United States Patent Application Publication US 2012/0017338 A1 - sequence listing, part 11

SEQ ID NO: 40392 - DNA, 2040 bp, Zea mays
  Peptide Sequence Number=SeqID_82171
atggagggcgagatcagggggtgccattgggatactctgagagcgttgctgcccatctatcaagcgatcagttcgtctcaggttggggatggctgcagcactgatttttggcatgacgcttggtctgggcctgacgacctgtctacagccttcccagccctgtactcacactgcatcaggcaaaaagtctgcgtgagggaggtggtgctgcagggtttgcacctagtcccgcgcctcacgccacaagcccgggaggaactagaagatgtgctaacaatagtaaacaacacaagcctcgccgatcgaccagataccagacattgcttccttgcggatcacactggtaattttcagacctctactctctacaacctgcttaaagggtccttggggcatggtgatgttagcaccactttcatctggggtaacaaagcccccccgcgggcacaatttttctgttggctgcttatgcaaggaaaaattcagtgcaaatggaacctgaagaaaaaagggattgttgatgatgactgttgtgaaatatgtaaccaagacagtgaaactccttcgcacatcatcttccactgcccgtttgcacgccaattttggagctccatcggattctctgtcgctgatgatctgggcacccaggacctgccaaacatcagtcgccctgatcgccttccgggtgcagaattcaactcctttgtcctcctctgctgctggcaattgtggaaacgcagaaatggtgtcgtcttccgtcaggatcatgccactcttgcggccactttgcattcatgcgcttctgaagcaaaagcttgggcgtacaggcacaacaggaaagaggcacaaaagaagcaaggttatgagctgcgacagttgaaggacttgaatgagcttggtggcagtttaagagtggaaaatcttgagaatgtcattggaaaggatgaagccgtagagtcgaagctatatctgaaaagtcgccttaaagagttggcacttgagtggagttccgagaatggaatggatgcaatggatattctagaaggtctgagaccgccaccccaactgagtaagctcacaatcaaaggttacagatctgatacatatcctgggtggttactagagcgatcctattttgagaatttggaaagttttgagcttagtaattgcagtttgctagaaggcctaccaccagatacagagctccttcggaattgctctaggttgcgtataaactttgttccaaatttgaaggaactatctaatcttccagcaggccttacagatttatcaattgattggtgcccactgcttatgtttatcaccaacaatgagctaggacagcatgacgtgagggaaaatataataatgaaggcagacgacctggcatctaaacttgcattgatgtgggaggtggattcaggagaagaagttaggagtgtactgtcgaaagactattcatctctgaaacagttgatgacattgatgatggatgatgatgtatcaaagcatcttcaaattattgaaagtggtctggaggaaagagaagataaagtatggatgaaagaaaacatcatcaaggcatggctctttttccatgagcagaggataagattcatttatggaaggaccatggagatgccattggttctaccgtcaggactctgtgaactttctctttcttcatgcagtattacagatgaagctttagctatttgccttggtggcctcacttcactgagaaatttacgattgaaatattatatggcattaactacacttccatcagaaaaggtgtttgagcatttgacaaagcttgtctggttggttgcacctcgatgtcaccccaacacgacgctctctcctcttgaagctccagagttcaggatcaagtcagaagcgaatgggtcagctaatgttgttgtccccgcgcttcaagctccaggaaattcttttttcctcaacaacaagtatgccgagagcccgagaggactggtgtctagctgtctgctgtactttgtagacaggatgggcatctag

SEQ ID NO: 40393 - DNA, 1143 bp, Zea mays
  Peptide Sequence Number=SeqID_82172
atgtggggaaagggtacacccatccacgctgagattgcagcggctctggcagttgacaaaggctcactgatagaaattgaaaaagtatatgagctcaaacgctttcgtgtcacgccttccagaaactattttaaacctgttgacaataacttcatgatacaattcactctgtacattcaagccaaattggctacaactcaacaatcatcagagacgtcttcatcaagaatacaaggtcaaccatacctaagcggtactacaacaagttcatggtacttcaatcctggaattcctgaggcacagacctaccgcaacgggttgcaaaacaatgacctccaactaatacaacccacaacagccgaagaagaaatccagctttctcaacccccaaatttggaacacaagactgttgaagagctgctcaacatagatccggacatgtttcccccagaaggctacaaatgcactgttactatctcacgcattgtgcaaaatagcaaatggtggtacccaccttgctccaggtgccacaaatcttcatctcaaacttcaactggatatcactacacatcatgtggctgcacaaatattaactttagatacaagctcagcttcattgctactgatgggacatgtgaagaagagctcttttgttttgataacatagccagaaaaatagtaggaaaaccttgtgacaaccttgttatagcagttacaacttctcagggtcccacagcagccctagctactattatgtgtctgaaatttacccttgcagtttccatcaatatgtcagcctactcagtcacaaatagagtcttctttattatgtctattttaacaaatcatggaagacagaccttcataccatctaacatgcctagccatcctcaacaagagttgcatacacaagatgaaatacctagccttccgaccacacaagactctccagcaacatcaatggtgaaactatctacctgtagcaacgaaagaaacgagggtgatgaccaacgcataagtgaactcaacaatcaagaattatcgtcaccaccgaaaaggataaacatagccacactagcaaaggcataccagatcttacagaccccaaaaagaaaacctcctagatcgtcatcaacttcatga

SEQ ID NO: 40394 - DNA, 1032 bp, Zea mays
  Peptide Sequence Number=SeqID_82173
atgggtacacccatccacgctgagattgcagcggctctggcagttgacaaaggctcactgatagaaattgaaaaattggctacaactcaacaatcatcagagacgtcttcatcaagaatacaaggtcaaccatacctaagcggtactacaacaagttcatggtacttcaatcctggaattcctgaggcacagacctaccgcaacgggttgcaaaacaatgacctccaactaatacaacccacaacagccgaagaagaaatccagctttctcaacccccaaatttggaacacaagactgttgaagagctgctcaacatagatccggacatgtttcccccagaaggctacaaatgcactgttactatctcacgcattgtgcaaaatagcaaatggtggtacccaccttgctccaggtgccacaaatcttcatctcaaacttcaactggatatcactacacatcatgtggctgcacaaatattaactttagatacaagctcagcttcattgctactgatgggacatgtgaagaagagctcttttgttttgataacatagccagaaaaatagtaggaaaaccttgtgacaaccttgttatagcagttacaacttctcagggtcccacagcagccctagctactattatgtgtctgaaatttacccttgcagtttccatcaatatgtcagcctactcagtcacaaatagagtcttctttattatgtctattttaacaaatcatggaagacagaccttcataccatctaacatgcctagccatcctcaacaagagttgcatacacaagatgaaatacctagccttccgaccacacaagactctccagcaacatcaatggtgaaactatctacctgtagcaacgaaagaaacgagggtgatgaccaacgcataagtgaactcaacaatcaagaattatcgtcaccaccgaaaaggataaacatagccacactagcaaaggcataccagatcttacagaccccaaaaagaaaacctcctagatcgtcatcaacttcatga

SEQ ID NO: 40395 - DNA, 333 bp, Zea mays
  Peptide Sequence Number=SeqID_82174
atggcgtcggggatcgacttggagggttcgcagatgtcctcggtccccctccccgccgatgacctccacaggcgggtagccggcacggtagggaggctggatgtcggtgcccttacccagccctcgatgcgtcccgagcgtgggtgcatatccctggtgagtgtccgctccttcttccttcttgtgtcagattgcccttggttctcacagccgagatttttcttccgtctccaggagttgggatttacaacttcttttgtccctgttcccgggggaacgggggggacccgacccgcggaagggttctttttggatgggggggtcgggctttaa

SEQ ID NO: 40396 - DNA, 895 bp, Zea mays
  Peptide Sequence Number=SeqID_82175
atgacaggtgtggagccagcaattatcggtgcaatcgctaagttggcggcccctgtcctgcctatagccattaaagggatacaaggtgcactgaagaaacggcaagtccgtgacagtgatgttgaaaccctgaaatcccagcttagctacatccagggcatcatccgtgatactcggaagactatcaggagttcccaagacccgtccgacaggcttcaatcctgtgctggatacctcagatgcttggcgtacgacatcgaagacctaatagaaggccgccgtgccggaaccatgacaggtgcgaagcttaatggcaagattactatcatccaggatttaatcagatgtgtagagtcctatccggagtttatggcggttccgacgaatgaggctcctagtcaaggcgctgcttcttcctccactacttcaagcgcccagctggtcgtgcctaattccaatccgcagacggccggaaggggctttccgctggctgatcttgtgggcaaggaggacctcgatgagcttctggacctcctcgtccggagacccgacaatgagctggacatggtcctcaataaggtgatggtgatctccgttgtcggcttctgtggcataggggagaccaagctttgccacacagtgtacacggacgtacaggagagcagaaagttctccctgcatgcgtatgtcattgtcagcgctgctgggaaggactgcagcatcgttctggaagagataatcgagcaatttagactgcaagaggatccacaagatagcagtggtggattttttcacaggtattttgtggtggtggatggcgtggagtctgaagaactggtggatggcatagcatctgccttcccggataatagtatgggcagtagaattatcatgg

SEQ ID NO: 40397 - DNA, 1065 bp, Zea mays
  Peptide Sequence Number=SeqID_82176
atgacaggtgtggagccagcaattatcggtgcaatcgctaagttggcggcccctgtcctgcctatagccattaaagggatacaaggtgcactgaagaaacggcaagtccgtgacagtgatgttgaaaccctgaaatcccagcttagctacatccagggcatcatccgtgatactcggaagactatcaggagttcccaagacccgtccgacaggcttcaatcctgtgctggatacctcagatgcttggcgtacgacatcgaagacctaatagaaggccgccgtgccggaaccatgacaggtgcgaagcttaatggcaagattactatcatccaggatttaatcagatgtgtagagtcctatccggagtttatggcggttccgacgaatgaggctcctagtcaaggcgctgcttcttcctccactacttcaagcgcccagctggtcgtgcctaattccaatccgcagacggccggaaggggctttccgctggctgatcttgtgggcaaggaggacctcgatgagcttctggacctcctcgtccggagacccgacaatgagctggacatggtcctcaataaggtgatggtgatctccgttgtcggcttctgtggcataggggagaccaagctttgccacacagtgtacacggacgtacaggagagcagaaagttctccctgcatgcgtatgtcattgtcagcgctgctgggaaggactgcagcatcgttctggaagagataatcgagcaatttagactgcaagaggatccacaagatagcagtggtggattttttcacaggtattttgtggtggtggatggcgtggagtctgaagaactggtggatggcatagcatctgccttcccggataatagtatgggcagtagaattatcatgggtatgaggaccgcagtgggcagggatgcagatagatgtgtgggtcatcgtcacaagatgtggccacttgaagacaagcagtcggtggtccgcttcctaaatgaagcggagcgacgacgacgacatgaacaagatttatcggattttgcagcggattccaaattttattga

SEQ ID NO: 40398 - DNA, 276 bp, Zea mays
  Peptide Sequence Number=SeqID_82177
atgcgtaacaccctacgtcctgtggacccgggggatatctatcccccacacccgcccactggtggcggcgcggagctctggcttccagacgagttcctggacaacgacttcttctccgaggaggagaaggcggcggtcgccaccaggagcgagagcaacgaggaggaggaaggggcggacgacctcccgcgtcgcctggttgggctcgtcgtcggcaatgggaagggggatggttcccttgcaaatgtttccgtttttgatttcgctgagctctga

SEQ ID NO: 40399 - DNA, 570 bp, Zea mays
  Peptide Sequence Number=SeqID_82178
atggctccgttgcatgggggcttcagtgcgggaaagtcgagtctctgttgcgatttactcgctcgacgttgtgggccatccgggcttgcaccaatctggtcttttactcctttagtggacccgggggatatctatcccccacacccgcccactggtggcggcgcggagctctggcttccagacgagttcctggacaacgacttcttctccgaggaggagaaggcggcggtcgccaccaggagcgagagcaacgaggaggaggaaggggcggacgacctcccgcgtcgcctggttgggctcgtcgtcggcaatgggaagggggatggttcccttgcaaatgtgggcggaggtgttggtcggctcatcgcagtcgattttgtgcggccaccactagagcgcccgccgatgaatccctgggatgttctgaacgaggcggctggccaggtggcttgcttgcgcacaaacagcacccccgtgccaacgaacgacgttgttgccaatcaaggactccccgtcacgccgccggcggagaagctctccgcgccggcggaggccgcgaaggccaactga

SEQ ID NO: 40400 - DNA, 486 bp, Zea mays
  Peptide Sequence Number=SeqID_82179
atggctcggcatacgctagaggatttcctgcgccagggcggtggacttactggagatgtgctcatggagcctgccatatgcacttgcatggatggttcttatccattaaggggtaaacactaccatgagatgataaatccatttcgtgtacttacagatgtttcttatatccatgtgtttcaagtcaagaagcttatgaaggagaaaaagaacgatgctagaatttctgaatatatcgatataaataaagagcttcaagaggagtcatgcccaacacaaggtagcatgaaaaagattgcttgtaacataagatttgtttggggtgttagaatttttgtaaccttgaaagccgaagatcctaaagaaagagaacaccttcggaagatcctctcaggagcagcgccgaagctattacctatagagcttcggcatagtgacagatctcaagacgaaggggcgaaccaacttaaagatggattgacttaa

SEQ ID NO: 40401 - DNA, 480 bp, Zea mays
  Peptide Sequence Number=SeqID_82180
atggcgatgcgggacctactggagatgtctctgctccatgcctccattacttcatgccgtcctccctccttccacgctccttcccgcaagagcagcttccctcctccctttcccccaaacgctcccctcctcttctctcgcgctgaactcgacctggcgtccgactccttcacggccccgtcgcagggtgtcgtcatgggtgatggtgtcgtcgtccctgccacagtccgtcggggacttaccggagatgtgctcatggagcctgccatatgcgctttcatgcatggttcttatccattaagtggtaaacactaccatgtcaagaagcttatcaaggagaaaaagaatgatgctagaatttctgaatatatcgatataaataaagagcttcaagaggtttatggcacgatgattcatctcagagtttctgattcttatgttttgtcacaagggcaagacggcaagtcattttgctgctaa

SEQ ID NO: 40402 - DNA, 432 bp, Zea mays
  Peptide Sequence Number=SeqID_82181
atgtacagcagagagaaggaggaagggcgccatgggaagctcggctgcagggggttgctcgccatggagagggggcgcaggggaaagtggagtcggctggagcagagggagtatggtgttcaaggagctaggcgccatggggagagggaagagatccctgctgctggcgccaggaaaaatggagtccatgccatggctgccgagcgcctgctccaggggagctcgaccagcatccaagcagggaggtggaggcccgcgcccatggagaagagggcctgctggggacgggatgagctgggcgccatggatcagagctcgcccacgccatggctggccgacggcgaggagctcctgcgcgcaggctgctgcgtgtgggagaagaaggcagggaaaaggaagtggcggctaggaaaaatgcaggggtgggagtga

SEQ ID NO: 40403 - DNA, 432 bp, Zea mays
  Peptide Sequence Number=SeqID_82182
atgtacagcagagagaaggaggaagggcgccatgggaagctcgcctgcagggggttgctcgccatggagagagggcgcaggggaaagtggagtcggttggagcagagggagtatggtgttcaaggagctaggcgccatggggagagggaagagatccctgctgctggcgccaggaaaaatggagtccacgccatggctgctgagcgcctgctccaggggagctcgaccagcatccaagcagggaggtggaggcccgcgcccatggagaagagggcctgctggggaggggatgagctgggcgccatggatcagagctcgcccacgccatggctggccgacggcgaggagctcctgcgcgcaggctgctgcgtgtgggagaagaaggcagggaaaaggaagtggcggctaggaaaaatgcaggggtgggagtga

SEQ ID NO: 40404 - DNA, 345 bp, Zea mays
  Peptide Sequence Number=SeqID_82183
atggcgagcaaccccctgcagccgagcttcccatggcgcccttcctccctctctctgctgtatatggcgccatgcagcagccccactttccctctcccacgccacattttatctcggatctatagcacacggcagcagcagccatggcgtccattttctctgcgcagcgacgccgctccaaaggcagcagccccgtcagcgacgtcgtcgaccccgcaaccgtcgacctcgcgcagcagcagcgacgccctccgctgcgtcgcactcgccaagtcagaccacccgtcgtcgatctgcgcagccctgtgtgccgtcgtcgaaacccacgttgtgtatgtcatttaa

SEQ ID NO: 40405 - DNA, 291 bp, Zea mays
  Peptide Sequence Number=SeqID_82184
atggcgtccattttctctgcgctgcgacgccgctccaaaggcagcagccccgtcagcgacgtcgtcgaccccgcaaccgtcgacctcgcgcagcagcagcgacgccctccgctgcgtcgcactcgccaagtcagaccacccgtcgtcgatctgcgcagccctgtgtgccgtcgtcgaaacccacgccccttgtcgttgtcgcgcttcacgcgtcgtttctcgacagaaagccaaaccgacatgcacgcatgcgcaactccactcgggtttcggccaggttgttcgccttga

SEQ ID NO: 40406 - DNA, 276 bp, Zea mays
  Peptide Sequence Number=SeqID_82185
atgcgcctaggggtcccttttatagccccaaggcagctaggagccgttggagaccaacttggaaggcaattcctgccttctatcgagtggtgcaccggacagtccgagacaatcgatcaagccaaggatggaggcaagaagaggttcgaggtaccgagtgcacgggagaaggtcaaggagaccaggaacccaaagccaggggtgaagaagaagacttgcaaagtcaaggttgatcgagttaagaagagttatggtgcatcaaggatcactacataa

SEQ ID NO: 40407 - DNA, 449 bp, Zea mays
  Peptide Sequence Number=SeqID_82186
atgaagacgcaagtggtcaccacgcagcggcaactgatgcgcgatctggaggtgttgccactcgaggaggccacaacaagtgccaagagcatgaacgtgaatggtgcatgtcagcgagggaagctgctacggttcctagagcaggttgttgtgatggtggttgctgttgatgtagatgaagttcttggtagctttcttgcggctctgaacaaatttgttgttgatcgttgtttgtggaatcactcagtatcaaaataccatgtatacgagttctttaaggatgcaattaagaatcacacattggaatggtttgggaagtattatcgaggcttatttgatcagatccattttgggaatcatttcgctttagaaggtcactctggatttaggagacgacctgatgcacattttcttggtgactctagcgaccatatctacggggcagtgag

SEQ ID NO: 40408 - DNA, 696 bp, Zea mays
  Peptide Sequence Number=SeqID_82187
atgaagacgcaagtggtcaccacgcagcggcaactgatgcgcgatctggaggtgttgccactcgaggaggccacaacaagtgccaagagcatgaacgtgaatggtgcatgtcagcgagggaagctgctacggttcctagagcaggttgttgtgatggtggttgctgttgatgtagatgaagttcttggtagctttcttgcggctctgaacaaatttgttgttgatcgttgtttgtggaatcactcagtatcaaaataccatgtatacgagttctttaaggatgcaattaagaatcacacattggaatggtttgggaagtattatcgaggcttatttgatcagatccattttgggaatcatttcgctttagaaggtcactctggatttaggagacgacctgatgcacattttcttggtgactctagcgaccatatctacggggcagtgagggcccgttacaatgggccggatcgcacgtgggcctctgagctggacgaggccgcactgtgggatgacttcgtcgctggtcttcgtctggtgccgatcaagcgaagggtgtccctgcctgttttgtctgttagaccagcggctgcagcgaagacttcgagcgaagagtggcgtctttgccttcgctccaacatttgccctccgagggaccagttcgacaaagtcacctggtgccgaagacgtcgctag

SEQ ID NO: 40409 - DNA, 372 bp, Zea mays
  Peptide Sequence Number=SeqID_82188
atgaccgttggtggaggctgtctgtcgtatggtgcaccggacagtccgctcaagtataataaaactggcagagagaatgactgcttgcctagagttgggcattggaatatgatgaacaagggaccgacgaggagggacgcgacagcgctggacccggagcaggtgcagctggtggagcttgccctgggcgcgcttcgtgagaactctatcgctgatgtgttgtatttgcagtggctcgtgctacccgagacgaccaagctgttgggatccattgcaattgggttgaagacaaaggatggtgttgttctcgccattgagaaacgtgtgacctcacccactgctggtactgagtcacttcttatctggtcatag

SEQ ID NO: 40410 - DNA, 558 bp, Zea mays
  Peptide Sequence Number=SeqID_82189
atggggctatcgtcgtgttgtctgatgtcctccaccccttttcagggaccgacgaggagggacgcgacagcgctggacccggagcaggtgcagctggtggagcttgccctgggcgcgcttcgtgagaactctatcgctgatgtgttgtatttgcagtggctcgtgctacccgagacgaccaagctgttgggatccattgcaattgggttgaacacaaaggatggtgttgttctcgccattgagaaacgtgtgacctcaccactgctggaaatgtgtggttttgacgaagaagcgaagtcatataaggatcctagcgcgatagagttggttcttatgccatggagatactctacaggctatgtacttttcgttattaatcatgcaaacaaatttgtgtctgtgtttaatttcacacctactccagaatggtgcaaagatataccactaaaaagattttgggaagttattcttcttatttcgaagaaatataaagttgcatacggtgtcaaacgtattggatggtcacatgacatttatatgtggcgacattcaatttga

SEQ ID NO: 40411 - DNA, 339 bp, Zea mays
  Peptide Sequence Number=SeqID_82190
atgaaggacataccttcatcattgcagcatacaataataaaaggagaatcatatgaaataaaaatagaaatgatatcaaattacaaatgtaccttcggcttgaaagaagctcccttgcgcatagcttcggctctatgtcaaccttcgtattctttgtgcttctcatactgtggttctgatccgagtccgaagtccatggttcctgagtttgttgatgaagatcttcctgagcaacaacctgggggcttaggccacttgcctgagtacctctcctgctcaggaggagatgatggcaacatggaggactttgaggagttccaggactatgatgagttctag

SEQ ID NO: 40412 - DNA, 411 bp, Zea mays
  Peptide Sequence Number=SeqID_82191
atgaaggtcatgaaggacataccttcatcattgcaacatgcgataataaaaggaaaatcatatagaatctcatttctattttattatcatggaaaaatagaaatgatatcagattacaaatgtaccttcggcttgaaagaagctcccttgcgcatagcttcggctctacgtcaaccttcgtattcttcgtgcttctcacaatgtggttctgatccaagtttgaaggatctttggaagacaaaggcccccaacaggaatgatctggagattactaaggtgcaagatatgcatcatggtaaagatcaagggatgacaagggttaaggtgataacagacaaacacaaccaaggatgtattttagacaaaacttgtgaggcatcaaagaaggggaagcaatcaatggtgaagtag

SEQ ID NO: 40413 - DNA, 423 bp, Zea mays
  Peptide Sequence Number=SeqID_82192
atggcgaggatactgtctctgaagagcctcaatgcgtttccacatgcggaggaacacttgtcgaagaagacttactctggtgctgttgtgacaattcttgggctacttataatgattacactgtttgtacatgagctacagttttatctcaccatatacacagtgcatcagtttctgttaattatcattgatgagattatgccgtgtgaagtattgagtgtggatgcaattgacatgtctgggaaacatgaagttgatttgcatacaaatatttggaagatgttagaatttgagagggccttcattgatttctataactcaatattgcataaaaatgaaactgttcttcaaatatggaccttaatggttttctccacattaggaaagctggaagagacttttgaactcacttttttttgctaa

SEQ ID NO: 40414 - DNA, 399 bp, Zea mays
  Peptide Sequence Number=SeqID_82193
atggcgaggataccgtctttgaagagcctcaatgcgtttccacatgcggaggaacacttgttgaagaagacttactctggtgctgttgtgacaattcttgggctacttataatgattacactgtttgtacatgagctgcagttttatctcaccacatacacagtgcatcagtttctgttaattatcattgatgagattatgatgtctgtagatctaaaacgaggagagactctgccaattcatgtcaacatgtcatttccttctttgccatgtgaagtattgagtgtggatgcaattgacatgtctgggaaacatgaagttgatttgcatacaaatatttggaagatgcagaagatatgtacttttacaggctttgatttgtgtcttggtgcagtgtaa

SEQ ID NO: 40415 - DNA, 221 bp, Zea mays
  Peptide Sequence Number=SeqID_82194
cgtcacggcgcgcggccggacattcggccctaaggacccatcgagcgaccgagcttgccctcggaccgcgaccccagaggcgtcctcagcgacggaccgggcccaagttctctggaaagggacgcctgggagggtgagagccccgtccggcccggaccctgtcgcaccacgaggcgccgtcaacgagtcgggttgtttgggaatgcagcccaaatcgggcg

SEQ ID NO: 40416 - DNA, 732 bp, Zea mays
  Peptide Sequence Number=SeqID_82195
atggaacggagccaaaacgacacggaggcgcgcgacgtcgggcggcatggctgttcggccttgcgtttgggccgaaaacgaggggttcgcccatggcgcagggggcgaaaaggcacgttggaactgagggaaaacgacacggaggcgtgcggcatggctgttcggccttgcgtctgggctgaaaacgagggcacagtggaacggagggaaaacgacacggaggcacgcgacgaaccgaggctcgggcacggaggcgcggggcgacgggcggcagggctgttcgtccttgcgtttgggctgaaaacgagcgtcacggcgcgcggccggacattcggccctaaggacccatcgagcgaccgagcttgccctcggaccgcgaccccagaggcgtcctcagcgacggaccgggcccaagttctctggaaagggacgcctgggagggtgagagccccgtccggcccggaccctgtcgcaccacgaggcgccgtcaacgagtcgggttgtttgggaatgcagcccaaatcgggcgggttcgagttggagcacgcctgtcgggacccgaaagatggtgaactatgcctgagcggggcgaagccagaggaaactctggtggaggctcgaagcgatactgacgatagctggagcccacacgagttctatcgggtaaagccaatgattagaggcatcgggggcgcaacgccctcgacctattctcaaactttaaataggtag

SEQ ID NO: 40417 - DNA, 192 bp, Zea mays
  Peptide Sequence Number=SeqID_82196
atgaatccatgtttcctacttcaaaccccgaacaaactccatgagcaggaggcattcgcgttgtcgtcgctcatcgatgacgagaagaagcttggcgactcgccggaggtgacacagaggaggatcgacaacagtgaccagttcgtcatcctcgccaccgtcagggtagcttttgtgccggcctgcctttaa

SEQ ID NO: 40418 - DNA, 414 bp, Zea mays
  Peptide Sequence Number=SeqID_82197
atgaatccatgtttcctacttcaaaccccgaacaaactccatgagcaggaggcattcgcgttgtcgtcgctcatcgatgacgagaagaagcttggcgactggccggcaaagcgctgcctcgtcggccgcacagaagagcaccgccggtgcgctctcgcacacatcgcagatcgtccgcatcccaacgccgcgccgctcccgacgccagtgtcatcgctccgccgccatccgggcgacaaaaaccgcaggtcccccgcctcgcgccgatcccctgtgatccttcccagcgctaaaggtgtcggcagacgacggggcggcggcggggagatgtggaccagaggcggcagcagaacacaggccgcacaggagcttggagtctttggacgaggagagatgtggcagcgaagcgactag

SEQ ID NO: 40419 - DNA, 129 bp, Zea mays
  Peptide Sequence Number=SeqID_82198
atggccgataagcggaagcctcgccagggtggcgaaccatttggtgtttgcccttttcggagcagcagtgagacatgttatgtctcaaaatcgtcatctactggtcagattgaggttagatcatattga

SEQ ID NO: 40420 - DNA, 459 bp, Zea mays
  Peptide Sequence Number=SeqID_82199
atggagcgattccctcaaattgattggtgccatctaatttttagtgacttatgtgaggctgcacagaaatggcacaacaggagcattaacaatgtgtcgacgacgatatatggctgttccatcgttgttctgctgtattatttggatcatttgcaccatgctgctgctccaaacaacaaaattggcactccgcgcataaagtattttaataagaatattataagggtgttgtcaatggccgataagcggaagcctcgccagggtggcgaaccatttggtgtttgcccttttcggagcagcagtgagacatgttatgtctcaaaatcaccatctactggtcagattgagtccccaatgaggccagaatctgttgatgaagacccaaatcaacatggtcgacttccaaatataatcatccaactccctcttatgcaagacctgatggcaaataagatttag

SEQ ID NO: 40421 - DNA, 984 bp, Zea mays
  Peptide Sequence Number=SeqID_82200
atggggtcatctctctccccgtcatccgtcgccgcgctcaccaccgcagcccatgggcaccgctaccacctgtcctcctcctcctcctccgactactacgaagacgacggcttcgagttcacgccactcctacccaggccgcggcgccggcacagcgcgcgcacggagcgtccaagaaccgtcgcccaggctgcggccacgacggcggcccagccgcagcctccccagctgcgcgcgcgccgcggagcgccaagcgtcgtggccgcgacgccggcggcgccaccaacaccaaggaagcagcaggtgcggtggcacgacatggcgttcgggtccgcgcgcgtgccggcggccatggacatgggcgagatcaggaggcgcctgagggcgcggcagctggctctggccggtggccccgccgggaacgagcggccgccatcctccgccgcggggtgggcgccgtggaggctcatacggtcgctcagctgcaagggcctcgagcccgtggcggctgccgcggcgccggtgaggctggctgtgctggtgcggcccgtgaaggccgagagtgcggcgccggccgacgtccggtatccgggcgaggggtcgggctcgcgcgggggtgaaaaatccggaggcgctgttgtgccgtcgctggcgacttcgatccatctcggcgagggggcctcgcggcgctgctcctcggcggcgacggccaagctgggctccaagaggccatgctcgagcgggtccggaggcggaccgctctcggtggctggaggcaaggaggtgggcgtcgacgactcaaagatccaaggagcgggtgcgaccgtcggtgttcgtcgccgtcgaaccaccatcgccaagaagctgagaagatccacgacgccgatgaaggaaggtggggagaaacgcaagcgcatctcgacgccgccatcgtcatcgtcttccattaggtcgggtggtccagatccgaagaaaaaaaggtaa

SEQ ID NO: 40422 - DNA, 980 bp, Zea mays
  Peptide Sequence Number=SeqID_82201
atggggtcatctctctccccgtcatccgtcgccgcgctcaccaccgcagcccatgggcaccgctaccacctgtcctcctcctcctcctccgactactacgaagacgacggcttcgagttcacgccactcctacccaggccgcggcgccggcacagcgcgcgcacggagcgtccaagaaccgtcgcccaggctgcggccacgacggcggcccagccgcagcctccccagctgcgcgcgcgccgcggagcgccaagcgtcgtggccgcgacgccggcggcgccaccaacaccaaggaagcagcaggtgcggtggcacgacatggcgttcgggtccgcgcgcgtgccggcggccatggacatgggcgagatcaggaggcgcctgagggcgcggcagctggctctggccggtggccccgccgggaacgagcggccgccatcctccgccgcggggtgggcgccgtggaggctcatacggtcgctcagctgcaagggcctcgagcccgtggcggctgccgcggcgccggtgaggctggctgtgctggtgcggcccgtgaaggccgagagtgcggcgccggccgacgtccggtatccgggcgaggggtcgggctcgcgcgggggtgaaaaatccggaggcgctgttgtgccgtcgctggcgacttcgatccatctcggcgagggggcctcgcggcgctgctcctcggcggcgacggccaagctgggctccaagaggccatgctcgagcgggtccggaggcggaccgctctcggtggctggaggcaaggaggtgggcgtcgacgactcaaagatccaaggagcgggtgcgaccgtcggtgttcgtcgccgtcgaaccaccatcgccaagaagctgagaagatccacgacgccgatgaaggaaggtggggagaaacgcaagcgcatctcgacgccgccatcgtcatcgtcttccattaggtcgggtggtccagatccgaagaaaaaaag

SEQ ID NO: 40423 - DNA, 414 bp, Zea mays
  Peptide Sequence Number=SeqID_82202
atggccgccctaaggactatagacccctactcttaccttgaccttagtgtcctttcaaaagttggtcatcttgaccaattctatgttatttacttatctcaaaagttttatctcacttttctttctgtttactttctggtcttacagttctactctcactcttgtgcttgcgatgtcctttgtagatggctcgtcttagatgcactgcacgccttattagagcactattctattactgagagggatactgccgagacagccatgcaagatgcagcacgacgtgtactttctcagtattgctcgttgttcagtggggtagctgatggccttgacctgaagtactaccctcgccgttcgaccaacagtgctggagatgtgatttctcacccgttggtgagggaaatcccaggctga

SEQ ID NO: 40424 - DNA, 1119 bp, Zea mays
  Peptide Sequence Number=SeqID_82203
atggtccgccacgcccgcacggtgactggccgaattagcccgactctatgcctcggcattgacaacgagcagcccgcggttcatgagtgtgttgccgaagatctccctgagcaacaacctggggactcaggccattttcctgagtacctctccttctactctcactcttgtgcttacgatgtcttttgtagatggctcgtattagatgcactgcacgtcagtccagccacctggagagactgcaaggtcacctgcacgaggagcaggagcgccgacgccaggagcaggagcaacaggactcttcccctcgcctcagtaggaggtggagtctgggaggcagccttcccctccacctcagccagagatgccccctgcaccaccacagggcatccggctgcaggaggagaccgtgacggagacgacgatgacgacgacgccggtggcagttcaagccacagcacggagctctcgaaggagcaggagccgaagggatggatcgctagacccatcactcacgacaccgctcgcgggtgtcacttccacgacgctctcgacaccttgctgcgtcgagccttcgaccggcacacttggtccatcgagtaccattgtgtagtctaccagcatcgtcgcgaattatacccggaccagtgggaggctacttgcttgatgcaccgtccggacaatgatctttggggtgtagaggccttctcagagcactattctatcactgagagggatactgccgaggcagccatgcaagatgcagcacgacgtgcactttctcagtatttctcgttgttgagcggggtagctaacgacctcgacccgaagtactaccctcgtcgttcgaccgatagtgctggaggtgtgattgtctcacctgttggtgagggcaatcccaggctgaacatcatagtcaatctggtcgtcgtgctcaacaccgagctggaccacgcccttgacgagttgggcaagatgtctgagaacaggcgccgaggtgcaaggcgtgttcagcatgagcagcaggcaccccaggaggaggtagcccaacaacaattgccactgccacccccgatgaccactgagcatatgttcctgatgcatacccaagcagtctaa

SEQ ID NO: 40425 - DNA, 414 bp, Zea mays
  Peptide Sequence Number=SeqID_82204
atggcgagagtggcacgtaccctcctggcaacggatcgcctaaaaggggtggtgtactctcgggtggcgcggacctgttcatgcagtggaggatccgtgggaatagtagacatcaaggtttacgagaaacatatgtcgtgtgttttgaatggatcgacgctcaaggaaaggtacactaacctcgaaaacgtaatctatttaggtgtatatgttcttgctcttgaacttgatatgccaatagaagaccatgcccttattcgattggcgcaagctgatatccctaattccagcttgcttgttcttgataatcacatcattgttttatcgacccaacctaggaaaggcatgtctcatcattttcatgagtttgatgcctttgatttcctcatttctatcgaaggcatatcaacttaa

SEQ ID NO: 40426 - DNA, 252 bp, Zea mays
  Peptide Sequence Number=SeqID_82205
atggcgagagtggcacgtaccctcctggcaacggatcgcctaaaaggggtggtgtactctcgggtggcgcggacctgttcatgcagtggaggatccgtgggaatagtagacatcaaggtttacgagaaacatatgtcgtgtggtcatagttttgtgctgctgatgatggtgttaagtgccggtgggctcggccttcttataagtctaagtaatccttctatacttcttaatgaggatggtcacttgaactag

SEQ ID NO: 40427 - DNA, 168 bp, Zea mays
  Peptide Sequence Number=SeqID_82206
atggggaggctagaactccgggcagaatggaaatcacggcttgtgggtaaagtgtgcgacctctgcagagtgttagaaactggtatatcagtcgtgctcacgtgctcaggaggagatgttggcaacatggaggactttgaggagttccaggactacgacgagttctag

SEQ ID NO: 40428 - DNA, 276 bp, Zea mays
  Peptide Sequence Number=SeqID_82207
atggggaggctagaaccccgggcagaatgggaatcacggcttgtgggtaaagtgtgcgacctctacagagtgttagaaactggtatatcagtcgtgctcacgatgttagaccttggaatgtcaactacaagtgatgtcactaagtgcaaagaatgcattgtgttggcaactcctccagctaagtctcagatggaacagttcaagaaggtgcatgcacagtttctgcaagcaacctctcaagtggtagctagactccaacaagttgatttagcataa

SEQ ID NO: 40429 - DNA, 186 bp, Zea mays
  Peptide Sequence Number=SeqID_82208
atgggaaccaatggccatctcaacctcgacacgggaggtttccaggcaaatcctaaggaagttcactgttgggaccatgcttcgtcgccgaaggtcgtgcaggaagaagcagcttcggctgaagctgtttgtacgagataccgaaggatgcagttcatgaagcttcggaaatgcaaaccgacttaa

SEQ ID NO: 40430 - DNA, 735 bp, Zea mays
  Peptide Sequence Number=SeqID_82209
atggggcttggtgtatgcggcttgctctgccaaggtggcaatgagaatgatggttttggcattggctacggtaaagtgagactcaggcgccgccggcaaactccgccgcacctgcgcacgtgcggaccgtctggcccgtcaggcagggaacccgagccctgcgccaggtcgcggaccgtccgtgcctgtgcagagagcaccgccgcaggttctcaacgcagtgattggagcctggatctgcaccaacacactttttggcaactccactggggaaaggtgtctagatctactaaaaatcaggccctcaaatggccggttctaaagatcacaccgatatctcccaagacaatatcctggagccggctgttgaaagttttgacggtcgatgagcaacaacaatacgaggactacatgcgtcaagcaaaggagaaattattatcacaatacacggtggatcgccaccagaaaaatgtcaaacatggagagaccgacatcgcatctcttccatcttcgcttcaagtccccaacgtaagtaaaccagacgacatccaatctattaaacaatatgtagatcaacagcagaatcaaatgaaacaacagattggagggttagaagaatcaattagaaaattaacgcgtacgttggagaagtctgttgcccctagttttccatcaaatgaaactagtaacaggatatctatgtctaatacatcggcgacaaatggggattcgtag

SEQ ID NO: 40431 - DNA, 663 bp, Zea mays
  Peptide Sequence Number=SeqID_82210
atgccagaccctcgtgccgtcgcggccacaacgcttgcgctcgtcgctttcactggtctgtgggccccagttgtcaggttcatctcccacgccgtgaatttcgcaacgaatccgagctgcacggcaaccgtccgcgcggagtccgccatccccgcccggatccttgcgaccgaccttctcggcgcaggaatcggtcacaggggagactccgccctcaaccataaatatggctgtgactctttacgccttcacagtcgtgtattgagggagcggcgagctgtgtatgcgatgagagagaaacccgccgccgcatggatatctccttcatggcgtgggtgtgtgtgccgtggcatggctgtaacctcgcggaccgtctcgcgcggggcttcacggcctactccaggcaccaccgtagttcccaaggtctccctgccattaccgcaaacacagagaaagaagggagccccgccatggccgttcctcacatccgcacgatcgcttttgctagaagactcacgccgcggatctgcttatggcgtgggggctctgggcaagccacgcctcgccgggggagaaacagagggatcaccggctgctcgggctcctgttcggcggacaccaccgcggaatggcaacgctcactgcaatatttacctcacgtga

SEQ ID NO: 40432 - DNA, 303 bp, Zea mays
  Peptide Sequence Number=SeqID_82211
atggccgttcctcacatgcgcacggtcgcttttgccagaagactcacgccgcggatctgcttatggcgtgggggctctgggcaagccacgcctcgccgggggagaaacagagggatgaccttggttcgttgctcgccgggggggaacttcgccgtggagagacctggcagggtagggatcaccggctgcttgggctcttgttcggcggacaccaccgcggattgggaacgctcactgctctgtttacctcacgtgaggaagacgaaggaggaccgttggatgcgcaatgaagaatggaggtga

SEQ ID NO: 40433 - DNA, 265 bp, Zea mays
  Peptide Sequence Number=SeqID_82212
atggacagggagtggcacaacaacgagtgcatgggggaagttggtggagatcgacgcaagccccccggggcaagcttggcgtcgacgcagtggaatttgagggcagaatcgcggagaagacggcgaacttctccctctacggtggagctcccctgggcggagcagaggggtacggtggagcaggagcttgggaacgagggtgtggacttgctaccatggatgagcacaacgtccaagagccaaggcgcagggcaaggatggtcag

SEQ ID NO: 40434 - DNA, 174 bp, Zea mays
  Peptide Sequence Number=SeqID_82213
atggatgagcacaacgtccaagagccaaggcgcagggcaaggatggtcagcttggtggagctggtggttaggaaagcatgggtgtatatatatgtaattgtggacattactccacaactcatcacactcaatcaaagatccaaaccagacaagtatcataagaacaaacactga

SEQ ID NO: 40435 - DNA, 219 bp, Zea mays
  Peptide Sequence Number=SeqID_82214
atggcgacggagacgcggcggcagcccgagtcgacggtggcggacctcggcggctgcgcagagaacggcggtgagcgagggcagaggaaattagagggggggagggggaattggggcgtgtcccgggttgcggacgtcgaggcgaagctcaccgtggcagagggcacggcggggctccgacgtcgacggagaaacgggctcgggacggcggcggtttaa

SEQ ID NO: 40436 - DNA, 219 bp, Zea mays
  Peptide Sequence Number=SeqID_82215
atggcggtgatgttgttacttttggttctactacttaattgggttggtatttacttatacttagtaattgctaataaaattttgaccaactttaaaaagcaatgctcagctctaaccatcctctttggtaagccttacacttcacgtgagctcccacctttggtcaagaacaggtaccacatgatgaggcgcatggaggatgctgtggcgagttcatga

SEQ ID NO: 40437 - DNA, 183 bp, Zea mays
  Peptide Sequence Number=SeqID_82216
atggcggtgatgttgttacttttgttctactatttaattgggtttggtatttacttatacttagtaattgctaataaaattttgaccaactttaaaagcaatgctcagcttcaaccatcctctttggtcaagaacaggtaccgcaggatgaggcgcaaggaggatgctgtggcgatttcgtga

SEQ ID NO: 40438 - DNA, 396 bp, Zea mays
  Peptide Sequence Number=SeqID_82217
atggggagatgtatgtccgctcgcatgggcatctcgtcaggagctttactctgggcttggttgatgttcgaggagagtctccagagcacaccgaacacgttcgcgacctcacatggcggtattgagggcttgtggagcatggggattgctcgccgacgtcgtgtagtccggggcattccgccgtgcgccgtggttagggcaccagtgcgcataatccaaggtgatgttgttacttctattctactatttaattgggttggtatttacttatacttagtaattgctaataaaattttgaccaactttaaaagcaatgctcagcttcagccatcctctttggtcaaggacaggtaccgcaggatgaggcgcatggaggatgctgtgatgagttcgtga

SEQ ID NO: 40439 - DNA, 216 bp, Zea mays
  Peptide Sequence Number=SeqID_82218
atggagaaccacctgggaaaacagtggtaccacaagggtggtgttgttatcacttttgttatactacataattgggttggtatttacttatacttagtaactgctaataaaattttgaccaactttaaaagcaatgctcagcatcaaccatcctctttggtcaaggacatgtaccgcaggatgaggcgcatggaggatgttgtgacgagttcgtga

SEQ ID NO: 40440 - DNA, 540 bp, Zea mays
  Peptide Sequence Number=SeqID_82219
atggcgctctccgaccgctcccgcgagtcgctcctcccgagcttcctctacgcctcctcggcgcgctccttcgccgccacaggcgccgccgcgcgcctccatgcctccgccccggcgcctgccgcggctggagcaggaggcgccgtgccgttctcgatccaggcgcccaacgagaagatcgagatgtactcgccggccttctatgccgcctgcaccgtcggaggaatcgccagctgcggcctcacccacatggccgtcacgccgctcgacctcgtcaaatgcaacatgcagattgatccagcgaaattcaagagtgtttcatctggatttggtgtcctattaaaggagcaaggggctaggggctttttcagaggatgggttcctacattgcttggttacagtgctcagggggcttgcaagtttggcttctatgagttctttaaaaagtattactcagacattgcagggcctgagtatgctcagaagtacaagactctaatctacctcgcaggatccgcatctgctgaggttaattgctga

SEQ ID NO: 40441 - DNA, 585 bp, Zea mays
  Peptide Sequence Number=SeqID_82220
atgtcgcgcgtgttcgacgactactatattaaggaccgtggcgtcatctcgacgccggaggtgacacagaggatgaccgacagcaatgaccactcgccatcttcgactaaagggacctcctcggcgcgctcctttgccgccacaggcgccgccgcacgcctccatgcctccgccccagcgcctgccgcggctggagcaggaggcgccgtgccgttctcgatccaggcgcccaacgagaagatcgagatgtactcgccggccttctatgccgcctgcaccgccggaggaatcgccagctgcggcctcacccacatggctgtcacgccgctcgacctcgtcaaatgcaacatgcaggtgagcgggcagcggcctagatctgtgtcccccggtggtattaatggagaaagatcagaaatagctgaaattgaagcagcatcaacaagtgaagctgctcggcttagagctgctctccggcgtgctccacccagcgcttttcgggaacctcaccagtcttttgaacggcttacacagacctgttttgataagagccgagcagcgattcttcaatttcggaccacgacctag

SEQ ID NO: 40442 - DNA, 1017 bp, Zea mays
  Peptide Sequence Number=SeqID_82221
atgacactagagctaatgatcgtcgtcttgtgttcgttgggaaagccgaggttggatttctttgtctcctcaactggccacatggtggtggtcgaggattcttcttttgctgggattgtgaggtcattccctggtgatgtgtcggcgttcgtcgctggagcatcgaaggtcaccgacatgaagaggtgccctaacgggtactctccttcagtcggaacgatgccaaagaatggggtatttatcacacccggtttggaaggcgtgttcagggcgacatggcgaactcgaccgtgggcaccacgccggcgcgggggcactagagaggaggttgctcaccacgagtgcgaactcaagagtgcttggaggacggcgggggcggtgaagtctcgggtcgacggcggcgaactccggctacgcaagaaatgctccagtgagcgcggcctggacgaaccagaggggaagaaggcgaaccaaggggtgtctcgagttgttgacggcgaagcggaactcaccagggcaacggacgcgacggggactcaacagcggtcgtggaacggcgatggccttcgtatgcgatttaatgaggttagtagttgggatctcaaggtcgaggagcgtcctgggaagcagccccccaggcgcggatcccccaccgccgtcgcggcgcttgtgctcgtcctagccctgatcgccggaggccactaccgcgaggcccagctcgacgccgcggacgctgtcgccgtgtgctgggcccttggcagagggcccgagccacctggtatggccagcccaacgacaccggccccgacgacaacagagacggtgatcatcactgacatgaactactacccgatgtccaagtaccacttcgaccacagtggcacggcgttcgacaagctggccaagcccaacctcaacgacaagctccgccactctagcatcatccacatcgagttcaccaggattcatcgtcgacattgggggttcgagtctagtttggttgcgcggaggcatgtt

SEQ ID NO: 40443 - DNA, 1344 bp, Zea mays
  Peptide Sequence Number=SeqID_82222
atgacactagagctaatgatcgtcgtcttgtgttcgttgggaaagccgaggttggatttctttgtctcctcaactggccacatggtggtggtcgaggattcttcttttgctgggattgtgaggtcattccctggtgatgtgtcggcgttcgtcgctggagcatcgaaggtcaccgacatgaagaggtgccctaacgggtactctccttcagtcggaacgatgccaaagaatggggtatttatcacacccggtttggaaggcgtgttcagggcgacatggcgaactcgaccgtgggcaccacgccggcgcgggggcactagagaggaggttgctcaccacgagtgcgaactcaagagtgcttggaggacggcgggggcggtgaagtctcgggtcgacggcggcgaactccggctacgcaagaaatgctccagtgagcgcggcctggacgaaccagaggggaagaaggcgaaccaaggggtgtctcgagttgttgacggcgaagcggaactcaccagggcaacggacgcgacggggactcaacagcggtcgtggaacggcgatggccttcgtatgcgatttaatgaggttagtagttgggatctcaaggtcgaggagcgtcctgggaagcagccccccaggcgcggatcccccaccgccgtcgcggcgcttgtgctcgtcctagccctgatcgccggaggccactaccgcgaggcccagctcgacgccgcggacgctgtcgccgtgtgctgggcccttggcagagggcccgagccacctggtatggccagcccaacgacaccggccccgacgacaacagagacggtgatcatcactgacatgaactactacccgatgtccaagtaccacttcgaccacagtggcacggcgttcgacaagctggccaagcccaacctcaacgacaagctccgccactctagcatcatccacatcgagttcaccaggattcatcgtcgacattgggggagcggccccggcacgtcggcgtgcgggcgccccacggtgcgtgggcgcggatccccggcacacagcgtagccccgcgcggcgtggtggccctcggccccggcagtaggcgggttcgactctccggcgcggcccgtggtctttgcgcgcgtgcggccggagctcacccggcgtggcgcgccgcaccctcctcgcaccccctggttcggccatggcgccccggcgcgacggcccgccccggcgagcctccccagccagcttcggcggcctggcgcggcggcgcggccatcctcggcggcccggcgtgtcagctcgcggcgccccacggcgcgtcgcgtgcggcctggccccggtgtcgcgcg

SEQ ID NO: 40444 - DNA, 594 bp, Zea mays
  Peptide Sequence Number=SeqID_82223
atggctgcacttggggaggcgagttcggtgtgctggcgaagatttgcaagggcgcacgctgtacaggaagcgaggacaggcgccgtgggagaggaagatggagacgggcgtcgtgcacagggatggatggcgggcgcgctgggcacgtcacagaggtgcgacggagaagctcgacgccatggggaggagatagcaggggcgctggtctggagatgggacctcgctggatttttagagcggggagcgggcaaacagggagctcggccatggcgctgctgggggatgggtccgctggagaggggacccggcgtagggagctcggcgtccgagcagaggggagctgcagatcgggcttgcagcttgtcccgggcgcctgctcgagctgggggccggtccggccatggccagcgaccgagagagagcagagagagggaaaaaaacaaaaatggagcagcggcctggagggggcagaacgccgaggggagaaaaaaaaaagccagccgtgggagggagctcggcgagctggagggaaggaacgcccggccatggaagcccctgcgcgctggggaaggagcttcagctctacgtgcttga

SEQ ID NO: 40445 - DNA, 594 bp, Zea mays
  Peptide Sequence Number=SeqID_82224
atggctgcacttggggaggcgagttcggtgtgctggcgaagatttgcaagggcgcgcgctgtacaggaagcgaggacaggcgccgtgggagaggaagatggagacgggcgtcgtgcacagggatggatggcgggcgcgctgggcacgtcacagaggtgcgacggagaagctcgacgccatggggaggagatagcaggggcgctggtctggagatgggacctcgctggatttttagagcggggagcgggcaaacagggagctcggccatggcgctgctgggggatgggtccgctggagaggggacccggcgtagggagctcggcgtccgagcagaggggagctgcagaccgggcttgcagcttgtcccgggcgcctgctcgagctgggggccggtccggccatggccagcgaccgagagagagcagagagagggaaaaaaacaaaaatggagcagcagtctggagggggcagaacgccgaggggagaaaaaaaaaagccagccgtgggagggagctcggcgagctggagggaaggaacgcccggccatggaagcccctgcgcgctggggaaggagcttcagctctacgtgcttga

SEQ ID NO: 40446 - DNA, 384 bp, Zea mays
  Peptide Sequence Number=SeqID_82225
atggggaaacctgtcccatcactcctcatgctcctcctcagtcgaggtagggtcccactcgacagtccaacccggtggcaagatggacggccaagtcactccagcaaccatgtcctccaaggaacctgtaaaaattgtgccacaagcaaggctgagtatactaatactaagctagacttacctggtgagcatggatcaagcagtctcattagctgcgagaagcagacgattcgaatcgagtttttatccttgcaagtgaccgcacttgtacccaccatatccggaatgggagacctcgtctcaggtcgcgtgaggagggcaatctgctgccaggttcaatcagggtttaataacattatactaatagaagaaaaactaagttaa

SEQ ID NO: 40447 - DNA, 783 bp, Zea mays
  Peptide Sequence Number=SeqID_82226
atggaagaaacacacctccacgtgttcgacgccttctgcccgcgcccgagccaagccagcgccatggcccgcgcctgcgcttataaaaccctcccaggcttagattgtacccttccgcgcaccctcaaacctcactggagtctagctcgtcgccgtttgcccgtgcgcagcgagtccgcggccgcccaatccctctgccaccgtagaccggccagtggaaccattcccaactccggccagccctcggagaagactgtgcacacctctgtgaggctccccgagcaaggaatcggagtttgcttcgccggagaggccagtccacgctcgccggagctctcaaccccgccggagtacgtggaccgggtaaaccactccaccatccttcgattccttgtgtacacggtcgctatgttaccccgtgaagctcaccgtgccctcggattgaaccagttcgccgtggtttggccggtatactcgccgccgacgaggacacccgcctgcacgcatggaccgggcgattccggccatccccgacgtcaagccgtacctcgacgtgaccgccagagtctccccgagccaaccccacccttcgccggacctccctcgccgccgcagattgccctcctcacgcgacctgagacgaggtctcccattccggttatggtgggtacaagtgcggtcactgcacgacggccagtcggggtcagtgaggcattgtacgccaaggcggtttaccttgcaaggataaaaactcgatttgaatcgtctgcttctcgcagctaa

SEQ ID NO: 40448 - DNA, 1278 bp, Zea mays
  Peptide Sequence Number=SeqID_82227
atgagcaagatatcacgaagtgatgaggatgtggtgcaaaatggtctccatctatcaagaagcactatggtgtacttcaagcacaatgatatggcttcacttgcaagcactttggaaaaacttactcgcggaaataaacgtgctgaaaagattagacgctacattgttgtagaatccatttaccagaattctggccaaattgcccccttggatgagattgtcaggttgaaggagaaatatcgatttcgtgttattctggaggagagtcattcttttggggtgcttggcaagtctgggcatggccttgatgaacattatggagttcctataacgggtcagttggcggagtctgaaggagttgcagtgtttaaggggtttgatcagcccaaggcaaaagggaatcacgacttgtgggaggtagagtctgtgacgagctcctcccctgtgcccccactggaggcgccctctgcaccaccactgggcgtcctggccgctggagtagctattggaggagaccccgacgacggaggtgacgacagtagctcgagccacaacaccgacctttcaaaggagcaggagccagagggatgggttgctcgacacatcactcgtgatgccactcgcaggtgtcacttccacgatgcgctcagcaccttgctgcgccaggcacttgaccggcatacctggtctatcgagtatcgccgtgttgtcttccagcacagtggtggggtttacccggaccgctgggaggcgacttgtttggtgcgtcgtccggagaacagtcttcggggtgcggaggtctgctcggagcattattctatctctgagcgggacttagctgaggcggccatgcaagatgccgcacggcgtgcgcttttgcactactgctcagtgttcggtggggtggccgatggtattgacctgaggtattacccccgccgtccatctggcagcacaggaggtgtggttgtctcacctgttggtgaggacaatcctaggttgagcagcatagtcaacctagccaccgtgctaaacacggagctggaccatgctttagatgagctgagtagggctcctgctgagatcgcccagttgcgggctgagcacgcggagcaccatcacctagcggatggctccctcgccccgttgggactcagctcccgtaccgctaaccacagcgtgggcaccatgcctatgattcagacagtccaagctattggtcagaccctggccgctatgcagcaagtgcagcagcaacaacccccacctcaaccttag

SEQ ID NO: 40449 - DNA, 255 bp, Zea mays
  Peptide Sequence Number=SeqID_82228
atgccagaacagagaaagttcaagcctatagataatgatgagggtgttcactgggcagtgcaaaatggtctccatctatcaagaagcattgtggtgtacttcaagcacaatgatgtggcttcacttgcaagaactttggaaaaacttactcgtggaaataaacgtgctgaaaagattagacgctacattgttgtagaatccatttacaagattatttcagtgttttggtttgatttagagtacacttatgtatga

SEQ ID NO: 40450 - DNA, 615 bp, Zea mays
  Peptide Sequence Number=SeqID_82229
atgtcactgaatgccagcattttgtctctacgggagattgatgagctatgtgatgagtgggagacaaagccgctatgccctccaatcaaggagggggccaaaatagatgctccaacattggaaagtgccgctggaccacatacgattgttgatggtaaagaagttgtgaaccttgcatcagcaaactacctcgatttaattggcaacgaaaagattattgattcttgcatcagttcattggagaaatatggtgttggttcttgtggtccacgtggcttttatggaacaattgatgtccatcttgactgtgagtcaaagatagctaaatttttggggactccagactccattctttattcatatgggatttctacaatattcagtgtgatacctgccttctgtaagaaaggagatatcatagtcgctgatgagggtgttcactgggcagtgcaaaatggtctccatctatcaagaagcattgtggtgtacttcaagcacaatgatatggcttcacttgcaagcactttggaaaaacttactcgtggaaataaacgtgctgaaaagattagacgctacattgttgtagaatccatttaccaggcgcagtgcttttga

SEQ ID NO: 40451 - DNA, 303 bp, Zea mays
  Peptide Sequence Number=SeqID_82230
atgagccatgttttctgtagatattgtgtctaccgtgtgaggcaatcgcgccagcttcctttgggtttgggactgggagctccatcgctctatggtcacttgatcgtggaagggcttcttattgcagtcatagtgttccagctctccacgaagagctacaaaccactaaagaagccactcactgaaaaggagattgatgagctatgtgatgagtgggagccagagctgctatgccctccaatcaaggagggggccaaaatagatgctccaacattggaaaggtacgtgaccctgagcgcgtga

SEQ ID NO: 40452 - DNA, 810 bp, Zea mays
  Peptide Sequence Number=SeqID_82231
atgttggctgcctgggaaatctggaagcatcagaatgattgtgtattcgaagggcaacgacctggtgttcatactgttttgcaggttgtgaccaatgaatgtaccctttggaggttgagcactgagctgagagacaaagatgtttacaacgatggtctgcagcggtggtacatgaaaggtgaagctggacaagcattgcgccaggctagttcagctgtctgcatgctcaatgagctcatgtatggtttgtcaggtcgatcccttgttactaacaaaagagaagtgtggggttttagtgaacaaaagggcactaaagacaacattcttcattgcatcagcagtattctgcatgaatatgtatcaccagaagtgtgggatcttccaacagagaaggacactgagctacacctaatagagttgaacctgccattgcacttctaccgtgatacaactgcattgcacacagtagtgcttgaaggaattggagtcttgggtgttcttcttggtcaagattttgcacttagtgggtttatgcactcttccctttatcttctgctccgtgaacttatcagctcaagtgctcagataagaactgcatgtgatgctgtcttgagagcccttgctactgctggcggtcattgttcggttggccaatttgtcgttgcgaatgcagactacattattgactctctttgcaggcaattgcgtcacctggacctgaacccccatgtccctgatgttcttgcttccatgctatgttacatcggtgcttctcgtgatatcttgccattcttggaagaaccggtatga

SEQ ID NO: 40453 - DNA, 2496 bp, Zea mays
  Peptide Sequence Number=SeqID_82232
atggccgctttcctccgcgccgccccggccccggcgctgcagctctgcttcgagttaatcgtcacttcgccttcagcccttcacttgtttttgctgtcttgggtttttggtttggtgtttccactgctcctgctcctggatgcggcggtgcagtgcaggaagcaaggcaatgcgccggggcaggttgcagggggcattgatataggtgatgccgtcgccgaagctggtctgacctgccttgaggtcctcctcaccaagtgccacctcacctcggtcaatcagatggtagcaatgctgaaaaagttgacttccggggctatgctttcaccttcagaggcttcagaggaattccgtggtgcaattattagatgcttcagggctttggttttgcagttacagccatgcttggaccatttttgttcttgcaaacacggaatagtgttacctacgatcccaaccagtacatgcttggaggcatcagaacttgaggcatcaagggggcaccggggaagtgcagatgttaggaaggaatcattgcacacgctgcgcattcttattggcaaggtaggctctgctgatgcacttgcctttttccttcctggaattgtcagtcgccttgggaaggttctctacacagctaagactatgattagtggtgctgctgggagttctttgagcattgaacaagccattcttggattgaccgaggctttgatgatagtactaaatgacaaggaaaatcttagtgcacttggtaagcacaagaatgagaatcattctggtggcagtgagtcaactgagcatatattgcagatgcttcgccagttgccaaccaaaaatatatctgataagataagccatgatgagattacagatgattctgtctccaatgtcaataattcctttgctgatagaaaggcactgcatgtgaagcggaccaaaaaatggcttgaggaaacaactagtaatgttgataaattgctgtctgctacattcccacatcttgctattcattcatctgagaaggtaaggaaggcagtggttagtggtgtaaaagggcttttgtctagttgcagttctacattaaaaagaaccaagatgctacttttggaatgtttatgtgttctggcatgtgatgatgctgcagctgtgtctgaggctgcacaagatgctcttgatcatcttttcaaccaaggccacaatctcgtaacagaaaaggagatttctgatacctttactaggctggttgaaaggctaccacaagtggtacttggaagcgaggagacaaccgcactttcacatgctaggatgttgttggctctgaccttttatgctggtccccagtttctgataaatcatcttcaccgttctcctgtcattgctgctcgtttctttgattgtttgggtttatgcataggtcatagctcacagttttctggttccatggacaagctaattgtatcaaagccactatctattgggtatctttattcagttgctgagttgaagagtggcgcctattctaaagatacaactaacatatctctgcatgccacgtcaacatctgcagcctccaaaatatctgttatccatgataatgctttgccaaatgcattacttggtacagttgaatatgagttgccccatgtgcctccatggttttttcatgctggtagccagaagctttatggggttcttgctggaataattagacttgttggcctatcaacagtgtcaggggaaggaactgctgcaaccttgtctctctttgttgatattctgcttgatcagtttaggaggttgagcactgagctgagagacaaagatgtttacaacgatggtctgcagcggtggtacatgaaaggtgaagctggacaagcattgcgccaggctagttcagctgtctgcatgctcaatgagctcatgtatggtttgtcaggtcgatcccttgttactaacaaaagagaagtgtggggttttagtgaacaaaagggcactaaagacaacattcttcattgcatcagcagtattctgcatgaatatgtatcaccagaagtgtgggatcttccaacagagaaggacactgagctacacctaatagagttgaacctgccattgcacttctaccgtgatacaactgcattgcacacagtagtgcttgaaggaattggagtcttgggtgttcttcttggtcaagattttgcacttagtgggtttatgcactcttccctttatcttctgctccgtgaacttatcagctcaagtgctcagataagaactgcatgtgatgctgtcttgagagcccttgctactgctggcggtcattgttcggttggccaatttgtcgttgcgaatgcagactacattattgactctctttgcaggcaattgcgtcacctggacctgaacccccatgtccctgatgttcttgcttccatgctatgttacatcggtgcttctcgtgatatcttgccattcttggaagaaccggtatga

SEQ ID NO: 40454 - DNA, 427 bp, Zea mays
  Peptide Sequence Number=SeqID_82233
gcaatcaaaagatgtcgtcaaggcactaaagaaacggattggccacaagaatccaaaagttcaacttcttgcactaacttctgatcctcgtgttaaagagaaggtattggtgctgatagatacatggcaagacgtgtttgggggatcacatgcaagatatccacaatactatgcagcataccatgagttggtgcgtgctggagctgaattcccgaagagacccgagaaacctgcacctttgtttaatggccagtctcaggcagcaaggaatatgcgtagtcctgaccaacaggaagcggaatcttctgctgccaatgattttcctgctttgagcatgtcggagattcataacgcttgtggtattatggatgtacttgctgagatgctgaatgctttagacccaggaaacagagaggtaccaaagtag

SEQ ID NO: 40455 - DNA, 288 bp, Zea mays
  Peptide Sequence Number=SeqID_82234
atgagcctgaagccctgcacacgcgttggtgattctcctatacagacatctatgcataagtgtttatatcttcctgcgcaattgcacctagcagttgaggagtgcctctttggctcttttcgtctaaccactaggtcatgtgggtttctttttaggcacatgagaggcgcacaaccgaatcaacagcaatcaaaagatgtcgtcaaggcactgaagaaacggattggccacaggaatccaaaagttcaacttcttgctctaagtatcaaacacctgatcctctgctaa

SEQ ID NO: 40456 - DNA, 987 bp, Zea mays
  Peptide Sequence Number=SeqID_82235
atgggttcgaaaaccctgagtacgaagtgtactttcgcaagtcttacccgtctaaggaaaaagactctcaaggatatgctggctattgggaatcaaggacggctgccgcgacgcgcacgacgtcgccacgccacaaacaccaccacggccaagaacagaggcacgcgcagggagcttcacggcacggtggcgtccgagacatggacgagcacaaacaagttgacggccgggccggacgaggagctcgcggccggcaccaagggcgagagcagggagggctcgggttcggaacggcgaccaaggaaggagcagggatgggagggactcgccacgaaaaattgggcgcgcgcaggagctgtcaccggcgagggaggatgtaggggcacgaccgagaagcagaggccgaggaggagcgcggttaggcgaccacacaaagctcgactagaggagcttgggcgcgacggttggagcaggcggccatgggcagaggcacacagcgatgggagcaggcgcgccatggacgcgcaggcaaccgagaaaagcaggggtgagcagggagcttggggaaccgcggcccagggggaggtggccaagcttgagggagcgacggctgagcctgagccagcgcgcgcgaggatctcggctgggcgcaggaaggaagaagatcgagctgggtgcagtggagaaagttcagggcgcggcgctgcgcagaggggggagaggaaggagatggacgcgcgcggcgagcactggcgagcagcgggggcgcggtttgggctatggaggagctcggtcgggcgccatgggggcgagcagagagctccgagcggagctaggacggcgcgcagaggaggaggaaggaggagcgcgacgctgggcagggggaacgcggtcgagcatgggcctcggctggagaaaggaaaacagggcgccgagagggagatggagaagagctcatcggggcggcagcttgaagatgaagactag

SEQ ID NO: 40457 - DNA, 249 bp, Zea mays
  Peptide Sequence Number=SeqID_82236
atgggttcgaaaaccctgagtacgaagtgtactttcgcaagtcttacccgtctaaggaaaaagactctcaaggatatgctggcttttgggaatcaagatcctccacaacatgaaccggttcgtccgactgacgacgtcgtcttgcggcagaggtccactcctagcaccatcttgaggtcaacttggctcgtcttccgcatcacgcgatcaattaatgtacctcatgggatgcacgatgcacatgtatga

SEQ ID NO: 40458 - DNA, 240 bp, Zea mays
  Peptide Sequence Number=SeqID_82237
atgggttcgaaaaccctgagtacgaagtgtactttcgcaagtcttacccgtctaaggaaaaataatctcaaggatatgctggcttttgggaatcaagtgggcgaccgaaagggaagccgtggagtcttcaccattcgtgacaccttctcggagccccaatccgccgtggtgtccccatcggcgtggtcaaaccccggtgaggacacccctaccgatccccgttatatgatccaagtgtag

SEQ ID NO: 40459 - DNA, 1113 bp, Zea mays
  Peptide Sequence Number=SeqID_82238
atggcaggtttccaccatccactcaggcttgggacggtgatcaagttcgagagcctggagttcatgtctctcggcatcgagtatgacatgatacttctcccacttgtccctctcgagtgctcaagctctcgttgccacctctctcgtcgtaggaggcagagacagaacaatcgtgatcgtgccgctcatggcaccccgtgcactggaggagcccccgggatggcagatggcatagactccctctcgaagaacctagccaatgtcaacattgcacccagagtgccgccagtagtgcctgcaccaacattcccggcatcacctcctccgatgtgggagacaccagttcccacgttgttgagcgagcggtgtcagctgcagtggccctcccactcgtcggtcaggaggagccggaagctccttggagagacgtggcggggggtcaggggagaattgtctgtgtgcaaccccatcgccttccaaccgagtttcgacaccagctctatcacccggatgtacgtcgggcttcctttcccctcagggtgcctagactccaaggaggaagacggtccgagcttcgccctggacttctctgggctgagagatcccaagtccatgctgcagtttctgtatgtgtgcggcgagatgctctccaaaagctcgtgtgacagaacctcccaagtaccgggaggcaaacaccctcccccaaataagtttagagttcttcctcaagcttgggcaccaccttggagcagaaacaacagaactcagctatttcatcacctacaacaacatgggttcgaaaaccctgagtacggagtgtactttcgcaagtcttacccgtcaaaggaaaaagactctcaaggatatgtaggcttttgggaatcaagttgcataaaaccccttgcacttctatttctttacgacttttggtccatgacggaaccgcgtcgagcacatggctggaatcgcgattccacggtgaccacgacccgtacaggaggcaacaagcatacggacatcgtgcgcaagtctacccaagcaaaagccctcactcaattggatgggttcaaccttaatcgatgcttggtcatggcggtgcaagggctccgctga

SEQ ID NO: 40460 - DNA, 474 bp, Zea mays
  Peptide Sequence Number=SeqID_82239
atggcggaggacgagcttgggcggccttgcggtggcgaggtgctggcggtagcgcgtgctgtgctggcggggtcggtgttcggcggccgatgttgtggcgacggagcggtgggcgggaaagggctggtgagagagagctggggatgtcctgagggtcacgacgatgtgtgggtcgccgtcgggaatggtcggagtcggccggtccacgtgcgcaggtgggggagctcgtcggcggattgctcggtccacgcgcggcccccgggcaaccgaaagtccggcgaagatgatctcgggtctctggtgagtgagctggccgcgatggccgaggctcgggcggtgatggcgggcggaggaaagcttgtcagagctaaggaggggcgtctggccagcgagggtgagcacggggtgagtgtcgagcacgacgcagcgcagagagaggtcgtgttcaagcgcggattggctccaaatctttga

SEQ ID NO: 40461 - DNA, 150 bp, Zea mays
  Peptide Sequence Number=SeqID_82240
atggcgggcggaagagagctcgtcggagctaaggaggggcgtctggccagcgaggggttttgcctactggtttcaaagatttggagccctgaagtctggtctgtctccctgcccgagcccgaggcaaatccttggttttgtcgtgtctag

SEQ ID NO: 40462 - DNA, 255 bp, Zea mays
  Peptide Sequence Number=SeqID_82241
atgggccgttggatctccggtcgggacaggggcaccggaggggggcggtccacggcgaagcggctcggcggcgacgctaagggactccggcgtgcaattaagcgcagcagagagccaaagaggggaagggagagggcagaggaggttccttacctcaaggcgaaccccagggactcctcggtggcggcaatggcgcgacgacggcccgggtcgacggtggtggacctcggcggctgcacggaggacggctggtga

SEQ ID NO: 40463 - DNA, 255 bp, Zea mays
  Peptide Sequence Number=SeqID_82242
atgggccgttggatctccggtcgggacaggggcaccggaggggggcggtccacggcgaagcggctcggcggcggcgctaagggactccggcatgcaattaagcgcagcagagagccaaagaggggaagggagagggcagtggaggttccttacctcaaggcgaaccccagggactcctcggtggcggcaatggcgcgacgacggcccgggtcgacggtggcggacctcggcggctgcacggaggacggctggtga

SEQ ID NO: 40464 - DNA, 354 bp, Zea mays
  Peptide Sequence Number=SeqID_82243
atgtgcttgaaatctgtattggtccacgttcttaaccttaagaacgtgggtaccttcgaacttattgtgcagtccgcgcagacccacgcagggttaaaaacgtggtttcctgtagtgatcctcgaccacctttgccgtcgaacttacttctctaagttcgtccaaaaatcaccatcggctatattcgtcggtaaaccacgttcttacgattgcaatctcgctgacggagagtacgtgctcatccccgagcaaggagctgtccacgaggaagaccaggagcaagctcccgagactgccatcgaggatctccccgcagccccagctattgaaggcaagccccggttttatgcataa

SEQ ID NO: 40465 - DNA, 866 bp, Zea mays
  Peptide Sequence Number=SeqID_82244
gcagagtgatgcttgcttttgaagataatggatcctcaaaaattggagtccgacttgacaagcagatccctgatggtaatgatcttggtggtttgtgcgaggaagatcatggcttcttctgctctgctgaatcacttcgcccagacttttctgctagtgaagaagttgagaggctagctatgaccgagctaatagaggtattgttgctttttaggacaatgaatcctgtcgaatatgaagttatcactctgtatgataagaaatcattcattggagttaccgagtcactttcatctttgcggagcaaatttgaatcgcttccatctggtgttcttattataggatcccacactcagatggacagccgcaaagaaaagcataaaagttcatcaaagtcaagttccagctcatcttcagaatcttcaagcagcgacgatgaggataggggttcaaggaagtccagatcacagtcgagatcaaagagaacaaggaaggaaaagaagagccagtcaaggtccaagcacagaggcagtgaaagcgaggaggaaggcccgaaaagggttaagaacgtgggtacccacgttcttaaggttaagaacgtgggtaccgtcgaacttattttgcagtcctcgcagacacgcagggttaagaacgtgggtgcccacgttcttaaggttaagaacgtgggtaccgtcgaacttattgttcagtccgcgcagacctccgcaggacacataagtttgacggccacaccagcggctgcagcgaagacttcgagcgaagggtggtgtcttttccttcgccccaacatttgccctccgagggaccagttcgacaaagtcacctggtgccgaagacgtcgctag

SEQ ID NO: 40466 - DNA, 657 bp, Zea mays
  Peptide Sequence Number=SeqID_82245
atgccatttctgaatgttattattgcactctgtgtacaagaaccagttcaacaggtcaatgaaggcgatagtttggatgatggaaatgatgacatggatgagcaagctagatcttcacaacacctgtcctcatcaacaactgagatttctttgcccccatctgaggatagtgatcgaatgagtgggcaagtagagaatgatgatgggctgggcttagttcagagtgacactccagttggagcagcatatggtgacagtacccagatcacctcgactttgactgctttttcggcttatggtcataaagatcctaatattcatacaaccaatgaggcccagctatatggactggtggagcctaatgtacatccacaaagcattagcttcctcttctcagtacttcaacacacctggggattctctaagaagtcacagatgtcagttgggcaggaagggcacgtcttcacaatcttctgtgcccttagagtccgaccaccacagcttctttcccttacagaagactggctatcatatgccccaagcaaacaagttttgcaaaagttgtgggcacatggagtcgatccccagctagaaccagtgtgcatcataaatcgaaaaaatgacaaatacagaataagcatacaaatagaagactga

SEQ ID NO: 40467 - DNA, 465 bp, Zea mays
  Peptide Sequence Number=SeqID_82246
atggaaggcctgaatttgatatgcaacagaagacaagtcacacagagaatatggcttcctgacaatccctttattatatgtagttcacaagaaccagttcaacaggtcaatgaaggcgatagtttggatgatggaaatgatgacatggatgagcaagctagatcttcacaacacctgtcgtcatcaacaactgagatttccttgcccccatctgaggatagtgatcaaatgagtgggcaagtagagaatgatgatgggttgggcttagttcagagtgacactccagttggagcagcatatggtgacagtacccagatcacctcgactttgactgctttttcggcttatggtcataaagatcctaatattcatacaaccaatgaggcccagctatatggactggtggagcctaatgtacatccacaagcattagcttcctcttctcagttattttttgttttttaa

SEQ ID NO: 40468 - DNA, 2004 bp, Zea mays
  Peptide Sequence Number=SeqID_82247
atggtgtcccctcagatctcccacaaaaccctcagcttcctgctcctctccgccttagcagcggtcgtcttgccgaccaccaaagacgaggtgatgtccctgacaaaagtcgattttcagaaggaggtcagccaggaccatgacaccctcgtcgagttctacttgccatggaattcctatcgttgttgcagatcaaatacgatgaacatagaattggagaaaggtggaatctttgtgcgtgaaaactgcaatcagttgcagcagcaggacaaaggttctgatgaggttgtactcaaggccatgggaagggctatcaataaaattgtcatgactgtagaattgatcaaggtactcctgaagactctggtccttgctaatattactggtgacttgattgttgattgtgtgagaatgtcggcaccaaatggatgggggcaaaatgatgaggctgggatgtcaagggcttatgtcgtgcttcatagatggagaggtgggcggcagcaaaccaacaagctgctgagacccttgcataggttgggtcgcgttgcttcccctgagtggctgagtagccgtatctacttggtcagtaattttggttggcgagagaaagaatctcttgtggtttttattgatagcgaggatgagatcaccttttcattacatctcaatgaaggttcagcgaataaatctgctcattctgatgccataaatacgaattgggactgctctatggaaacaaagtcacccttgtctgaattttcctcaactccatctagagtctattcaatgtcgctgaggcaacagttacaagatcctggaagaaaacccgtggcagctctacactacaataagggtgataaagatgtctcgcccaatggaagtggccttcgtgctcctttaaaggatgtgaaaaacacactttctgtgagtaaatacaacaagaagctggtgaagaaggatcctaggtgcctgaaccacatgtttgctgctgagatcttcatgcaccggttcctgttgtcaagtgctgtccgaacatttaatcctgaagaagcagattggttctacactcccgtatacgccacatgtgatctgactccttcgggtattccccttcccttcaaatctccacgcatgatgcgcagcgcaattgagctaattgccacgaactggccttactggaacagatcagagggtgcggatcatttctttgtcacgccacatgactctggtgcttgcttccattatcaggaagagaaagcaatcgggcggggaatccttcccttgcttcaacgtgctacactggttcagacctttggacagaagaaccatgtctgcctgaagggtgggtccatcacaatcccaccatttgcacctccccagaaaatgcaggctcaccttatccccgtggacacccctcggtctatcttcgtgtacttctgtggtctgttctacgacaccggcaacgatcctgagggtggttactatgcgagaggtgctcgtgcatcagtctgggagaacttcaagaacaacccgctcttcgacatctcgactgatcacccaccgacttactacgaagacatgcagcattcagtgttctgcctatgccccttgggctgggctccatggagccccaggctggtggaagctgtggttttcggctgcatcccggtgatcatcgccgacgacattgtcctgccctttgcggaagccatcccatgggaggagatcagtgtgtttgtcgccgaggaggatgtcccgaagctggacaacatcctgacgtccatcccaacagatgttatactgaggaagcaatgtctccttgcaaacccgttgatgaaacatgccatgctgttcccccagcctgctcaggcgggagatgcattccaccagatcctaaatgggctcgcgcgcaagctcccacatggtgagagcgtcttcttgaagcccggggagagggtcctgaactggaccgccggaccgccaggcgaccttaaaccttggtag

SEQ ID NO: 40469 - DNA, 234 bp, Zea mays
  Peptide Sequence Number=SeqID_82248
gacaaaggttctgatgaggttgtactcaaggccatgggaagggctatcaataaaattgtcatgactgtagaattgatcaagatttctacaggacgaggctgggatctcaagggccaaccagtgttactattttacacctcttaccctgctggtaccgagatgctaaccaacacggcaaagctttacaaggctgcattaggcaattgttttaagacataccatattggttgttag

SEQ ID NO: 40470 - DNA, 867 bp, Zea mays
  Peptide Sequence Number=SeqID_82249
atggccgtctctctcgcccccgctctcctctttgctatctgcacctacgcgacatggaaggagatcgccttcgctgcgccaaatcgagaaatccgcgtccgctatggaagggatcggcatcagaggacgctcgccgttgtctccggcgcggtgcttgccggtggagctctggcgtacgcccgctcgagccagagccgccggcggaggaggcgcccggaggcgagtcgcagcagcggagccggtgcattggccgccaatggggatggtttcagccggaacggtgccggcggtggattggctgcagcggaccagaggaggagtggcctcaaatctctgcatttcctcgctgctatcctactcaagaagatagggcccagtggcacgcgctaccttctatgcttggtattaacattggtaggttctaccattttttcctctgtgagtgatgtacttgtccagatagtgctcgtgttcaccgctgccttcatcatctcctcgccagcgccgctcgcgatgacccccctccaacgattccggggtcttcgcgacccaagcgtgacgctctacgccgacgatggaggggagctacacaccacctcctccgtccgggcgttgttccacctctttcttcccccctgtaggaatcacgggactgaaagaaaggacaaaggttctgatgaggttgtactcaaggccatgggaagggctatcaataaaattgtcatggttgtagaattgatcaagctgttggtaggaatgcattcgatgaacaacgctcttgctcggcgaggcagccctgaacagcttgatttctacaggacgaggctgggatctcaagggcttatgtcgtgcttcatagatggagag

SEQ ID NO: 40471 - DNA, 592 bp, Zea mays
  Peptide Sequence Number=SeqID_82250
gcgtccacaccgtggtgcacggttctgcctccagatctcgcgcttgcccaaaccaccacccagcactagccaccatccctgcccgtcatctccgcgcgtctggccgtttctctcgcccccgctctcctctctactgtccacgcccacgggacatagaaggagatcgcctctgctgcgccaaatcgaggaatccgcgttcgctatggaaggagatcagcatcagcgtccgtgtccgctgcgccaaatcgaggaatccgcgccccaaatcgaggaatctgcctccgctatggaaggagatcgcctccgctgcgcctcgactctcggtcggcatcatcgtctgcgtccgctgcgcccctactttaattctgtctcctgtcctcctgccgcgcctgtttcctcacttatgcgccaccaaccaggaggacgctcgccgttgtctccgacgcggtgcttgccggtggagctctggcgtacgcccgctcgagccagagccaccggcggaggaggcgcccggagagatccggacagtgctcgtgttcaccgctgccttcgtcgtctcctcgccggtgccgctcgcgatgaccccctcccc

SEQ ID NO: 40472 - DNA, 294 bp, Zea mays
  Peptide Sequence Number=SeqID_82251
atggctcaccggattgctcagtctacgtgtgactgcgggcgaccgaagtccagcgagggtgatcctgggtctcctgtgaggctctgctgggtccgaggacttggaaagcttcatgggccactagcgaggctacgagcaactggcgcggctgtaagcggctggagggagctggccgcggtggtcgaggctcgggcagtgatggcgggcggaggagagctcgccggagttggagttcttgctcgaggcgagaggcagagtgaagggcagaccgttgcgcacccggggtacttatag

SEQ ID NO: 40473 - DNA, 288 bp, Zea mays
  Peptide Sequence Number=SeqID_82252
atggcgggcggaggagagctcgccggagttggagttcttgctcgaggcgagaggcagagtgaagggcagaccgttgcgcacccgggtcactaccaaagtcaagggaaaagataccacacaaatggattgaacaaggatgtcagtatacaacagatactcccccctgtcgataaagcgacaatgcaatcctcaagaacaggcaaactggataaggtacatcagcttgtgccaattgaacaagggcatgatctagaatggaaatatgacaaccaaaatgtcacagattaa

SEQ ID NO: 40474 - DNA, 396 bp, Zea mays
  Peptide Sequence Number=SeqID_82253
atggtggtggccccctgggtgaagtaccttagccaagaatacgaccccatgttaacgtgggctgccagcacctaccgctccccctcttgcccatatttcagaatacatgggatgaacgtcgacgagcagggagcgagccgggacagggggttcgacgggcagggaacggcgcgatcgtcggtgagcgttcggacgaagctccggctggggggggacgatacagtaggggacgggagatcggcgaggccctgggatgctaactctagtgacggggagagcaggggggcttcctacacgagtacagtgactgcgcggctagagccagagaggcgtagaggaagagctgccaggcgggcggatgggcacgagcacgatctggtgatgcagtttttatag

SEQ ID NO: 40475 - DNA, 207 bp, Zea mays
  Peptide Sequence Number=SeqID_82254
atggtggtggccccctgggtgaagtaccttagccaagaatacgaccccatgttaacgtgggctgccagcacctaccgctccccctcttgcccatcgttcaggtacaaacagaatatgcagagggagaatccacttgccttgctcaagcgagtcctgcggatcgtcctcgaacgaaattggttctcctaccgcacaatccgcttctaa

SEQ ID NO: 40476 - DNA, 1029 bp, Zea mays
  Peptide Sequence Number=SeqID_82255
atgtcttcgcccgagctccgggagtcttcggcgcggatgctggaggttacctggggtcgatggcctaagaacgttcctatcccccgtgcggccggcgaagacttctttatgtctcgcatggctcgtgacttgagagtgtttccttacggacggaatattgttgctgttgtgtcggcagtgatgaacaaggatcgccaggaagccgcgcagaagcgtcgggcggtcatcaggcttcccaaggctaggctgaagagggcgcgggggactgcgaaggctaccgcccccgacggtagccagccgacgctggcggcgaagccggccgcccctaggtccagcaaggtgtcggagagcgtgaaggcgaccggtgccggcggaaccaagtctgtcctggccgaagccgcgaaggcccgggaattgccttcgccggggaaatgcgttgccgacttcggcaacaatattagtgtggacgattatctcgttggatcaggcgaggggcaacttgttgttgttccgcctgcggtggcgaccacggtgtctaccgcggtgcctggggtgaagggtagcgctctcagcgctggcggcgagatttcggtggttgctgccgtcaaggacgaagcaggcactgtgtcccgtcggctgagggaggagtcgcagcagctgagtcaagcggccgacttcgccgaccgtgtggcgtcgggggcccttactgcagatgtgtctgccgaagtcgagagacatcaggcgcagcatgctgacaccgtccgggaaaagtcggctgcggatagcaagtgccgcaagctggcggagaaggtggctgtcctggagggcgagaggacggacctccggcgccagctggtggaggagaggagggaggccaaccaggccatcgccaaggcgcaggcggcacaggcggaggccaaattggcgcgggtggaggagagtcttgccagccagcacgccgaggaatgggaggtgcggttcaacgctttggaggcccgcatggagagggccgaggcctctacacgctag

SEQ ID NO: 40477 - DNA, 1143 bp, Zea mays
  Peptide Sequence Number=SeqID_82256
atggaggccgaaaagacggacctccggcgccagctggtggaggagagaagggaggcgaatcaggccatcgcagaagcgcaggctgttctcgccagtcaacgcgccgaggagctagaggcaaggttcaacgccttgcgcaaccgcgtggacaaagccgaggcctcgacgcgctcggaagttgagcggacgcacgcacagttcgtggacgcgtaccgcgagctaggtgcgcagactgctgacttcgaagtacccgaccgagaagcagaccttcgcttcctcgaatggttgcaggccttcgtggctatggtgaagcagtcagcgggggcactctttgataggatgtggggtccgcacggtcgggaggcggtcagggagcggtccgaccgggcgatagagcaggcgcatgccgaggacgttaaggaccttggagctctggtcggcgcgccgcccgaggctgcggaggtcaacccggtgccgcccctggatgtcggtgaaggctcctcggctgcacccgtgcccacggtggccggtgaagaccctgtgtcggcccctgcgtcgacggccgaagatgctttgaaggtggtggctgagccggccgccgaagaccccatggccgcggccgagccttcgcaggttcagggttttgggcctgcgcacgcaaccgctactgacaatgctaattttgtggcagcttcgatcgtggttgctaaagacgattctgatgattctgtgtctatgttttttgagtctgatgattctgggagttcgattgtgtggatggaggggtcttcggaagaggacttggattattttgcagcgttggatgtggctgcggcggagactcctccgcgtgtgatgggtgctgaggatcatccgggtgtgagtgcttggcataggcggcgaagagcggtggcgaaacggagagtgggtgagttgtcgcgaggtgagaggcgtcatcgtggtgagatggagggtggttgtcttcgtatggatgggactggcaaacgggaattgttatcctcgccggctggggcgagtgtgggtgagggggagctgcgaagtctgtttgcgggtgaggaattgaggataatgttgttcaactatagggagatgggtatcatcccgaaggttgagccgatgtaa

SEQ ID NO: 40478 - DNA, 457 bp, Zea mays
  Peptide Sequence Number=SeqID_82257
atgtacggcgagatgccggccgatttcgggaccctctgcagtggagaagcccaaggcgacgtgcggcttggtcaatgcgtaggggacgctgaagttgacggcgggtcggactcagcgttggagacggtgctcgcgacggcgggtggattgcctagggttcggcgccgcggtggatcaaatgcggctcgttctctgcggtggagaagaacaagggggcagcgccaccttctctgcgattctgggtccctcaccggtgaagaagaacaaggcgacatcgtctccctctatgcggtggagaagactcttcagcagattgttgagaaacaatacaatctatctgatgtttttagcgagttaatagatgaggtcctccgtgccgagtcgggagacaatgaagatgtttatgatgtgcagaaaacaactacaaaatcagatgatattcttccccagtcggcag

SEQ ID NO: 40479 - DNA, 1833 bp, Zea mays
  Peptide Sequence Number=SeqID_82258
atgcaggctgctaatgaggacgatgactttatgccattatcgaagaagtgtaactttgatgacagtcctccaaaagtcttgaagaagatagttacaaagcggaggaaagtagtggacccccccgacaggcttaatgtgagatgcaatccccaagacgtattagtaagcatccagatattaaatgacagacagcgccaagctattgcacggagggggttctccagtattcatgatatgagagttgacgcactcggcagtagatctcatttagcttggctgatggaaaagcttaaccataatgacatgacaattcgagccggcccagggaaggagctcaaaattacaaaggagacggtgcaccttattttggggttaccaaatgctggtggaggaacgacattaggcattgatgaagctgttgctgcaaacaatttaagggttgaacttggtttatcgaaagaagattttagggttgcagctcttcaagatcgtctgaggaaagggtctaacaatgatctaagcatcagattcttattcctgatactgttcaataggttgttgttccctactgccagctggggaataactaaccatgaggttcttttaactgaggagatggatcgtttccacgagatggactggtgccagcttattttcaatgatttatgccaagctgccaagaagtggcatactaggagcgttacaaatgtttctacaaccatttacggatgttccatcgtcattcttctgtattatttggatcatcttcatgactcagctgcacctcagaataaacgtggaacaccacgcatcaaatattttgataggaatattattcaagcactgacaagagctgacaagggcaagatacgccaaggacaagaaccatttggacattgttcgcataagaccaggacaaacacttttgatgtacctcgtcctgacccatctggacaacacacaattcacatcgaactcccgctcatcagggatttgatatcaagcaagctgaatcagcttccatcccgccaccccctgggtttcatagagaagttgtcacattatgatatagaggttggtaaggcttgttcagttattaaacagactcttcagcagattgttgagaaacaatacaatctatctgatgtttttggcgagttaattgatgaggtcctccgtgctgagtcgggggacaatgaagatggttatgatgtgcagaaaacaactacaaaatcagatgatattcttccccagacggctgaaagttgccccgatgaagctgatattgatccactgggtaaacatgatgacagtggcaagaacatgccgaccaacacaaacgtcactcctaaagcaacaccacatacggaatcttcctcgccgatatttgatgcgacgccgcaaataaaggtttctgttgaaactgatccagctacaaacactcctcaggttgaccaggtttcacttgattcggagatgcaaactgtgttagctctacgcgaatatttgtgtggtacgcaatctgacaccagcagtcactactcaactttgaggaacaggaacgacacagtcggaaccctcaaccttttgataaatctgtactgcacacacttcttgtcggggaccataattaggggtaccctcaaggctcctaattctcagctgccccagaagatgacgaactccgcttcacccgaccctagggctcggactcagccctggcctcagccgacggtctccgcctcgcccaacccaggggctcggactcgaccacggccacggaagacagactcgacctcgacctcggaggagcctccacatcgcccaacctag

SEQ ID NO: 40480 - DNA, 257 bp, Zea mays
  Peptide Sequence Number=SeqID_82259
aaaacgaagaagagagtgaagtgactgaagagaagacaccaccacctttggaatctcaggcagggacttggctctacttcgacatctgcgggtctgagccttactcacctactaacgaaggcaagccctgtaacaaaaacacccccacctggaggaaaagactccaggctctgtcaggaggagatcccacagaagatgaccccactatcgtctacatggccggatacctccacaccctcgacaaccactacgattag

SEQ ID NO: 40481 - DNA, 179 bp, Zea mays
  Peptide Sequence Number=SeqID_82260
atggattccagcatctactgcacctacctgtatccccaaaccctcaccaaaaacgaagaagagagtgaagtgactcaagagaagacaccaccacctttgggatctcaggcagagactcggctctacttcgacatctgcgggtccgagcctgactcacctattaacgaaggcaagccccg

SEQ ID NO: 40482 - DNA, 210 bp, Zea mays
  Peptide Sequence Number=SeqID_82261
atggattccagcatctactgcacctacctgtatccccaaaccctcaccaaaaacgaagaagagagtgaagtgactcaagagaagacaccaccacctttggaatctcaggcagagacttggctctacttcgacatctgcgggtccgagcctgactcacctactaacaaaggcaagccccagtgcatgcaacccctttccttgtgtttttaa

SEQ ID NO: 40483 - DNA, 528 bp, Zea mays
  Peptide Sequence Number=SeqID_82262
atggattccagcatctactgcacctacctgtatccccaaaccctcaccaaaaacgaagaagagagtgaggtgactcaagagaagacaccaccacctttggaatctcaggcagggacttggctctacttcgacatctgcgggtccgagcctgactcacctactaacgaaggcaagccccgtttatgtaattgcttccgcatttctatatctccgatgttctgtattgtctgcaagacaggtgaaacgttcctggtaagggatgatctatgggtcgcggatgcagccatccgctacttgcaagaccaactcgcgaaacgagatctagcgctcgattgggcgattaactctcgtccatttgcctgggctaaggaagccaaagctcgagcccgtgtggaggagcttagcttagccatggataacttgcagggccaagacatagatgtcatcttgggcatgaactggttagcccagcgtaaagcaattctcaaccccgacctgagaaccatcgggttgagttatgaccaataa

SEQ ID NO: 40484 - DNA, 399 bp, Zea mays
  Peptide Sequence Number=SeqID_82263
atgcctgctgctgagagccagacccgtcggtgggcctggtatctgatggaggaggtgtggccttgggagcagagggggaagaagccctggcaaactgatgatgggttaagacctgtcggcatgatgatcaggctcaaagaaaaaggggctacacttacttggggccctggactttccagtgaccctggaagcgagatcgccgctcctactgctattgttgttgctgttgctgctgttgttgctgctggtggtgcccctgggggagatcacccccagatgatggtgggtggtggtggcggcgcgaccagaggactgacgcgcctctgcgcgccgtgggcctgggagctcgcctcgtcgggcctcgcctgcggtcctctggcgcttctggggaggctctga

SEQ ID NO: 40485 - DNA, 615 bp, Zea mays
  Peptide Sequence Number=SeqID_82264
atgcggcttcatatccttagaggtatgaaggcagaagtcatccttgcatttgcagacatttgcactcatgagggcttcttccccctctgctcccaagaccacacctcctccaccggatgccaggcccaccgacgggtctggctctcagcagcaggcatctgctgggagtggtgccggtgttccacccccagctgctgccgagacaatgccagcagcttcccatgctctagctggggatccggcgacagcagcgccagcgtcgggcgatgctgcaacggtgccggcgtcgagtggcgtcgcaacggtggaggaggtccctgctgggggatctgtgccccctccgaacactggggtgacgcaggaggcacgtccaactccaaccctccacctgctccagaggagatggagatggtgttcgggcgacgcctccggtcaggtgccgagcaagaagcggcgccagtcccgctccctcgcatgctgtcccgcgcccaccaggtccttagtgacactggggcagcaattttgcgggagtgggaggcgctacaggctgagcaccaacgcctcagcgactggtgcatacagctggaggagcgcaccaagtcggtgtcccgatag

SEQ ID NO: 40486 - DNA, 420 bp, Zea mays
  Peptide Sequence Number=SeqID_82265
atgccgggggttttgcggctgcgggcaccgccgctcctgctcctcggcggtgaagtcaccggagctagagtggctgtgggctacaggggttccgaggtcgccaaggttggccaggatcggcgaggagaacccgacgaacacactagtggggttctagccacaagaccaaggctagagatgggagaacggctaagggagagctccgagcgggtcgggggtaactcccgcgaggaatcccggccgcggggagaggcaatcgagtgcgatagggctcgagctaattcctgtggggtaggggagtgctatgggccaacaccggggcataggtcggggctgagttggtcgaacaccgcgcggggcgcggcgcgcgaccgaactgcagcgaggccaaattggttaaggtcaggcatgaataaataa

SEQ ID NO: 40487 - DNA, 684 bp, Zea mays
  Peptide Sequence Number=SeqID_82266
atgccgggggttttgcggctgcgggcaccgccgctcctgctcctcggcggtgaagtcaccggagctagagtggctgtgggctacaggggttccgaggtcgccaaggttggccaggatcggcgaggagaacccgacgaacacactagtggggttctagccacaagaccaaggctagagatgggagaacggctaagggagagctccgagcgggtcgggggtaactcccgcgaggaatcccggccgcggggagaggcaatcgagtgcgatagggctcgagctaattcctgtggggtaggggagtgctatgggccaacaccggggcataggtcggggctgagttggtcgaacaccgcgcggggcgcggcgcgcgaccgaactgcagcgaggccaaattggttaagccccgccagtgccccgcgcacaaccctcgcctcattttgctcagcttcaccctctctcgcgctctgccctcgtcgcaagacaccgccggagacccacgcccgtgttcccgggccatccagctcgtgggagaccgccccaagcctcaccgagctccgccccgaggtgagacacccgtccccgtgcccaatttccctcattgcgccctgtgtttggccaatttcgccttcgccggtgctcgcgcggtggccggctgatttagcccggtctagttcactggagtag

SEQ ID NO: 40488 - DNA, 168 bp, Zea mays
  Peptide Sequence Number=SeqID_82267
atggcgcttattccaggcttcaagggtaagcttcccaatatcttcttgggtaagggaagaatagagtttttccaaagtacggactactcagattcaggggctaagcataactactattgctcggctcctgaattgagaactatgctaaatgcaacttatgagcactaa

SEQ ID NO: 40489 - DNA, 786 bp, Zea mays
  Peptide Sequence Number=SeqID_82268
atggatgagggtagaactcctgaatcttggggatttgaactccttgaagtacctcataacaagggtcttacggggccttcttctgctgttgctgcttgggcagactgcagagagatgactgacacagggttgattatgggagaaccttcttctcatcttctcttcactattttcttttctcttcttactgctcctttctttctctttgctcttcccactgggaggattctatcaaagagtattaccatcacacagaggaggaaaccaaagatgttgaaccatatacaacagtcttcaacccaagaattaccaagcattgtgatcttaggagcaagggagtggaaaaatggagttgcttgcgatttggcagaggggattttatctggagtgttttgctttgagcgagatgggagtcaagggagctggtgggggggttatcaggtgtgtgctttgcttgggacgggaactgagggagttggtgcggagttttataggtgcgatggaggggaaagggggcctggtgttgccggcgatgatggcggcggtgggtgcgctgcaaagggggcgtgggtggcggtagtgcgttgcaaagggggcatgggcggcggtagtgcgctgcaaagggagcgtgggcggtggttggagatgggacacgcgtgcggggagcacgggggaagaatagagtttttccaaagcacggactactcagattcgggggctaagcataactactattgcttggctcctgaattgagaactatgctaaatgcaacttatgagcactaa

SEQ ID NO: 40490 - DNA, 231 bp, Zea mays
  Peptide Sequence Number=SeqID_82269
atgggcggtggccgcgaatttggacgagacacgcggcggtcggaggtgaagaagaagcactggcctcgtgagttcgtggccaacggcgtggcagtaactccggaaccttattggaacactaccccacttaaaaagaatgagggtagaactcttgaatcttggggatttgaactccttgaagtacctcataacaagggtgttacggggccttcttctgctgttgctgcttga

SEQ ID NO: 40491 - DNA, 531 bp, Zea mays
  Peptide Sequence Number=SeqID_82270
atgagaaaagttatgaagaaaatatttgtggggactagaaaaatgattctgaagagcgagtttgagaaaattccaagatttgaatttttgggatgctacaaatctaccccacttaaaaggaatctcgtcctcaagattcggcttagaagggttatgggtatagctttacctcagctacatatcttcactttgcaactcttcgaggagatggaacttcaacaagatttggccttgaggagcatctggttgccgattgcaaacgctgattctggctactcaaagacgatcttcaggcttctaggtttcgcttggcagctagcttattggagaagcatcggtgccaacacgcaaacctttctcttgcgaaatcccacatggattccttccttgattggtcttctggaactctactggaatactaccccacttaaaaagaatgagggtagaactcttgaatcttggggatttgaactccttgaagtacctcataacaagggtgttacgggaccttcttctgctgttgctgcttga

SEQ ID NO: 40492 - DNA, 348 bp, Zea mays
  Peptide Sequence Number=SeqID_82271
atgcctccgcctacacgcaacccattctcggcagagggtgtggaagcaggcgtctcctccctgtattcgtcctacgccagcctcgacaccgacccacacagtggctattgcacgtccacgagggtgtttcacagcatgcacgcaccatcgttttcgccgtcgtcggacgtcccgttcaccttcccggccttcgcccttttcttcctccccaacctgttgcccctgcccacggtcacaaccgcgagccgatcaacgctcgtcgacgcgggtacgggcgagtcggtcttgctcctggcttttcttcgtgcgtgccgccgaggaggacacgatggcgcctgccacgcttag

SEQ ID NO: 40493 - DNA, 444 bp, Zea mays
  Peptide Sequence Number=SeqID_82272
atgcctccgcctacacgcaacccattctcggcagagggtgtggaagcaggcgtctcctccctgtattcgtcctacgccagcctcgacaccgacccacacagtggctattgcacgtccacgagggtgtttcacagcatgcacgcaccatcgttttcgccgtcgtcggacgtcccgttcaccttcccgggccttcgcccttttcttcctccccaacctgttgcccctgcccacggtcacaaccgcgagccgatcaacgctcgtcgacgcgggtacgggcgagtcggtcttgctcctggcttttcttcgtgcgtgccgccgaggaggacacgatggcgcctgccacgcttaggttatcttggtaataatgagtccagatctgagatattggacaaccaagcggtatactacctatatcgcctccagtccttctccgacaacgaacag

SEQ ID NO: 40494 - DNA, 372 bp, Zea mays
  Peptide Sequence Number=SeqID_82273
atgtccaaaccggacaaaactttccccctccttatcctcccggtgctccccagccttcttaaccctggggttggaccgcacgagttcggattgagtgactgcccacacagtctcgagtggttgtacgagaagaggagtacagggacggatggacttgccttcgtcgaagctttcttggcacagaagatctacttccggaagttcgggctccggctcaatttggctagagggggctgggagggagctgtccgcggggaggtggcagagctccgcggcggggatcgccgccagtggcctctgggcgagggattggggcggaagagtggtgtgctgagctcgcggcagtgcgaggaaactagtgaactaccttaa

SEQ ID NO: 40495 - DNA, 264 bp, Zea mays
  Peptide Sequence Number=SeqID_82274
atgtccaaaccggacaaaactttccccctccttatcctcccggtgctccccagccttcttaaccctggggttggaccgcaagagttcggattgagtgactgcccacacagtcttgagtggttgtacgaaaagaggagtacagggacggatggacttgccttcgtcgaagctttcttggcacagaagatctacttccggaagtgcgggctccggtccttctcccggggctacgggatccggatccgcggtctccgcttcttctag

SEQ ID NO: 40496 - DNA, 777 bp, Zea mays
  Peptide Sequence Number=SeqID_82275
atgcaagaactagggcacggaaagcaaaggcggctaaaagcgcgactcttaagggatattcttgagccagataccctttcaaaaagtgcccagtcatcacccggcggtcatttccgaaatcccagcatgccacgtggatatccgacagttatttccaagaaagccgacgtgccacctcatcactcggttattttcctcaaagtaacttgtgaagctggctatcactcggcgctgcctctaaaacgccgaccacgtgctcaatcgcttggcgttgcctctaaaatgccgaagtcgaccttcaatcactcggcgctgcctctaaaacgccgaccacgtgctcaatcgctcggcattaattctaaaatgccgacgccgaccttgaatcacttggcgctgcctctaaaacgccgaccacgtgttcagtcgctcggcgttgcctctaaaatgccgaagccgaccttcaatcactcggcgtgtcctctaacacgccgaccacgtgttcagtcgctcggcgttgcctctaaagtgccgaagccgaccttcaatcactcggcgtgtcctctaacacgccgaccacgtgttcaatcgctcgacattacttctaaaatgccgacgccgaccttcaatcgctcggcgttgtttctaaaacgccgaccccatattctgtcgctcagcattacttctaaaatgccgatgtcgaccttctatcattcggcattgcctctaaaaaacgctgatcttgtgttcgattgcttggtgttacttctaaaacgctga

SEQ ID NO: 40497 - DNA, 225 bp, Zea mays
  Peptide Sequence Number=SeqID_82276
atgggcaagaacaacaagcgcaagcgtgagccgactcctccatcggaggagtttggtgactcggaatactcagaggaggagttctcctctgagttcgaggggtctccggctcccatccccctgctagaaacaacgccgagcgatgtgaaggttgacatcagcgttttagaagtaacaccaagcaatcgaacacaagaccagcgttttagaggcaatgccgaatga

SEQ ID NO: 40498 - DNA, 630 bp, Zea mays
  Peptide Sequence Number=SeqID_82277
atggcagatgggagctcaacatggggtcgacgagatccgagctgggccagcgacgcggcagcagggaggagcagaggtggccggccaagacagagaaaagaagggaccacgctggtgtcggtacttggtaggagcaccagaccgaactgcatattggagtggaggatgacgaccagcgctggggagatgagtgagcttgcagcagcgttgcaggtggaatacgaattacaagttagtcaaaaccaacttgttgaactacttctgacattgagtaggttctctcagtaccatcgggagtacgatgggagactgttaattcagccacaagcatatttctatgcacaccgtagagattacaagtcaaggattaagttggtgacaaacatgatgcaacaatcaggatgcatgctcgtcctatacgtcctcacaaattttgccaacaatatggcaatagcgttctatctcggtggcatagttatgactctcacgctccgataccagcctgtggcagaacctccaagttattgggcccacatgcacccgtccttgtcccaaagacctcagacggccatgcatgtgcaccagataactcaacaggatctgtccgattgccccaaggacatcgaataa

SEQ ID NO: 40499 - DNA, 678 bp, Zea mays
  Peptide Sequence Number=SeqID_82278
atgaatgccgccagggataagaacggcgccaaaaaaatccacaggggcggcggaatctccttccatgaacggcggcaagatttttccacggagagagaacggcggtggataacaaatgtgtgcacggatgaagattggagcgctcggctggaggagataagcactggtgaagaaagatccagggagaggatagcgacgggaggaggagaaaaatcctcacgccaggataggatcggctgcgtgctggaggataaattgggtcataacctcgcgcgcacgattttactcagacgacgcgcgattctaattaatttgtccgggataaaatgccctccccccttaaaagaatctcgtcccgagattcagagcaaaagactttcaagagtggagaagcagtttgctttttttctgatgacactgtactatctgagtctgttgagcgagcggcaaatacgcgatcttacccaaacagaatcagatacaacctcttgggtaaacacacagaataaggtttaccaacaagcggttacgttacaagttagtcaaaaccaacttgttgaactacttttgacattgggcaagtcctctcagtaccatcgaaatctatttggtcatgttgttcatccgtttcttcatgcgagacgcattatccacttggttagggaatacatggattaa

SEQ ID NO: 40500 - DNA, 516 bp, Zea mays
  Peptide Sequence Number=SeqID_82279
atgggttggcgcgagatggaacacaaggggaaaacgcggctcgtattatctcgcaccaggggggtgctcgtagtaggggttacaagcgttcgcgagagagagggagtgagcctgttcgttagctcgtccttcccccgcgtgaccctctcgcaggaaggccctggacctctcttttatagatgcaaggagagggtccaggtgtacaatggggggtgtagcttatgcgctaacgtgtctggcagagaggtgcctgagccctgtgtacatgccaacgtggctgtcggagagggggctgagaaccaccgtcgtcatggacgcacgcggggagccatcattacctgttaccgggacgagccagatgggacgccggtcttgttccctcgtatcctgagctatctagggccttgcccgggtgactggcacaacagtcggagcgggatgagcgacgctgttttcctgtcagatcggtcagtgaaagggcgaagtgactgcggttacttcgaccttgccgactga

SEQ ID NO: 40501 - DNA, 540 bp, Zea mays
  Peptide Sequence Number=SeqID_82280
atggccgataaaggcaaaggtaggggcatcgtcattggcaatcctcgcatgtcaattatatcgcaaaaggagattgctcgaaaggctttggacgagaaggctaaaaagctggggggcacctcctgtcggcgtttcggaccctgggggaccctcaaccgggccgaccaatgcaaggagagggtccaggtgtacaatgggggtgtagcttatgcgctaacgtgtctggcaaagaagtgcctgagccctgtgtacatgccaacgtggctgtcggagaagggcttgagccctgcgtacgcgataacgtggccgtcgaagaagtccctgagccctgtagaagcacagctggcgggtaatgatgtatcccctatggcgcagtcagtccgagcccaaggtcgggcgaggcggagacttctcctgaggccgaggctgaggctgagtcttggggttgggcgaggcggagacctcctcccgaggccgaggcctaaggtcgagtcttggggtcgagcgaggcggagacttcctcccgaggccgaggcctaa

SEQ ID NO: 40502 - DNA, 210 bp, Zea mays
  Peptide Sequence Number=SeqID_82281
atgagggtggaatgggacgcccttagctgtttaattagaggaaccagaggagtagttggcttcgtcgtagggccatctatggggtctgggcacagtacttgctctgccgaggctggttgcagaggttgtccccactgtactcagtgctcaggaggagatgttggtaacatggaggactttgaggagttccaggactacgacgagttctag

SEQ ID NO: 40503 - DNA, 138 bp, Zea mays
  Peptide Sequence Number=SeqID_82282
atggcgaagccaactactcctgtggttcctttaattaatcagctaagggcgtcccattccaccctcatggttgcactgttatcccgggttgtcactccccaaacaggtccttatggagaggttaaagcaatagcataa

SEQ ID NO: 40504 - DNA, 138 bp, Zea mays
  Peptide Sequence Number=SeqID_82283
atggcgaagccaactactcctctggttcctctaattaatcagctaagggcgtcccattccaccctcatggttgcactgttatcccgggttgtcactccccaaacaggtccttatggagaggttaaagcaatagcataa

SEQ ID NO: 40505 - DNA, 573 bp, Zea mays
  Peptide Sequence Number=SeqID_82284
atgaagccaactactcctctggttcctctaattaatcagctaagggcgtcccattccaccctcatggttgcactgttatctcgggtgtcactccccaaacaggggtctgcgcgctataacacaggacagcgggttgattctcgaaaacctgagggcctctttaacaaaaatacacgtgaaggggtattgggcgatctcaaccatcagatcgcagatcaacggccaagatcagatcacgcggacggattgggcgcgcaggcgcgaatcggtactcggagatctggaccacacaatcaggatcagatggtggagatcaacgccgggaaggttttacggctgcaggcagcgccgctcctgctcctcggcggtgaggtcgctggagacgagaggaacaggcatggcagggctctaggggttcagggaaaagctcaggcacgatcagggcacctggcgaactcagtcccgggcgcaataccggcgggaaggcaccagagggcgtggaacacgatgagacgaccttacggcggcgcagatcaactctggcaaagaattgcgcgaacactagggcagtaa

SEQ ID NO: 40506 - DNA, 408 bp, Zea mays
  Peptide Sequence Number=SeqID_82285
atgccccctgtactctggacttatgagactgctacatgcctcacaggagtagattttcctgattatcagttcataagtatagataagaaggctttccctccaaaccaaccgttggggaggctgtctatcaatgggcgcaccagacagtccggtgtgccaccggatactgtccggtgtctgttggagtggatcgttgtgctggagccgttgctctactggcacactggacagtccggtggcccaccggacagtttggtgaattatagcggagcggctctccagaaacctgaaggtgaagagtttgagtcgatcgccccttgtgcaccggacactgttcggtggcacaccaaacagtccggtgcgccagaccagggttctctttggtttcttttgttcctttctttttga

SEQ ID NO: 40507 - DNA, 384 bp, Zea mays
  Peptide Sequence Number=SeqID_82286
atggagtcttcggcgaggacaaggcttccactccactctatcggtattatttacccttcgccgtcactccgcaccattctccactttggtatcatcttcactcatatttatttgtaccattggggagaaagtgccaaaggttcagcacaaaccaataaaaagattaaagttagggttcaaaagaaaggagcaaaagaaaccaaagagaaccctggtctggcgcaccggactgtccggtgtgccaccaaacagtgtccggaagtttccaacaatccaccatgggccatacaggagaaaggagacctagtagaagaagagaacgccaacttcaaagacaaagagtctggcactaaagatgaagttgaggatgatgacaacgcttag

SEQ ID NO: 40508 - DNA, 924 bp, Zea mays
  Peptide Sequence Number=SeqID_82287
atggcgcctcctgttgacgtggctggtctgcgccctaggttgggcgatgtggaagctcctccgaagctgaggtcgagtctgtcttccgtggccgaggttgagtccgagcccccgggtcgggcgaggcggagatcaccggctgatgccggggcggagtccgagccctggggtcgggcgaagcggagttcgtcgtcttctggggctgagcccaagtccgagccctgggttgggcgaggcggagatcgccgtcttccgggacttagcccgagtccgagccctgggtcgggcggagttcgccgtcttccgagacttagcccgagtccgagccctgggtcgggcggagttcgccgtcttccgggacttagctcgagtccgagccctgggtcgggcggagttcgccgtcttccgggacttagcccgagtccgagccctgggtcgggcgaagcagagcttcctatggtgccttcgactgggcctgactgcctgtcagcctcactctgtcgagtggcaccgcagtcggagtggcgcaggcggcgctgtctttctgtcaggccggaggatcaaggcaggaaacggaagcatcctctaactcccccttcggaggacttcggcgactctgagttcttggaggagcggttctcctccgagggcgaggagcctccatcgtcggtccccctctcaccatcgttggagggctcggacaactcgataaggctatcagtgatgaagagagcctacgtccgatccatcgagcgggtaggattcgaggggtcagactcctcggaggaggactccgaggagggcggtggcggcgatgatgggagcgactacgatggcggcgacgagggaggcaacgacgtcaatggcggcgtaggggcaacgatgaagacatcggctacgacagtgacgatgagagcgacaagg

SEQ ID NO: 40509 - DNA, 1518 bp, Zea mays
  Peptide Sequence Number=SeqID_82288
atggcgcctcctgttgacgtggctggtctgcgccctaggttgggcgatgtggaagctcctccgaagctgaggtcgagtctgtcttccgtggccgaggttgagtccgagcccccgggtcgggcgaggcggagatcaccggctgatgccggggcggagtccgagccctggggtcgggcgaagcggagttcgtcgtcttctggggctgagcccaagtccgagccctgggttgggcgaggcggagatcgccgtcttccgggacttagcccgagtccgagccctgggtcgggcggagttcgccgtcttccgagacttagcccgagtccgagccctgggtcgggcggagttcgccgtcttccgggacttagctcgagtccgagccctgggtcgggcggagttcgccgtcttccgggacttagcccgagtccgagccctgggtcgggcgaagcagagcttcctatggtgccttcgactgggcctgactgcctgtcagcctcactctgtcgagtggcaccgcagtcggagtggcgcaggcggcgctgtctttctgtcaggccggaggatcaaggcaggaaacggaagcatcctctaactcccccttcggaggacttcggcgactctgagttcttggaggagcggttctcctccgagggcgaggagcctccatcgtcggtccccctctcaccatcgttggagggctcggacaactcgataaggctatcagtgatgaagagagcctacgtccgatccatcgagcgggtaggattcgaggggtcagactcctcggaggaggactccgaggagggcggtggcggcgatgatgggagcgactacgatggcggcgacgagggaggcaacgacgtcaatggcggcgtaggggcaacgatgaagacatcggctacgacagtgacgatgagagcgacaaggaactacgcaaggtcccgactaatctacgttggtgcccctacgcaaacggtagcccacgtgagggccaacactacaggaattcgactgattcccgtcggccagggccgcagccgcgcgggctcatttctcctcttcccatcgctgcccgaccgccgccctgctcaaccgccgcccaccgccgcccgatcctgcccctgcccgagcgccgccggcgaggccgcccccgcccgagccgccccgcccgagcccgccccgcctgagcgccgcccccacccgcgcctcccccgcccgagccgacccggctcaacgccgccgccctgcccgaccggcgccgtggccgagcaccgccgccgcttgagcgccgccgcccagcccgaggtcgccctgcccccgaggccaccttgcccgaggccgccccgccctagcgccgccgccgccccgcccgagcgtcgccgccgccgtcggcccgccccggagcgccgccgccgccgcccgagtgccaccacaagctcccgagctcctcgtaccccgagcgtcgtcgtccccagcccgtcgtcgtccaccgtccgctcgtgccccgacgggaatcagtaa

SEQ ID NO: 40510 - DNA, 304 bp, Zea mays
  Peptide Sequence Number=SeqID_82289
atggccacctaccccggcggtaaaaccggcccgtggcggcggagctcgctggacccgcctaggctcacctccctggtgcacaatttccccgactacgcaggccaacgcaatgaagagaagaatgcgaacacgagcatgggtaactcacctcgactggggctgtgtattaaccgggcgacgttgggagcggatttggccgcacaaagcaaagcgtccacgcgcggcgtcagtgaacgggcccgcaagccagccagtgggcggaagtcggcgactgcccggtgggactgcggtgtcggcgccgcgc

SEQ ID NO: 40511 - DNA, 399 bp, Zea mays
  Peptide Sequence Number=SeqID_82290
atggccacctaccccggcggtaaaaccggcccgtggcggcggagctcgctggacccgcctaggctcacctccctggtgcacaatttccccgactacgcaggccaacgcaatgaagagaagaatgcgaacacgagcatgggtaactcacctcgactggggctgtgtattaaccgggcgacgttgggagcggatttggccgcacaaagcaaagcgtccacgcgcggcgtcagtgaacgggcccgcaagccagccagtgggcggaagtcggcgactgcccggtgggactgcggtgtcggcgccgcgcgcgatgtggcacctcagcatttaatgtgccctgtccactccactggcaggcgatgtgccgcctcaacatttaatgtgtcctgtccactccactag

SEQ ID NO: 40512 - DNA, 171 bp, Zea mays
  Peptide Sequence Number=SeqID_82291
atggccttcgtggctgctgccttcgccaagaagccggagacaccgacgacggctgatgtcgcgcaggagaagcacgaggagcttgagcgatgcatcgacgagtgcgagagcggcagcgagttgttaaccgccgccaatatcacagatacgaacgtggacgagcggctgtaa

SEQ ID NO: 40513 - DNA, 363 bp, Zea mays
  Peptide Sequence Number=SeqID_82292
atggtggcgctccacagggagctcgcccgcctcgccgccaggtccgtcgcgcgtctgcctgctggggctgggctcggcgggagcggaaccgccgaggaggccgagatggtcgccgcgctcatggacgtcgcggccgccagcgccgccgccgtgttctcggccgtcgcgtccgtgtctgccgccgcgtcgtcgtgctcgaacaagaaggccccgacggccttcgtggctgctgccttcgccaagaagccggagacgccgacgacggccgatgtcgcgcaggagaagcacgaggagcttgagcgatgcatcgacgagtgcgagagcggcagcgaggtggtgttcaggagcattgttttggaatag

SEQ ID NO: 40514 - DNA, 174 bp, Zea mays
  Peptide Sequence Number=SeqID_82293
atggagctatttggcaaggtttgccagcatcagaacattgtcccattgcgtgcttactactactccaaggatgagaagctcttggtgtatgtcccactaggtagcctttgtgctgctttgcatggtaacaaagctgttggaaagaaccccattggactaggagacccagggtga

SEQ ID NO: 40515 - DNA, 141 bp, Zea mays
  Peptide Sequence Number=SeqID_82294
atggagctaattggcaaggtttgccagcatcagaacactgtcccattgcgtgcttactactactccaaggatgagaagctctttgtgtatgtcccactaggtagcctttgtgctgctttgcatgtgaatgcaaaagaataa

SEQ ID NO: 40516 - DNA, 309 bp, Zea mays
  Peptide Sequence Number=SeqID_82295
atgaacgtatgtgagctcactcttgctgtctcacacccccccacaggtcaagaacaggttggccatgaggaggtggtgcccggctgtcctgcttggctgagtagtggcgctgtccattctggtggccaccgtggaatgcgctgtggcttccgcatccctgggcccccctccttctccgctgcctcggaggctaccaccgtcacagcgcccaaatggatgcccgcgcccgcgtgtgtgctcctgaacctggacacgtccgctttctccctgctcgaccttgccttggcgagctcgggggtcatccgatga

SEQ ID NO: 40517 - DNA, 426 bp, Zea mays
  Peptide Sequence Number=SeqID_82296
atgggccttcgtggcagcaaccaaaacagaggaggtgtgcaggaggaggaggtggtgctggagggaaagatctcacaagtgtgtgaagaccacacagtctcgcgcactcgcaaacccagtgcacgctgcggttttcctcttcgcccaccttcttggagcggggaggttggccatgaggaggtggtgcccggctgccctgctgggctgcgtagtggcgctgtccgttctggtggccgccgtggaatgcgtcaatgcgctgtggcttatgacaagaaggcaatgctgattgatgggcagatgtggattctcttctccggatccatacactaccctaggagcacccctgatgtaactgcattttacaaaatctcttctccccccactattccctggagaggtttatggctgcggtcagctgtttcttga

SEQ ID NO: 40518 - DNA, 445 bp, Zea mays
  Peptide Sequence Number=SeqID_82297
atggctgacgccggcatcgatccgcaggtggtgcttaagcgcgaggacggtgggcgagggggcttggtggtgtgtggaggcatcagggccggggctagggctgccggtggagggcgtgtatctgagagagctgcaagggttcatagcgacaccgtcaccttcgtgtccacgccgaggaacgttgccaggttgagcgccatctcgccggagctttctgtgtgcctccgcgtcgtcgtgctggatctgccgccgcaggtggagggcctcctggttggcgcagagtcgaccgttgacctcccacctgagaaggtcgagctactcaaggaggcgttcgatgatctcgtcgcgccgttcgccagcttcgtcgtggagtcccccgcgggcgtgtgccgggccaggcgtacctccggcgtggtggcctcggcctcggtcgccagccccacag

SEQ ID NO: 40519 - DNA, 519 bp, Zea mays
  Peptide Sequence Number=SeqID_82298
atgcattgcgcccttccatcttccgagcccccggatggggagcgccttcgttgctttcgtcttgctgtcgttggaggagcgcaacttcgcggaagttggtacctttcagccatcgctcggcttcaaggattttcatcaggcagcccgactgcatccccttgccgatggtcacccaagacggtgaccaccagtttgatggtggggagaagcaagccgggctgcgacctctgccctgccctcagcttcaaggatcttcatcatccttgcaggggcagagggcgagctgagccggagctctacctcccgtatgggtcggtgggccacctcctccttcatcatttaggggagagggcgctcgccggcttagcggaaggggcggacttcgacaacgcggtgccgatcggccgcaagcgtcgtcagctccagcatgcctggttcgctggctcagctggctctggcgcagcttccggtgccacctcccaccgccgggcggagtgcggctatctgcccgccgtatag

SEQ ID NO: 40520 - DNA, 912 bp, Zea mays
  Peptide Sequence Number=SeqID_82299
atgcctggcttgctggctcagctggctctggcgcagcttccggtgccaccttccaccgctggggcggagtgtggctatctgcccgccgtacgagcggctgttgtgtcgtgtgcaccgggggaccacccaagacgtcgcacgccgctagggcggcgtttgtgttcttgggttgtcctgccctcgctccggcacgacgcctccgcgcggaggtcggtgctcgcccgtccgagaggacttgagtggggatctaccggtgggcaggtggctactgtcgtcggtgctgaggtggtggcagccggagaaggtttctccaccgacgagaccatcagcgccacccgcggatcgacctccggctctttggctttgatagcttgtcctcgcccctcgagtggggacgcgggcgagggccttgttgcagcagcgtctgccctgaggtcatcgctgctgctatttagccgcccggagcgaaggtcgttgtcgctgctgatggagcggccggcggcgagccaaccgaagtttgtcgtcccgcaggccctccgatgtggaggttgttcatacccgcgggagtggaaccggagttccgtttgtaatggcaccttgagtgccggtgtctgttcattgtggctgtcggggcctaaacatctagccgccgaggcccaaacatatcattgtcgtactataaagctgcgtttcctttcctcttgtttcgagtatcaggacttgttcgtcggtaacagaattgtttatccgagcgagagctacttttcacggaaggtgatgagtgaggattctgttatcgatatagtcgagaaggcacgaaaaatcattccgccagaaaggtttttgagcgttaagacttgctcggcagcagagtcgcttatccgagcgagagttacttatcgcggaaggtga

SEQ ID NO: 40521 - DNA, 360 bp, Zea mays
  Peptide Sequence Number=SeqID_82300
atgagaacgatccggttgaagagcccgaagaactcgcaggagaagccccctgagcagcagtcggttggtggaggcaagtgtcccttgacctacccctgtcctattcattctttaattcacctcccgcattacacatttatgcctaaggtggcaatgagattgatggttctggttatgactgtggtgctggttgtcagcattgcaaccactgctcaggagaagatgaagccgtggaaggagacttccaggagttccaagactacgacgagttctaggtgtgggttagcggcaacccccagtcggctgcctgtgaaggccgcgtttatctacgtttcttttccgcactttgatttattgtaa

SEQ ID NO: 40522 - DNA, 288 bp, Zea mays
  Peptide Sequence Number=SeqID_82301
atggagagtcatgatctccaggtggcaatgagattgatggttctggttatgactatggtgctgggtgtcagcattgcaaccactgctcaggagaagatgaagccgtggaaggagacttccaggagttccaagactacgacgagttctaggcgtgggttagcggcaacccccagtcggctgcctgtgaaggccgcgtttatctacgtttcttttccgcactttgattttgtaaagactatgtggatgtctcagacatatgatgtaatcgactattacttccctttttaa

SEQ ID NO: 40523 - DNA, 540 bp, Zea mays
  Peptide Sequence Number=SeqID_82302
atgggtcaagcaacccatccttctggctcctggtcagcagaaaagtcggtgtcgtggctcgagctgctgtcgccacctccgtcgtctaggtctcctccagcagctactccaggggctggggcatccagtggtggtgcagggggcgcctctaggggagcacgggggagcagctcctcacaaactctatctcctgttggagcgagaaagaggagccctgctgctcctgtcgtcgacgctcctgctcctcatgcaggcggtgatgcagcctctccaaatggctggactgactggccacaggacggcgaagcgaacgctccgcgagacgagagggttagtggtcctacagtcaacacgactttgataccacctatgtcacacccggttttagaaggcaaaccgaatgcgaaccatgtacgtgccaggatcagcaattcacgtacacagcagttacataacatggacatcatcacacagtgctcaaatagtattaaaaaagggaataatagtcgattacatcatatgtctgagacatccacatag

SEQ ID NO: 40524 - DNA, 549 bp, Zea mays
  Peptide Sequence Number=SeqID_82303
atggccggactgagcaaacggacgccaccgagagcatcacaagcatgcagaggcatgaaaacagtatacgaattggatggcgactcaccagaacgagctggccacgggagggctagttttcacggtgcggcggatggaattgggggaaacttggaattagagctcgtcggtgaaccactgggagcaatactggacgtcgagttcacctccgagcggtcccaactcgagcgggaccacaaggagtacaagagagacctccagagggtgtgtgctagggagctagaggcaacccggagggagaagaaggtggccagaagggaggaagctgtgactcagagggaggccctcacgatggagtaccaggccaaactgagtgctctggaccagactctggaagcccagcgggcccagctggtgaaggccatcgaaaggctgcagaaatggcagcaagagctcaagggcaaggccagcgacgccgccctcgccgaggagaaccttaaggagaaggagctgtccttggacaggcgggagacggacctcgccaggtga

SEQ ID NO: 40525 - DNA, 749 bp, Zea mays
  Peptide Sequence Number=SeqID_82304
cattcttgcgggagtgggaggcacttgaagctgagcaccagcacctcagtgactggcgcacccaactggaggagcgcaccaagacgaaatggcagcaagagctcgagggcaaggctagcgacgtcgccctcgccgaggaaaaccttaaggagaaggagctgtccttggacaggcgggagacggatctggctagggaagaaatgctcgtccggcgaagtgagttgctggccgagcatgagctcgaagctgaggaaaaggagaggaagctggaggagcaaatccaccagtttgatgcggtgcaggcggcgccgggtccccaggcaatggaggccaccagaaaggccctcgaagatctccaagcagaacatcgcgccgaggtccagcgcattaccgagtgggtcggcgaggcaagcacgacactggtgccactagggatgagccccatcccagtgtcggagccgccagtgtcgatctccgatgccctcccggtgctggactctaccgctgatcgcctccgacgcctggatcagatcctcggtgcccgcctggaggcagagggcagcaagctctgtcgagcggtggtggactacgtcctaacgtgcttccggagtcacgaccccgccatatccttggcgtcggtgatcgatggtccggtagccgccacagaagatgtcgtccgggagagtgtacaagatgtagtggagatggtggccgcgcgctttcagcgtgatcctgtcgacgccgagtag

SEQ ID NO: 40526 - DNA, 273 bp, Zea mays
  Peptide Sequence Number=SeqID_82305
atggcgcccgcgcccgccgccgcacagacacagccggccgctggcgtgttgccacaggaggcgcccgtgctgggcaaggcgcgcagcaagcggtcgcgcgtcgcgccatgcagctgggcctcccacgtgctcgtgctcccgccacctcctggctcgccggcgtccgcggccatctcgccgttcgagtccggcaccgcggcccccctgggtgacggcgctgaagacggcagtgtggccaaaggagacttattcgcacggcgggagattaattag

SEQ ID NO: 40527 - DNA, 267 bp, Zea mays
  Peptide Sequence Number=SeqID_82306
atggcgcccgcgcccgccgccgcacagacacagccggccgctggcgtgttgccacaggaggcgcccgtgctgggcaaggcgcgcagcaagcggtcgcgcgtcgcgccatgcagctgggcctcccacgtgctcgtgctcccgccacctcctggctcgccggcgtccgcggccatctcgccgttcgagtccggcaccgcggccccctgggtgacggcgctgaagacggcagtgtggccaaggagacttattcgcacggcgggagattaa

SEQ ID NO: 40528 - DNA, 978 bp, Zea mays
  Peptide Sequence Number=SeqID_82307
atgcccaggaaccaggtcatcggcagcgaatcgctgttgaacccaccggcggccgagttttcccccgcgggtcggccgatggaagactctctggtcattaggacatcctactgctcaaaggtggaagggttcccacatctgttgcgaagttgtgcgcttcacatggggatccgcaagaagccagaatatgtcaggaaggaatatctcgagaatggaatggagaagtgctctatggcagtctacctgggagaaagccgaagctacccaaaccacccttctttccaagtcactttcaccagacaccgcttcccagacacttgccaaaatgttgcccgaaaagccctccggcggctatgccagaactacagcagaaaggtcgttgaaacaccccttcgctactttccacccaacaacaaaaatacccctgcctggaggaaaagacttcaggctctatcaggaagagatcctaccgaggacgaccccaccatcgtctacatggccggatacctccatactctcgataaccaatatgatgacctttcctcccactgcacttacttaaactcccaggtggaaagcctggagcaacaagtcaagaaacttaaaagggaaaaggcgtccctccaagagagtctcgaaatagcagaaggcgaggaaaccaacactcgtgaagcctaccaaaccctgaagatggattatgacaagaagctaaagaagctcgcccccgcgaagaaaatccgaaagaagaccagaaaccaaggatgccagatggagcagaaggaggaagcccctccagccctacctcctaccaggatagaaaactcgtccgacactgaggctatgtccctagctagccttgatgacctcctcaaggaatttggggacactttagaaaaggagttcgggagtaccttagatagcacccgcgtgtacagatggcttcggataaaaccacgcctaccgcctccgggattgtga

SEQ ID NO: 40529 - DNA, 900 bp, Zea mays
  Peptide Sequence Number=SeqID_82308
atggaagactctctggtcattaggacatcctactgctcaaaggtggaagggttcccacatctgttgcgaagttgtgcgcttcacatggggatccgcaagaagccagaatatgtcaggaaggaatatctcgagaatggaatggagaagtgctctatggcagtctacctgggagaaagccgaagctacccaaaccacccttctttccaagtcactttcaccagacaccgcttcccagacacttgccaaaatgttgcccgaaaagccctccggcggctatgccagaactacagcagaaaggtcgttgaaacaccccttcgctactttccacccaacaacaaaaatacccctgcctggaggaaaagacttcaggctctatcaggaagagatcctaccgaggacgaccccaccatcgtctacatggccggatacctccatactctcgataaccaatatgatgacctttcctcccactgcacttacttaaactcccaggtggaaagcctggagcaacaagtcaagaaacttaaaagggaaaaggcgtccctccaagagagtctcgaaatagcagaaggcgaggaaaccaacactcgtgaagcctaccaaaccctgaagatggattatgacaagaagctaaagaagctcgcccccgcgaagaaaatccgaaagaagaccagaaaccaaggatgccagatggagcagaaggaggaagcccctccagccctacctcctaccaggatagaaaactcgtccgacactgaggctatgtccctagctagccttgatgacctcctcaaggaatttggggacactttagaaaaggagttcgggagtaccttagatagcacccgcgtgtacagatggcttcggataaaaccacgcctaccgcctccgggattgtga

SEQ ID NO: 40530 - DNA, 474 bp, Zea mays
  Peptide Sequence Number=SeqID_82309
atgaagaagaagagcaagagagatttagagatgaagcacaaaaccgcagctctcaagctcactcaaagatttctctccaaagatttgaaatgggagaggcaagagatgtgtgagagagagggaggtgtttcttgggcctggcaacctgtctgccagtctgactggcagactgacgcgcagactgaccgcagacgggtcaaagttgaacaacaccagttgaaccgcccagggggggcggttgaaccgcccctgacagctcctggcgacctgtttgccagtctgactggcagactgcagatcagaggtcagaggggtcagagaccagctgaactgcccctcaggactagttcaaccggtcttgactattcagctcagctgcagctgaagaagctcaactcagctgaagtcaagttcagctggaaagctcagctgcagttgaagaagttcagctgcttttcagcaagaacactctag

SEQ ID NO: 40531 - DNA, 447 bp, Zea mays
  Peptide Sequence Number=SeqID_82310
atggagaggcaagagatgtgtgagagagaaggaggttttcttggcttagaaatagagttcatatcgcactcacacctgtgtgggccggttgaacccgccccctggcaggcctggcaacctgtctgccagtctgactggcagactgacgcgcagactgaccgcagacgggtcaaagttgaacaacaccagttgaaccgcccagggggggcggttgaaccgcccctgacagctcctggcgacctgtttgccagtctgactggcagactgcagatcagaggtcagaggggtcagagaccagctgaactgcccctcaggactagttcaaccggtcttgactattcagctcagctgcagctgaagaagctcaactcagctgaagtcaagttcagctggaaagctcagctgcagttgaagaagttcagctgcttttcagcaagaacactctag

SEQ ID NO: 40532 - DNA, 432 bp, Zea mays
  Peptide Sequence Number=SeqID_82311
atgaagcacaaaaaccgcagctctcaagctcactcaaagatttctctccaaagatttgaaatgggagaggcaagagatgtgtgtgagagagagggaggtgtttcttgggttggaaatggagttcaaaatcgtgctcttggctatggggagagagggcggttgagcctccccctagggcggttgagcctcccctggcaggcctggcagcctgtctgccagtctgactggcagactgacgcgcagactgaccgcagactggtcaaagttgaccaaaaccagttgaaccgcccagggggggcggttgaaccgcccctgacagctcctggcgacctgtttgctagtctgactggcagactgcagaacagaggtcagaggggtcagagaccagctgaactgcccctcaggaccagttcaactggtcttgaccagtga

SEQ ID NO: 40533 - DNA, 453 bp, Zea mays
  Peptide Sequence Number=SeqID_82312
atggtgagagaacgaagaacacaaacaaacacaatgagcaagaacacaagagacacaagatttatcccgaggttcggtcacaccaccaaggtgccctacttcctcgttgaggcgcccacaaagagccgggtctctttcaaccctaatcctccctttgccgaccacaaagggcggttgaacctccccctagggcggttgagcctcccctggcaggcctggcagcctgtctgccagtctgactggcagactgacgcgcagactgaccgcagactggtcaaagttgaccaaaaccagttgaaccgcccagggggggcggttgaaccgcccctgacagctcctggcgacctgtttgccagtctgactggcagactgcagatcagaggtcagaggggtcagagaccagctgaactgcccctcaggaccagttcaactggtcttgaccagagagtttag

SEQ ID NO: 40534 - DNA, 420 bp, Zea mays
  Peptide Sequence Number=SeqID_82313
atgagcaagaacacaagagacacaagatttatcccgaggttcggtcacaccaccaaggtgccctacttcctcgttgaggcgcccacaaagagccgggtctctttcaaccctaatcctccctttgccgaccacaaagggcggttgaacctccccctagggcggttgagcctcccctggcaggcctggcagcctgtctgccagtctgactggcagactgacgcgcagactgaccgcagactggtcaaagttgaccaaaaccagttgaaccgcccagggggggcggttgaaccgcccctgacagctcctggcgacctgtttgccagtctgactggcagactgcagatcagaggtcagaggggtcagagaccagctgaactgcccctcaggaccagttcaactggtcttgaccagagagtttag

SEQ ID NO: 40535 - DNA, 420 bp, Zea mays
  Peptide Sequence Number=SeqID_82314
atgaacaagaacacaagagacacaagatttatcccgaggttcggtcacaccaccaaggtgccctacttcctcgttgaggcgcccacaaagagccgggtctctttcaaccctaatcctccctttgccgaccacaaagggcggttgaacctccccctagggcggttgagcctcccctggcaggcctggcagcctgtctgccagtctgactggcagactgacgcgcagactgaccgcagactggtcaaagttgaccaaaaccagttgaaccgcccagggggggcggttgaaccgcccctgacagctcctggcgacctgtttgccagtctgactggcagactgcagatcagaggtcagaggggtcagagaccagctgaactgcccctcaggaccagttcaactggtcttgaccagagagtttag

SEQ ID NO: 40536 - DNA, 453 bp, Zea mays
  Peptide Sequence Number=SeqID_82315
atgaacaagaacacaagagacacaagatttatcccgaggttcggtcacaccaccaaggtgccctacttcctcgttgaggcgcccacaaagagccgggtctctttcaaccctaatcctccctttgccgaccacaaagggcggttgaacctccccctagggcggttgagcctcccctggcaggcctggcagcctgtctgccagtctgactggcagactgacgcgcagactgaccgcagactggtcaaagttgaccaaaaccagttgaaccgcccagggggggcggttgaaccgcccctgacagctcctggcgacctgtttgccagtctgagcgtcagactgccagtcagactggcaaaaggggctgagaggcctgccaggggaggctcaaccgccctagggggagctcagctgcagctaaaggagctcagctcagctgaagtccagctcagctga

SEQ ID NO: 40537 - DNA, 177 bp, Zea mays
  Peptide Sequence Number=SeqID_82316
atgggtgcgtcgtcttcacaccgtgggagagggctcccctgccgcttcaggaggggacgcgagcatgcagggttgcctcgagtcacggcaccggttccgcagtcgagaagacgcggcattggtgcgagcggcagtgcggtttccttgcacgcagtaaccgttgcgccggttgcatga

SEQ ID NO: 40538 - DNA, 1293 bp, Zea mays
  Peptide Sequence Number=SeqID_82317
atgcaggtggtgtgcaaccgcaccgcgatggcacaccccttcggcttcgtcgcatccggcatggaggcccaggcccacatgtcatgtaaccggcgcgccggttactacgtgcaagaaaccacaccgccacttgcgccaatgccgcgccttctcgactgtggaaccggtgccgcgactcgaggcagccctgcgcgcgacccaacggtgccaattgagtgcaacgatcacgggctcgcatcccctcctgaagcagcaggggagccctctcccacggcgcgaagacgacacgcccgtgtcccgttcctcgaacgactcgcgcacgcggccgtcccgcgaatcgcccgtcccgtcgcattaactcctcggcagggcaagcgacacctttggcaggcgaagcgggcaactttttacctccaccatgatgaccacgtcaaaaaagggaccgggaaaggggatatttcgaaagggatccttctccgcgaaggaagcgggcccccgagccctcctactgatcaggggttcgaaggctggcccctcggaagggttcgacagctgccccagagcactcgagcttcgcacccactactgatcaggggttcgaaggctggcccttggaagggttcgacagcagccccagagcacgcagagcgagggatgactctaggtacgtccgttacatggccgaggctcgagctacgctcccgaggtaccctaggacatttccgagaccagcaggagcaattttgtaatggaatcccatcagagggaggcattgagccctcggatcctatcgaatgggtccgggtccggcaaatcacctgcagtcacttcaccctttcactgaccgacctgacaggaaaacagcgccgctcgccccgctccgactgctgtgccacccaccagggtgaggttggcaacagtcaagttcagcctcgggcgcaacaggaagctccgcctcgctcgaccttaggcctcggcctcggaaggaggtctccgcctcgcccaaccctagggctcggcctcaacctcggcctcggaaggaggtctccgcctcgcccgaccctagggctcagcctcaaccccggcctcggaaggaatcgcgtcctcgcccgaccccagcctcggcctcaggagaagctacgggggaacaagaccggcgtcccatctggcacgccccgggctcaggcacttcttcgacggccacgttaccgcgtacacagggctatagcacctctccaacagccatgttggcatgtacacagggctcaggcacctctctgccagacacattag

SEQ ID NO: 40539 - DNA, 354 bp, Zea mays
  Peptide Sequence Number=SeqID_82318
atgacactgtacgggagagggctgaccgagcattgccgcaggtcagttgctgcgcaggttccgacgtccgggcctgcgcaagcaacccccgctgatgttgatactagtattttggcggctgcaaatgcaacaccctttaatggaaatgtgtctgagggttctgaaactgagtcgtggtcctcagacggggatgattttgggagcccgcttttgtggattggggagtcttctgaggaagatttagactactttgttgcgttggatttggccgcatcggagtccccaccgcaatttgatgcgcgcgaagagtctgctcccccggccatggcgatagccgaagaccaccacaggtga

SEQ ID NO: 40540 - DNA, 1251 bp, Zea mays
  Peptide Sequence Number=SeqID_82319
atggagaaagatcgccaagatgggccgcggaagtgccaggcgtacgccaggttggcggacccgaggcgcgaggcgaaggtggcgtggcccagtgcgaagcctgccgcctcgggcgccagcatgcctccgcccgccatgcccacaagtgagcgtaggcctccctcgccaccgcatgctactgagacagcggtttcgggcaccgaagtctccatggagctctccgtggacgactaccttgtgggtggggtcgctatgttcgacgcccatacgaggctggcacctgctgcggctgccttcgccaaacacattgcttcgagggcgctgagcttggagttttctaccgagaggcggcgacttgaggggaggatcgagcgcctccggacgcaacatacagaggcggtcagggacaagtcggcggcggagaacaagtgccgcaacctgcttgagaagctgacggagagggagggcacggaaaaggcccgcgcggaggcccaagctgcccacacggaggctgacgctacgcgcgctgaggccaaccttgccctcaagtgcgccgccgacgcggagtcggggctgaagagcttgtgcagctacaccgagaagacggaggcctccacccgcgctggggttgaacgggcgcacacgttgttcgtggatgtgtaccacgagctcggcgcgcgaaccaccccttttgacatgtctggcgaggaggtgggcattcgctttctcgggtggctgaaggaggagctagagtcgctcccatctatcgcgactggcctcatgtcctacgcctcgctcgttacctgcgagggggcggcgaatgccttgtcccgtgaggggtgtaggcatttcgaagtcttcgatcgggtaactgtggacttcgatcgtggaatctttcaggtcggagacgaggtgctaaagcggtctgctagggcactttacgataggatgtggggccctcatggccgcgacactgtccgggagagggatgaccgagcattggcgcagatgatgaatgacaaagaagtcgaggactttggtggccttgaaagctcgctgacccggacagatggcgtggagacggggctgaaggttccgacgtccgggcctgcgcaagcaacccccacagatgttgatactagtattttggcggctgcaaatgcaacgccctttaatgtaaatgtgtctgagggttctgaaactgagtcgtggtcctcggacggggatgattttgggagcccgctttcatag

SEQ ID NO: 40541 - DNA, 169 bp, Zea mays
  Peptide Sequence Number=SeqID_82320
atggcgttctctccctttctgcccgactccggcgaccccggagccaccctagctcgtgccagcctcaactctggtgacctcaccgccgtggagaagagtagcaccgcctacaacgagcagtccgaggttcctgattgtgttgttggagacctccctgagcaacaacctg

SEQ ID NO: 40542 - DNA, 870 bp, Zea mays
  Peptide Sequence Number=SeqID_82321
atggaccagcgcgtgcgcactcgcgcacgtcaccgggtttctcggccacgacgccggccctcgcgtctagctcccctttttagagccccgccagtgccccgcacacactcgcctcatttcacacaccctcgccctctctcgcactttgccctcgccgctagacgccgtcggagacccgcgctcacgttcccgaccgtccagctcgccggagaccgcgccaagcctccccaagctccgccccaaggtgagacacccgttcccgtgcccaatttcccttactgcgccctgtgttcgtccaatttcgccttcgccggtgctcgaccgcggcagtccaccgcgctcgcgcggtggctggccgatttagcccggtctagttccccggtgttagtccctaaggtgcatctgcctctgctgaagccagccaaggccttagcgcgccttaagtcccctccccgtggccggagtcgctcaccgaagttactccggcccacccgagaccttctcaccgccgctctttcctctctacccgtggattcatggcctttccccgccatcgagttcgctgtggcaccctcttcccctctgcccaactccggcgaccccggagccacgctagctcgtgcccgcctcaactccggtgacctcaccgtcacagagaggaatgatacaagtgatagtgatagggacgacgacaagaaggggaagaaaaggatggagaagaagaaatattacaagaagggtggtaaagcacacatgggatgggaatgggactccgacgagagctccatcgactcctctccgacgaggacgctgccaacatcgccatcaacaagggacttctcttcccaaacgtcagccacaaatgcctaa

SEQ ID NO: 40543 - DNA, 411 bp, Zea mays
  Peptide Sequence Number=SeqID_82322
atgccgacgccgactttcaaccactcggcgctgcctctaaaacgccgaccacatgttcaatcgctcggcattgcttctaaaatgccgacgccgactttcaaccactcggcgctgcctctaaaacgccgaccacatgttcaatcgcttggcattacttctaaaatgccgacgccgactttcaaccactcggcgctgtctctaaaacgccgaccatgtgttcaatcgctcggcattgcttctaaaatgccgacgccgacattgaaccactcggcgctgtctctgaacaccgaccatgtgttcaatcgcttggcattgcttctaaaatgccgacgccgacattcaatcactcggcgctgcctctacaacgccgaccacgtgttcacacgcccagcattacttctaaaatgctga

SEQ ID NO: 40544 - DNA, 528 bp, Zea mays
  Peptide Sequence Number=SeqID_82323
atgtgccacctcatcactcggccattttcctcaaagaaacttgaagaagctggctatcactcggcgttgcctctaaaacgccgaccatgggttcaatcgctcggtgttacttctaaaatgccgacgccgactttcaaccactcggcgctgcctctaaaacgccgaccacatgttcaatcgctcggcattgcttctaaaatgccgacgccgactttcaaccactcggcgctgcctctaaaacgccgaccacatgttcaatcgcttggcattacttctaaaatgccgacgccgactttcaaccactcggcgctgtctctaaaacgccgaccatgtgttcaatcgctcggcattgcttctaaaatgccgacgccgacattgaaccactcggcgctgtctctgaacaccgaccatgtgttcaatcgcttggcattgcttctaaaatgccgacgccgacattcaatcactcggcgctgcctctacaacgccgaccacgtgttcacacgcccagcattacttctaaaatgctga

SEQ ID NO: 40545 - DNA, 1119 bp, Zea mays
  Peptide Sequence Number=SeqID_82324
atgaccccactgtgcagcttgaggccactatgcggcaacttacttgttaacttgagagatcctcggagaccaatttgcaaggttggatactttgggttgtcaaggatcaagcgcaacactctggtttctggtggtgtctgcggcactcttccatggatggcaccaaagctactaaatggcagcaacaacaaagtctctgagaaagcaagtttttttccgaccatactcctgatagctctttgcatatggaaccctgacaggctaatacgtaatgagtatttggttttacacatgcaggtggatgtgttctcttttgggatagttttatgggagatcttgactggtgaggaaccgttaaggtgctttatctataacttttgttctgttctttttcttattactcacttatttctcaacattgcagtttatgtcattaaagaatttagtgttagaatacagatctgtatgtatgtaccaatgtgtcaaagatccaacaatcctgacagtctggcatcttccttcgtgcagatggttgaacttgggtacaaatctatggcacactttttaattgcgacacatcgagcatcatcagataactcagaggattcaagcccagctggcaaagagaagtcgttgtctactaaatctgaaagctcgtgcatttccgatcatgatggcccggatgccaatgagaggcccgaggatggtgaaacgagcagcaaagctaaggtgaagaaagcaacccgccgcaaagggaagaagagttctgacggcgacaaagaagacagcagaagcgagtccgtggtgacatctgagtgccaggatggccatcaagccaacacggaggctgggtgtgtcactcaatcgtccaagtcagtgtcaaggaagaggaaaggctcggtcccttttgcgatgaagttgtggcgctttcacttgcaagcagttcatggtatgctagcgaagatgtttagtttcagcagagaatgtatccttattgaggagaacaagggcctcctctctacatcctccttcgataggcctcgtgccagaagtcacgttgcagtgaattttttcatccccaatatgatgcagaacaccatcgccactcactgttactga

SEQ ID NO: 40546 - DNA, 696 bp, Zea mays
  Peptide Sequence Number=SeqID_82325
atggcgtacggcgaccgcgtcatcaccttcgaggactccgagaaggagagcgagtacggctatgtccgcaaggacatgaagcattggcccctcatagctcccctgccatcctacgggagaggaagggacgagcctggcgcaaggtacagcaatttcattggaggatccaatctcactgacgtcatcatcacagagtcttcctcgcgtgtcaagatcgaggactgctacatcgtctccggcgacgactgcgtggccgtgaagagcgggtgggatgagtacggcatcaggttcaacatgccgagccagcacatcgtcatccagaggctgaccagcgtctcccccacgagcgccatgatcgcgctgagcagcgagatgtcgggcggcatccgcgacgtgcgtgccaaggacagtgtggccatcaacacggagtcggccatcagggtcaagacgcttggagcaattgctggtgttctgtcgaggaatgagctcgtcgctgcagctctcttcactcttgcaatcaatcacaaacaggtggatgtgttctcttttgggatagttttatgggagatcttgactggtgaggaaccgtatgcaaatatgcattgtggtgctatcatagcattgatagaagtgattacaagtcaggcgaccagctggtcgtgctataggaccgaccaggcgcctaatcatgattag

SEQ ID NO: 40547 - DNA, 672 bp, Zea mays
  Peptide Sequence Number=SeqID_82326
atgggtctaagcctgaaaaattgtgctaaacttaagaataggaaaagagctagatataagaaggtgattcaccggcatatggacttccgaatgcttcactctaagatcaagagtggcgcaatctctggcaccaaggagcttttgagagatatacttattttcatcaataatgtaataaccttctatctgaagactacattagagcacatggatgtggttgagcttcatgactttgcacgcaaaaatgtgaagcagagtgcaagcttgttcttgaaaagccatcgagagaccaaaacagctggtgcccctgtaatgaagaagaatgctcgatccctgcatttttcgagaacaagcttgcactctagggatgcaagggcaatcaaggtttcttcaagggatgctgctgccaaggaaggtgatggcaagagaccttgcagtgatgagctggctaatcaaaatactacaaagacaaatgagccagccaagaagaggggtgtgggtcggcctccaaagagcgagcagaggattgctggggcacaggaaaatagccccatcaaaggcaggaaaagtagcactggggcacaggtagatagccccagcaaaggcaggaagaggagtgcggaagcacatgatgatagctccagcaaagggggcaagaggagccggcggtga

SEQ ID NO: 40548 - DNA, 1026 bp, Zea mays
  Peptide Sequence Number=SeqID_82327
atggcgaccaaccagcagccggtggatgggatcgctgcccgctcccgccgtcgttgccccattggtggaggcccgaccaacaccggcaaccggcggatgggatcgccacacctcccctcgccgtcgttgccccgacgagttctgtggcgaaggggctggttgaaggcaaatcaatttggagggtgcgtcaggcgggcagcacgagggggtgggatcccgtttgagaagtccaagaggcagcacatcatgtggaatctcgcactggtgaactccatcgtcgctaaggccaggcttaatcccaccggcaccatccttgagatcgggccaagcgtggaaacctcaccaagcgcctcctcgatgcggtgctacatggttggtcaatttgatgtgctgaggaaaagagctagatataagaaggtgattcaccggcatatggacttccgaatgcttcactctaagatcaagagtggcgcaatctctggcaccaaggagcttttgagagatatacttattttcatcaataatgtaataaccttctatctgaagactacattagagcacatggatgtggttgagcttcatgactttgcacgcaaaaatgtgaagcagagtgcaagcttgttcttgaaaagccatcgagagaccaaaacagctggtgcccctgtaatgaagaagaatgctcgatccctgcatttttcgagaacaagcttgcactctagggatgcaagggcaatcaaggtttcttcaagggatgctgctgccaaggaaggtgatggcaagagaccttgcagtgatgagctggctaatcaaaatactacaaagacaaatgagccagccaagaagaggggtgtgggtcggcctccaaagagcgagcagaggattgctggggcacaggaaaatagccccatcaaaggcaggaaaagtagcactggggcacaggtagatagccccagcaaaggcaggaagaggagtgcggaagcacatgatgatagctccagcaaagggggcaagaggagccggcggtga

SEQ ID NO: 40549 - DNA, 633 bp, Zea mays
  Peptide Sequence Number=SeqID_82328
atggatcaaatggttgtttgttttacaaagaagatcaaggactggagcaacgtagttgttgcctatgaaccagtttgggctattggaactggtaaagttgccaccgtagctcaggctcaggaagtgcacgcctctctgagggattggctaaagaccaacgtcagccctgaggttgctgaatctactaggatcttctacggaggctctgtaactgccgcgaactgcaaagagctagcagcacagcctgatgtcgatggttttcttgtcggtggagcttctttgaagatggggctactggtgttgtttaagtattttcgtttctgtggaagaaaatctggatgttgcggtgccctggtaaatggtacacttaacgtggatgatgcggaaaatgaagtcgaagaggtattgacagcaagtttaatattagagtcaactgctgactacaaggatccttgcagtcgattccttgaccattgctgccctcgtgaaattaccagaacttcgtaccccagaatcgtgatcgtagctgatagacaaaactttcccagctttaacacagtgctggattgccactctcgcagagaagtaatcaagcaggatgcaaagattgttcgaaaggaactttgtgattga

SEQ ID NO: 40550 - DNA, 720 bp, Zea mays
  Peptide Sequence Number=SeqID_82329
atggatcaaatggttgtttgttttacaaagaagatcaaggactggagcaacgtagttgttgcctatgaaccagtttgggctattggaactggtaaagttgccaccgtagctcaggctcaggaagtgcacgcctctctgagggattggctaaagaccaacgtcagccctgaggttgctgaatctactaggatcttctacggaggctctgtaactgccgcgaactgcaaagagctagcagcacagcctgatgtcgatggttttcttgtcggtggagcttctttgaagatggggctactggtgttgtttaagtattttcgtttctgtggaagaaaatctggatgttgcggtgccctggtaaatggtacacttaacgtggatgatgcggaaaatgaagtcgaagaggtattgacagcaagtttaatattagagtcaactgctgactacaaggatccttgcagtcgattccttgaccattgctgccctcgtgaaattaccagaacttcgtaccccagaatcgtgatcgtagctgatagacaaaactttcccagctttaacacagtgctggattgccactctcgcagagaagtaatcaagcaggatgcaaagattgttcgaaggaactttgtgattgatctgttaagttatgaggacaattcgtgtcgatatgccatccctgcaaacatacaacagagacttatcgatatcgctaaaaaggattag

SEQ ID NO: 40551 - DNA, 513 bp, Zea mays
  Peptide Sequence Number=SeqID_82330
atggcgcagtcgaccgttggcagcctgagagccgttggcacaccggacatgtccggtgcacaccggacagtccggtgcccccttctagccgttggctcggccacgtgtcccgcgcagatcgcgcggctgaccgttggccctaccgaccgttggctcaccggacagtccggtgcacatcggacagtccggataacccatgagctaggccttaatgcaaaagacaacctctatccacaagatctgagcaggactaagcatttttgtaaatcatattttgatacttcaccagaagtatctataaagtgcggagaatcaaaggaacaacacgttcccgacgatctatggtggtatagttcaattaaagggatcaaggagcttgaggagaacttacggatgcttggacaaatgattgaggagcttgaactaacctggaacaagctggccgcggtgaggtgttcttgcggtgtattcgaaccgatttgggggaagttagaaattggagttcctcagtga

SEQ ID NO: 40552 - DNA, 177 bp, Zea mays
  Peptide Sequence Number=SeqID_82331
atgaacaggtccgtgccacctgagagcacaccaccccttttaggcggtcctttgccaggagggataacccctgagctaggccttaatgcaaaagacaacctctatccacaagatctgagcagggctaagcatttttgtaaatcagattttgatacttcaccagaagtatctataaag

SEQ ID NO: 40553 - DNA, 399 bp, Zea mays
  Peptide Sequence Number=SeqID_82332
atgaccaacgtcctcggcggtaccgccccgccgtggtgtctcatcggcggcgctgtgcggcatttatggccggcgctgtgcagctcaccggcgccgcgaagctccgccgctccccttccctcacgcgcctataaaagggccgccccgagctcctccttccccgcaccggcctcggccatccctctcctccctcgtccgagctcaattcgtggaagagccgccgccatcgtcttcctccccggggaagcagggacctttgatccggaacccgtagccccggaagaagggccagagcccgaacttccggaagtagatcttctgtgccaggaaagcttcgacgaaggcaagtccatccttcccttgatgcataaattacctattctctctaccactgcctag

SEQ ID NO: 40554 - DNA, 348 bp, Zea mays
  Peptide Sequence Number=SeqID_82333
atgaccaacgtcctcggcggtaccgccccgccgtggtgtctcatcggcggcgctgtgcggcatttatggccggcgctgtgcagctcaccggcgccgcgaagctccgccgctccccttccctcacgcgcctataaaagggccgccccgagctcctccttccccgcaccggcctcggccatccctctcctccctcgtccgagctcaattcgtggaagagccgccgccatcgtcttcctccccgtacaccacttccccaccccgattactcgcccaaagctcaccgacggcaaccccgccgcgaagctccgccgcctccccacggacaaccccctccccgacctcctctga

SEQ ID NO: 40555 - DNA, 1023 bp, Zea mays
  Peptide Sequence Number=SeqID_82334
atgcgtcggagcatcacatgcgtatcgtcgaaaaggtgtgatgctcttgctgaatttagcaaatgggttttatccattggagattgtactattcctattgagaagatggatgacgaggccgagccttcgtggatcatgatccctcccgatctattgattcatgatgacggtgacaagatcctcgcacttataactgaagtgtacccaaattttattgcaaatcacagaaactatgattacctagctgcgcgggctatcatttgtcctaataattcaactgttgatgacatcaacgagcgtattgttttgatggtacctggcagtggcgtcgagtgcattagttgtgacacaatttcaaaatcagcagaacacattccagattttgatgtgctttacccaaccgaattcctcaattccataaatgcacccaattttccttaccacagacttgcgcttaaagagggtgcgatggtgatgatgcttcgcaatctgaaccaaactatgggcctctttaatgggacaaggctgcttatttcccaactaggtcagcgtgttctgcgatgcataatactcacaggatccaggattggcgatgagatggcagaggttctgattggtagccttattattgggaattgcagtgaccggttgtgtatccgtgtctcccgtatgtgggaattttatgatcctcaggatgagtcgaagctcctccacgctgatatggtcctcatcgatgaggagggtggcagtgctcatgctcaaatataccctccactcgctgtcgttttcaagcccatgataaaggagggcaatgtctacagagtctcctacgttcagatcaagaaagcaaataggatgtacaagcatgttgacaacgatatcatgattggtttcacaaaatggatgacagtcgaggcgcttattgaagtgccaccagcttttccagagcttgtttactccctcactccctttgaccagcttacaacccttgtggacattagagagtatttcataggtacatag

SEQ ID NO: 40556 - DNA, 1077 bp, Zea mays
  Peptide Sequence Number=SeqID_82335
atggtgcatcaacaacatatagtatttagggtttttatacgtacgggaattccaaaccgaatcccgctagaactttggaaaaggtcaaggtttagcgagggaaaaagaaaaggaaaaggtaacgcccgaattttggcgagtaaagaaaagaaaaaaaattcaactgcaaaattcggggcgttacagatcggtttcacaaaatggacgacaatcgaggcgcttattgaagtgccaccggcttttccagagattgtttactccctcactccctttgaccagcttacaacccttgtggacattagggagtatttcatagatgtcattggcgcggtcaccatgatctcagatgtcgcaaccattcgtacaaagatgcgccagactcaaacagcaaagagatccgtcactatacaaaatgagagctgtactccccttgaggttgtgctgtggggtgagcaggcaacctccttcccggctgatcagattagtattgccggccaggactcactccagattattatctttgttggtactcttgctagatcctatgctggttccagaggcaacaagccttgcagccagaaagttgagtggttggtaacagttaccgttcttaagattgatcaactatggtggtacaggttgctcatcacagcaggagatgagacaggcgagactgatttcatagtatttggacgtatggcacaacgcattgttaagaaaccacttgacatcttgatcgcggataatccacccggatttattcctgatgaaataactaagctgatggaaaaggtgtacacattcaacgttaacacggttgtcgccgagattggtgatggaggtcaggttccaatttcacccagtggatcccaaccttcatcaatttcgtctgcgcgggctgcatccaagtctacatcagcagactctgtcccaactggaggtatctcttctcagacaccacagagcaccaaaaactacggcaaggataagacttggctaaagtttgcaacactcgatctccagatcattactttgcaacctaatgtgcccttttgccgatatacgcagttggtgtga

SEQ ID NO: 40557 - DNA, 708 bp, Zea mays
  Peptide Sequence Number=SeqID_82336
atggagatggccaccatcaccgtcgacatggaaactagagttgtccctccacttgccgcatggatcctctctgcctttagttcctcacctcttctctctctttgcagtggtaggtacatgaacggaagaacacaagacgatcactatcaaggtctcaaaggtctcgatcccactgcaatgctcttgaacaccgaagctcctgacttgtacataaggcagaatcctgttccaaatgcctacaccttagcaatcaacggcaaaaaaccattcattgtcgttcacacaagccttgtggagctgcttactccaagggaattgcagactgttttggctcatgagctgggtcacctcaagtgcgatcatggtgtttggctcacttttgccaatatactcacaatgggagcatacactgtccctggtttcgacatggttgctggctttttggaagagcaactatatagatggctacgagctgcagagctgacttgtgacagggcagctcttgtggtgcaagacccgaagtgtccaaaatggtttaatgtcagtatgttttgtttcgtgcttggtgcagagatggagaaccagagagcgctcaagggcatcatccccgccaagaggatgttgttccgtgccatggccgccacatcggtggcaactgacgagatcgcggcagcaggaaagggtcgatccaatcaggctaatagatga

SEQ ID NO: 40558 - DNA, 312 bp, Zea mays
  Peptide Sequence Number=SeqID_82337
atgggagcatacactgtccctggtttcgacatggttgctggctttttggaagagcaactatatagatggctacgagctgcagagctgacttgtgacagggcagctcttgtggtgcaagacccgaagtgtccaaaatggtttaatgtcagtatgttttgtttcgtgcttggtgcagagatggagaaccagagagcgctcaagggcatcatccccgccaagaggatgttgttccgtgccatggccgccacatcggtggcaactgacgagatcgcggcagcaggaaagggtcgatccaatcaggctaatagatga

SEQ ID NO: 40559 - DNA, 453 bp, Zea mays
  Peptide Sequence Number=SeqID_82338
atgggcgacggcggcctcacctgctcgagcttggatcagagggtgtgccgcaccatggctggaatagaggggaggacgggcgccgtgcacagggatggatggcgggcgcgctggtctggagatgggacctcgctggattttttttttgggcaggggagcggggaaaacagggagctcggccatggcgctgctgggggatgggtgccgctggagaggggacccggcgtagggagctcggcgtccgagcagaggggacctgcagaccgggcttgcagagctcaactgggtgcggcgttgaggagcagcggctggagcagaagggaaggcgctcaaggagaggagccatggacggccctggagctgaagcgtcgcgccatgggaggaagagctcctgctggctcgctgcatcgagggggcgagtggagggagacgcagggagcgtgcgtcggctga

SEQ ID NO: 40560 - DNA, 792 bp, Zea mays
  Peptide Sequence Number=SeqID_82339
atggattccttgaacatcataaacgccggaaaaacagcgaggacaacggggttctcaccgagggtcgacggcatcacggacggggctgcgcacaacacattatttctcacgggtattccgtcgaacaaccaaggggcattgaagagaacagcaagggcgctcagctatgggatggaagcaggggcgccatggaggttgctgccgctgcttggtgttttggagggtgggctgctgtgcgccatggaagttgcaaaggggaactcgacggggtggctgggacagcaggcatggtgttgtgctgcgcgttgctggctgctgaccggaaagcagggcatcggccatgggcgacggcggcctcacctgctcgagcttagatcagagggtgtgccgcaccatggctggaatagaggggaggacgggcaccgtgcacagggatggatggcgggcgcgctggtctggagatgggacctcgctggattttttttttgggcagggagcggggaaaacagggagctcggccatggcgctgctgggggatgggtgccgctggagaggggacccggcgtagggagctcggcgtccgagcagaggggacctgcagaccgggcttgcagagctcaactgggtgcggcgttgaggagcagtggctggagcagaagggaaggcgctcaaggagaggagccatggacggccctggagctgaagcgtcgcgccatgggaggaagagctcctgctggctcgctgcatcgagggggcgagtggagggagacgcagggagcgtgcgtcggctga

SEQ ID NO: 40561 - DNA, 155 bp, Zea mays
  Peptide Sequence Number=SeqID_82340
atgtcgaaaactggagggtcccgcttgtcaaagactgttgctatcctagcaaagggaagcaaaattaatattgcgaggggctactgttggggaccttcggcttccgaaggtcctcaaaaacgtgatttgacaatgttttctaagtatgcgagcag

SEQ ID NO: 40562 - DNA, 267 bp, Zea mays
  Peptide Sequence Number=SeqID_82341
atgtcgaaaactggagggtcccgcttgtcaaagactgttgctattctagcaaagggaagtcgtcaggtcaggatgccacgcacgaagaatgtgtcggcgccagggggaggagatgacgaggaccctcctcgaccctttaggaaggtcaatgggaagactgtttatttggagcagcaggaaggccgcaagaagcggcgtttggatagaacagcccgagcggctctagcagcaagaacatccgctgagcaggctaagagaggagattag

SEQ ID NO: 40563 - DNA, 252 bp, Zea mays
  Peptide Sequence Number=SeqID_82342
atggagctcaagtcactatctcaaagaatcgaatgcgtgaagttggagtcttggagtcttagaatgtttcttgtggaaaactggtccaaagtgggaatgtcagaatctgaatttcagactgcaatgtctgaaactgaagatttttatgctgaagcaactttggaagcctgttggtggctgatccatatggctatggattacaatttatgtaccaaagtggaataccacatgttggggtataagtttggttaa

SEQ ID NO: 40564 - DNA, 938 bp, Zea mays
  Peptide Sequence Number=SeqID_82343
ccttcaatggccaaccccttgtcttctcccccaccaggccatctccctgctcacagcagccgccaggagccgcagaagccgtcgtcagtcgcgcccaggcgactgagcctcgcctccccgacgcgcccagagcctgcgcgtcgagcccgacacccacaagaccccgagccgaccgcgcctcaagccgctcgctaggaaccacgcgtctgtcccagcgctcctgccgcgacgcccgcgcccacgaagccgagcgccgccagaagtcgcaccctgccagcgccaggacacggccgagcccgacacgcccgcgccaagcagcgccaggaccgagccccgcgcaaccccgcgaccgaccgttcttctccccacgttatggagtttattgcagccgtttcttccccattaatggcgacagtttcttctccattacttcattctggcgacgttctcccttccctgctcctataaagctcgacgtcgtatccctgcgaaccgattctcgaagactcctccatgcctccctattgtgctgctcgccgcgtggtgttgtccccctgtaccgaagaccaacactgtgcagctatctcaccgtcgtcttcctaccgcgttgctgggattcctccgcatctacgacgtgctgctacacggccgtgtccaccgctctgctcacgtcgagcactgtcaaccctcgccagatttcgcagtttgccagtgttgtgccgatctcctacgccagcgtcagtcgtgctgttgctcgcttggccgtcattcttcgcctcgtcgaaatctgccatgcctcgttgtcacccgtgcgcctgctggtgcctagcatccagctcgtcgaagccatgtacgagttccacgtcaagaccttctactcccttacgaccgaagctgcaactgcttgctgtgcgacgaacacgagattaagaaggtga

SEQ ID NO: 40565 - DNA, 501 bp, Zea mays
  Peptide Sequence Number=SeqID_82344
atggcagatttcgacgaggcgaagaatgacggccaagcgagcaacagcacgactgacgctggcgtaggagatcggcacaacactggcaaactgcgaaatctggcgagggttgacagtgctcgacggtgcgacttctggcggcgctcggcttcgtgggcgcgggcgtcgcggcaggagcgctgggacagacgcgtggttcctagcgagcggcttgaggcgcggtcggctcggggtcttgtgggtgtcgggctcgacgcgcaggctctgggcgcgtcggggaggcgaggctcagtcgcctgggcgcgactgacgacggcttctgcggctcctggcggctgctgtgagcagggagatggcctgagatcagtggtgcgtggcgaggacacgcagcaacttgcaagtagctcaagcggcatggatggcggctacacggttgaaggagcagaggagacgctggaaattgaagaaacatactgccaaatgggacccaccactatgtga

SEQ ID NO: 40566 - DNA, 624 bp, Zea mays
  Peptide Sequence Number=SeqID_82345
atgggtaggcttacgggttgtgaagattgtgatgctactggttttggagatttaggaaggaaagagaaaacaataccagatgccttacaacctgaattagggaaaggattgctaattgcacatggaagtcaccaagaacttggtaaaggtgattcaatgacaaatctaatgattaacatgtgcgatgtgctcataccatacatgaatttgcaacgccatgtacttgttgatggcaaggtcaggactgacaagacctaccctgctgggttcatgggtatgcctatatctctattaatgcataaagatacctatacacctattttggttgctgatttgtggtgtcatttttttggcagatgtcatttccattccctaagacaaacaagaactacatgctgcttccgtcttcacccaatcagggatgaggatgccaagttcaagctctgcaacgggaggtctattcagtttgacgtcggcaacgtggtcatggtgaccggcgggaggaacaccgggcgtgtaggagtgatcaagaactgggagaagcacaagggcatcttcgaggaaaacatagaatggaattcaaatttggtggtcgcaaaagtgtggagacttgaattcatataa

SEQ ID NO: 40567 - DNA, 201 bp, Zea mays
  Peptide Sequence Number=SeqID_82346
atgggtaggcttacgagttgtgaagattatgatgctactggttttggaaatttaggaaggaaagagaaaacaataccagatgccttacaacctgaattagggaaaggattgctaattgcacatggaagtcaccaagaacttggtaaaggtgattcaatgacaaatctaatgattaacatgtgcgatgtggttcacatgtaa

SEQ ID NO: 40568 - DNA, 504 bp, Zea mays
  Peptide Sequence Number=SeqID_82347
atgacaacaggcgccccgcttccaaggccactgggaagttcatggccccaaggcccctccttcttcgacttccatgggcgctcgtaccccttcggtcactgtgcccgccggctctctgggaaaccgaggtggctatccggcgggagtgggagggcgctcgagaccgagcgccagcgccttggcgactggtgctcccaactggaggagcgcactaaggcagtgtcctgccattttgcctcaaaacgggccgagtttgagcaggagcgtgaggacttcaaggaggacatccagaaggtgtctgatcgagaggacgaggtgatccggaaggagaaaagcctggctaggaaggagaaacagcgggtcaagcaggctgcggctgaggtgaagctgcagaagctgcagcaggagctcgctgacagggccagcgacattgctcgtgccgagggaagcctcaaggcgggggaagcttcccttgcaaaacgggcagctggtcttacccggtag

SEQ ID NO: 40569 - DNA, 963 bp, Zea mays
  Peptide Sequence Number=SeqID_82348
atgacaacaggcgccccgcttccaaggccactgggaagttcatggccccaaggcccctccttcttcgacttccatgggcgctcgtaccccttcggtcactgtgcccgccggtgggtctggctcccagcagcgtacaccagccaaggacgttgccggcgatctgtcagcgggtactgcatcttcagcatcagcgtcggtgcgaaatcctccattggcagtggccgaagaggttcccattatacttgcctccaccgcgctgggtggcgctggtgctgggatggtgccaccagaccccaggattcgcctgtcaccgtcaaggcggcaccttcaggtccccgagttctagctgagggtctagaggtaacgctgttgccaacatccgctgagggcctagcggcggggataccgtcggatgcaccatcggtgataggcatgggaggcgcgcccagctctgttccaccaccaactccggggtctccagaggttatccttgggcgtccgctccggtctggcaccgaatctgaagcaacactgactcccctccctcgggtgttgtcccgctctcaccaggctctctgggaaaccgaggtggctatccggcgggagtgggaggcgctcgagaccgagcgccagcgccttggcgactggtgctcccaactggaggagcgcactaaggcagtgtcctgccattttgcctcaaaacgggccgagtttgagcaggagcgtgaggacttcaaggaggacatccagaaggtgtctgatcgagaggacgaggtgatccggaaggagaaaagcctggctaggaaggagaaacagcgggtcaagcaggctgcggctgaggtgaagctgcagaagctgcagcaggagctcgctgacagggccagcgacattgctcgtgccgagggaagcctcaaggcgggggaagcttcccttgcaaaacgggcagctggtcttacccggtag

SEQ ID NO: 40570 - DNA, 750 bp, Zea mays
  Peptide Sequence Number=SeqID_82349
atggagaagcgtggaaagctcggaggcgaaagggcggagcagttaggaaataatgcggaggcaaaaccaccgcgcatgggagaccctccatcaagagatggctcctcgcacgctccgaaaaaacccgcccagcgcgaagaacaaaccgccgcacgctcccacgccgcctcgggggccgctgctggaaaatatccttggcatgggcggggcccacagggcgccccacgcgcgcggggcacaaccgaactgccatgcatggggggccacgtgctagtttaccgcaaagacgggcgcgacggttgggagcttacacaggaagagggttgcggccccacctgcaggctcgcatcctcccctgaggtgggtccggggggcactatcggtaccttgaaacaggggcctggacctgctgcgtggaaggcactggaccctgtacctagagagcggacctctaggacagatcccggacccttccaaatgtggttcggacggttcaccaccgggtcccagatcctaggggcaggaaatacccgggacgcgacgcctgcgctaagccaacgagagatgtgcccctcagcatttaatgcgtccagtcctctccgcttacagacggtgtcagacagcgcgcctgtccaatctatcatcaaacagcacgcctatgccatgtggcggactatgctcgttgtcccttctgcaagaaagcttccccagcacgccaagggcacgcagatctccagtgtcagggcgtag

SEQ ID NO: 40571 - DNA, 360 bp, Zea mays
  Peptide Sequence Number=SeqID_82350
atggagaagcgtggaaagctcggaggcgaaagggcggagcagttaggaaataatgcggaggcaaaaccaccgcgcatgggagaccctccatcaagagatggctcctcgcacgctccgaaaaaacccgcccagcgcgtacctaacgcccgagcaactcagtcgctgacaaagaaacccgggaccgcaagtcgcatggctggggcgctggtctccgtgcgcaggaagaacaaaccgccgcacgctcccacgccgcctcgggggccgctgctggaaaatatccttggcatgggcggggcccacagggcgccccacgcgcgcggggcacaaccgaactgccatgcatggggggccacgtgctag

SEQ ID NO: 40572 - DNA, 171 bp, Zea mays
  Peptide Sequence Number=SeqID_82351
atggccgagaacactcggtaccacttcgcgtacgattttagctcaagagaccctgagttctcggacaacgagcagctcgtggttcctgagtgtgttgctgaagatctccctgagcaacaacctggtgaaggaaagtgtcctctgacctattatgtcctacatactttataa

SEQ ID NO: 40573 - DNA, 366 bp, Zea mays
  Peptide Sequence Number=SeqID_82352
atgttgacccatagcgctcccctaccctcactggaactagaccggtccctatcgcactcgattgcctctccccgcagtcgagattcctcgctggagttacccccgacccgcccggagctctccctccgtggttctcccatctctggccccgatctcgtggctagaaccccaccaatcaccggataccgcttcgcgcacgtgcgccctgcgcctggacccacctatcggtcgcttatgcccctggcactgggcccgaccgacgacgagaagcttgtggttcctgagtgtgttgccgaagatcttcctgagcaacaacctggtgaaggcaagtgtcctctgacctattatgtcctacttactttataa

SEQ ID NO: 40574 - DNA, 327 bp, Zea mays
  Peptide Sequence Number=SeqID_82353
atggaggagctcggagagggcgccatgggagccgatccctgctgctggaggtggaagaaagggggcgccatggggagagagctccctgctcttgcgcttaaccagagaaggagaggagaggagaagtggcgtgtggaggatgggaaggagagaggtgggctgccatttattgagctggagctctggacatgtcaggtggcagtgagcagtggcaggtggaaaaatgttaacattgggcggccatttttggcgttttctgtttgttttctgaccttagtcgctgtagaagatttcttctttgatgtacactctacaaatcttgtatag

SEQ ID NO: 40575 - DNA, 207 bp, Zea mays
  Peptide Sequence Number=SeqID_82354
atggcgtcccctttcttccacctccggcagcagggatcggctcccatggcgccctctccgagctccatggccatggcgctccctgcctcgcccatagctcagcagcaagctcgcctctggtactgcgcgcgtgagggagatccctccatggccgcgtccaagatctgtagctctagtgctccaaatggattcaaaattttaaagtag

SEQ ID NO: 40576 - DNA, 903 bp, Zea mays
  Peptide Sequence Number=SeqID_82355
atgaaaagtagcactataccatggtttggtgaaaggagagatgaaggtgctggtacatcacagccaatcaatactggaagcaagacagatgcacccactgttgttactgaagccgctgccggcggtggcggccagcggtggctgtcggcccaagtcagcttcccgcgacctcccactcgtgcctcctcttctctctctatcccctccccaccctgctctcctctctccctccccttcgtcggcatcgggtggggctcgcctttggatctgtggtcccctgccatggatccagtcgtccccgcacgggacccatccgaagttcgctgctgcctcggggctactgcgcgtggctgtcgtggctcgccgccggagctagctggtgggttggccgcgcagctagcggtgaaggtggcagcggcggcgccatcgtgcccctggctggcccacggcggcggcggccgcccacttaggcagctggcctacggctgggtgcgcgcctgcgtggctggcccggcggcagcgtccgcccatcgctgctgctcgggggttggaggtgtgtctggtctgcgtgcttgcgcagctgatgcacagaaggctggatctggcgcgcgcgaggttggcggcctccgcgtgccagcgtcggaggcgtcgacaggctggtttcggcgagatgctgtgaaagcccggtccatcgccgacaggcgacggtggcgtcacggtgacgtcactcccttcctgaaggcgtcacttctgaagttcgtctcggccacacgactttgccttcggttgttgcttcgcttctcggcgcctggtttgcgagtggagaatgtttcgaaggttgggcaaaaaccggaggcagggcagagggtcaagattggaagtcagagcttgtctgtgccttga

SEQ ID NO: 40577 - DNA, 786 bp, Zea mays
  Peptide Sequence Number=SeqID_82356
atgaaaagtagcactataccatggtttggtgaaaggagagatgaaggtgctggtacatcacagccaatcaatactggaagcaagacagatgcacccactgttgttactgaaggccggggaaaaaaggccctcacgtcgctctgcttggggcgtctcgggggcgaccaggctgtgccaccgccagtcccctccacacttgcccttgacagccgctgccggcggtggcggccagcggtggctgtcggcccaagtcagcttcccgcgacctcccactcgtgcctcctcttctctctctatcccctccccaccctgctctcctctctccctccccttcgtcggcatcgggtggggctcgcctttggatctgtggtcccctgccatggatccagtcgtccccgcacgggacccatccgaagttcgctgctgcctcggggctactgcgcgtggctgtcgtggctcgccgccggagctagctggtgggttggccgcgcagctagcggtgaaggtggcagcggcggcgccatcgtgcccctgggctggcccacggcggcggcggccgcccacttaggcagctggcctacggctgggtgcgcgcctgcgtggctggcccggcggcagcgtccgcccatcgctgctgctcgggggttggaggtgtgtctggtctgcgtgcttgcgcagctgatgcacagaaggctggatctggcgcgcgcgaggttggcggcctccgcgtgccagcgtcggaggcgtcgacaggctggtcccgagccatcgcatgagccagggtag

SEQ ID NO: 40578 - DNA, 1107 bp, Zea mays
  Peptide Sequence Number=SeqID_82357
atgccgttctgtctccttccctttccgcccgtcccgtcgaccccctctcccaagggcggctgcggcaaggaccgctgcgccttcagccacgccacgagggcgtcttcctcctcctctggtcctcctctacagcgtcggcactggttttggggattttttttccaggctttgctttatggtgttgcatgggcttcgtgggttccatattttagctcttcattgggtatcatctatgttctggccaaaccagcaatatatgcgataatttctggtgaagtactgtcaactgaccagggaaaagcgcaaggttttattgcaaccgtgcagtctataactatattgttggcaccacaatttatgagtccactgacctcttacttcatttcaaaggaagcgcccttcgactgcaaaggtttcagctttattgtggcgagtttcttcttgggatttgccattggttcagctgctcttgtgtctctggcactttttggtgccttcatcagcagagctggagtgaaggttgtccatgtcctctcccccaaggttttcattggtttgattgttggagccatgcttccctattggttctctgccatgaccatgaagagtgttggaagtgtcgccctaaagatggtggaggaggtccgcagacagttcaacaccattcctgggttgatggagggaactgccaagcctgactatgcaacctgtgtgaagatctccactgatgcttccatcaaggagatgattcctcctggtgctctggtcatgctcactcccctcattgttggaaccctcttcggtgttgagactctctctggtgttcttgctggtgccctgattgccatctttgctcccaacatcggtggtgcatgggacaatgctaagaagtacattgaggctggtgccagcgagcatgccaggaccctcggccccaagggatctgactgccacaaggctgctgtgataggtgacaccattggtgaccccctgaaggacaccttgggcccgtccctcaacatcctgatcaagcttatggcggtggagtcccttgtgtttgcccccttcttcgccacccacggcggcctgttgttcaagtacctgtaa

SEQ ID NO: 40579 - DNA, 1107 bp, Zea mays
  Peptide Sequence Number=SeqID_82358
atgccgttctgtctccttccctttccgcccgtcccgtcgaccccctctcccaagggcggctgcggcaaggaccgctgcgccttcagccacgccacgagggcgtcttcctcctcctctggtcctcctctacagcgtcggcactggttttggggattttttttccaggctttgctttatggtgttgcatgggcttcgtgggttccatattttagctcttcattgggtatcatctatgttctggccaaaccagcaatatatgcgataatttctggtgaagtactgtcaactgaccagggaaaagcgcaaggttttattgcaaccgtgcagtctataactatattgttggcaccacaatttatgagtccactgacctcttacttcatttcagaggaagcgcccttcgactgcaaaggtttcagctttattgtggcgagtttcttcttgggatttgccattggttcagctgctcttgtgtctctggcactttttggtgccttcatcagcagagctggagtgaaggttgtccatgtcctctcccccaaggttttcattggtttgattgttggagccatgcttccctattggttctctgccatgaccatgaagagtgttggaagtgtcgccctaaagatggtggaggaggtccgcagacagttcaacaccattcctgggttgatggagggaactgccaagcctgactatgcaacctgtgtgaagatctccactgatgcttccatcaaggagatgattcctcctggtgctctggtcatgctcactcccctcattgttggaaccctcttcggtgttgagactctctctggtgttcttgctggtgccctgattgccatctttgctcccaacatcggtggtgcatgggacaatgctaagaagtacattgaggctggtgccagcgagcatgccaggaccctcggccccaagggatctgactgccacaaggctgctgtgataggtgacaccattggtgaccccctgaaggacaccttgggcccgtccctcaacatcctgatcaagcttatggcggtggagtcccttgtgtttgcccccttcttcgccacccacggcggcctgttgttcaagtacctgtaa

SEQ ID NO: 40580 - DNA, 357 bp, Zea mays
  Peptide Sequence Number=SeqID_82359
atgatgacacaattgggaagtgagaggctccagttactgatttctgactgctcagatcagtgggaagtccttgagaaggagaatattaattcagttaaggatggtaaatccagtgaaaatgcacggtattctccttgggaacattggcatgttttaggagataggggaagtgttacttacaactcaaatctcagaaaaagggtactaagaaagcacgtaaataagggcaataatcatacctcctcggtaaccccaaataatggagacagaacggctagccacatagtgcttatcccctcggaagatcactgtttcgtcttcgcccgtgttattattggaaaggaaagagaggcatag

SEQ ID NO: 40581 - DNA, 2700 bp, Zea mays
  Peptide Sequence Number=SeqID_82360
atgaccgtccgggccgcggccgtgctggtggccaccgccgcgctcgcgctcctgctcccgggatgggcggcggcggagtggagcctcacgaagaaaggcagcgtcgtcacctacgatgggcgctctctcatgatcgacggcaagcgggacctcttcttctccggcgccatccactaccctaggagcccgcctgagatgtggccgaagctgatcgagcgggccaaggagggcggcctcaacacgatcgagacgtacatattctggaatgcacacgagcctgagcctggcaagtacaattttgaaggcaggttcgacttgatcaagtacctcaagatgatccaggagcatgacatgtatgcaattgtgcgcatcgggcccttcatccaggcagaatggaaccatggtggtctgccgtattggcttagagagattgaccacataatattccgggcaaacaatgacccgtacaagaaagaaatggagaaattcgtgagattcatagtgcagaagttgaaggatgctgagttatttgcatcgcaaggaggacccatcattctaacacagattgagaatgagtatgggaacataaaaaaagatcatgcaacagatggtgacaagtacctcgagtgggcagctcaaatggccctcagcacacaaacaggagttccatggataatgtgcaagcagtcttcagctcctggtgaagtgatccctacatgcaatggaaggcattgtggagacacatggacacttcgcgacaaaaacaagcctatgctttggactgagaattggactcaacaattcagagcatatggcgatcaagtagctatgcgttcagctgaggacattgcatatgctgtgttacgattttttgcaaagggtgggtcattggttaactactacatgtaccacggaggaacaaattttggaaggactggcgcttcttatgtgctgactggatactatgatgaagctcccatggatgaatatggtatgtacaaggagcccaaatttgggcatctcagggacttgcacaacgtaataaggtcatatcaaaaagcattcctctgggggcaacattcgtctgagatattgggtcatgggtatgaggcacacatctttgagttgcctgaagaaaagctatgcctctctttcctttccaacaataacacgggcgaagacggaacagtgatcttccgaggggataagcactatgtgcctagccgttctgtctccattcttgctgggtgcaagaacgtagtttacaataccaagagagtgtttgtacaacacagtgaaaggtcattccatacctcagatgtaacaagcaagaataaccagtgggagatgttctcagaaacgatcccaaagtatcgtgatactaaagtcaggacaaaggaacccctggagcaatataaccaaaccaaggacgatactgactacttatggtacaccacaagctttcgcttggagtcggacgatttgccctttagaaatgacatccggcctgtgcttcaggtcaaaagtagtgcacacgcaatgatgggatttgctaatgatgctttcgtaggatgcgcgcgcggaaacaagcaggtgaagggtttcatgtttgaaaaaccggttgatctgaaagtaggtgtgaaccatgtcgtattgctgtcgtcaactatgggaatgaaggatagtggtggtgaacttgctgaagtaaagggcggcattcaggagtgcctaatccaaggtctcaacactgggacgttggatttacaagtcaatggctggggccataaagctgcactagaaggtgagtacaaggagatctactcagaaaaaggtttgggcaaagttcagtggaaaccggccgagaacgaccgggcagccacttggtataagttttggttgcaaccctcaccctcggtgtcactatgttcactgccatgccagagatactttgatgagccagatggagatgatcccgttgtacttgacatgagctcaatgagcaagggaatgatttttgtgaatggcgaaggagtgggtagatactgggtctcataccgaactcttgctggaactccttctcaagcagtgtaccatatcccgcgtcctttcttgaaatccaaggacaaccttttggttatcttcgaggaggagatgggcaagccggacggcatcctcgtgcagaccgtgacgagagacgacatatgcctgtttatctcggagcacaacccgggacagataaagacgtgggacacggatggtgacaagatcaagctcattgcagaggatcacagcaggcggggcaccttgacgtgcccccctgagaagacaatccaggaagttgtctttgccagcttcggcaacccggacggcatgtgcggcaacttcactgtaggcacttgccacactcccaatgcaaagcagatcgttgagaaggaatgcctcggcaagccatcctgcatgctgccggtggatcacacagtgtacggcgcggacatcaactgccaatcaacgactgccacgctaggggtgcagtcatggaggactgggttctttggaaggatgatgaggcagattgttcaccacaccatctatgccagtgtgaagatctttgttatgatgcggccaaccaaacaagagttatatctaacctgcaaacaaccaaacaatagtctactgtatgaagctagcctggccatatga

SEQ ID NO: 40582 - DNA, 261 bp, Zea mays
  Peptide Sequence Number=SeqID_82361
atgccctggaaatgggacaggcatacccttgagagtcttttctttagtcgggtggcttatttaaaaaccactaacccacaaccgggggtaatgcatacatgtgtattgttattatttgggccattcagttctgaatggatcgacgctcagatatggaatttagtaccccatggatgtgtatgggtatacagatatgggaatactgagaagtgtaatgtacttgcaacgacgcacctacgcttaggtaagaaggtacactaa

SEQ ID NO: 40583 - DNA, 189 bp, Zea mays
  Peptide Sequence Number=SeqID_82362
atggccaagatggattcaacatcggaaaagatgtacctctaccagcgacatcctctattaagccctaagttaaggactatcaggtggcttagttcaaaaccactaacccataaccggggacatgggaatactgagaagtgtaatgtattggtaacgacgcacctacgcttaggtaagaaggtacactaa

SEQ ID NO: 40584 - DNA, 687 bp, Zea mays
  Peptide Sequence Number=SeqID_82363
atggatgtgtatgggtatacagacatgggaatactgagaagtgtaatgtacttgcaacgatgcacctacgctcaggtaagaaggtggagtatctctttgtatattgtcatccttgctcaatccagttgtgtggtgcgagatttcttattggatacgtctgttgaagccttgaagctttttagtgttgagagacaactaattagtccttctactaaaaaatcaattcccctgctgctgagatgcaggagttgtttcacgctctctgaattaatccatgtattccctaaccaagtcagttcatctcgcatgaagaaacagatgaacaacctgaccaaatggatttctacccaagtgcatgatctcctgttaaccaaagtgaactctcaacccttggcttaccgatggtactgcgaggacctactcaatgtcaacgtcacggaattaccactagacgcgcagagcagcggaagacgtctcgatgtagacgaacgcgtcgagcagtgtcgtgcagtcgccggcgttcttcacgtcctcgcacggttcgtccaagtgctccagatgcagcacctccgaggtatccacacgtacagggaggaagcgccgcgtaccgaactgctaggttcgcgacggcggcttggcgagggcgagaggtgggcggcggctattagttcgcaggtggcgaattag

SEQ ID NO: 40585 - DNA, 447 bp, Zea mays
  Peptide Sequence Number=SeqID_82364
atgcaggagttgttcacgctctctgaattaatccatgtattccctaaccaagtcagttcatctcgcatgaagaaacagatgaacaacctgaccaaatggatttctacccaagtgcatgatctcctgttaaccaaagtgaactctcaacccttggcttaccgatggtactgcgaggacctactcaatgtcaacgtcacggaattaccactagacgcgcagagcagcggaagacgtctcgatgtagacgaacgcgtcgagcagtgtcgtgcagtcgccggcgttcttcacgtcctcgcacggttcgtccaagtgctccagatgcagcacctccgaggtatccacacgtacagggaggaagcgccgcgtaccgaactgctaggttcgcgacggcggcttggcgagggcgagaggtgggcggcggctattagttcgcaggtggcgaattag

SEQ ID NO: 40586 - DNA, 636 bp, Zea mays
  Peptide Sequence Number=SeqID_82365
atggaccggtacctgagggtggagcggccgcggaacgagtcaaccatcgaggagaacgggatccgcatcaccgcgcagggcctcatccgcaactatgcctcctacgctacctccctcctccagtcccgtccctgtctattcgaagagatccccagcaacgtgagggaggtgttcctgaccggcgccacctccaagctcggcagggccatcgcgctctacctctgcaggaagaagatcagagtcctgatgttcacggtgtttcaggtaccaatgtgtggtcactgcaagcatcttgctccgatttatgagaagctggcttcagttttcaaacaggacgacggtgttgtgattgccaatcttgatgctgacaagcacactgacttggctgaaaaatatggtgtttctggtttccctacattgaagttcttccctaagggaaacaaagtcggtgaagattatgatggtggccgggacttggatgactttgtcaagttcattaatgagaagtgtggcaccagccgggatccaaagggccacctgacttcagaggttggttataaagccaagcgaaatcgctttggaatcaagttgatgaattctggatctgatgcattctgttcattttttgctgtgtag

SEQ ID NO: 40587 - DNA, 999 bp, Zea mays
  Peptide Sequence Number=SeqID_82366
atggaggatcatagattgttaccactagataggctgtgcagcagaagaaaaacatgtcgatgtagtgaaagtgtggccactgcaaaaaagcttgcccccgagtatgaaaaacttggcgccagcttcaagaaggctaaatctgtactgatagcaaaggttgactgtgatgagcacaagagtgtatgcagcaagtatggagtttctgggtaccccacaattcaatggtttcccaaaggttccctggagccaaagaagtatgagggtcaacgttctgtggaagcccttgcagaatttgttaacagcgaagcaggtaccaatgtcaagatagctgccattccttcaagcgtcgtggttctgacttcagagacctttgactcaattgtccttgatgaaaccaaagatgtccttgttgagttttatgccccatggtgtggtcactgcaagcatcttgctccgatttatgagaagctggcttcagttttcaagcaggacgacggtgttgtgattgccaatattgatgctgacaagcacactgacttggctgaaaaatatggtgtttctggtttccctacattgaagttcttccctaagggaaacaaagccggtgaagattatgatggtggccgggacttggatgactttgtcaagttcattaatgagaagtgtggcaccagccgggatccaaagggccacctgaatcaagaggctgggcttgtgccaagcttgaatcctcttgtgaaggagtttctcaatgctgctgatgacaagcggaaggaagtcctctctaaaatagaagaggatgttgctaagctcagcggttctgcagccaagcatggaaagatatatgtgacagctgcaaagaagatcatagacaagggctctgactacactaagaaggagactgagaggcttcaccgcatgctggagaagtcaatcagtccttccaaagctgatgaattcatcgttaagaagaacattctttcgatattctcttcgtga

SEQ ID NO: 40588 - DNA, 1320 bp, Zea mays
  Peptide Sequence Number=SeqID_82367
atggatgacctcactaaacctttggatgaggaaagcattaaggttactatggatgactttgtgagtgcacttcatgaaattactcctgcatttggtgcttccaccgatgatctcgaaagatgcagattgcgaggtattgttgactgtggtaaggcacataagcacatttaccagagagctatgctccttgtagagcaagttaaagttagcaaaggtagtccacttgtgacttgcctgttggaaggtcctactggaagtggtaaaacagctatggcagcaagtgttggcattgacagtgattttgcatatgtgaaaattatatcagcagaaacaatgattggtttcagtgaaagcagtaaatgtgcacagatttgcaagataaccatggatgacctcactaaacctttggatgaggaaagcattaaggttactatggatgactttgtgaatgcacttcatgaaattactcctgcatttggtgcttccaccgatgatctcgaaagatgcagattgcgaggtattgttgactgtggtaaggcacataagcacatttaccagagagctatgctccttgtagagcaagttaaagttagcaaaggtagtccacttgtgacttgcctgttggaaggtcctactggaagtggtaaaacagctatggcagcaagtgttggcattgacagtgattttgcatatgtgaaaattatatcagcagaaacaatgattgatttcagtgaaagcagtaaatgtgcacaggtttgcaagaagggctacttctcaggggagtcgaagaaacactcagatgtgttccgtgatatctcagaattagatttctttccatatgctacagattcagatagcgaagaacttgaactgaaggagcagaaacctgttctgaaggctcagtcgggaggcgattcaagtggcaacagctcaaacgattgctacttcccaggccttcatgatgacctgtcacaagactgtcttgcctgggcaagcagatcggaccacccttccctttcttgtctgaacaagagattcaatctgttaatgaacaacgggtatctgtacaagctacaaaggaaatacaacatcattgagcactgggtgtacctcacttgtagcctgatgccctgggaagcatttgatccatcgcagagacgtccggttccacaagttaaccggaaatcttcatgggtgatagctgtgtcagattcttccgcgcatagggcaagtaatgcaagtgatagctgtgtcagtttacccccattttcttgggcatcacttgtctcaaatgaagttcattggaggttcgcaagttaa

SEQ ID NO: 40589 - DNA, 411 bp, Zea mays
  Peptide Sequence Number=SeqID_82368
atgatcaatccggttccacaagttaaccggaaatcttcatgggtgatagctgtgtcagattcttccgcgcatagggcaattaatgcaagtgatagctgtgtcagtttacccccattttcttgggcatcacttgtctcaaataaagtccattggagtgatctgcgcgtacctggaaggggatctagcgaggatctggctgtcgatcctcgtgttcgtgggcagccagctcgttctgccgctggtgtcctcgctagagaagaacaggctcagctacgctactaccggaatcgtgatggttgtcccgaccacgttcgtcgcaactacgtcccgaactcgtcctccatggctactgatgacatcgtggtgccgttctcgtgggcgaagacctccataaagacgacgacagggtga

SEQ ID NO: 40590 - DNA, 375 bp, Zea mays
  Peptide Sequence Number=SeqID_82369
atgcccaggaagcggcagcggctggtgagacagaaaggcaggaaggcgcctcggggagagggatcggaggaaggcaggaagccaaggccacgtccacgttcgggtcaattcctccaccttgcctccctctgcaccctctacctcggcttctggcgcttcccagacaacgccacgctcccgcagggctacgctttcaccgttcagacttcagacttcgcggctccccaacctttcaagatactgggccttgcgccctgcttgccgtccacagtcatctccattcccgctgactccatgccatcgaacgacttggcggggctgtacggagctttgctcacgaccctgtttcgtgccatcatttatttaatcacttga

SEQ ID NO: 40591 - DNA, 708 bp, Zea mays
  Peptide Sequence Number=SeqID_82370
atgaggacggcggcgaacgcggaggcggagcgggggaagccacacggagtagtctccgcccaccggaacagctggcgcgcgaggcccgggaggccgcggagcgcggagtggacgtcgcccgtggcgagcacctggcggagaggctccggcggtgggggctcagaggcgaggagcgcagcgaacgggttctcatcgtgcaggggcggaggcggcggaaccagtgccggcagggaggaggagaagcggatgctggaaatggctgctacgacggcggctacaggagcttgtgctttgcagtgtgggatgttgaatagcatggattatggttcttgtaccgccaggcgacgcctcgccatgaatgatggcgtggcggcggcgagaaggaatctgtggcagtttgctgccgcgcatccactagattccggcgcacgttcgggtcaattcctccaccttgcctccctctgcaccctctacctcggcttctggcgcttcccagacaacgccacgctcccgcagggctacgctttcaccgttcagacttcagacttcgcggctccccaacctttcaagatactgggccttgcgccctgcttgccgtccacagtcatctccattcccgctgactccatgccatcgaacgacttggcggggctgtacggagctttgctcacgaccctgtttcgtgccatcatttatttaatcacttga

SEQ ID NO: 40592 - DNA, 210 bp, Zea mays
  Peptide Sequence Number=SeqID_82371
atggccgcacgcgctattgctgagcgcgaagatgttgttgcgaggctcgagggggacaaggcggggcttgagaagctgctcgccgagcgtgagaaggagcaggctcaggagatagaatctttgagaaggttcaagctggaggaagaaattattgatgcagaatacactctgacatgtgacagaattgtgagcttgaaggacaagaggtag

SEQ ID NO: 40593 - DNA, 384 bp, Zea mays
  Peptide Sequence Number=SeqID_82372
atgtcgcctccggactttgcactgccaatgccaatgttggcgcctccacctccgcctccgtcacaattccctatggtagatcaagtggcgcagcttcgagaggaagttgaattgaagaaacttgctcaagataaatacagaagaaagctaacaaagatacaaaagacaagtgcccctccggttgatgaaatagaatctttgagaaggttcaagctggaggaagaaattattgatgcagaatacactctgacatgtgacagaattgtgagcttgaaggacaaggattccggctctcatcaagtgactcctccccctcacgataactttgcggacaaatgtctcaattctagtggtggagctacgaacaacaatccgatgtcctga

SEQ ID NO: 40594 - DNA, 684 bp, Zea mays
  Peptide Sequence Number=SeqID_82373
atggctgattcattgaaagagtcattagctgaattgtatgtgatcaatggtcaatacgaaaaggcactttctctttatgctgaactcctgaagccagaagtattcgagtttattgagaaatacaacttgtatgatgctattcatgataagattgtcaatcttatgatagtggacaataaaagaacagttcacctacggacccaacatcgtgatatcattctcccatatgaagttgtggagcagctgttgcataccagtaaaaaatgtgacaagagatatttgttacacctgtatttgcatgctttatttgagatagatatacacgctggaaaggattttcatgatatgcaggtggagctttatgcagactacgagacaaggatgctactacccttccttctaaccagtcagcattacaggcttgacaaggcatatgaaatctttgcacaaaaagaacttgctgttgaatttgttacggaacagcatgatgatgaactgtgggaggaactgattagacaatgcctccagaagcctgaaatggtagggaatctattggaacatacagttggcaatcttgatcctctgtacattgtcagtttggttcctgatggcttagaaatacctcggttgcaggatcgtcttgtgaaaattgtgacggattaccggacagaaacttcattgtga

SEQ ID NO: 40595 - DNA, 758 bp, Zea mays
  Peptide Sequence Number=SeqID_82374
acctgaaaatgtttgcagttgcgaagagaatatcaaataaaatacttgtcgagcttaagtttcttcatcaaatcatttttgggaggcttcgaaagtcattagctgaattgtatgtgatcaatggtcaatacgaaaaggcactttctctttatgctgaactcctgaagccagaagtattcgagtttattgagaaatacaacatgtatgatgctattcatgataagattgtcaatcttatgatagtggacaataaaagaacagttcacctacggacccaacatcgtgatatcattctcccatatgaagttgtggagcagctgttgcataccagtaaaaaatgtgacaagagatatttgttacacctgtatttgcatgctttatttgagatagatatacacgctggaaaggattttcatgatatgcaggtggagctttatgcagactacgagacaaggatgctactacccttccttctaaccagtcagcattacaggcttgacaaggcatatgaaatctttgcacaaaaagaacttgctgttgaatttgttacggaacagcatgatgatgaactgtgggaggaactgattagacaatgcctccagaagcctgaaatggtagggaatctattggaacatacagttggcaatcttgatcctctgtacattgtcagtttggttcctgatggcttagaaatacctcggttgcaggatcgtcttgtgaaaattgtgacggattaccggacagaaacttcattgtga

SEQ ID NO: 40596 - DNA, 390 bp, Zea mays
  Peptide Sequence Number=SeqID_82375
atgcatgctttatttgagatagatatacacgctggaaaggattttcatgatatgcaggtggagctttatgcagactacgagacaaggatgctactacccttccttctaaccagtcagcattacaggcttgacaaggcatatgaaatctttgcacaaaaagaacttgctgttgaatttgttacggaacagcatgatgatgaactgtgggaggaactgattagacaatgcctccagaagcctgaaatggtagggaatctattggaacatacagttggcaatcttgatcctctgtacattgtcagtttggttcctgatggcttagaaatacctcggttgcaggatcgtcttgtgaaaattgtgacggattaccggacagaaacttcattgtga

SEQ ID NO: 40597 - DNA, 582 bp, Zea mays
  Peptide Sequence Number=SeqID_82376
atggaggagtccaatttagctgctaatacaaagttacattctacagtgattgtcaatcttatgatagtggacaataaaagaacagttcacctacggacccaacatcgtgatatcattctcccatatgaagttgtggagcagctgttgcataccagtaaaaaatgtgacaagagatatttgttacacctgtatttgcatgctttatttgagatagatatacacgctggaaaggattttcatgatatgcaggtggagctttatgcagactacgagacaaggatgctactacccttccttctaaccagtcagcattacaggcttgacaaggcatatgaaatctttgcacaaaaagaacttgctgttgaatttgttacggaacagcatgatgatgaactgtgggaggaactgattagacaatgcctccagaagcctgaaatggtagggaatctattggaacatacagttggcaatcttgatcctctgtacattgtcagtttggttcctgatggcttagaaatacctcggttgcaggatcgtcttgtgaaaattgtgacggattaccggacagaaacttcattgtga

SEQ ID NO: 40598 - DNA, 207 bp, Zea mays
  Peptide Sequence Number=SeqID_82377
atgaagagtatatgtgatcttgacaagacccctggacctagccgtcaggtgaagtacgacaatttggagttacttttgtattcagtgaactgtttggtaatgcggttccttttctatttagtgaactgtgtggtactgcgtacacactgtagttccttttgtattaagtgtagtagtgatgaggaaatattgttgagtttgtcttga

SEQ ID NO: 40599 - DNA, 795 bp, Zea mays
  Peptide Sequence Number=SeqID_82378
atggttaaaaattttggcaggaaaacagtgcaaatagcaatgaatgctgtggtaacttcacacctactagtctgtttatatagtgctgcaggtgaacagtacccccgtactgttcacgtggacttggcatttgcttttgcgtcacacttgtattttcatctccttccaagccgaaggatgaagaggtctactaggtgttctgcagttccaagagatcaaaaggttgtctacattttgggtcaagtgcgtgctatggacaacgagatgctactgaggatcaagcagtatggtcttgacatgatgccaaagatccttattttaagtgtgatggctaatatggtgaccaggttgctccttgatgcaactggccccacttgtggccagcatcttgagaaggacagaaaatggaaccattcgcaagtggagcatcttcaatatatattgattcgcagcaagtgtttggctgcatataagaagctttcatctaatgaggtctcccggtgggttgttgaaaggatggacaatgttgaatgccatgtcactcgactggttggcacaccccgctggaagttttttatttccaaaatcatgaagagtatatgtgatcttgacaagacccctggacctggccgtcaggtgaagtacgacaatttggagttacttttgtattcagtgaactgtttggtaatgcggttccttttctatttagtgaactgtgtggtactgcgtacacactgtagttccttttgtattaagtgtagtagtgatgaggaaatattgttgagtttgtcttga

SEQ ID NO: 40600 - DNA, 564 bp, Zea mays
  Peptide Sequence Number=SeqID_82379
atgtcgtgggggcacatcgcctgtcagaagggtggacaggcggcgtgtcccctccgcaataaatgcggaggtcgcgcggcccagagcccttacgtcatgctccgctcgctggcctacgtcacggacaataagccatgtggcagcattagaccctcgtccgagtggggagcggaggcgctctcgatggagcctggacacgcgtcaataccggacccatgcctaggtcacggcacttcctctctcgggaccttgttatgggtggtccggagctcacttagtggggtccgaaccctatccaatggattcgggctgctttacttcaggggtctgggttgtgcgtacaggggtcatgtgccttctgggtctgacggcgttgtctccgagaacgccaccttaactgctcacgagatactcgtgaggctgttctccgcgcggctaagggtagccgcacaggcatcgtgccttcataccgtagcaaggggtacccctaatgcaaggtaccgacagtggccccgggcccgcctcaggggaggatgcgagcctgcaggtggggccagagtttga

SEQ ID NO: 40601 - DNA, 363 bp, Zea mays
  Peptide Sequence Number=SeqID_82380
atgtgggcccagggacatagtgattacagtacttggagacacaaacgtttgctacaggtgcaatcttctagtgccctgacacccgagatctccgtatcctcggagaaggtacccctgatcaagggtactgacagtggccccaggcccgcctcaggggaggatgcgagcctacaggtggggccagagtctgattggcgatctgtttgctgctcttgcgctcctgttggtgcaattactgtcgccccgcctatggctacgccaactgtcacgcccgttcccacgactgactggcccgtgacctttgtatttaatatcactgttgagccatgcgcggggtgcctcgagtcgctgcatcggttctga

SEQ ID NO: 40602 - DNA, 522 bp, Zea mays
  Peptide Sequence Number=SeqID_82381
atgcctgcgacgctcactgctctgccttcccacgggcggtggatggacgcgggctggggcctgggggtccctcgcctgcctcttgtcgtggtgggccacaaaagggcaaaagcccgcagcaaccaagcgtgggccgctcccgcaggtcccgtccgcccgatcatagatcagcgggccggaacccacctgggcccctcgggcgcggaaaaaaatttggtgcagcactgctgcaaatcagagtgtttgcagcccctcacaaaatggaggatagaccccacacgcagcaacaataatataactaaaacgttatctgctggacctgcagggtatgagtttgggtcaatttctctacccatgggtttgttaatgggttcaaatggaaacccaatggtgggtatgggaaactcgttgggtatccgaaacccgtatgggtatgagtttgggcaaaattttatacccgtcatgggtatagattttttagcggacgtatttttctttgcggatacgggtttagacaagtaa

SEQ ID NO: 40603 - DNA, 168 bp, Zea mays
  Peptide Sequence Number=SeqID_82382
atgggtttgttaatgggttcaaatggaaacccaatggtgggtatgggaaactcgttgggtatccgaaacccgtatgggtatgagtttgggcaaaattttatacccgtcatgggtatagattttttagcggacgtatttttctttgcggatacgggtttagacaagtaa

SEQ ID NO: 40604 - DNA, 489 bp, Zea mays
  Peptide Sequence Number=SeqID_82383
atgcctcataatatctgcaaagaagggctacgctccgataccagctgtgacggaacctcccaagtaattaggcccacctacagttgtccttgtctaacagacatcagacaccctgtagatgttcctaagtcacttgacaagttcggtatctttccttacctcaccaggaacgtttcacccgtcttgcagacattacagaacatcggagataaagaaatgcggaagcgattacataacttacatttatttaaaaagcaagctccagttattttattacggaccagatctaaggagatgagtgctgagcatcaatactatactgaccaagggaggaaaaaagggaccggaaaaacagatactcgtaaagggatccttctctgcgaactaggcggaccccgagatctcctactgatcacgggttcgaaggctggccctgtcggaagggtcgacagccactgcacagcactcatgctccgcgcccactactga

SEQ ID NO: 40605 - DNA, 546 bp, Zea mays
  Peptide Sequence Number=SeqID_82384
atgcctcataatatctgcaaagaagggctacgctccgatatcagctgtgacggaacctcccaagtaattaggcccacctacagttgtccttgtctaacagacatcagacaccctgtagatgttcctaagtcacttgacaagttcggtatctttccttacctcaccaggaacgtttcacccgtcttgcagacattacagaacatcggagataaagaaatgcggaagcgattacataacttacatttattaaaagcaatactaagcatagaaaaacctttttgtaaaaacagggtttcaaggaaggtaatcaagttcaaggaagcaagtgagaaagattttaaaaacatcaagggaggtggcaaatgcaccggggcttgccttcgttcacagaatgaatgccatgtttatgcgcatgagagtgcgaagataataaagaattattatctaaatcttgaatataactttccttcacggaactccgagaacttagggtttccggagtcggtaaaggagctcaatgggcaagggggtgttttggggttctag

SEQ ID NO: 40606 - DNA, 771 bp, Zea mays
  Peptide Sequence Number=SeqID_82385
atgaagcccgttgtttgggtccggtacgagcccggtatgacccggttctatgtgggcccgggccagctcggcacgaataagcgtgctaagctcggacaggaaactaggcacggcgccgtcggcgatctaccgccgcccctgcgcacgcgcggaccgtccggccctagggcgcggaccgtccggccgtcaggcagggaactcgagctcctgcaccaggtcgcggaccgtccggccctgtgccacggaccgtccgcgtctgaccagagagcgccgccgcctcgcaccaggccgcggaccgtccggcccctgcgcgcggaccgtccgcccctgtgcagagggcaccgccgccggttcttcttgagtgattggcgctccgaaaaagcgtcaacagtggtcagtctagagatcacaacgacttcgatggtgggggtaggagaagaggtgatgggatgcggcgttccagagcaccacagggtaagtcattgccgatcgttgtggcgtggggcggactgcggagttcagctagacggttggggcggttccgcggagaggagcttgaccggcacgacggcccgcgggggaggaccttggcctgccgattttcggggagccgaggaggagctcgttcggccgggtggcctaggactggaacgcgcgccgccgagccaagtcggcttgggcgtgggcagtctggagctcgggctcagcggaacacggagtccagagcttgacgcctggtggaacagggacagggcgacgacgaacgaatga

SEQ ID NO: 40607 - DNA, 282 bp, Zea mays
  Peptide Sequence Number=SeqID_82386
atggccgataaaggcaaaggcaagggtatcgtcattggcgatccccgcatgtcagatatatcacaaaaggagattgctcgaaaggcttcggacgagaaggctaaaaagtccgaagacactggggggcaggcacagttaatgaaccaaacacatcagcatagcccgaacatcgtagatggcgccgtcggcgatcttccgccgtccctgcgcacgcgcggaccgtccggccctagagcgcggaccgtccggccgtcaggcagggaacccgagctccagcactag

SEQ ID NO: 40608 - DNA, 711 bp, Zea mays
  Peptide Sequence Number=SeqID_82387
atgaaggggaggtctcggggatcacaacggtgtgcgggtcaccgtcggagatggccggagtcggtcggtccacgcgcgcaggcgaggatgctcgtcggcggcgaggagtccggcctgagaggtccacgggatgccagagaagatatgagcgcaaggaattgggcggagactcattggatagcttggtccacgcgcggcggcggaagaccgaagtccggtgaggtcgatctcgggcctccggtgaagtccggccgggtccgagggcttggcaagcttcacgggctactggcggagctagccgaagcactggctcgcccagaggatggctggagtgggctggccatgacggccgaagctctggcggcaatggcgggcggaattgagctcgctggagctaagggaaagtggctggcctgtgagggtgagtgcggggcgaagtggggcgcgcctgggaaggctttatatgcatggcgcggtgcacgggcggtcatggaccggcgagtgcacgcgggcgtgcactgggaggcgcggtgcgcgaacgggcgtgaaccgggggtgtcagccgcggtcgaacacgtgttcccgttgcctctgcccatgttcaagcgccgattgggagcaaatcttcgcgaatttgggcaagatcgctacgaaggatttgttcacctgaccaagctttgtcttttgtgtatggacgtcgcgcggttttag

SEQ ID NO: 40609 - DNA, 465 bp, Zea mays
  Peptide Sequence Number=SeqID_82388
atggagctccaagttgatctgtcagataagctcttcactaagtcaggcgcactgttcaccggtcttcagaaaaatcacgccgaggataaggatcagccctcgccggcgataagaacgccaccacagcttgggatggtcgtcggcggccgtggagatccaaatatcaaagtcgtgccaaattcccttgaacacatcctggaaaagtttgaactcaaaccaaattcatttggcatggttttggcgcagcttgacctcgggaccaggcattctgacactggcaccttggtgacgctacaactccctgtccctagcctaaaaccgcgcgacgtccatacacaaaagacaaagcttggtctggtgaacaaatccttcacagcgatcttgcccaaattcacgaagatttgctcccaatcggcgcttgaacaggggcagaggcaacgggaacacgtgttcgaccgtggctga

SEQ ID NO: 40610 - DNA, 285 bp, Zea mays
  Peptide Sequence Number=SeqID_82389
atgggcgggtccgaagccgccccatgtccagaaaaggtgatatactccatggcgtcaacagtagtccggacccccaaggttggtcccggacccctagatatacagtctggacctccaaggttggtcccgaacccccggatatacagtccggacctccgaggttggtcccagacctccacttgtgcaagccggacccctggaatggaatccggaccccaagtatggggtccgggccgtccacagaggggtcccaaggcaaaaggacagaacatacccggaccttga

SEQ ID NO: 40611 - DNA, 1224 bp, Zea mays
  Peptide Sequence Number=SeqID_82390
atgtcccacggcggcggcggcgggagggcgaaagtgacgccgaacctggcggtggacggcgagggcacgcggacgctcaatctcaccgtgctgcagcgcctcgaccacgccgttgaggacatcctcatcaccgcggctcacgtcacgctctacgacttcgacaccgacatcaaccagtggagccggaaggacgtggaggggtcgctctttgtcgtcaagagccttttgagagatacatacctggatttgtatatttgtcaatttcagagttcaatgtattaccttgtcaggaatgctcaacccagattccagttcattgtcatgaatcgcaggaatacagataatctagttgaagatcttttgggagattttgaataccaactacaagctccttatataatgtaccgcaatgctgctcaagaagttataggaatctggttttacaattcccaggagtgtcaacaggttgcaaatcttttcagcaggattctgaatgctttctcaaaggtggcaccaaagccgaaaattccttctgtccaaagtgaatttgaagagctggaagcagcaccttcgttggttgatggtcctctggaagcgcaaacgtcaaatatcatgtcaactactactcacgttcaagaggatcctttatctgcatttttcagtgcagctgcaaatgttggtggcaactctgctgtagctgttgcaaggcaaccaattcagccttttggtgctactccggtggctgcacatgcagctactagtatcactacaacacaatcgccaggcttgcattatttgcttccttcacaagcctcatcggtttctgggaggcctgctgatgctcatggtggcactggttctataggaaggtccacaagccttgtatatccgtcacttttctcaccattgacatcttcacagacgaaaatggtgcacactaattctgcagtaccaactgctccacctcaacatcctcggattgctcagcagccgcaaagtgctcccttgcttcagccttttccgttacctacggcttcatctccaccatatgggactccattacttcaaccgtttccgccacctaatccgtcgccatctcttgcatctgcaccagtcttgagcccagcgctgactagagacaaagtcagagatgcattattgagacttgtggagaatgatgaattcgtcgatttagtctaccgcgagatcatgaacagacagtaa

SEQ ID NO: 40612 - DNA, 255 bp, Zea mays
  Peptide Sequence Number=SeqID_82391
atgtcccacggcggcggcggcgggagggcgaaagtgacgccgaacctggcggtggacggcgagggcacgcggacgctcaatctcaccgtgctgcagcgcctcgaccacgccgttgaggacatcctcatcaccgcggctcacgtcacgctctacgacttcgacaccgacatcaaccagtggagccggaaggacgtggaggggtcgctctttgtcgtcaagaggttcgtctcgtctgtttctgatgagtttgcataa

SEQ ID NO: 40613 - DNA, 603 bp, Zea mays
  Peptide Sequence Number=SeqID_82392
atggccagcccgctccagtcgcttccaagtcacgcttgcccttcggttagcttcgctagtgattcgcgaagctttccaagcgctcggacccgacaggacctcaccggagacccaagatcgtcctcgccggacttcggtcgcccgcctgctcgcgtagaccgagcaatccagccggattcctcgccgccgatgagctcccccgcctgcgcacgtggaccggccgactccgaccatccccgacggcgacccgcatatcgccgtgacgctcaagacctcccctacaccctcgaccacctcgccgaagcagtctcgccgccgattgcaatctcgctgatggaaagtacgtgctcatccccgagcaaaggagatgtccacgaggaagaccaggagcaagctcctgagactaccatcgaggatctccccgcagccccatctattgaaggcaagccccggtttttatgcataatcgtatctatatatgcaactttactacacttaaggtcaggaattgattgtattcatcttgataacgggatctatgttagtctatggacttggatccagggaggatgccttgtccatgatacgggaaaaaggaactaa

SEQ ID NO: 40614 - DNA, 438 bp, Zea mays
  Peptide Sequence Number=SeqID_82393
atggccgagtcctccctaacgtgcgccatagttaacggagtggccgtctgcgggattcatggtggagcaggtagccgaggcctagctcaggcaaggcggagatggtgccttagtatgagctcagcgtcgggcgaggaagagatggtgcccgtgggcgagcccagcgtcaagcgagatctcagtctgataaagccacttaaccaggatcaaataccacaatctcacgcgaagtacaaggggtcaagcagtctcattagctacgagaagcagacgattcgaatcgagtttttaaaccttgtaaggtatccacacattaatcctcaattccttttcccgtctcatggacaaggcatcctccctggatccaagtccatagaccatcatagatcccgttatcaagatgaatacaatcaattcttgacctcgcgcgagtgctag

SEQ ID NO: 40615 - DNA, 752 bp, Zea mays
  Peptide Sequence Number=SeqID_82394
gggtcgggcagcagccgatgccagagcgcacgggggagataatttcatcggtgcggacagcgaacaagcgatttgatggcgaacagagaccttcgcgcgtgcccaacagagagcttcgcgcgcgcagggaagaacgacgagctgggaaagctgcacgcgatctcggcgcgcagcaaggcgagatcgtgatcacgactaacgacgacgatgactctggggttgtaaacgatggagaggacctcgccgagacccggcgagaactggagcaggggcgcggctggagcttggagacgactggggcagggagaggcgaccagcgcgcaagggagctcgacggcagccatgtagaggagagaaacgctgggggaggaagctacggcgcaggaagctgggcggccgagcgcgtgggagctccagggcacgcggtacagagagctccagcggcaagcgcaggggcgcggcgcagcggccatggccgagttggagccagggacggcgtcgagcagagaaggaagctgcggtgcgcagactgggcgagcgccggtagaggaagatccgagctggggtgcggcggggaagctctacggcgatcatggcacaacagcgcgcgggatccggtgaactctagtacagaggcacgacgaggttctatggaggacatggttgctggagtgacttggccgtccaccttgccaccgggttggactgtcgagtgggaccctgcctcggctgaggaggagcatgaggagtga

SEQ ID NO: 40616 - DNA, 324 bp, Zea mays
  Peptide Sequence Number=SeqID_82395
atggccgctgcgccgcgcccctgcgcttgccgctggagctctctgtaccgcgtgccctggagctcccacgcgctcggccgcccagcttcctgcgccgtagcttcctcccccagcgtttctctcctctacatggctgccgtcgagctcccttgcgcgctggtcgcctctccctgccccagtcgtctccaagctccagccgcgcccctgctccagttctcgccgggtacgttaattagtcgcacgatgcggaagaagaaccaagtcgacctcaagcgcgggctactccacatggtgaagctgaaggacgaacgcaaggatggatga

SEQ ID NO: 40617 - DNA, 417 bp, Zea mays
  Peptide Sequence Number=SeqID_82396
atggccgctgcgccgcgcccctgcgcttgccgctggagctctctgtaccgcgtgccctggagctcccacgcgctcggccgcccagcttcctgcgccgtagcttcctcccccagcgtttctctcctctacatggctgccgtcgagctcccttgcgcgctggtcgcctctccctgccccagtcgtctccaagctccagccgcgcccctgctccagttctcgccggccgcacctattgccgcgtccggcctgctcccttgtgcacgctctacttcctcgccgagctcgtacctgcgcgccgagatcgcgtgcagctttcccagctcgtcgttcttccctgcgcgcgcgaagctctctgttgggcacgcgcgaaggtctctgttcgccatcaaatcgcttgttcgctgtccgcaccgatga

SEQ ID NO: 40618 - DNA, 357 bp, Zea mays
  Peptide Sequence Number=SeqID_82397
atggcgagcacagggagggagcaggtacggctgggctgggcgaccatggcgagggagctcaggagaaaagctacggcgcaggaagctgggcggccgagcgcgtgggagctcgagggcgcgcggtacagagagctccagcggcgagcgcaggggcgcggcgcagcggccatggccgagttggagccagggacggcgccgagcagagaaggaagctgcggtgcccagactgggcgagcgccggtagaggaagatccgagctggggcgcggcggggaagctccacggcgatcatggcacaacagcgcgcgggatccggcagggagcttcgacggtgcacaaggagatgaaggataattga

SEQ ID NO: 40619 - DNA, 633 bp, Zea mays
  Peptide Sequence Number=SeqID_82398
atggcgaacgggccaaaaacggattttcggccacggccgcgaaaacgggcacgtggatgggcacgggaccctcccgtggtccccccgcgtgagacgtggaagttcgggtccacccgagagggaaaacggaactccccgaagtcctgggagggggtctcctcggccgagccccgcaccccctcgcggcctagccgtggccggtcagcaccctaccgcgcccagctccggctggcgctgttggctgcctggccggccatgcggctacgctggcgcatgagttgtcttggacccgtgactgcttggaggacccctgctaccgtgcggccgactcccggcgcccgtgtcccatcgctcgtgtgggcatcctatgcctgctgcgctgagaagtgcttgcgtgctgctacccgtcccacgggaagccgtgctcgatacacgttgccttcgtcgagctcaccccccggggtgcggctcgtcggctcgagagcgcccgcggcgtttgcctcgtgccgtcgtcggcctatggccggcggcaccgaggacacctcgctggcgcttttggtctcggatgtggctcacgctgaaggccggagacgcgttggcgtcacgcgcccaagaatcggtccgcccgaatga

SEQ ID NO: 40620 - DNA, 142 bp, Zea mays
  Peptide Sequence Number=SeqID_82399
aactccccgaagtcctaggagggggtatgcccctcaggtctcctcggccgagccccgcaccccctcgcggcctagccgtggccggtcagcaccctaccgcgcccagctccggctggcgctgttggctgcctggccggccatg

SEQ ID NO: 40621 - DNA, 480 bp, Zea mays
  Peptide Sequence Number=SeqID_82400
atggcggtgacaactgtatcaactagcaggaaaagaaaagttggagcagcgagcctcacagtgcgataccgggagggagagagtgcccatcctttaaggagccgacctccaggaggttgcgcaggagatggcgtggatttcggcgggagccgaacagatcggccgctgagcgccgccgccagccccccgcttcctttctccctctgcccgctcacttgcttcctcttgcggcaacccttttgccctaggaacgtgcgtcctatctaccagcgggctgggtgggctgctcggcctttggtccttgtagcggcccagcctggctggccattttttttaataaggtaccttcggactcagaattacgaacatgaagtgcggtcaggacgaagcctgaaccagacgaaggacgggctgattaccaagctccacgaaggatggtgcacagccgaagctgtgcgcagggaagcttcgtcgcgatag

SEQ ID NO: 40622 - DNA, 222 bp, Zea mays
  Peptide Sequence Number=SeqID_82401
atgggacatggaccagctagcgaggacgacgacgatggagatgatggatcgtcaagcaaagcaagccacacacagctgatgaggtaccttcggactcagaattacgaacatgaagtgcggtcgggacgaagcctgaaccagacgaaggacgggctgattaccaagctccacgaaggatggtgcacagccgaagctgtgcgcagggaagcttcgtcgcgatag

SEQ ID NO: 40623 - DNA, 720 bp, Zea mays
  Peptide Sequence Number=SeqID_82402
atgagctcgagccacacgcccccacaactggaggaagaagaggcgatcacccaggaacttcccctaaccacacaagaggaccaccaccccgactacatcttgaggccagggtgctacctgttgggactcgcttccagcagcaaggaggccaacaggggtgaacagtggcaacaacagggttacgtgctcgggggcaatagctctgttcatctagcctctcacgggcactgtgcggggatcaggcccgtaacacaaaggcggccacgcagggcccgttacaatgggccagatcacacgtgggcctcagagccgaacgaggccgcgctgcgggatggcgccgccgcaggccttcgtctggtgccgaatggagcgaagggtgtccctgcccgtcttgtctctgtcagaccagcgacctcagcgaaggcctcgagcgaagggtgggcgtttttgccttcgccccaacatttgccctccgagggaccagttcgacaaagtcacctggtgccgaagacgtcgctagatggcggagacgctgccctcgctcgaagtggttccgcgggggtttttgatgtgaccgttgatggacggtgtactgttggattgcgggtttcccgaagcgtcgcgccctgtcggattgcgggtttcccgaagagccgcgccctgcctataaaagggggcgggggttggcactgtttgaactttgccttccgcgctccgtga

SEQ ID NO: 40624 - DNA, 1215 bp, Zea mays
  Peptide Sequence Number=SeqID_82403
atgcaggcggcatgctgcaccatggggatgcacccttttgacttcgacgcatccagcatggaggcccaggcccacatgtcatccgcgggagaaggcgcgacgatcgatatggccaaaagtgggccggcagtaatggcggcagcaggcgggcggaagcagcagtcaaatcgtctgcaggctcacgtcccctcctggagcagcaggggagccctctcccacggcgtgaagacgacgcgcccgtgttccgtccctcgaacgactcgcgcacgcacaacggctgccccgcgaaccacccgtcccgtcgcattaactccacggcagggcaggcgacacctttggcaggcaaagcgggcgacgcttcacctccgccatgatgaccgcgtcaaaaaagggaccgggaaaggggataccccgaaagggatccttctccgcgaaggaaacgggccccgagccctcctagtgatcagggccgccttagaccactcaggctccgcgcccactactgatcaggggttcgaaggctggccccccgaagggttcgacagccggctcagaacacgtagagcgagggatgactctaggtacgtccgatacatggccgagactcgggctacactccagagcctcaggcgccataggaagctccgcctcgcgccgaccccggggctcggcccccgcctcggcctcagaaggtggtctccgcctcgcccgaccccagggctcggcctcaacctcgacctcggaagacggtctccgcctcgcccgaccccggggctcggcccccacctcggcctcggaaggtggtctccgcctcgcccgaccccagggctaggcctcaacctcgacctcggaagacggtctccacctcgcccgaccccagggctcggcctcgacctcaacctcggaggagtcaccacctcgcccgaccttgggctcgggctgaccacgccacagggggcccctacggaagcaaggagacgtcagctattggaacttgctctcagcagcaaggaggccaacaggggtgaacagtggcgacaacagggttacgtgcacgggggcaatagctctgttaatctagcctctcacgggcactgtgcggggcggttatcagcgaaggcctcgagcgaagggtggcgtctttgccttcgccccaacatttgccctccgagggaccagttcgacaaagtcacctggtgccgaagacgtcgctag

SEQ ID NO: 40625 - DNA, 219 bp, Zea mays
  Peptide Sequence Number=SeqID_82404
atgtccacggcgagggagagacggcgcaagacccgcacgatcagtttgtcgcgcagcgtgggcagacttgctggcgagtgggccccacgtgatagcagcttgctgcacagatggttattttcccttacacagattttgggctttacaaatcctaccccccttaacagaaatctcgtcctcgagatttgtaaggaaaagctcggtggagctggtggttag

SEQ ID NO: 40626 - DNA, 123 bp, Zea mays
  Peptide Sequence Number=SeqID_82405
atggagattttgggccttacaaatcctacccccttaacagaaatctcgtcctcgagatttgtaaggaaagggtgtatactcatattgtctcaacacaaagtgacgattctcaagattctttaa

SEQ ID NO: 40627 - DNA, 357 bp, Zea mays
  Peptide Sequence Number=SeqID_82406
atgctgtcgatcccgcgacgcagatccacctccgacgagaaatctcggatgctctacttcactaccgcgctcgatgtcgctgtgtgtcggtcctctgtgacctacgcgaggtccgacgtcgttggcaggggtccggctagtaggagatacccgagatccacggtggcggcgattctctcccttggtatggcaattttgggggtctgcgcgcgaggaggtcgaaatggcagagaggacaagttttatagggtcgaggattttgggccttacaaatcctacccccttaacagaaatctcgtcctcgagatttgtaaggaaaggcttggtggagctggtggtgataagtatgctaattag

SEQ ID NO: 40628 - DNA, 285 bp, Zea mays
  Peptide Sequence Number=SeqID_82407
atgggcccacaggccagcgtcagtgcagattttgggccttacaaatcctacccccttaacagaaatctcgtcctcgagatttgtaaggaaaggcttggtggtggtggtagtgggagattgagagagcataggtatccagctactatttatgtgggatataaactgaacagattgagaataggtctcctattcctaaaggtcactttaggcacaagattaagtgtgaaatccacatttgtctttagaagtgaaaagataagagtaatcagagtaaagcggaaatag

SEQ ID NO: 40629 - DNA, 321 bp, Zea mays
  Peptide Sequence Number=SeqID_82408
atgtcttccattgtccggcctcccagctctacttgcttaggtgtcgagtccaccgtccccgtctccggcttgttccaggtcacccactgctcggccgcgccctggccatgctccctgcgcttgccagccgtgcgcatctccctctgtgcgcgcgcgcctgcgtcctgcgccgcgaacctcgccgtggagttcccgacgctctgcctagccccagcgcttggcttccatcccagccgcgccctgctcggcttctctggtgccggccgccgttccaagtcgctgttccagccgacctcattactcgttgctcctgatggctga

SEQ ID NO: 40630 - DNA, 249 bp, Zea mays
  Peptide Sequence Number=SeqID_82409
atgccgctgccatggaactcactgctcggccgcgccctggccatgctccctgcgcttgccagccgtgcacatctccctctatgcgcgcgcgcctgcgtcctgcgccgcgaacctcgccgtggagttcccgacgctctgcccagccccagcacttggcttccatcccagccgcgccctgctcggcttctctggtgccggccgccgttccaagtcgctgttccagccgatctcattactcgttgctcctga

SEQ ID NO: 40631 - DNA, 255 bp, Zea mays
  Peptide Sequence Number=SeqID_82410
atggcggctctcagccccttacggaagcaaggagacgtcagcaaggatccgacagccccgacagctgtacttccacagggctcaagcgctcctccgacggccacgacatcacatgaacagggcgccaaaacctctccgacggccacgacggcacgtatcttcggacctgagttaaaaccacaacgtgaagaagcacagaaggggtacgaaggatggcgcggagccgaagctgtgtgtagaagagcttcggcatga

SEQ ID NO: 40632 - DNA, 978 bp, Zea mays
  Peptide Sequence Number=SeqID_82411
atgtcgtcgtggctgtcggagaggttttggcgccctgttcatgtgatgtcgtggtcgtcggaggagcgcttgagtcctgtggaagtacagctattggggctgtcggatcttgctgacgtctccttgcttccgggtcgggcgaggcggagaccgccttttgaggtcgaggttgagtccgagctcaggggtcgggcgaggcgaagaccgtcttccgaggtcgaggctgagtccgagctcaggggtcgggcgaggcggagtccgtcttccgaggttgaggctgagtccgagctcaggggtcgggcgaggcggagaccgtcttccgaggtcgaggctgagtccgagctcaggggtcgggcgaggcggagtccgtcgtccgaggtcgaggctgagtccgagctcaggggtcgggcgaggcggagtccgtcgtccgaggtcgaggctgagtccgtgcccaggggtcgggcaaggcggagtccgtcttccgaggttgaggttgagtccgagccctggggtcgggcgaggcggagcttcctatggcgcctgaggccggtcttggcggctgtcagcctcaccctgacggatggcacaacagtcggagcagcgcaggcggcgctgttttcctgtcaggcgatccttgcattgaatgctcctgcgatacggtcggttggcgtagcgatccggccaaggttgcctctccgcgaagcctgcccgagctgggcctcgggcgagtcgaagctttttgctgatgggggttaccagctgagattaggagtcttgaggcttttttcatacgcccctgcgtcgcctttccgcaaggaggagggggaaagcgccatgttgccctcggagggcgccgaacatggtgtctccagtgatttgccggacccggtcccgtttgatagggtccgagggctcgatgcctccctctggtgggattccgttacagaatcgttcctgctggtctcagaaatgtcctag

SEQ ID NO: 40633 - DNA, 339 bp, Zea mays
  Peptide Sequence Number=SeqID_82412
atgggtggatttgggcaggcgcggggacctccggtcgcccctaaccctagtcgccctcccgtgggctggacagaaggggagcagaacaacccgagagtcgtcgacattgacgacgaccatgaggtccccatgtttgacgatggacagcgcggtgcagccgctctggaccacgtccaagcggcggctgcgcccgaagcttgccgtacacagcggcgcatgggccatgtaggactgcttccagagttcgaactggcagtcgccaagtttcttctcgtcgtcggtgagcgacaccaacgcgagcgcctcgtgctagtggtgtttgttcgggtttccaagtaa

SEQ ID NO: 40634 - DNA, 843 bp, Zea mays
  Peptide Sequence Number=SeqID_82413
atggcgacggacttcttctggtcgtacacggacgagctgcacacgtcgcgccgccgggagatcctggccaagtactcgcagatcaaggagctcttccgcccggatccgtggggcttcctcaagggcttgtcaagaacaaccggccatgccaggggttgcaagggaagcccgtccgcggttgtcgcaccattccccacctcgaattcggggtctccaagcccagacgccatcagcgcccgccgtcagcgatttggcaaccgcgcagatctagaccatcaacgccttgggtggaggggattcttgcatgccgcgcagatccaggccattccccgcctagcccaccggccgcccaagcctgcacccgacgcgcccgatgctgatcttaccggtggctcaaagcaggcggccaccacgacgcccttctaccttgccttagatcacacagcttctgccacgtcgtctccaccgccggcggaggcgccgcccctgccgtgtgctgccaacagcgagaggggatccgaaataatcaaggcgaagatcatgtcccacccactctatccggctatcttcagagccttcatagactgccggaaggtcagagcgccgctagagattatcggccggctttccgccctcgttgatgacgtcgaaatgaattcagacgacagacaagaacagcgacgagcagcagacccagagctcgaccagttcatggagatctactgtcacatgttggtgaggtacagacaggagctcacaaggccaatcgaggaagccgatgaattcttcaggagcatggaggcacagatcgatgcattctcgttattaggtgattatgtttaa

SEQ ID NO: 40635 - DNA, 495 bp, Zea mays
  Peptide Sequence Number=SeqID_82414
atggcccgctcgaccacacccctgaccggatccgccctgcgcatgctcgccagaatcgccgtaggcactctctaccccgacgcccgccacccaaaccctagaagccccacccgcttccttgtcgcccccaaacgcagcggatccggtcgcggccacggcgggcggatccggccgaagatcctgccgcccccaaacgcagtggatccggtcgcggccacggcgggcggatccggaagcagggcgagggtccggcgtgaaaaggagccgacgaatccacctacccacattcgggctccagcgccaccccgtgccatcgggctgcgtccgctaaccacctctgggatggaggcggaggaaggcgtgatggcgacggacttcttctggtcgtacacggacgagctgcacgcgtcgcgccgccgggagatcctggccaagtacccgcagattaaggagctcttccgcccggatccgtgggccttcctcaaggtgttgtga

SEQ ID NO: 40636 - DNA, 1887 bp, Zea mays
  Peptide Sequence Number=SeqID_82415
atgaagcagcgccccacgcgtgaccgaccaggaacggctgccccgccgagtcaaaaggccgccgagctagccctcgagccgtccagggcgcggcgacgacacccacaggccacagccacaggctacacgacaccaccgctcggtctcggcgtccgcctccacgcacgcttcctcccgcaggccatccacccgatccgatccgatccgagcgtccaccatgtgggtgacgtcgatgccgcaggttgggacgaggagggcgcggccaagggcggcgcggtgaccccggcgccggccgcggccatgctgggctcgctggcggggtggctgtcccggaccgtgcagccgcagccgccggcgccccgggtgtgcggcaccgcggggggcccgcccgtgacggcgcccaggctcaggctccgcgacggccgccacctcgcctactgcgagagcggcgtgccccgggaccaggccaggttcgccgtcgtcttctcccacggattcaccggctcccgcgaggacagcgtccgcgcctcccaggtaccgaccgatccaagcaccaccaccaccaccttgtctacctcccccatctgctgctggacccgtacgccggccttcgcttcactcgcccgccaggttcatggacgtacgggagagatagatctggagcgcgcctctgtcggtgtcggtgtccttggaacgaagacgacctggcaaagggcagcggacggagcattgcgtcgcgacgcggtcatcgcggcgagcgacgcggactgggcggtgggggggccgtcaccgggatccagcaccaagagcctaggaaggccaggggcaggggtcctcgccctcgccgcaatggagctgctggccaaggcgcccgtgctgggctgcgccgggaagatgcagaggcagcggcaacgggggtccgcgctgggcaggtggatttgccgtgccgtggcgccgccgagggccgcgccagccacgccgccgagggtgcggctcagggacggccgccacctggcgtacgccgagtccggggccagcaaggaggacgcgaggttcaaggtcgtcttctcccacggcttcaccggctcccgcctcgacaccgtccgcccggcgccggaagttgcggaggagctgggcgtgtacatggtgggtttcgaccgcgccgggtacgggcagagcgaccccaaccccaaccggtccgtcaagagcgcggcgctggacgtggaggagctcgcggacgcgctggggctcggccccaagttctacgtcatcggcatctccctcggctgccatgccgtctggggcgccctcaaatacatccccgacaggatcgccggcgcggcgatgatggcgccggtggtgaactactggtggccagggttctcgccggagctggcggcggaggtgtacgcgaagcaggaggtgggcgaccagtgggcgctgcgcgtgtcgcaccacgcgccgggcatcctccactggtggatggagcagagctggctgcccacctccacggtggtggccggcaccacgccgctgcccaacgagcgcgacgccgagatccggagcaagatgaaggcggacggcacgttccagcagaagcgggagcaggcgacgcagcaggggatccacgagtcctactaccgcgacatgaccgtcatgttcggcaagtgggagttcgaccccatggcgctgccggagccgccgtgccccgtgcacctctggcagggcgacgaggacggcctcgtccctgtcgtgctgcagaggtacctcgccggcaagatcggatggatcaactaccatgaactccctggcaccggccacttcctgtcgtcggtgcctgggctcggagacaacgtccttaggacccttttcagtgacaagcagtaa

SEQ ID NO: 40637 - DNA, 471 bp, Zea mays
  Peptide Sequence Number=SeqID_82416
atggcgccggtggtgaactactggtggccagggttctcgccggagctggcggcggaggtgtacgcgaagcaggagagctggctgcccacctccacggtggtggccggcaccacgccgctgcccaacgagcgcgacgccgagatccggagcaagatgaaggcggacggcacgttccagcagaagcgggagcaggcgacgcagcaggggatccacgagtcctactaccgcgacatgaccgtcatgttcggcaagtgggagttcgaccccatggcgctgccggagccgccgtgccccgtgcacctctggcagggcgacgaggacggcctcgtccctgtcgtgctgcagaggtacctcgccggcaagatcggatggatcaactaccatgaactccctggcaccggccacttcctgtcgtcggtgcctgggctcggagacaacgtccttaggacccttttcagtgacaagcagtaa

SEQ ID NO: 40638 - DNA, 1143 bp, Zea mays
  Peptide Sequence Number=SeqID_82417
atgtcttcgtgctcccttatgcatcatgtctttccaccttccgagcccccggatgggggatgcccgcagtccttccgccttgtcgttgggggaacgcaactccgtgggagttggtacctttcagccatcgttcggcttcaaggattttcatcatgcagcccggctgcacccctccgccggcggtcacccaagacggtgaccaccagcccctggatggggagaggcaagccgggctgtgatcttggtcccgccctcagcttcaaggatgttcatcatccttgctggggcggagagcaaggcgagccggggctctacctcccgcgcgggccggttggccacctcttcttccagcttctggtggtggcaaccatcctccagctctacggaggaggcatcctccagccatgctggggaaggcgaactgttgctgcccagctaggatgcaacattccgccctcttcctcgctttcatggcgaggacgggaacgaggacctgccggtgcgctttggagcggcccgctctttggctttgatggctggttcgcgtcccttgagcgggaacgcgaacgagagccttccggcggccgcgtctgtcctgggaccatggctgctgctgcagaggtcgctggcgagtcacctggaactcgtcgccacgcaggctccccggagtccctcggctcgatcggccttgctgtccgaggcttctcttgcttagttaaaggaacccctcggccgctcttcgatgagccgaggccaggggtagcggtgtcagcacgggcagaggcagagttggctcgaaaagaagacttggtcgaccggagcctggccgggtcgtccgttagcgggaccgacgccggagttgatctgccgaggcctcgggtcgggctgatgtcttcgggggacagctggccgaggcctcggggtgaccagccgagccgcctgctcgggccggattctcggagaagacccaggcggcgatggcctgggcgtgatgacgaagtcgtccttcagagtggagaccctcggaccgcgtcgccgtccgaggctaggtcggacctcgctgaaggtgtagttgatgccgagggtgctgctgctcccttcaaccgtcaagatccgagcctgcgggatcggatcatcttgtag

SEQ ID NO: 40639 - DNA, 1025 bp, Zea mays
  Peptide Sequence Number=SeqID_82418
atgaaaatccttgaagccgaacgatggctgaaaggtaccaactcccacggtgttgcgttccccccaacgacaaggcgaaaggactgcgggcatcccccatccgggggctcggaagccgtcgcgggccgagtcttctccaacacgctccaaggtcctcccctacagcgcgggagctgggtcccacacgtcatgcaagctggcccagagcagaagaagccaaaccgccgcgcgtggtgcatgcaaccgcccagcggttacaagcggccctccacttttgcccagaccaacgggcgaaagggcgggcagccatgcaggcggcatgcaaaccgcgccaagtgggcgcacttctccgacttccaacacgcccagcatggaggcccaggcccacgcgtcatgcaaccggtgcgccggatgctgcgtgcgagcaactgcaccgccaccagcgccactgccacgcctcctcgactgcggcaccagtaccgcgactcgaggcaacacggcgggataggcggcgcctctggcagaagaagcgagcgatgcttcaccttcgccataatgaccgcgtcaaaaaagggaccgggaaagggggataccccgaaaaggacccttctccgtgaaggaaccaggctccgagccttcctactgatcagaggttcaaaggctggcccgtcggaggggttcaacagccgcctcagagcacgtgggctccacacccactactggtcagaggttcgaaggccggcccctcggaagggttcaacggctgcctcaggccactcgggctccacgcccactactgatcaggggttcgtagtctggccctcgaagggacatttccgagaccagcgggaacgatcttgtaacggaatcccatcagagggaggcatcgagccctcggaccccgtcgacaggggaccgggtctggcagatcacccgcagctcatcggagacaccatgttcggcgcccaccgagggcaacatggcgctttccccccctcctccttgcggaaaggcgacacaggggc

SEQ ID NO: 40640 - DNA, 543 bp, Zea mays
  Peptide Sequence Number=SeqID_82419
atgccctccgccatcttcgtcgttgtggaccccgccgaccaagagttaaactgcctgtttcacgacttcctatggcgacaacttcggttgctgcgcgccgggagcctgtttcgacacctcgtctggaggcttatccagcgaaggctgctacatccaagggacctcacagccgccactgagaatgggaacgggaagttcctagatgttctaaagaactggccacatagaaacattcaagttatctttgttactgatggtgagcgaatcttgggacttggagatttgggttatcaggagcatgatgagcttattgaagagttcatggctgctattaagcaattctacgcgctaccccaggagggcgcgccgccctgtggccccgggctcgccgggatcctcccacagacgtcagtgggagaggagaagaaggaggagaaggtggactacctcaacctcctctgccccgtgcccttcgaggagatccagcgcgaggctctcagtttgtccccttacccgtccagttttaactccataaccagctag

SEQ ID NO: 40641 - DNA, 393 bp, Zea mays
  Peptide Sequence Number=SeqID_82420
atggaaggtggccgatgcagtgatgggtcgcggacgcccccgccatcaacgcccctttccccgcaatccccttccatcgttgtcgctcaccttccatcgacgacgctgcacttcctcggcgccctctgcccacctacgactattaaagaaatccaaagggatgacagatgcgaggccgccacccgacacccatcctcctcgcatattccctgtttcagattcgcggagttgagtttcccaatcctctgttctcttacgttagtgggagaggagaagaaggaggagaaggtggactacctcaacctcctctgccccatgcccttcgaggagatccagcgcgaggctcccagtttgtccccttacccgtccagttttaactccataaccagctag

SEQ ID NO: 40642 - DNA, 282 bp, Zea mays
  Peptide Sequence Number=SeqID_82421
atggattcggagaacgcaaagctccgaagagcactcgctcatttaatcagagtagtggaggagcgttgtgccgacatcgtcgatgtcgtccacggtgccttccaaccacttgcactggaaacagactgggagatggagcacatggccccttcaccaattgctgaatcatcacaaacagaggatgagcttctgattgattatgattcagagttgaacaatgacgatatcgtcggctacgacgacggccgtgactactccactgacgacacctatccctactag

SEQ ID NO: 40643 - DNA, 804 bp, Zea mays
  Peptide Sequence Number=SeqID_82422
atgtggagacttggagacgtgcgctatccgggtgagtcgtcgggctcgcgcgggggtgaaaaatccgagcgcgctgtactcccgtcgctggcgacttcgatccatctcggcgagggggcctcgcggcgctgctcgtcggcggagccggccaagctgggctcgaagaggccgtgctcgagcgggtccggcggcggaccgctcttggtggttggaggcaaggaggtggcccgcgaggagagaaagatcgaaggctccggtgcaaccatcggtgttcgtcgccgtcgaaccgccatcgcgaagaagctgagaagatccacggcgccgacgaaggaaggtgcggagaaacacaagcgcatctcgtcgccgccatcgtcatcgtcttccagtaggtcgggtgctccagatccgaagagaaaaagaaatcgtccagatctagggtttaagaccatggattcggagaacgcaaagctccgaagagcactcgctcatttaatcagagtagtggaggagcgttgtgccgacatcgtcgatgtcgtccacggtgccttccaaccagttagcggaccagtcctcaatgaaatgaatcgtgcattagttcagatcgaggacctcgccaacgaccttgatcagcttgcactggaaaaagactgggacatggagcacatggccccttcaccaattgctgaatcatcacaaacagaggatgagcttctgattgattatgattcagagttgaacaatgacggtatcgtcggctacgacgacggccgtgactactccaccgacgacacctatccctactag

SEQ ID NO: 40644 - DNA, 780 bp, Zea mays
  Peptide Sequence Number=SeqID_82423
atgaacatgtgtgagctcacccttgctgtctcacaccccccacaggttaaggacaggacttttgttgataatttcccagcttgtcgacaattagaggctctcccattcttggacccactgaagcattttagaggctacaaggttttgatggaaccagtcatattgaaccgtgaaagagccgcaacggaccgcctaaaaagggtgcctatgttgttcgacgactactgtgatgaagatttttatgggctaccggggaaatacagtattgtcgctcgggtagaagttaaattcccgattgaaccacattatcgtgacagacaacatttcattttttctgacatcaatggaaccaagatcgaggccataacatcttggtatgagatagtcaaacatttcaacaatatgctccatgaaaagcatgtttacaagatgcataacataaagtttggtcttcatccgggtgaatttaattttcgacatctaaatggtcccatggaattgtatctcaaccaacaaactatcgtggagccatacactgttccaattcaaatggcgccattcccaaaacatatattcttgaaccttgctgatattgtcgagatgccaaacatgactttagtcgagtgccttgagtcttcggatcataccgcaatacacttcaatctgttccatcacaactcccattattttggacatgtgattaattgtgacattcattgcagtaattcaaaaagctttggtggcacggcacaaccgtcagtttgttgttacatttattga

SEQ ID NO: 40645 - DNA, 429 bp, Zea mays
  Peptide Sequence Number=SeqID_82424
atggaattgtatctcaaccaacaaactatcatggagccatacactgttccaattcaaatggcgccattcccaaaacatatattcttgaaccttgctgatattgccgagttgccaaacatgattttagtcgacattatggctattgtagtccacttgaatacaattcatcgcacaatgtggggcccattcagaaagattgttataatggatgctaggtggtctttacatatcattaaagttcggggtgacttactaaacaaaaatgcactccgctgggtgttggctaaggaggattatggcataataattgggactatgtttagacggttcagaagacaagagtgcctcgagtcttcggatcataccgcaatacacttcaatccgttccatcacaacacccataattttagaccaaacgaatcaagctga

SEQ ID NO: 40646 - DNA, 438 bp, Zea mays
  Peptide Sequence Number=SeqID_82425
atgggcggggcggcggcacgtgttgccgacttcgacacggacatcagtgtcgctgattattttgttgggtcggatgtggggcaactggctgttgtcccacctccgatggcagccacctcaccgacggtggtggctggggcgaagggtgccccgcgggactcgtgggccactttctgcgtgagcggcgagattctgtcggccgctgccgctaaggacatggcgggctccatggctcagcaactgaggcaagcgtcgcagcagctgtcgcagcagctgaagcatgcggccgacttcgccgaccacattccctctatttttaggggcccggtttcagcagtgatgggtttggaacagacggtgactagctactgtgagatagtggtcattgttggattgatctccatcaagatagacccaacggacatcttaggtctttga

SEQ ID NO: 40647 - DNA, 1022 bp, Zea mays
  Peptide Sequence Number=SeqID_82426
atgtctcagcgactgagggaagcgtcgcagcagctgtcgcagcagctgaagcaagtggccgacttcgccgacctcgtcgcgtcaggtgccttgactgtggacgttgccaccgaggtcgagcgtctttgggcacagcatgcggatgctgtgcgggagaagtcggctgcggaaagcaaaaaccgtaggctgtcggagaaggtggccgccatggaggccgagaagatggatctcctgcgccagctggcggaggagaggagggaggtgaacaaggccatcgccgatgtccacgtggacaaggccgagacctcgacgcgcgcggaggtcgagcggacacacgtgcaggtcgtggacgcgtaccacgagctgggtgcgcggactgctgacttcgaagtgcccgaccaagaagtgggccttcgcttccttgaatggttgcaggaggagctgctggtgctcccgaccattgtgataggtttcatgtccttcgcctccctcgtcacctgtgagggggccatgaatgctttgtcccgcgaggggtgcaggcattacgaggtcttcgaccaagcgaacgaaaactttgagcgtgaaatctttaaggtcgaagaccccatggtgaaacaatcaacgggggcactctttgataggatgtggggtccacacggccgagaggcggtcagggagcggtctgacagggaaatagagcagatggctcatgccgaagatgtcgaggaccttgttggtctggacgacgtgctgcccgaggccgcggagggcatttcgatgccgccctcggatgccgcgttagatgtggctgcagtggagccttcgccgcgcgcggagagttccgaagagctcccgggcgcgagtactgggtataggcggcaaagggcggtggcgaaacagagagtgagtggattggcgcgaagcggtgagggggagctgcgaaatctttttgagggtgaggaattgaggataatgctgtttaactatagggagatgggtattatcccgaaggttgaaccaat

SEQ ID NO: 40648 - DNA, 309 bp, Zea mays
  Peptide Sequence Number=SeqID_82427
atggggagtagctctctccgggcagaatgggaatcacggcttgtgggtaaagtgcacaacctctgcagagtgtttgaaaaccgatatatcagccgtgctcgcggtggctatgagatcgatggttttggttatgactatggtgctggttgtcagcattgcaaccactgctcaggggaagatgaagctgtggaaggagacttccaggagttccaagactacgacgagcgtgggttagcggcaacccctagtcggctgcctgtgaaggccgcgtttatctacgtttcttttccgcactttgatttattgtaa

SEQ ID NO: 40649 - DNA, 405 bp, Zea mays
  Peptide Sequence Number=SeqID_82428
atggagagtcatgatctccgggcagaatgggaatcacggcttgtgggtaaagtgcacaacctctgcagagtgtttgaaaactggtatatcagtcgtgctcgcggtggcgatgagatcgatggttttggttatggttatggtgctgctagtccactacagccaaacaggatacttgctgagtatgttgatgtgtactcacccttgctctacacaccaaaccgcccccatccccaggttgtcagcattgcaaccactgctcaggagaagatgaagccgtggagggagacttccaggagttccaagactacgacgagttctaggcgtgggttagcggcaacccccagtcggctgcctgtgaaggctgcggttatctacgtttcgttttcgcactttgatttattgtaa

SEQ ID NO: 40650 - DNA, 654 bp, Zea mays
  Peptide Sequence Number=SeqID_82429
atgtgggcgctcacccacgttgccaacaggggcgacttcctcaccctgctccacgtcctgccgtcggagagcggccacagcaaccgcggtgctgcggaggacgcctccacgctcgccaactcccttggcgcgctttgcaaggcctgcaagcctgagaagcctgctgctaaacccttggttgcagttgcgaaaaatggttcgaagacggtcaagcaagagagcagcagtgatgaggacaattctgaagatgagtcggatgacgacagtgatgatgaacctgcaaagaaggttgctgctaaacccttgggtgccgttgctaaaaatggtttgaacaaaggcaagcaagaaaccagcagcgatgagaccagttctgatgatgagtcagacgatgatgttaaacctgctgccccattaaagaaaacatttgtggctgttgcacaaaggaaaaagggagattcttctgagagtgactctgatgatgattcggatgaggaagtgcctccaaagtcaaaggctccagcagcaactatcaataaggaagattccagtgaaagtgagtcagagagtgattctgaggttgagtgctcactttgctacaatgctttgcatatgctcaaggtcaccagaatactgtttgcttcaataagaaactga

SEQ ID NO: 40651 - DNA, 540 bp, Zea mays
  Peptide Sequence Number=SeqID_82430
gaagtgcctccaaagtcaaaggctccagcagcaactatcaaaaagaaagattccagtgaaagtgagtccgagagtgattctgaggttgaggaagcactttcagctgcaaaaaaagaaagcagcagtgaggatgaagatgacagtagtgaggaaagttcggatgatgagccaacaaaagttgaagaaaagaaggatccaaaagtatcagaaaacattggatctgaggatgaatcttctaaagacgagagtgataaagacagtgaagagcctgctaatactccaaagaaggctccaaaggctgctcggggtaacaacatctcaatatttatctggggctttgataaaaatatttcagaggatgagaccggggggtccctgggccgacgagtgaatgtcgccgcgtgccccagcccagatgggtcgagcgcgagggcgagcgtgaagggggagagcgaggcggccgaagaccggcgtgagagaggtgggaatcccgtggccttcgtgttcgtcccgcgcccaggtcgggtgcgcttgcagtag

SEQ ID NO: 40652 - DNA, 237 bp, Zea mays
  Peptide Sequence Number=SeqID_82431
atggtggacaaagtgcaaatcaatacaaagacagtgtctggtgtgccaggctggcgctggtcaactggccgctctcaggaactcgacggcggcgtatggctaaaaatcaccggactgtccggtggtgcaccggactgtccgggcgagaggctccaagttgtggagattcctcgcaaacgggaaagagtaaagaaagaagaacaccgtggtattcaagttgatcattggatcacttga

SEQ ID NO: 40653 - DNA, 255 bp, Zea mays
  Peptide Sequence Number=SeqID_82432
atggagaagagttggctcgagcagccaagactctgctcagtctgggtgcaccggactgtccggtgcgcctggcgctggtcaactggccgctctcgggaactcgacggcagcgtacggctaaaaatcaccggactgtccggtggtgcaccggactatccgggcgagaggctccaagttgtggagattcctcgcaaacgggaaagagtaaagaaagaagaacaccgtggtattcaagttgatcattggatcacttga

SEQ ID NO: 40654 - DNA, 276 bp, Zea mays
  Peptide Sequence Number=SeqID_82433
atggaggggggaggggcgccgccaccggggaaggtgaggggagagtgggagaggctctgcacggacgggaaaacgaagaaacgaagaaaccttaggtgcaacaatggaggtttctcaccggggaagaagaccctcgccggagccgaggagaaatccgtcgattgccggagattcggggatctaatcgatgaaccgaacgcgctgcgacaaagccttcgacgagaccaacgcagcggtaccctcggattccgcggacgatgcacggattgggagtaa

SEQ ID NO: 40655 - DNA, 263 bp, Zea mays
  Peptide Sequence Number=SeqID_82434
ggcttcgtcgcagtgcgttcggttcgtcgattggatccccaaatctccggcaatcgacggatttggcttcggctccggcgagggtcttcttccccgagcctctcccactctcccctcaccttccccggtggcggcgcccctccccctccgtttcccctccccggcggcgcccctttccccctccccggcggtggcggcggtggccgacggcgacgctcgtgctcccgcgtcccacgcccgcgcgcacccctccccgggcagcg

SEQ ID NO: 40656 - DNA, 375 bp, Zea mays
  Peptide Sequence Number=SeqID_82435
atgtcggacgaccttgttgttcctgtccactttgaagttggccaagaactttgcttttgcctcctggatcatccgctccttgtgctcctcgaactggagctgctcgtcagccggcaagaaatatcagagctatcccttgaaccggccattgagggccgatttgatgagcttagatatgtcttccccagcggagtcgccaaaaagtatgttgacgccttttcggagcgccaaatactcaagaagaaccggcggcggtgcttctctggtcaggcgcggacggtccgcggcctggggccggacggggcggcggaagatcgccggcggcgcctggatctcgctcccgggagggaccccgtcggggaggagagatcctag

SEQ ID NO: 40657 - DNA, 357 bp, Zea mays
  Peptide Sequence Number=SeqID_82436
atgtcggacgaccttgttgttcctgtccactttgaagttggccaagaactttgctttcgcctcctggatcatccgctccttgtgctcctcgaactggagctgctcgtcagccggcaagaaatatcagagctatcccttgaaccggccattgagggccgatttgatgagcttagatatgtcttccccagcggagtcgccaaaaagcgcggacggtccgcggcccagggccagacggtccgcgacctggcgcgaggcggcggtgctatctggtcaggcgcggacggggcggcggaaatcgccggcggcggcctggatctcgctcccgggagggaccccgtcggggaggagagatcctag

SEQ ID NO: 40658 - DNA, 465 bp, Zea mays
  Peptide Sequence Number=SeqID_82437
atggtcttcggaaccctatgcagactaagaataatcagatgcaccatcttgggtaaaacacacaagaagaggtttgccaacaagtggttacagtggtccgctcgtaaccagataatccaagtccgtaaaaggaaaagcttgagtgagatggtcgagccttggggaggaggagctcttaggtggttattgcccggcttaatccagattattgaaacttcttccttaagagggggtttgtacaaaagcagttacatgttagtgaaacccaacttgttgaactactttttgacattgagcaagtcctctcagtaccatcggatggttgacaagccgttgtgctacttgaaactccatgggatgagcacgattcaattctttgatcgcctgatcctgatggcttatgaagctcatggtttccttaaggtcttctctaacagcaacagcatacaagtgaatttcttctag

SEQ ID NO: 40659 - DNA, 1473 bp, Zea mays
  Peptide Sequence Number=SeqID_82438
atgtcgaagacctgcttggcctccctctggccattctatgctcacactgttatgtggcgttccctcgattcgaggtggcggaggatgacgaggacgatggggccctcgagtcctgcttttggtgtggatttgcggggtccgaacccggccgcatttgcgcgtgaagtggaggccgaggccgcaaagattgtggggagatatgtgccgaggactgagaccctgcggagttgggatatccgcggttctaacgttcggttgaaccgcgtttttgagttgaatcgtctgccgtatgccggctacatgggggatgatgatgccgatgctgccgactgccggagaaaaaaggtggtgacggcgattgacgaaagcccttcgcggggagcagcgccggctgcggccgccaagaagaggaaattaggtacaacagctgaggggttgagggctttcgaacgttttgctgtggatttattggagacccacgatgttcccggggagatgatgtcttcgcccgagctctgggaatcttccgcgcgaatgctgaaggttaccgagggtcgctggcctaggaatgttccgattccccgggcggctggcgaggacatgtttacatctcgattagctcgtgagatgaaaattttcccttacggacggaatgttgctgttgttgtaccgacagtgatggagaaggatcgtcaagacacgccacagaaatgccgggcgtttgcgagggtcggggatctgcgccgtgaggtcaaaatggcgcgggcgagcgcgaagcctgccgcccccggctcctgcaagcctccgcctggcgcgcccggcactagcatgccgctccctgctgactaccttgtgagtggggtcgcgattttcgacgcccacatagggtggggacctgtcggtgagtttaatgtttttttgaatggggtctgggtttttgaggacccatggtccaggttttgcgctagcgacgaaattgcttcggccgccgccgctaaggacgtggctggctcagttgcgcaacagctaaagcatcgcctccagacgcagcacattgaggccgtgcgggacaaatcagccacggaaaataagagccgcaatttgatggagaagctgtcgacgacggaggctgaaaaagaggagctctgccgtcggctggcggcagaaaaggaggatgcggacagggctcgcgcgaaggcccaggctgcccgtgccgaagccaacctcaccctcaaccgtgccaccgacgcggagtcggtgcaccggagactgcatggttatctggacaaggcggaggcctccacccgcacaggggaggaactggagctcctcccatctatcgtgatgggtctcatgtcctttgcctcgcttattacctatgagggggctgtgaatgccttgtcccgtgagggatgcaggcacttcgaagtctttgaccgggccaatgaggatttcgaccgtggaatcttctag

SEQ ID NO: 40660 - DNA, 950 bp, Zea mays
  Peptide Sequence Number=SeqID_82439
aaaccctagctcttgcaaactactcgcctgccctccttgctctcccgcttcggaaatctggcccgcatcaagcagaccgcgcgccgccgctgacgtcgggccataccgtggagtttggcactttgagaatttcctctgtccgcgtgctggagatgcagcggctcggatactttggtgacggcatcgggtgggttccgggtgcagaggagatcctcgagcctgagggcgaattggttgtctttgaggcttttttatcgccagccttcgtctcccggcgcatcgcttcatggcagaggcagccgtctatggaggtcttcgccaagaattattgcctacattggcaaaaaaggaaaataggaaataagattgcacaatttggatcgtgcaccttcacgccgaggactggaaagacttcggcggaagtcatggaggtagtcccttgtgcttggaacaagtggggcaactggtgcgatttttggttctatgtgtctcctaatgaagtcgaagacctgcctggcctccctccggccattctatgctcacactgttatgtggcgttccctcggttcgaggtggtggaggatgacgaggacgaagaggcctttcggtacgctgcccgcttgagtagtaggcgcgatttggttgaggaatttatcggttatggagtgtggcccttggcacacggctgggtactgggcgttgtgtacccccaccggatgccgaccctgggtgaccggttggtgcaaagtcctgcctttggtgtggatttgcggggtcggaacccggccgcatttgtgcgcaaagtggaggccgaggccgcaaagattgtgggtagatatgtgccgaggactgagaccctgcggagttgggatatccgcgagacctgcgttgttcccggggagaatgatgtcttcgcccgagctccgagaatcttcccgcacgaatgctga

SEQ ID NO: 40661 - DNA, 669 bp, Zea mays
  Peptide Sequence Number=SeqID_82440
atggacgtagagagctggggtagatggctgggcccacgaagggatgaccttacgattaattgggcctttgggtctttcgtgaggtcttttatccttccagtggacccggggtatatctgtcccccacaacgccctctcaccgttccactcgtcccaccgcgactgccgcccctgctccgcccgccccatcctcagcgccgagaatccgcgccccaagccccacggctccgttctccgatttggaaacaccgcttttctcgttccacgattggtagctcccccgttacccatgaatttgcaattggagatcgacgcccgctacccacgcttggatgtcgtcacctcgatggtcatggcacgctccaccttcttctcgccgagctcgccgttgcacgacatctcggcgtcgtgcgtgccccgaactcccccaccattgcttctgttgttcgctgcggtggaggtgcgtttcatggtggagcgcttcactttctcgccgatcacgccgtctcacgggatctcatcattgcgtgcggctcgggtgaggacaccgaggccacggcacccgttgaagaggcgagcggcgtgcacgtggcagcgacggagaaggagtggaaggtcagccttgggtccgagtcgttcaggccgctacggcggagtgcaccccagtga

SEQ ID NO: 40662 - DNA, 1191 bp, Zea mays
  Peptide Sequence Number=SeqID_82441
atggaggcgtccacagttgcttggttctgccatcgcgcgctccgcccgcgattccccttcccgcgcccgcagtccccgccgccgttgtgggggacagatatccctcgggtccactggaaggataaaagacctcacgaaaggcccgagggcccaataaatcgtaaggtcatcccttcgtgggcctggggaggaatgaccagtgaagcagatcgacacaaggccgaatcgatccaaatccgttgcgcccgcaaatccgccgcggatggaaggtccgcgcccctgcgccaaatcggccacgcccgcaacgcccgcaaatcctctccccagcaatgcgccaccacctcatcctcggacgcgcggatggaagctccgcgcccctgcgccaaatcagccgcgccctcaatttcgctcgcccgcaaatcctctccccagcaatgcgccgccacctccaactcggacgcgcggatggaaggtccgcgcccctgcgccaaatcggttgcgcccgcaaatccgctgcaacgcctgcaaatccgccgtcaatggaaggttgttgcccattttagagcgtcatggtgtgtgatgtccctgtccatgaactacaagtttgaggagctggtgcagacccaccccgaggtcttgttcctctacgtggacgtcgacgatgtccagaattatttgacaggtctcgtgccttcgttcattgggaaatatcccatgcagtacatttttgaatgtatccacaagttcactggtattcagttagatgtagctatcgttatagctcttgctttgacaaactcatatagctctgctactactcaattgaaagggagacgatcttgttcatactatttgctgtcagcatttctttcattcactgtactcttcattagagtaaggttatgggtaagagtaatgtcaaatgcaattgttgggtctatcattaaacatgatataattgcttatctaggtactcccaccattcattgttatttgttgccgattggtcagggtacatatagtaatgtttacagagccagtgatcttgaaaagaagattgttgctttgaagaaagtgcactttgatagtttggaacttgagagcggtcgtagcaacagggttcaaagacatgtgtttgatagggcggttgctcagcatgacgagaggtggggagttccattgttggtttaa

SEQ ID NO: 40663 - DNA, 507 bp, Zea mays
  Peptide Sequence Number=SeqID_82442
atggcgcgggcgagcgcaaagactgcagctcccggggtcagcatgccttcgcctatcgcgctaggacctagcgcgccgctgcctgccttgcccacgcaagagcggaggcatgcatcgccaacgcacgctgccgaggcggcggtgggcggcgccgaagtctccctggatatttccgtgggagactacacgatgggcggggtcgctatattcgacgcccacacaggacggggacctgccagagcggagtctgggcaactggctgttgtcccggcatcggcggtggctagcgctgtggctgtgggcgtagaggggcctacactggacccgtgggccaggttttatgccagcggcgaaattgcatcagccgccactaaggacctggcgggctcggtagtgcagcagctgaagcacgtgaccgccttcgccgagcgtaatgcgtcgggggcgctgacctcagagtttgctgccgagaggtggcgactcgaggggaggattgaacgcctctaa

SEQ ID NO: 40664 - DNA, 1224 bp, Zea mays
  Peptide Sequence Number=SeqID_82443
atggagaaggatcgccaagtcacgtcgcggaagcgtcgggccttcgcaagggttggtgacccgtggcgcgaggtcaaaatggcgcgggcgagcgcaaagactgcagctcccggggtcagcatgccttcgcctatcgcgctaggacctagcgcgccgctgcctgccttgcccacgcaagagcggaggcatgcatcgccaacgcacgctgccgaggcggcggtgggcggcgccgaagtctccctggatatttccgtgggagactacacgatgggcggggtcgctatattcgacgcccacacaggacggggacctgccagagcggagtctgggcaactggctgttgtcccggcatcggcggtggctagcgctgtggctgtgggcgtagaggggcctacactggacccgtgggccaggttttatgccagcggcgaaattgcatcagccgccactaaggacctggcgggctcggtagtgcagcagctgaagcacgtgaccgccttcgccgagcgtaatgcgtcgggggcgctgacctcagagtttgctgccgagaggcactttgaagtgtttgatcgatccaacgaggacttcgaccgtgggatcttccaggtcgaagacgaggtgctaaagcggtccactggggcgctttacgacagaatgtggggcccacacggtcgtgatactgtccgagagaggtcgaaccgggcgcttgagcaaatggcaaatgatgaagaagtcgacgactttggaggcctggagagctcggtgacccgggcagaagatgttccgacgtctgggcctgcgcaagcaacccctactgatgatactaattttgtggcggtcgcaaacgcagtgcctactaatgatagtttgtctggttctgaatctgggtcttggtcgtctgatggtggtgagtttgggagcccgttttcctggactgaagagtcatcgcatgaagatttggattattttgctgcgttagatgtggccgcggcggagtcctcgccgcgcctggatgtgcgcgaagcgttggatcccccggctggcgtgaggaccgatcgtcgtcgacgaaaagtagtgtcgaggcatagcgttggagagatgtcgcgaagtggtaggcaccgtcggatggggatggagcgaacccgccttcgggtagatcggggtggcccgcgagatttgatgtccttgtcgttgggacgagcattgggaacgaattcaagctga

SEQ ID NO: 40665 - DNA, 177 bp, Zea mays
  Peptide Sequence Number=SeqID_82444
atgggagcagagagctcgcggcttgtcctgggcgcctgcacttggggattttctgctggcgaggggggcatgggcgtcatggctgggaggaagatcctgcgcgcagccgtgaggagaagggctccctgccctagcgtgcgtgaaggagcaggaaggaggatggcgtggggagaataa

SEQ ID NO: 40666 - DNA, 1062 bp, Zea mays
  Peptide Sequence Number=SeqID_82445
atggctgcatctgctgggcgccatggaaaagcagggggcatgggcgccatggctgggaggaaactcctgcgcgcaaccgtgaggaagacaggaacagggagctcgcagggaggagcggcgaccggaaggggagctcggctggcgtccagcttggaggaaggagctcgccgcaagggaaggctggcggccatgggaggcccctgcgcgccggcgtgctgctgccgtgaagaagagaggcgcctgctgctgcgcgaaaataatgtcgatgcggaatcgaacacggagcgtcgcggtctcaccggggtgaacgatgacgacgatgggctgtccccaaacaccaacgcgacggcgtgggtcgggactgcgcagatcggatcaatgcaagcgacaccgacgggatctcatggctgctgctcgctgcgtcatttcgacgagcacgccgagggcgcgacgcagagggaacccatgtggctgcgcgaactgccgtcgcggctgctgcgcgaggtcgacggcgcactgctcgcctgggcgcgcgggggaacagagatgggagcagagagctcgcggcttgccctgggcgcctgcacttggggattttctgctggcgagggcgccggcgtgctcccaaggagctcggccatggctgcatctgctgggcgccatggaaaagcagggggcatgggtgccatggctgggaggaaactcctgcgcgcagccgtgaggaagacaggaacagggagctcgcagggaggagcggtgaccggaaggggagctcggctggtgtccagcttggaggaaggagctcaccgcaagggaaggctggcggccatgggaggcccctgcgcgccggcgtgctgctgccgtgaagaagagaggcgcctgctgctacgcgggaaccttcaggcggtggccgtggagtgggatgaatatcggcgtcaggtcaccgaagcttccctctgtgttgactccctctctaatcacttggaggtcgagcggtctgagggccgagccttgagggcccagatgggagagctcgagatggatctggagaccaccgcctag

SEQ ID NO: 40667 - DNA, 474 bp, Zea mays
  Peptide Sequence Number=SeqID_82446
atggagaaccacccgggaaaacagtgctaccacaagggtggaatgggacacccttggccaacgggttttcttgaactagtggaactttggaaaggccttgtagtgctaccctgcctcgtctcctcggtagagaagaacgggaagtcgcgatcccttggcagatggcaccctcacgggtggcagctcgcatcgcacgtcgccagcactaccgccatcacggagtccgagccctctaagatgccctccgccgccttctccctcaacaaattagtgaaggagtttatccaccgcgccaacctgtggctttcccgccacgatcgcgccgctacagtcgcggaccgggctgcggcggaccacaccgtcgtgtacctcgaaatcttcctccaggccggcgccgcttttgtgctggttcgctggggcgttgctggtcagcgcaccgccgtctgtgtgggtgccgtcgtactcagagcctag

SEQ ID NO: 40668 - DNA, 336 bp, Zea mays
  Peptide Sequence Number=SeqID_82447
atgcctagcaaaagtctagatgcattcctcttcaatcctgaaaagcagcggcttttagtctggaagaaacagtttgatataatcgaagccattgctagagggctgctatatctccaccgggattcaaggctgcgagttgttcaccgtgatctcaaggccagcaacattctcctggacgcggacatgaaacccaagatatcagattttggaatggcaaggatgtttggaggggaccaaaaccaattcaacacgaatcgggtcgtcggtacattgtatgcacaaactcaatgggccatacaggaaccacactactgcaacttggttatgatacactga

SEQ ID NO: 40669 - DNA, 2181 bp, Zea mays
  Peptide Sequence Number=SeqID_82448
atggcaccagcacagcacgggacgcgggggcggtcatccatccgacgaccatcactgcgtcaggcacacgctgacgcgaactaccggccgtccacggagacgtttcttcgtttgaggctgaggcgccacctacccgagctccgcccaggccgcccgcccgctcggcagctcgactggacgagctcctcgccgcgggcgccgagcagccaagctcctctcgcggaggcgcagacctgccttcaggccgaggtgccgagctccgccccgcctcgtggaaaacaagtcatggatcagtgcaaattgtacccctggagctgctttcagatgccatgcgctgttttcagcaatagtgaaactaattcgcagtattttgttctaggagttgattgcgacgactacggcttcattgacttagaggtatggagggatagggctcatcgcaccttctacctcggggtcggcgtcgcgttcccgaagccaacactactccccagcccctccgggagctacgtcctaggtgctgtttttcttcagctctgccaagttttgcaacttgcagaacatccagttgttcagaaacttgtagatcccagtcttttcatccatcgttttacaaaacctgatgaatctaatgaagagcctgtttcaaaacattcgcccaagtctggagaaattatctgcaaacacaaggataaaggttttgagcattttgctcatggactttgtgaaaaatgctacaataagttcactaaactgtcgggtggactagaaggtggttctgtccctccagcattccaacgagctgaaaagaaaagacttgaagctgctaaaagggctgaagaagctgcagcagctaaggaggcagcgctggaagaatctctttgcgacacacagaattctgaggttgagagtgccatgactcctagaaagggtttaagtggagataaatcttcgaaaatgggatcagagggactcataaatgactctatgccacccaaggatcctgaagagggaggtgaaaattgtgaaggcaatgcagatccagaaagcctttctgacattgacgatgcagaggttgatgggtaccttcacaatgaggaagaaacacaatataaaaagattatctgggaggaaatgaacaaagagtaccttgaggaacaagcagacaaggaagctttggcagctgaattggcagctagagggattgatccagaagcgggaaagaaaaaacgaaaacgtaatgaaggcacgaagagctcgacacctgctgaaacaccagcagaagccacgtgcaacatgctgaaacggaagggacttggttcaaagatcaatgtgggagctgttgacgaattgtacaaggacaagcctcagccgccacctgagggccgtcttcctgatgccaccaagggttctgaccacctgaggcaagtctttggcaagcagatgggtttgagtgatcaggacatcgttgccctctctggtggccacaccttgggaaggtgccacaaagagcggtctggttttgagggggcctggactacgaaccctttggtctttgacaactcttacttcaaggaacttctgagtggtgacaaggagggccttcttcagctcccaagtgacaaagccctgctgagcgaccctgtcttccgccctcttgtggagaaatatgctgcagatgagaaggcattctttgatgactacaaagaggcccacctcaagctctccgaactgggtgctatgctggacatctcgcagtcaattcgttttgatgatgatgtggaggatggaaaaagtcatgaactcaaagtggaagagaagatccaggtgtacgagtacatgcctagcaaaagtctagatgcattcctcttcagcattgctagagggctgctatatctccaccgggattcgaggctgcgagttgttcaccgtgatctcaaggccagcaacattctcctggacgcggacatgaaacccaagatatcagattttggaatggcaaggatgtttggaggggaccaaaaccaattcaacacgaatcaggtcgtcggtatatttggctacatgtctactgaatacgcaatggaaggtattttctccgtcaagtctgacgtctatggcttcggagtcctgatcttaagcttccactgtcacgaggactccttgaacatcgctggatat

SEQ ID NO: 40670 - DNA, 810 bp, Zea mays
  Peptide Sequence Number=SeqID_82449
atggccctaggaagcaacgtgctaggatgcaaaacttatgttcgctccacaacaccagcacgcacgacatctctgattgttgtgtggtttgggacctcatccggcagcaccaggaggagcagtcctagtagctacgtgcttcgtagaaggacccgctgcatggggacctcagccctaggtgggctcaacgacgtagccctgatgaggacccatgagcatccccttcttagggcctccatgggtagcgtctacttgatagggcagacatcgttaccaatcacctttagcaccatcgaaaacttccgcatggagtacatcgacttcgacattgcccaagctctacctcccctacaacgccatccttgggtacacccatgctctacaaattcatggtttcgccaaatccacatggttagagaggatgatgagaaaaccactttcatcaccctctcgaagttaaagttgtactgttatgtttccatgccttatggtctaaagaacatgttgcctatttatatcattgttgttcattatacgcttaaaaatactagtatgaaaaaaggggcatcagcatcaggcatgaacaacatctgcaacagatacttgcaagcacaacaacatgtccccttgtctctaattatcttagtaaccaccagtgtttacatatccagcgatgttcaaggagtcctcgtgacaatggaagcttacagccctctttcctgtgatgatctccaagatcaggactccgaagccgtagacgtcagacttgacggagaaaatacttccatcgtgtattcagtagacatgtag

SEQ ID NO: 40671 - DNA, 903 bp, Zea mays
  Peptide Sequence Number=SeqID_82450
atggccatggacgcggagcggcggcaagcggagctgatcgcgcagttctcctctcaggcggtggctctttcgtccgcgcagcagctcgccgctctggtgctcgaggccacctcccacccggccctcttcgccttctccgagctcctcgccctcccggccctctccatgctcgctggcactcagtactcgtcttcactggacttgctccggctcttcgcctatggcaccttgaaggactataagagtaagatcgtggcctgcgcctttgcaatccttacattgttgccctttgcagataattcgggatcccttccagcattgttgcctgatcaggtccgaaagctaaagcaactcagtgtgctaactctggcagagtcaactaagatactaccatatgatcagctcatgcaagagttggatgtttccaacgtaagagaactcgaagattttctaatcaatgagtgcatgtattcaggtatcgtcagaggcaaactggatcagctgagaagatgctttgaagtacaatttgcagctggaagagatcttacacctgatcagctaaacaacatgatagagatcttatctgactggttgggaacatcagatagcctgttgcatcaaattcaggagaaaatcaaatgggctgacacaatgagtgatgtgaacaagaagcaccagaaagaatttgaagacagagtggaagaggccaaaaaatcaattaaggcagacatcgacatacgagggcatgacgactacctctctgaatctgtaggaataatggattttgaagaggaccgtgtccgaccaaagagtttgttctggctttctagatacacaacgttttactatgaatctaatctagatctaggtgcttatcaaaggaggcgacaaccactggcgtag

SEQ ID NO: 40672 - DNA, 207 bp, Zea mays
  Peptide Sequence Number=SeqID_82451
atggcagaagttgaacaatttaagcaggcagacatcgacatacgagggcatgacgactacctctctgaatctgtaggaataatggattttgaagaggaccgtgtccgaccaaagagtttgttctggctttctagatacacaacgttttactatgaatctaatctagatctaggtgcttatcaaaggaggcgacaaccactggcgtag

SEQ ID NO: 40673 - DNA, 732 bp, Zea mays
  Peptide Sequence Number=SeqID_82452
atgcaagccggcccagagcagaagaagccaaaccgccgtgtgcggtgcgtgcaatcgcccagcggttacaagcggctctccacttttgcccagaccagcgggcgaaagggcgggcagccatgcaggcggcatgcaaccgtgccaagtgggcgcacttctccgactcccaacacgcccagcatggaggcccaggcccacgcgtcatgccaccggcgcgccgaatgcttcgtgcatgcaactgcaccgccacttgcgccaccaccgcgcctcctcgactgcggaaccaataccgcgactcgaggcgacccagcgcatgacccaacagcgccagcctggcgcgacggtcaatgcggccaaaaatgggccggcagtaatggcggtggcaggcgggcaagagcagcggtcacgtcgtcagccaagcttacgtcccatccggggacaggaccgagaaagggggataccccgaaaaggatccttccccgtgaaggaactaggctccgagcctccctactgatcagaggttcgaaggctggcccctcggaagggttcaatagccgcctcagagcacgtgggctccacacccactactggtcagaggttcgaaggccggcccctcggaagggttcaacggccgcctcaggctactcgggctccgcgcccactactgatcaggggttcgaaggctggcccccgaagggttcacagccgcctcagacacagagcgagggatga

SEQ ID NO: 40674 - DNA, 996 bp, Zea mays
  Peptide Sequence Number=SeqID_82453
atggctgcccgccctttcgcccgctggtctgggcaaaagtggagagccgcttggagagtcgcctttaaaaggagggtgaccctcttggaaggtgaccgtgtcttcgcgctcccttatgcatcgtgtctttccatcttccaggcccccggatggggatatccgccggctttccgcttcgtcgttggaggaacgcaactctgcgggagttggtacctttcagccgtcgttcggcctcaaggattttcatcatgcagcccggtcgcacccctccgccggcggtcacccaagatggtgacctccagttcgatggcgggggagagcgaaccgggccgcgatcttggtcccaccctcagcttcaaggatgttcatcatccccgctggggtggaggccgggttgagccggagctctacctcccgcgcgggttcgtgggtcggcctctccttcggcgttcgagggagagggcgctcactggccctgcgggcgggtcggacttcgacaacacggggctgatcgacggcgggcgtcgtcagcctcagcgcgtcgggctcgtcggcttagctcctggtgccccctcctgccggaaggcggctgccgcgccgtgtgcacgggaggaccgcccaagatatcgcgtgctgtcagggcagcgttcgtgttctggggcggttctacctttgcaccggtacggcgcctccacacggagcagcatccgccctgaggccctcgccgctgcagttcggccacccggagcgggggtcgttgtcgctgctgccgggacgggcaacgactcgcctgttggttgtctgaactgcttcaccaagcgtgagtcgccccgtgtgaaggtgacgagtgaggagtccctcggctcggtcagccttgttgtccgaggcttccctggcttagttagaggaaaccctcggccgctcttcgatgagccgaggccaggggtagcggtgccagcgcaaacagaggcagagttggctcgaaaagaagactag

SEQ ID NO: 40675 - DNA, 594 bp, Zea mays
  Peptide Sequence Number=SeqID_82454
atgacattggattacaaatgtaccttcagtttgaaaggagatgaaagtacaagtgtgacgcaaaaacaaaagcccaatcagcgtgaacagtacggggatactgttcacctatttatagacacgggacacagcccatacaaaattacattcatgccctttacatttggtagtaattctatagtaattcaccgaggtctgaatagccttttcatctttaagtcggtttcattttctgctagcgtgccgaagctttcctgctcacatcttcggcgctgtatcaaccttcgtattattttaggcttctcctactgtgattccgactcgagtccgaagatggtcaatactaggaagggaggtggaattgatctacctgccaacccattcaaccggagggtacttagacaacaacaacaggccgacatgaatcctctgaatccttcaccagccgaagctgatctagtagttgcagcccagatgcagatgatgcaacagatggttgatactatggcagatatgcacgcgcagatgcgacaggagcgtcaggagatgcgccaagagagggaggagatgcgccaagagcgaagggtgcaatag

SEQ ID NO: 40676 - DNA, 504 bp, Zea mays
  Peptide Sequence Number=SeqID_82455
atgacattggattacaaatgtaccttcagtttgaaaggagatgaaagtacaagtgtgacgcaaaaacaaatgcccagtccgcgtgaacagtacggggatactgttcacctatttatagacacgggacacagcccatacaaaattacattcatgtcctttacatttggtagtaattctatagtaattcaccgaggtctgaatagccttttcatctttaagtcggtttcattttctgctagcgtgccgaagctttcctgctcacatcttcggcgctgtatcaaccttcgtattattttaggcttctcctactgtgattccgactcgagtccgaaggaccttcgtaagccgaaggcccccaacaagaacctcatcatggacatgcactacgaggcatgtatccaggccatcatcacttactatggctccgtgcttgggggaagaaggtgggcaagaaaggacgtctggaccatgtcgttggctccccagaccagtacttacacgtaa

SEQ ID NO: 40677 - DNA, 336 bp, Zea mays
  Peptide Sequence Number=SeqID_82456
atgagagatcttgagggtgtcccatgtaacaccccaggtgttactcaggcaaacttctcccctctctatctccctaccccgaccatatctcgacttggaactcacagcgaaaagataggatttggagcagagaagcgaccgagccgccgacgacccccgccgcctgtgctcgtggccagggtagctccgaccacctccgacaccgacccgcacaccgacgtgaccgtcgcgacctcccggacgtcactgaccaccccgccggagctctactgccgctgggggctttgcgcaatgtcagtgacccaagccaatagtggaccaagggttgttctgtga

SEQ ID NO: 40678 - DNA, 765 bp, Zea mays
  Peptide Sequence Number=SeqID_82457
atgaaccgatcctgcaggcttagacgtcgacggagggggagcagcagcaccctcggcgtcaactctaccttcggcgaagtccgaccgagcctcggacggcaacacggtcggagggtctccactccgaaggacgacgtcagcaccacgcccgggccatcgtcgccggggtctcctccagaatccggcccgagcatacggctcgaccggtcgaccccaagcctcagccagctgtcctccgaggacaccagcccggctcgtagcctcggcaactcgactccggcgtcggtcccgccagtggacggcccgaccaggcttcggccgacgaaatcttcttctcgagccaactctgcctctgtccacactgacactgctgcctccggctccggctcatcgaagagcggccgaggtttctatctgaaatctcggggcgagattcctttaaggggggagggctgtaacaccccaggtgttactcaggcaaacttctcccctctctatctccctaccccgaccatatctcgacttggaactcacagcgaaaagataggatttggagcagagaagcgaccgagccgccgacgacccccgccgcctgtgctcgtggccagggtagctccgaccacctccgacaccgacccgcacaccgacgtgaccgtcgcgacctcccggacgtcactgaccaccccgccggagctctactgccgccgggggctttgcgcaatgtcagtgacccaagccaatagtggaccaagggctgttctgtga

SEQ ID NO: 40679 - DNA, 345 bp, Zea mays
  Peptide Sequence Number=SeqID_82458
atgggaaaggttgcagtgtttatcaacaaaggcttcagtcaacaaagctctcagagtgtgcctaattttactctgaaaggtggctcatcaggtgcagatgatgctaggaaaatactcaataatgatggtacatgtccaatttgtgatcaggtgctctcaaaaaggaacatggttgctcctaaagacaacagaagaattgcagttgcagcattcatcagtggggagtggaaaggagttcaggaccaagccaatgccgtcttcttcaattttgatgaaaaagggggactaagggacgtttggatccgattgaggttccctaattttggtgaaaaattcaggatctaa

SEQ ID NO: 40680 - DNA, 1131 bp, Zea mays
  Peptide Sequence Number=SeqID_82459
atgtcggggtacggctcttgcagcggggacaggtgcgatctagatctgaggggcggtagcggcaggggcgggagatatgaggagtacaagtcagaatacatcacaactcagaagaaagcatactttgacctccataaggatgaagattggttaagaaataagtaccatcctacaaaccttggaaatgtcattgaaagatggccaatgctgttcctgtttgatgagaatctactgaggaaagtgtttgaactatactatgaaaatgggttattggatttatcatatgctccagatgttggtgactatttagtctgcgaggaagaacattgtcggacatggttctttatcagacgtggttccacaattctcattagtccctcaaactcgagtgttgaaaactcatgcatgaaaattgacctagactactgtgaatatgatctaaaaaagaaccgagactacatctggacagtgaattcagaatcattgtgtactgatattatatcggacaagagtgcaatgcttgctggcctgatttggaagggcaagctgtatcgaccacctgtggtcatcttttatgtatggttccactctactgccctctctggtgcagatgatgctaggaaaatactcaataatgatggtacatgtccaatttgtgatcaggtgctctcaaaaagccatatgaaacctatggatataaatccaggtgatgattggacaaatgcaacggaggacacagatattgcagttgaactttacaggctcagtgtttccaccctagatctattgaaactagcatccaaagaggaacagggtgcttatgtcggtgcatggtacaatatgcttctatcctgtgctcaagaattgaagcatggtgtggcactttggcaagagttttatcatgcaaatgtctgcgacagagtagtttctgaaggtggtcactacttgattgctcttggggagatatatagagttgcacagattttatacttatccttgcagcgtttcaagacctgggttcttgcagatcttggaatgttgagtaaaatgttgtcttgtttggacaactgcacttatatacgtaaaccgaacaagaatcgtgctgattcgagggctgttcttggaagatag

SEQ ID NO: 40681 - DNA, 384 bp, Zea mays
  Peptide Sequence Number=SeqID_82460
atgggaaaggttgcagtgtttatcaacaaaggcttcagtcaacaaagctctcagagtgtgcctaattttactctgaaaggtggctcatcaggtgcagatgatgctaggaaaatactcaataatgatggtacatgtccaatttgtgatcaggtgctctcaaaaagccatatgaaacctatggatataaatccaggtgatgattggacaaatgatttccccgtggttgtgttcccagcacctattggctattgcatcagaggaacatggttgctcctaaagacagcagaagaattgcagttgcagcattcatcagtggggagtggaaaggagttcaggaccaagccaatgccgtcttcttcaattttgatgaaaaagggggactaa

SEQ ID NO: 40682 - DNA, 483 bp, Zea mays
  Peptide Sequence Number=SeqID_82461
atggcgggtccgcttatagtattaggacaagttgatccggtgttaagggatggtgcagatgatgctaggaaaatactcaataatgatggtacatgtccaatttgtgatcaggtgctctcaaaaagccatatgaaacctatggatataaatccagggctgatgcccgactctcagctcagcacttccatcattgcgatgtgccaaaacaccgaagccatatcatacatgatcacctatggcttcgccgttgtcatcaccacaagggtgtccaacgagctgggagcctggaacatcgccaacgacaggaaggcgctcactgtgtcgctggcgctgtccctgatgctgggggtggcgttcctgctgctcctaggcctcggccacgacctctgggtgcgcctcttcaccatcagcgaggccgtggtcagcgccttcgcctccatgacgtcgctgctcatcggctccgtcgtgctggactccacgtag

SEQ ID NO: 40683 - DNA, 210 bp, Zea mays
  Peptide Sequence Number=SeqID_82462
atgggcttcgctccgatactagctgtgacggaacctcccaagtcattaggcccacctacagttgtccttgtccatcaaacctcagacaaccctgcaggcaccaccttggaacagaagcaacaaaaatttgctgcttcctcacctacaacaacatgggctcaaggatatgctggcttttgggaatcaagttttacttgtcaggttaagtaa

SEQ ID NO: 40684 - DNA, 626 bp, Zea mays
  Peptide Sequence Number=SeqID_82463
gctctagccgttcccagcgtcatccacagcaggccattgggaagaaggtgctggcgttggcgctagggcagcaggacccgaccgccgtggacaagctgctgtccacgcagcacccacagttcctggcaaggaagggctcccgtgctgcaggcccattgcccctgctccctccgttccaactctcccttgtgctcgctggtctgaccatagaacttgtatctactcctccgttccagctccagctcgcagcgcgtcctgctccttgttgtcgcgagttccagcccgaatttcgccttgtcgcccagctccttactcgccacggccctggtcgtcgcatcgctgtgcgcagcgtagcgtggtgggtattggtcgcgggcatggtcgggcgacgcgagatctgggcacgccgtcgtttcattatgcccaacgtcgtgccttttgtacctgtcgtcgattttctattcgccacagcgtcaagctcctcccgtccgtaccagccatcaaattctgctttcgcttccgtgccgcacgcactcatctttgctagctggtcgtacacctcactccgctattccgagtccgccaatcaccattgctcgtccgcgccaaaacattcctcgccatga

SEQ ID NO: 40685 - DNA, 196 bp, Zea mays
  Peptide Sequence Number=SeqID_82464
gctctagccgttcccagcgtcatccacagcaggccattgggaagaaggtgctggcgttggcgctagggcagcaggacccgaccgccgtggacaagctgctgtccacgcagcacccacagttcctggcaaggaagggctccgtgctgcaggccattgcccctgctccctccgttccaactctcccttgtgctcgctg

SEQ ID NO: 40686 - DNA, 1101 bp, Zea mays
  Peptide Sequence Number=SeqID_82465
atggccgccaacgatcacgtcttccgggccaccaacgaggcgtccgtcgccctcctgcgtgacctccgcgccggaaccgtcgacccgagattcaaagccttcatccaccacgcggacgtttacaccgctgtccctgaggagctggtcgccgacctggagccggtgccgggcaccgacgtgacggaggacgggtacaacaggcagtggtatatatactgtccgaagcgatacaagaacggcgagggaaggaccagcgggcacaggctgcgcgcggtggagacagccgggacgtgctggcactcggagactggcccgaagcccatggagggcttgcccggcgccacgttctgcagcctatcctacggccacaaggagaaggaggggacgtcgggtcggcatcgcttccaccgaatgggatggaggatgttcgagtacgacgacacccagggcggcggcggcgaccacgtgctgtgcaaggtgcaccgttcgtcctcgtctctggccaagaacaagtccaaggccaagaggacggcgacaggcgatcaccccgaggcgccgccaaccaaggtgatccacgacgtgcaggaccccgccggcgccatcttcactggtgcttacccgacgatggatgatcccctgatggtcggaggcgaggaggcatcagaggcggacttgggcaagttcaacgtcggtgacttgctcatcaacatcgacaatgtcgattggaaagctttgctagactatgtcgatggggagcaccagcagcaacaaccatgcgctgagccggccaagcagagcagtgacgtgcaggtgcatgtggaccccgccgccaccttcatgtcctccaatgttcatggtcatgaacaaggcggggattccatgatggtcggaggcgaggaagaacagcgtcgactcattgaggaggggttcaacgtcgacgacttgttcgacgtcaacaatgtcgattggaaagctttgctagagatgctagaagacgatgaggagcaggggctgccgctgcagcagcagccacgcgctgagccggcggtcgagcagagccagagcagcaggatcgaggacccatccgtgccgcccgtttga

SEQ ID NO: 40687 - DNA, 378 bp, Zea mays
  Peptide Sequence Number=SeqID_82466
atgggcttcgggccagtctccgagtgccagcacgtcccggctgtctccaccgcgcgcagcctgtgcccgctggtccttccctcgccgttcttgtatcgcttcggacaggataagtaccactgcctgttgtacccgtcctccgtcacgtctgtgcccggcaccggctcccaggtcggcgacctgctcctcagggacagcggtgtaaacgtccgcgtggtggatgaaggctttgaatctcgggtcgacggttccggcgcggaggtcacgcaggagggcgacggacgcctcgttggtggcccggaagacgtgatcgttggcggccatatgccaccgatctccgatctccaggtggtgatggtgtatcggccggccggctag

SEQ ID NO: 40688 - DNA, 216 bp, Zea mays
  Peptide Sequence Number=SeqID_82467
atggtggcgggcgacgacaaggtatccggcgcgaccacgaccacgaccgcgccgccgctcggccacaaggggaacccagtggaggtggacaatgaggacttgttgacatggtcgccagcacgcaagaagatgagggcggcgggcgcgggcgccgagagctctgaagcagcgtcgacggaggctgttaaagttttcatcatgtttcacaacacataa

SEQ ID NO: 40689 - DNA, 2694 bp, Zea mays
  Peptide Sequence Number=SeqID_82468
atgtcccgctccgactcgccttcgccatcgccggctgcggcgcgacgcgcgcagccttccgacgcgacgctcgtgaatgccttcctgtggccctgggtgaccttgggcatcaccatgccgggcggcgtgcacgcggtggacctctactccgcggaccctgagaagctggcgcgagggtaccagccggaggtctctctggacggccagtgcacgtggtacttcctcagcccgctgcgccccaagagcccccacgatccgcgcaaggtgcgcaccgtcgccgacggtacggggtgctggcgcagcgactccggggtcaagaacgtcatcgactgcctggacggcgcccgccacgtcggctaccgccagaacttttccttcatgaggagggacgccgccggtgcggacgctcggtcaggctgggccatgaccgagttccacctccaccacagctacgacgagcacggccacgggggcaaagtcgagggtctcgtcctgtgtaagatgtaccgcaaccgcaaccggcgcatccacgggggcagcgacgacgtggtgcccggcgtatcaccgtgcgcggaaaagacgttttcgtgcgggaagagccagccgataggccacgactattccaaagccaagaactcggacggcggagccacggctacagggacgatagcgccgccccttctcaacagcatggtggcgggcgacgacaaggtatccggcgcgaccacgaccacgaccgcgccgccgctcggccacaaggggaacccagtggagatggacaatgaggacttgttgacatgggcgccagcacgcaagaagatgagggcggcgggcgcgggcgccgagagctctgaagcagcgtcgacggtaagcaatccgacgcccgaccaggcgccgtcccccgtgtggctaggagacgccgcatgggtgcggcgtcttcatgctgtaggagagggtacccctgatttagggtaccgacaagcgggtgcagaggtggccgagatggaaatggccagtgccgctggaggtgtgccaaagaagctggacgacgatccggcggcgcacgccgcggagccgtggccgccggcagcgagggaggagaagaataagctgtggcgccgggttttgctcgtcggcagcctggtgactctgccgctcgtcgccttcttcgtgctcggccgggagagcgcgtcaacggcctggctgcagatggctattgccaagctcaccgccatgaacaatggaacagcagagggtcctcacgtgcacggccgtgacgagcttcttggagggctgctcgctccgggcatggaccggcgagcgtgccggagccggtaccagtcatggcagtactacaagcacttccccttcgcgccgtcgccgcacctcctggccaagctgcgcgcgtacgaggctcggcacaggcggtgcgcccccggcacgccgttgtacgccaagtccgtcgagcagctccggtccggccgcagcgccgacgacatggagtgcgcctacatcgtgtggctccccttcgacggcctgggcaaccgcatgctgtccatggtgagcggcttcctctacgcgctgctcaccgaccgcgtcctcctcgccgccgtgcccccggactcggccgacctcttctgcgagccgttcccgggcgcgacgtggcggctcccggcggaggatttccccgtcgccaacctgttcggggtcggccaggacattgatcggtcgtacacgaggctcgtcggcgacggcaaggtcggccccggcctggctgctgcgaacgcgactccgtcgtacgtgtacctgagcctagggtggcagctcaaggacccgctcttcttctgcggggagcaccaacgcgcgctcggcaagatcaactggctgctgctgtacagcgacctctacttcacgccgtcgatgtacgcggtggcagagttccaggacgagctccggcggctgttcccggagagggagagcgtgcaccacctcctgtcccggtacctactccacccggccaaccccgtgtggagcttggtcaccaggtactaccgctcctacttgcctgcggcgacgcggaggatcggcgtgcagatcaggatgttcggccactcttccatcccggccgacgacatgtacaaccagatccttaactgctccaggcaggagcacatactcccggaaaccgaagatggtgacgaggatgcgatcgaccggaatggtggcgatggctccaacaactccacggccatcttggtggtctctctgtacgccgaccacttcgagagactgaggtcgaggtactacgagcacgcggcgaagggcggcgaaatggtgggcgtgttccagccgacgcacggggagcggcaggcgacggacaacctggcgcacaaccagagggcgctctccgagatctacctgctcagcttctccgaggagctgatcacgtccgggctctccacgttcgggtatgtgagcagcggcctcgccggcgttcggccggcgatcctgctcactgcgttcgaccacaaggttcccgagacgccgtgccggcgggtggtgtccatggagccgtgcaacctcacgccaccccggggcctcgagtgcacggacaagcccgcggacgtggaggacctagcacgccatgttagggtctgtgaggatttcaacgatggggtcaagttttttgactag

SEQ ID NO: 40690 - DNA, 285 bp, Zea mays
  Peptide Sequence Number=SeqID_82469
atggggagaccagaaactacactagtgagaaccccgccagtggagcaacagagcttggtcccacacaaggccaagcccggtatccccgggaaggcaaaacacattacccaggtaggtcttagttttcttcctcctactttggaacaaccttggaacagaaacaatagaactcagcagtttcatcacctacaacaacatgggtttgaaaaccctgagtacggagtgtactttcacaagtcttacccgtcaaaggaaaaagactctcaaggatatgctagcctttag

SEQ ID NO: 40691 - DNA, 309 bp, Zea mays
  Peptide Sequence Number=SeqID_82470
atgggtttgaaaaccctgagtacggagtgtactttcgcaagtcttacccgtcaaaggaaaaagactctcaaggatatactggcttttgggattcaagaccagaatgggttcacgccaaccgagagcatagatacaccaccgtcaagcctcttgccacgaagggtacacgctactctcgccacctctccactcccattgcatggtggcctttctggtattggttcaactgaggcaaagcttacccatgacgaggcatatggccagttaaaaggtcctcggtcagcaggcctacatcgactcggtccttaa

SEQ ID NO: 40692 - DNA, 3255 bp, Zea mays
  Peptide Sequence Number=SeqID_82471
atgcccgactccgccgatcccctccccacgcaagcctcgccggatccggacatgccgccgcggaagcctacagctggctgcggcggcggcaagctcaagaagcctctcactgacaagcagcgcgctgccgcggagcagcgcctgtcccacctccgcgcccacctcatcctccgatccctcgagtcctcagctgccggggcccgtgccctaccgccggcgcaggaggcggcgctcgatgccctaggtctgctcgagtttttccgcctcgacctgcaatccgacaccctgcgccccgacctcatcgccccgctcgtcgcctactacgacccggtctgcaagcgcagcttcgtccgaggcgtccgtgtcgccgtctcgcgccacaactttacccgcgcgctctgcctaccctcgaagccctccccctcggcgccggccccagccgacatcgaccccgcagccgtggtgcctgccgttatgcagctcctgaaggattacgttctgctcccgttcctaggagacgacatgtgcatactgccgcaggaagtggccgccgcggagcaggcggtcagggagggggcggcgcatagggttgactgggcgggcctgatgtggggcctcgtcgagaaggagatcctcgagctgcctaagagggaagacggggtgtgctactacgggcctcatctgcagaggctcatttatgcccaaaagccacatttgttggagctggtggaggaagggggcacaggagagcctgctccggaggcatccactgatgtggagatggaggaggatggtgatgtggatatgaaaagcaagagcttggtggagctggagctgggggatagggatggggatgccagtaacgacgtgaggagcaagagcttggaggagtcggaattgggaaatgctagtgcaaggagtgatggtttggacgagttggaattgggggtttctgttactaggaacaaggtcatggaggagttgggtttaggggatatggatgacaggaacaacagtatagaggaactagaggtggttgaggaagatgcaaggagcaagaggttggatgaatatgagtctgtggatgtggatccggatgccatggataacaatatagatgaaataaacacagtcaatgaagactcaaggaggaaaagcttgaatgaatctgagactgtggatgtggatccggatgccatggacaacaatatagatgaaatgcaggcggtcaatgaagactcaaggagcaagagcttgaatgaatctgaggatgtggatgtggatccgcatgccatggacaacaatatagatgaaatggagatggtcaatgaagatgcaaggaccaagagcttggatgaatctgaggctgtggatgtggatccggatgccatggacaacaatatagatgaaatggaggcagtcagtgaagattcaaggagcaagaccttcaatgagtctgagtctgtggatgccatgaacaacaatatagtcgaattggatgcggtcaatgaagacacaaggagccagagattgaatgatgaatcagagttggtggaagaggatgttaagggtccaaacttagatgacaagaacactgcggatgagcatgtcaatggcacaaacattgatggaatatgtttgggatttgtggcagttgaagtggtgcctgctgtacatgaggcaaggcttgacaataatgaggaaacagcagaggtagcaccaatggggggcgatgatgtgccagtgcctacagatgtggatggtgaagaacccttggtggaggcagcagctgtaacacaggaggtagtggctgttgcagaggaattgggggatgatgaggctgaggaggatgaagagaaggatgcaatgggattgagcttggggtttgactctaccaatggttatgttgctatggatgtggaagaggaaactaatgttgagaatctggacgaggatgagagtgacagtgccaatgaagaggcagaggagtcagaggatgatgcatttgaggttaatgatggagaggacatgaattggagaattggggatggcaggggggatgagggaatgtcacattctttgcaacgctgtaacacatttggaggcatggagtttgagaacctgaatgaaggggagactgtaatgaaggatgagttgaggtttgatgatttccctgcgagggcatcttcagaaaggatgacaccatcaaacctcctccaagccatgaactcaattccctcaacgtacaatgtagcagggaatgtgcatgatctgccttctggggatttcttggctatgggggctgatgcacataagaatggagtggatctgggaccagggagctcatatttatttgggaataatggtaagaggaatattgatgatattgatggttacgatgacaatatgcaggcgcaagaggactttcctcagtctaatcagcagaagaggatgcgccatagtaacagtggcaacatatcacctggatcaggctttttcaacgcaagcttttcggtacctatacagaacttgatggttgaggcaagcaggctctatgagcagaaggagcaaaaacttcagagtttgcaatttgagaaacaacattggtctgacatgctgcaagagaaggaagccattatccaatccctaaactcagctcggtttgagcaacagaacaagtatcaagtggagcttagacgcttcgagcatgatctgaatgttatggcccatttggtaactacctacaaaagagctttaaaacagacccgggcttcttttgatgagtacaggaagaagttcccttgcaatgttcctctttatgatgatgttgctggtggtggtggtcttgttcttagtgtgagggagttggagaagaggcggtgtgaggaggagcagcaaaaaattgccatgcttcccccgccacacccctccctctccctcgaccacgagctggtaagcaacctctaccaccatccccacgtcttccattgttgttacctccgaacttcaccaatagcagtgcgcggcttccttgttaggcgggcggtgcggaagctgcacttgctgatcagctcatcgctgcaccaactcgcagcctgcacgcccaaccaccaggtctcgtctatactttttgaaccccctgcagaagtcgagatctggctcgaggacgagctggtcctcaagggagggggagatgtcatgggcatcatagggagcgagaggcaacagccaggcggggataaggctagagaataa

SEQ ID NO: 40693 - DNA, 625 bp, Zea mays
  Peptide Sequence Number=SeqID_82472
atgacacctggtatcagctctaggttatcctcaccaccaccagccgcccatccctcaccgccaccagccgccgcgccatcagccgctgcaacgccctcccacccgtcctctccaactccagatgcattcactcggctcgaagagagttttggccatttcgcagagaagtgggatcagttcgttgtgatgttccaccgctacaaggagaagacagagaaggaactccaagtagcggtgcggcttcagacgacagcgcgagggttcctggcacgccgccaggccatggtgcgcctgcaagccacagtgcgcggcttccttgttaggcgggcggtgcggaagctgcacttgctgatcagctcctcgctgcaccaactcgcagcctgcgcacccaaccaccaggtctcgtctatactttttgaaccccctgcagaagtcgagatctggctcgaggacgagctggtcctcaagggagggggagatgttatgggcatcatagggagcagtcactcatgtggggctgcacctatgcgcgccaaaagcgagaggccgcaggggcgctggcagcagcgcgcgcaagaaggcatggcaaaggaaagcgcgcgcaaggaaggcatggcaaaggaaa

SEQ ID NO: 40694 - DNA, 234 bp, Zea mays
  Peptide Sequence Number=SeqID_82473
aacgacgcttgtccgcctgcttgtgagtcagttctgccactctttcctgctgaagcaagaatccgaggcatgactagaccactcttcgatgagatagtcaagaccctgtgcggggaagctaggtccaaggactgcctcaagctttggctctttgccaactctcttactaaatcggccttcccctgtagagaagccgtttcctttgaacttgcttggtccatcggacagatatag

SEQ ID NO: 40695 - DNA, 441 bp, Zea mays
  Peptide Sequence Number=SeqID_82474
atggatggtgcttcaggttcagggttcggcggggtgtggcttgtggatggttcggacgcggcattttcctccgactccgataagttgaggtacttttgccaactctcagaggcggatcccgaagccgacccagaagaattcatccaatttatgagagcggattcgctaccgaagaagacccccaagagagaaagaatcaccaaggcgagactcccagggcagcccatctttctcaaaaaggaagagaggaacgacgcttgtccgcctgcttgtgagtcagttctgccactctttcctgctgaagcaagaatccgaggcatgactagaccactcttcgatgagatagtcaagaccctggcccaccccgtctccacaggatctcttcccggggataccccccaccctcacctttctgaggactataaagccttctcgaattag

SEQ ID NO: 40696 - DNA, 357 bp, Zea mays
  Peptide Sequence Number=SeqID_82475
atggatggtgcttcaggttcagggttcggcggggtgtggcttgtggatggttcggacgcggcattttcctccgactccgataagttgaggtacttttgccaactctcagaggcggatcccgaagccgacccagaagaattcatccaatttatgagagcggattcgctaccgaagaagacccccaagagagaaagaatcaccaaggcgagactcccagggcagcccatctttctcaaaaaggaagagaggaacgacgcttgtccgcctgcttgtgagtcagttctgccactctttcctgctgaagcaagaatccgaggcatgactagaccactcttcgatgagatagtcaagaccctg

SEQ ID NO: 40697 - DNA, 450 bp, Zea mays
  Peptide Sequence Number=SeqID_82476
atggatggtgcttcaggttcagggttcggcggggtgtggcttgtggatggttcggacgcggcattttcctccgactccgataagttgaggtacttttgccaactctcagaggcggatcccgaagccgacccagaagaattcatccaatttatgagagcggattcgctaccgaagaagacccccaagagagaaagaatcaccaaggcgagactcccagggcagcccatctttctcaaaaaggaagagaggaacgacgcttgtccgcctgcttgtgagtcagttctgccactctttcctgctgaagcaagaatccgaggcatgactagaccactcttcgatgagatagtcaagaccctgagccgtggatccgacaaccttgtctactgtaaggctggggatgtgagtctatgcgttctccactccattctattgatgcttcttattagctag

SEQ ID NO: 40698 - DNA, 576 bp, Zea mays
  Peptide Sequence Number=SeqID_82477
atggttgcctttcaagggggtcaccctccttttaaaggcaactctccccacttgcgtcctcagccgtcgcgggctgagtcttctccaacacgctccaaggtcctccccctacgacacgagggctgggtcccacgcgtcgcgcaagccggcccaagacagaaggagccaaaaccgccgcgcgcggtgcccgtaactgcccggcggttacgagcattcttccactttcgcccagaccagcgggtgaaagggcggaccgccatgcaggcggcatgcaaccgcaccaagggggcgcaccctttcgacttcgacgcgtccagcatggaggcccaggcccacacgtcatgtaaccgggaccgggaaaggggatacctcgaaagggatccttctccgcgaaggaagcgggccccgagcccccctactgatcagaggttcaaaggctggcccctcggaagggttcaacagccgcctcagagcactcgggctccgcgcccactactgatcagagattggaaggtcggcccctcaaaagggttcaacggccgcctcaggccactcgggctccgcgccaactactga

SEQ ID NO: 40699 - DNA, 1134 bp, Zea mays
  Peptide Sequence Number=SeqID_82478
atgcaggtggcatgcaactgcaccaaggggacgcaccctttcgacttcgacgcgtccagcatgaggcctaggcccacacgtcatcagggcaggcggcacctttggcaggcgaagcgggcgacgcttcacctccgccatgatgaccgcatcaaaaaagggaccgggaaaggggatactctgaaagggatccttctccgcgaaggaagggggccccgagccctcctactgatcagaggttcgaaggctggcccctcggaagggatcgacagccgcctcagagcactcgggctccgcgcccactactggtcagaggttcgaaggctggcccctcggaagggttcgacagccgcctcaggccactcgggctccgcgcccactactgatcaggggttcgcaggctggccccccaaagggttcgacacccgcctcagagcacacagagcgagggatgactctgggtacgtccgatacatggccgaggctcgggctacgctcccgaggagcattcaatgcaaggatcgcctgacaccttatcctgacgcgcgctcctcagtcgacaaggccgaagaaaacagcgccgcctgcgctgctccgactgttgtgccacccgccagggtgagacagacagcagccaactccagcctcgggcgccataggaagctccgcctcgcccgacccaagggctcggactcaacctcgacaccggaagacggtctccgcctcgctcgaccccagggctcggactccacctcgacctcggaaaacggtctccgccttgcccgaccccagggctcggactccacctcgacctcggaagacggtctccgcctcgcccgaccccagggctcgggctcaacctcgaccacggaagacgatctccgcctcgcccgaccccagggctcgaactccgcctcgcccaaccccagggctcgggctcaacctcgaccacggaagacgatctccgcctcgcccgaccccaggactcggactcaacctcgacctcggacgacggtctccgcctcgcccgaccccagggctcggactcagcctcgacctcggaggaatcaccgcctcgcccgaccttgggctcagaccgaccacgctacagggggcccatcattaccctacccatag

SEQ ID NO: 40700 - DNA, 1779 bp, Zea mays
  Peptide Sequence Number=SeqID_82479
atgggtgcgagggctgctgcttctggcgcgggcaagctgccctcggccgagcccgcgaaggagcgaaggccgctgtcgtcggcacgcactgacgtggcggtggcgcatgttgccaactttgacatggacatctgcgtgggggattatcttgttgttggctgttgtcccgactccggtggcggccccttcgccaacggcggtggttggggtgaagggtgcttcgcagacccgtggtccaacttctgcgcgagcggcgagattttatcggtcgtcgccgctaaagatgtggcaggctctatgtcccagcagctgaggcatgcgtcacagcagctgaagcatatcgagcgtctccgggcgcagcatacagatactgttcgggagaagtcggctacggaaaacaaaagccacaagctaacggagaggctggctgctgcggaggccgagaagggggatctccggcgtcagttggcggaggagagtagggacgcgaacaaagccattgttgatgcgcaggctgcacaagccgaggtcaaacttgcacgggcggaggccagtctcgcccgccaacgtgtcgaggagctggaggtgaggatcaaccgcctgcgcaaccgcgtggacaaaaccgaagtctcgacgagcgcggaggttgagcggacgcatgcgcagttcgtggacgcgtaccgggagctaggtgcgcggactgccgccttcgaagcgcccggccaagaggcgggtctctgcttccttgagcggttacaagaggagctgggggttctcccgacaatcgtgacgggcctcatgtcctttgcctccctcgtcacctatgagggggtcgtgaatgctttgtcccgcgaggggtgcgggcacttcgaggtcttcaacctgttgaacgaaggcttcaaacgcgaaatcttccaggtcgaggacccggtgctgaagcggtcggcgggggtgctcttcgacaggatgtggggccctcacggccgagagacggtccgggagaggtccgatcgggcaatagatcagatggcgcatgacgaagaggttgaggaccttggcgagcaggacagcacgctgcccgaggcatcgagggtggagctggcgccgccatccgatgcgggcaagggcccctcggcgacccccgcgccgactggagctggcgaagaccccgcgctagcccctgcgctgacgggtgaggaagcctcaaaggcggtgggcgaaccagttgccgaagaccccgcggcggtggccgggccttcgcaggttccgacgtttgggcctgcgcaagcaaccgctgctgacaatactgattttgtggctgcctcaaccgtagtgcctgccgatgatagtttgtttggttctgtgtctgggtgttttgagtctgatggtgaatccgggagttcgtttccttggacggaggagtcctcggatgaaggcttggattattttattgcgttggatgtggctacggcggagacttcgccgcgtgtggagggtgtcggggatcttcctagtgcgagtactgggtataggcagcgaagggtggcggggaaacatagtgtgggtggattttcgcgaagtggtaggcaccgtcgtatggggatggagcgtggccgtctccgagtagaccaggttggtaaacaagaattgttgtcctcgccgattggggcgagcataggcgagggggatcttcgaaatctttttgagggtgaggaattgaggataatgttgttcaattacagggagatgcgtatcatcccgaaggttgagctgatgtaa

SEQ ID NO: 40701 - DNA, 2307 bp, Zea mays
  Peptide Sequence Number=SeqID_82480
atgtcgctcgacactaagctcatcctcgacgccattagtgagttattcgacaagttcgacgcgcggtgggccaagcgagacgcagcgcgggaggcatccaggtgcgtccctgttccgagccagtccgcggctgtcggagtcgacgtggtcgccgataactgggacgacctcttcgacaatggcgacgactccgtcgagcagcactatgaggagcccatcatcgctgacaactggggcggattcttcggtggcggggacgcggctgccaacaccgagctcatcggccactgggacaacccttcctccaaccccgacgcgactgcctgcgtcacgccagaggttgcggtggaatcggtgcacccagccgcacacgaccgcttcttcaatgatgattcgggtgtcccgcttgacttggacgatgacagctccgtccacggcggccacggatccgtgttgtcccatctcctggagcgcgaagccgacaccgccttccttccccactcagatcagtgggatggagccgaggcgcggctcatcttgcacgggtgcactgccgactccttcaacgttgcctccaagagtgtctccgtgcgctgtgacctcaacgtgacgatcgatgggcaccagcacatcattgacgagaagcgtctcactgcttgcatcggaggtatacctgccaagtgttcggcaaaatgcttgaacgtctcgtcaatgcccaagctggcgctggccatcccggaggagccggagaataacgtcgcgtcagagcccgtcgtggagaagccggtgaccaatacgagcaccgaggcactggcggactacgtccatggcaagggctcaagcttgggatctactacgacgctgggttctagacctgcgccaaagcccagcccgagcccctcgatcatgaggagcaggacgtctgcattcaacaatcttatttatgggaatgcaaaaggaaggctgcaggcagcacgggaggttcatgccattatgacatgccgtgaggtcccaactgactctgaatcacatgagctcctagttgatagctttctgaacaagaacgagcatgctcacgcaaagacgacattggacagcatgatgcaacagggtcatctgccaagcctagctctgttcaagtctgttatggaggacgccgcgaaggtgttcgacgaaatgctgattaaaggagaggtgtcaccatcaacggtgatgtacactgctctgatcaatacctactgcacgggtggaaatctggaaggcacatatgagatcatggtagagatggagaagaagatgatttccctagatgaggtgacatataatatgctgatgagggggttttgctggcttgggcgacttgatgaagttcgcaggctcattgacgagataaaaaggaggggtattcatccagaccttgtcagccataacatgctgatcagtggctatagcatgaagggtggctggggcaatgtgatagtggacaatgttgtcacacatttctatggtgctttagaagctgtgtacaagcgtaatggagtgcctgcattgtttgctgaggtcaagaaagcatcccctagtaggggcgtgctcagggaggactttaatcctgttgaaattgttcaaccttatgaaaagaatggagctacatgtttgagcattttgacggataaaaaatactttcagggaagctttgagaatcttgagaaggtgcgcacctcaggggtgaagtgcccccttctatgcaaagagtttgtcattgataagtggcaaatctataatgctcgctctaagggtgctgatacaattctactaattgcggcagtgctaccagatcttgtcataaggaaatttgttcagatttgtgaagagttggaaatgacagctcttattgaggttgatgatggaatagagatggagcgtgtgctgaatataaatggagttaagtttactggtataaataaccgaagccttgagacatttgttctttacacttcgaacaccaaaatgttgctcggtaggcatggggatagaatcagggagaagggaattttggttgttggtgaatcaggtctgtttactccagaagatgttgcttctgttcaaaatgctggtcaagtctgcaatgctacttcttgtctactactgcacaaggaatttgcaaagcaattctgggatagattggttggatgggcacagaatatgaaagtatcaaatccagtggaggacgactgcagactgggttcagttgtcagtgaagaacaatacgagaaaaataaagaaattgatctcggctgcaagaagtga

SEQ ID NO: 40702 - DNA, 2580 bp, Zea mays
  Peptide Sequence Number=SeqID_82481
atgtcgctcgacactaagctcatcctcgacgccattagtgagttattcgacaagttcgacgcgcggtgggccaagcgagacgcagcgcgggaggcatccaggtgcgtccctgttccgagccagtccgcggctgtcggagtcgacgtggtcgccgataactgggacgacctcttcgacaatggcgacgactccgtcgagcagcactatgaggagcccatcatcgctgacaactggggcggattcttcgctccgtccacggcggccacggatccgtgttgtcccatctcctggagcgcgaagccgacaccgccttccttccccactcagatcagtggggatggagccgaggcgcggctcatcttgcacgggtgcactgccgactccttcaacgttgcctccaagagtgtctccgtgcgctgtgacctcaacgtgacgatcgatgggcaccagcacatcattgacgagaagcgtctcactgcttgcatcggaggtatacctgccaagtgttcggcaaaatgcttgaacgtctcgtcaatgcccaagctggcgctggccatcccggaggagccggagaataacgtcgcgtcagagcccgtcgtggagaagccggtgaccaatacgagcaccgaggcactggcggactacgtccatggcaagggctcaagcttgggatctactacgacgctgggttctagacctgcgccaaagcccagcccgagcccctcgatcatgaggagcaggacgtctgcattcaacaatcttatttatgggaatgcaaaaggaaggctgcaggcagcacgggaggttcatgccattatgacatgccgtgaggtcccaactgactctgaatcacatgagctcctagttgatagctttctgaacaagaacgagcatgctcacgcaaagacgacattggacagcatgatgcaacagggtcatctgccaagcctagctctgttcaagtctgttatggaggacgccgcgaaggtgttcgacgaaatgctgattaaaggagaggtgtcaccatcaacggtgatgtacactgctctgatcaatacctactgcacgggtggaaatctggaaggcacatatgagatcatggtagagatggagaagaagatgatttccctagatgaggtgacatataatatgctgatgagggggttttgctggcttgggcgacttgatgaagttcgcaggctcattgacgagataaaaaggaggggtattcatccagaccttgtcagccataacatgctgatcagtggctatagcatgaagggtggctggggcaatgtgatagtggacaatgttgtcacacatttctatggtgctttagaagctgtgtacaagcgtaatggagtgcctgcattgtttgctgaggtcaagaaagcatcccctagtaggggcgtgctcagggaggactttaatcctgttgaaattgttcaaccttatgaaaagaatggagctacatgtttgagcattttgacggataaaaaatactttcagggaagctttgagaatcttgagaaggtgcgcacctcaggggtgaagtgcccccttctatgcaaagagtttgtcattgataagtggcaaatctataatgctcgctctaagggtgctgatacaattctactaattgcggcagtgctaccagatcttgtcataaggaaatttgttcagatttgtgaagagttggaaatgacagctcttattgaggttgatgatggaatagagatggagcgtgtgctgaatataaatggagttaagtttactggtataaataaccgaagccttgagacatttgttctttacacttcgaacaccaaaatgttgctcggtaggcatggggatagaatcagggagaagggaattttggttgttggtgaatcaggtctgtttactccagaagatgttgcttctgttcaaaatgctggtcaagtctgcaatgctacttcttgtctactactgcacaaggaatttgcaaagcaattctgggatagattggttggatgggcacagaatatgaaagtatcaaatccagtggaggacgactgcagactgggttcagttgtcagtgaagaacaatacgagaaaataaagaaattgatctcggctgcaagaagtgaaggtgccacaattctatatggagatggccgaccacaacatctcagaagagggctctttcttgcacctacaattacaacagttgttagtacgttcatgcaaattgggcaagaggaagtttttggaccagtcgtccgtgttaaggagttcaagacagagagtgaagctactaactttggcttagctgatgttgtgatattccatggcgtcttacacttgcaatgggatcccggtggaatcaatatgatatatcggctcgagggcaagccgaattttaagaaggggggaatgttaggaaccaggcccatatggtacacaccagcccaactagctgaaatgagcattataaggagcaagaacaaggggaggcgagcatcatcaaagaaatattctgaacactacggactcctattcatcttccacctcaagctcctctactccttctacatctag

SEQ ID NO: 40703 - DNA, 1104 bp, Zea mays
  Peptide Sequence Number=SeqID_82482
atgcaggcggcatgcaactgcaccacggggatgcaccctttcgacttcgatgcatccagcatggcggcccaggcccacacgtcatgtaaccggcgcgccggttactacgtgcgaaaaactgcaccgccacttatgccaatgctgcgccttctcgactgcggaaccgatgctgcgattcgaggcaaccctgcgcatggaccaacagtgccagccgagcacgtcggtcacggggaccgagaaaggagatactccaaaagggatccttctctgcgaaggaagcgggccccgagccctcctactgatcaggggctggcccctcggaagggttcgacaactgcctcaggccactcgggctccacgcccactactaatcaggggttcgaaggctggccccccgaagggttcgacagccgcctcagaacacgcaaagcaagggatgactctgggtacgtccgatacatggccgaggctcgggctacgctcccgagaggctcgggggctgctctcgcaaacccagctccggccaaaccgttgacagcgtcaacatacgagcccgagaacttggaacctgaccatgcacccgggctacgaccagtcaaggctccgtccactcaagggacacgatctcgcctcacccgagcccagcctcggacaggaacagtagacccaggtggattcacgcctcgcccgagggcctcctcaagcaacgggcgcaccttcgactcgcccgaggcccagctcgggcaggcttcgcggagaagcaaccttggccagatcgcctcgccaaccgaccgtatcggaaacagcgccgcctgccctgctccgactgttgtgccacctgccaggatgaggctgacagcagccgaatccagccccaggtgccataggaagctccgcctcgcccgaccccagcgctcggactcaacctcgacctcggaagacggctacggggaacaagaccggtgtcccatctggctcgccccaataaacaaggaccccccgaggtcgaaacgccgacaaaacccgaaggtggcaagtttgaagtcgtgcggccctgggcaccggacactgtccggtggcacaccggacagtccggtgcgctag

SEQ ID NO: 40704 - DNA, 1068 bp, Zea mays
  Peptide Sequence Number=SeqID_82483
atgtccggtggtgcaccggacactgtccggtggcacaccggacagtccggtgcaggaatagctgaagcagactcttgcgcctcaggtgcaggaatatccttaggtgctcatacaccaacctttgagcctgttcctgagtcaagtgtctcgacagttgacgacagaactcctgaggacaaagaaaggtggtggaggaggggcttgagagacatttcagaggggaagttggctattgttttattggctggtggccaggggactaggcttggcagttctgaccctaagggatgttttatggtaactgttaagagacgtgcagatattttggtgtacgtcgccgagggacaggaacccaaggactgcacacgtcgaaaaccaccgagcgcctcgaccagctcgacgacgacctgcacatattctgcgtcaagttcgtcggcagggaccaccgcctccaggataatggttgagatcgaggaagtccctcgtgagaaagtgaatttctcagaagagcttttgagaagcacatcatttgctcgccaattagcggatcagatgactttagcaaaggcgtatgtcatccttgcaaaagagcatggtaatcttcagcttgcatgggagcttagttcgcagattgtgtttagtatcttccttagcttcagccttgctgccatgtatggtgttgatgtggctgctcttggaatgctgagtaccattgccacaggccttgctattgatgcctatggccctatcagtgataatgctggaggcatagctgaaatggctgggatgagccataggattcatgagagaactaatgctctagatgctgtaggaaacaccactgctgcaattggaaagggttttgctattggctctgcagccttggtatcccttgcactcttcggtgcctttgtaagccgggctgctatctccactgttgatgttctgactcctaaagtattcattgggcttattgttggtgctatgctcccatactggttctcggcaatgaccatgaaaagtgtaggcagtgttgcattcaagatggtggaggaagtccgccggtag

SEQ ID NO: 40705 - DNA, 435 bp, Zea mays
  Peptide Sequence Number=SeqID_82484
atgaacaagcttgattcgttgatcttggaggcagttgtgagcttgatcatggcctatcggttcaggcgtccacatggttttgctattggctctgcagccttggtatcccttgcactcttcggtgcctttgtaagccgggctgctatctccactgttgatgttctgactcctaaagtattcattgggcttattgttggtgctatgctcccatattggttctcggcaatgaccatgaaaagtgtaggcagtgctgcactcaagatggaggaagttcgccggcagttcaacaccatccctgggctcatggagggcaccacaaagcctgactatgcaacttgtgtcaagatctcaacggatgcatccatcaaggagatgatccccaggtgctcttgttatgctgacaccactgatcgttggaattttgtttggagttga

SEQ ID NO: 40706 - DNA, 519 bp, Zea mays
  Peptide Sequence Number=SeqID_82485
atggtggaggaagtccgccggcagttcaacaccatccctgggctcatggagggcaccacaaagcctgactacgcaacttgtgtcaagatctcaacggatgcatccatcaaggagatgatccccccaggtgctcttgttatgctgacaccactgatcgttgggattttgtttggggttgagaccctcgctggggtccttgctggtgcccttgtctctggtgttcaggttggtgggagttcctctcaaatttcgattgccatttctgcatccaacactggtggtgcctgggacaacgccaagaagtacattgaggctggagcttcagagcatgccaggacccttggcccaaaaggttctgaccctcacaaggcggctgtcattggtgacaccattggagatcctctcaaggacacgtctggcccctccctcaacattctcatcaagcttatggcggttgaatcccttgtcttcgcccccttcttcgccgcccatggtggcattatcttcaaatggctctaa

SEQ ID NO: 40707 - DNA, 417 bp, Zea mays
  Peptide Sequence Number=SeqID_82486
atgaaggccaagtcacaccatcaaccaatcatcctaaggaatacctgcaaaaattatgccacaagcaaggctgagtatactaatactcagctagacatacccggtgtgagtcatctcatttccacttgttacttaatgcagtacaatggatcaagcagtctcattacctgtgagaagcagacgattcgaatcgagcttttatccttgcaagtgaccgcacttgtacccaccataaccggaatgggagaccacgtctcaggtcgcatgagtggtaaagtctactgccaggttcaatcagatagtgtttgctgggggaggtactcgcttggcgagcatccactggttagtgaaagggaaatgtgcccttgggccatttctaagtgttttggtgatttagtgtccaatacaagtgcctaa

SEQ ID NO: 40708 - DNA, 192 bp, Zea mays
  Peptide Sequence Number=SeqID_82487
atgggagaccacgtctcaggtcgcgtgaggggtaaagtccactgccaggttcactcagatagtgtttgctgggggaggtactcgcttggcgagtatccactggttaagtccattcttcaggtcgtccaccaactgcgtcttgtggttggcaccacatcactggctcgatcatcatctctcggtcctatatga

SEQ ID NO: 40709 - DNA, 255 bp, Zea mays
  Peptide Sequence Number=SeqID_82488
atggagcgtgctgaggacgtcgaggacttcggcggtctggtcggcgcgccgcccgaggctgcggaggtcaaaccggtgttgccctcggacgccggtgaaggcccatcggacgcgcccgtgcctgctgtggccggcgaagaccctgtgtcggcccctgtgccgacgggtgaaggcgcccaggaggtggtggcggagccggcagtcgaaggcctgacggccgcggccgcgccctcgccctcgcaggtggctaagtag

SEQ ID NO: 40710 - DNA, 834 bp, Zea mays
  Peptide Sequence Number=SeqID_82489
atggccgttggaagtgtgctgtcgcatggcgcaccggacactgtccgcggagcgccctctgaatttcctgaaggtagcgagttcagcgttgagtgccctggtgcaccggacagtccgatggagcgtgctgaggacgtcgaggacttcggcggtctggtcggcgcgccgcccgaggctgcggaggtcaaaccggtgttgccctcggacgccggtgaaggcccatcggacgcgcccgtgcctgctgtggccggcgaagaccctgtgtcggcccctgtgccgacgggtgaaggcgcccaggaggtggtggcggagccggcagtcgaaggcctgacggccgcggccgcgccctcgccctcgcaggttcagggttttgggcctgcgcacgcaaccgctactgacagtgctaattttgtggcggcttcgaccgtggttgcggaaaatgaatcagatgattctgtgtctaagttttttgagtctgatgattctgggagttcggttgtgtggatggaagagtcttcggatgaggatttagattattttgcggcattggatgtggctgcggcggaggcttctccgcgtgtgatggatgctgttcttcctagtccgagtgctgggcgtaggcggcgaagggcggtggcgaagcgtagagtgagtgaggcggagggtggtcatcttcgtgcggacagggctggcaagtgggaattgttgtcctcgccggttggggcgagtgtaggtgagggggagttgcgaagtctttttgagggtgaggagctgaggataatgctgtttaactacagggagatgggtatcatcccgaaggttgaaccaatgtaa

SEQ ID NO: 40711 - DNA, 312 bp, Zea mays
  Peptide Sequence Number=SeqID_82490
atggcatcggaggacgtggtgggcaagagcaggggcgacacggtcgtcaccaccatcttcaacctggcggaggaggccaagctcgcgcgcgagggggtcaaggcgcgcggccaccagatcctcaccatctgcaagtcgctcgtcgccggcggcgtagcaggcggagtgctacccagagtttcgatccgtgtaggtgttcttaggctcctggtacagggaattgggggtttccgtgatgcttggcacggggtgtgcgtgcttggcctggcttctctcagctttatgcccgatcgttgggcgtcgcccgtgtga

SEQ ID NO: 40712 - DNA, 1950 bp, Zea mays
  Peptide Sequence Number=SeqID_82491
atgacgacgcctccacgccacccattctcggtagagggcgtgggagcaggcacctcctccccgtattcgtctgacaccagccctaataccgactcgcgaagtggctattgcacgtccacgagggtgtttcacagcatgcacacaccatcgttttcgtcgtcgtcggatgttctgttcgtcttcccggccttcaccctgttcttcctccccaacctaacgcccctgcccacggtcgcagccgcgagccgaccgacgctcgtcgacgcggcggtatactacctaagtcgcctccaaatgtccatgtcttcgtcgtgtccttctccagcaacgaacatgggcgacacggccgtcaccaccatcgtcaacctggcggaggaggccaagctcgcgcgcgagggggtcaaggcgcccggccaccagatcctcaccatctgcaagtcgctcatcgccggcggcgtagcaggcggagtgctacccagagtttcgatccatgtaggtgttcttaggctcctggtacagggaattgggggtttccgtgatgcttggcacggggggaggggcactagcggacagctcggcaacggtgaaatagtcgacagacggttctgcctgcaagaagctggagtcatccacgtcagccccgttcgcaggtctggcgtccacaatttgcatggcgcacggttctgccatctccctccgcgctgcatcaacgaccgcgggttctgcctctccctcacactgcgccgcctgcccccgccacacccctccacctcgccccttccccagccgtggatccaccgtaccccccgccctggcgccgcggttccccgccatagacgccctggatccaccacctcctcctctccccatcactacgccgcacacctccaccgcgcccccgtccccgtctccagcggcggttgcggggcccacgccggcggcagtgaggtccgggagcgagacccccacggcgtccccgtccccatccgcgcccgggacgcccatggccgctgcagcggctccctcgaatcccgcccgcggatcccgatccggatgcggaggatgacctcgatcccgcgcccggccgcggacgcggcagacgcccgcgtcgatgcatcgacctccgcggcgagctccagatcccgccgggcctcggccggcagtgaggtccgggagcaagacccccacagcggcagagaggcccgcggcggcagtaaggtctgggagggagacccccacggcgtccccgtcctcgtccccatccgcgcccgggacgcccacggccgcggcaacggctccctcgaatcccgcccgtggatcccgatccggacgcagaggatgacctcgatcccgcgcccggccgcggacgtggcagacgcccgcgtcgacgcatcgacctccgcggcgagctccagatcccgctgggcctcggccgacagagaggtccgggagcgagacccccatggcggcagtgaggcccgcggcggcagtgagatcccgccgggctttggccacgaggaggcggcgccggggtcggcggagccggacacgcggaggggaggcacgcgcggggacgccacccggaggaatgacgacgtcgagagaggccaggcgccggccaatgccgaccggaacgacaacggagcgcttgcagacacagacgtgaggaagaaggccgaggacgcagaggcgaagcggaaggcggaggaggccgaggccgaggcgaggaggaagaaggaggacgaggagtgggatgccgatctggctgcgtactaccaggagcagtgggcgactgaggatgaaggagctacgggcgctgccgccgccactactgagacggacccgctggccgctattgcaatccccgttgtgccaacagtgagggtggttatcactttcaccaagtctgtccccctcatcgagcctgaggagttcttcactattgactaa

SEQ ID NO: 40713 - DNA, 471 bp, Zea mays
  Peptide Sequence Number=SeqID_82492
atggtctggaaggtggggaaggcgcggggaacccaatggcgagggctaagtcgcgataggggcaccagagggtgggcgggccacggcgagatggctcggcggcggcgccaaccgactccgatgagaaatcaagcacaacagagagcaagggagggaaaaggagagggcaggggaggttccttacctcaaggcgcacccctggaacctctcggtggcggtgaaggcacgacgatggctcgggtcaacggtggcggcaccgggactgcacggaggacggcgggtgagcgcgggcagagaaaatcagggagggagaggagaaattggagcgtgtcccgagttgcggacgtcgaggcagagctcactgtggcagagggcacggcagggctccgacgtcgacggggaaacgggctcgggacggcagcggacaacagcggctcctccctggcgtgcgcgcagcgtgggaggggttga

SEQ ID NO: 40714 - DNA, 393 bp, Zea mays
  Peptide Sequence Number=SeqID_82493
atggtacaatacccagaggatcagatcgaccgcagaaaaatcccaccgccgacgaccttcgccgtgattcacgccaccgctgttggattcgtgctcggggtggggataacgtcgtgcggtagaagcccctcgccgacgattattccaaactctgggggacctctacgcaaacctgccccacgggcgcgggcgcgcgcgcgtttctgccctagctgggccgcctgggctggatttggcccagaacgtgaagaagaaatagaagttaccgaagaaaggacaccaccaccctcggattctcaagcaggcaactgcttctacttcgatatttgtggatccgagcccgactcacctgtaaacgaaggcaagccccggtgcatttgccacctcccttga

SEQ ID NO: 40715 - DNA, 306 bp, Zea mays
  Peptide Sequence Number=SeqID_82494
atgaagctccaaaatgctctgtcaggttcatctgaaggaaactggccatggtacagtgacctgataaggatcaggccgccagcgcggcaacttcaccgccggcgaccgattgccgccgtgattcgtgcggcagccggtccacgttgttctcgggaacgtgaagaagaaatagaagtcacggaagaaaggacaccaccaccctcggattctcaagcaggcaactgcttctacttcgatatttgtggatccgagcccgaatcacctgttaacgaaggcaagccccagtgcatttgccacctcccttga

SEQ ID NO: 40716 - DNA, 393 bp, Zea mays
  Peptide Sequence Number=SeqID_82495
atggtacaatacccagaggatcagatcgaccgcagaaaaatcccaccgccgacgaccttcgccgtgattcacgccaccgctgttggattcgtgctcggggtggggataacgtcgtgcggtagaagcccctcgccgacgattattccaaactctgggggacctctacgcaaacctgccccacgggcgcgggcgcgcgcgcgtttctgccctagctgggccgcctgggctggatttggcccagaacgtgaagaagaaatagaagttaccgaagaaaggacaccaccaccctcggattctcaagcaggcaactgcttctacttcgatatttgtggatccgagcccgactcacctgttaacgaaggcaagccccggtgcatttgccacctcccttga

SEQ ID NO: 40717 - DNA, 249 bp, Zea mays
  Peptide Sequence Number=SeqID_82496
atggaacgtgaagaagaaatagaagtcaccgaagaaaggacaccaccaccctcggattctcaagcagccaactgcttctacttcgatatttgtggatccgagcccgactcacctgttaacgaaggcaagccccggatccactttagtaagcatttctgcaaaacagagtctttgattattgaaaagccttaccttgactcccatcagcatacccttgagagtcttttctttagtctggtgaggaagtag

SEQ ID NO: 40718 - DNA, 201 bp, Zea mays
  Peptide Sequence Number=SeqID_82497
atggactacatggtgtttgaggttgctgaattggatggaacaacaatgatttgtcacactaacagcaaaatgaaaggtggtgatgaggatgatggttttggttatgactatggtaatgggcatgagaaactccaaggacatagacttatgagtgccttagggcctgaggggcctaaggacttacttttagggatgtcctga

SEQ ID NO: 40719 - DNA, 255 bp, Zea mays
  Peptide Sequence Number=SeqID_82498
atggttggtttacaggtggtgatgaggatgatggttttggttatgactatggtaatgggggttcggtctgtttctcaagtacctttccgtaaggacctgttcgttgagagacaccgggacaatagtacaaccatgagggtggctagaaagggatcacgactcatgggtaaagtgtgtgacctctgcaaagggttagaaactggtatattagccatgctcacggttaagagcagccttgggatcctctttgattag

SEQ ID NO: 40720 - DNA, 384 bp, Zea mays
  Peptide Sequence Number=SeqID_82499
atggaggagcctctgcgcacgcacaggaaaacagaggggaggagagggacgagctggataagcagcccatgggggagaagggcgcagggaggtggggctgctgcttgccgccggctagaggtagaaggggctcgcgcccatggagctgaggaacagggagccatggagggagcgtacgcaggggcgtcgggtcctaagcgtcccttggccatgggcagggaagagcagggggcggctggagatatgccgacgccatggacgccagggaggagcttcagcgtcgaggaggaaggagcaggggcgccagcttgctgttcgccatggaggggagcatggctccctgctgctgcgctaggaacagagaaggaagaaggctgtgcgtga

SEQ ID NO: 40721 - DNA, 249 bp, Zea mays
  Peptide Sequence Number=SeqID_82500
atggccgagcccccttcctccctggccgcccagctcactgtccagggcgcccagaaaattccagcagcgagccccttcctcgctgttcgtcgtggtgcccgccagctgttcgacaaaatgcgcagcaagccgcgcgctgcagcagccctcccgttcgatctccactcccctcgtcgcgtgtcgtcgctctcgtgctcgctgcgcagccccatccgcgacgccgtcgaaacccttgtggtgtttgactag

SEQ ID NO: 40722 - DNA, 687 bp, Zea mays
  Peptide Sequence Number=SeqID_82501
atggcttggcatttcgtcgaatgggcaaggcgcgaagcgcggcgtcgaccactagcaagggtttcgacggcgtcgcggatgaggctgcgcagcgagcacgagagcgacgacacgcgacgaggggagtggagatcgaacgggagggctgctgcagcgcgcggcttgctgcgcattttgtcgaacagccggcgggcaccacgacgaacaacgaggaaggggctcgctgctagaattttctgggcgccctggacagtgagctgggcggccagggaggaagggggctcggcttacagctgggcagcatcaatggagaaggagcccctgcgcacagaggtggtcgagcaggaaatggtcgctagcttcttgctgccggagaacaggggaagggcttcagttgctgggagcagggaaggcgttgtgcagaagagcgaagaggagcaggggcgtcggcatggatgctctgcgcacgcacaggaaaacagaggggaggagagggacgagctggataagcagcccatgggggagaagggcgcagggaggtggggctgctgctcgccgccggccagaggtagaagaaagggctcgcgcccatggagcagcaggaaggaggagggcgccatggctgttggcctagctgtcgtgaaagggagcaagaaggggcattggaaaatggctggtggcggctag

SEQ ID NO: 40723 - DNA, 165 bp, Zea mays
  Peptide Sequence Number=SeqID_82502
atggcgctcatgccccctgccctaggcgctcacctcctccatgttggatggccgctagtggtcgacgccgcgcttcgcgccttgcccgttcgacgaaatgccgagccatgtggacagtccatgcggctaaatcccgactcgttcaggttgaatccatgtgattga

SEQ ID NO: 40724 - DNA, 1560 bp, Zea mays
  Peptide Sequence Number=SeqID_82503
atgaagaagcgcaatgtttctgaaagccacacaagagtgttaagaaaagtcgtgacaaagagggttaaacatgaggagctaccccgacagaggcttaatgtgaggtgcaaccctcaagatgtcattgcaagcattaacattttgaatgaaagacaacgtgaggctataagacgcaaaggcttctcttccattcttgatatgacagtagatgcgctgtgcagtagatcacacctccaatggttgatggacaagctagaccccaaggatatgacaatacgtcctggtccaggaaaggaactcaagatcacaaaggatattgttcatcttattcttggcgtgccaaatcatggaggtggtaaacctttgggtattgatgaagcagttgcagcaagcaacttgagggcagagcttggtgtggccaaagatgagttcaatgtggcatttctacaggatcgattaaggaaaggcgaggatgatgacctttcaatcagatgtttcttcctcattctattcaacagattgctgtttccaactgctagctggggcatcacatatcatgaggtgcttctcacagaagaaatgcaccgtttccatgagatcgactggtgccagttgatttttaatgatctatgtgaagctgccaagaagtggcacaaccggatcaccacaaatgtctccacgactatctatggatgctccattgttgtccttttgtactacttggatcacctgcatacagccgctgccccccataataagagtggcacacctcgcattaaattttttgataagaatagcataaaagctttgaccaaagctgacaagaggaaggttcgccatggggctgaatctttcggacactgtgaaaatacgaaggtggacatggattcttactattttttgctgaacaaccagccggagtgcaggaccaatatttttgatgcaccgcgccctggccccatgcctcggccaacttttaacatcaaacttccatctatcaaagagatgatgtcaagtaagatcaacgatctcccccatcgtcatcgatctaaattcacagatattcttgctgcatatgacttggaggttgacaagtcatgcgtagccataaaagacagcatcgacaaaattattgtcaagcaatatgacatagcagacaagtttatagaattgatagacgaggtactacgtgccgagtctgaaaatttggaaaacgagacggatgagccacagcaaccggtgaattcggctgattcagcaagacacacagttgatgccactcagcccacacccgatatgccatcccaagcttcgcagcttgagacccaactgggtgctactcagtttgaagaaattcacgaaagacaacagcatatccgtacagtccttgagacctttcccgacgaatcggatgtggttatcagatcaacagcagtatgcgaaccacatttttttttgtccaccgagttctgttttgatgttcgaaacataagttttgagggaacacaaatattcacacctcaaaccacatcagcttgcatctgctttgcccaaatttga

SEQ ID NO: 40725 - DNA, 2584 bp, Zea mays
  Peptide Sequence Number=SeqID_82504
atggagttggacgtgttgctgggggcggaagagattcctgagccggagggtgagatggttgtgtttgaggcgtttttcaccgctggccttcgtctgccagcacatcgttttgtggcggaggtcttgcagagatttgaggtccagaaaagaaagattggaaacaagattgcacagtttggatcgtgcacgtttacgccgaggactggaaagacttcgatggaagtcgtggagttggttccttgtgctcgtaataaatggggcaactggtgggatttctggttttatgtttctgggagcgaagtcgaagacctcccagggcttcctgtggccgtaatgtgctctcactattatgtggcgtacccacaattcgaggtggcggaggatgatgaggatgaggggcccttcgatacgctgcccgtggtacggagtccagccttctccttggatctacgcgaccgagacccggtcacgttcgtgcgtgaagtggaggacggtgcggcgaggattgtggggcgctatgtgccgaggacagagggtctgtggagttgggatatccgggggtccaatgttcgattgaatcgggtcttcgaattaaacggcttgccatacggtggctacctcggggatgacactgctgcgaacgtcgaccgccgtgggaagaagccagtggccgtgactgagaaaggcccttcgcaggaggctgccccagccactaagaagagaaaaataggtactgtagtggggggagtgggggtctctgaacgttttgccgtggagttgatggggacttgcgcggccctcgggggaaggatgtcttcgcccgagctccgggagtcttcggcccgaatgctgaaggttaccgggggtcgatggccaaagaatgttccactcccccgcgcggctggcgaagacatgtttacgtctcgtatgactcgtgacttgaagatttttccttacggacgaaatattgctgctgttgtatcggcagtgatggagaaggatcgacaagacgctgcgcagaaacgtcgggcggtcgttaggatcggtgatcctttccgcgaagcaaagagggcgcgggggggcgtgaagtctgccgcccccggcagcagcaagctagcgccggctgcgaagcgggctgcccctgggcccaggatgtctttggcgggtgcgaaggctggtgcatctggtgcgggcaagtcgccctcgagcgagcccgctaaggggcgaaaggtgccctccctggcatggtctgatatggggcaactgcctcttgtcccggctccggtggcggccccttcaccgacggcggtggaaggggcgaagggtgttctacgggacctgtggtccaccttctgcgcgagcggcgagatatcctcggccgccgttgttaaggatgtggcgggctccgtgtcccagcagctgaggcaagcgtcgcagcagttgcagcatgcggctgacttcaccgaccgtgttgcgtcgggtgtcttgactgcggagtttgctgccgaagttgaacgtctccgggccgatgccaagcttgcgtgggtagaaaacagtctcgcctgccaacacgctgaggacttggaggcgaggctcaacagcctgcgcaaccgcgtggataaagtcgaggcctcgacgcgcgtggaggtcgagcggacgcacgcgcagttcgtggatgcataccgggagctggatgcgcggatcaccgccttcgacgcgcccggccaagaggtgggactccgcttcctggagtggttacaggaggagttggcggtgctcccgaccatcgtgacgggcctcatgtcctttgcctccctcgtcacctacgaaggggccgtgaatgctttgtcccacgacgggtgcgggcatttcgaggtcttcgaccaatcagacgagaacttcgaacgcgcaatcttcgaggtcaaagacccggtgcttaagcagtcggcggggcgctcttcgacaggatgtgggatggcacatgccgaggaggtcgaagacctcggtggtctggacagtgcgctgcccgtgacatcgggggtggaggtgccgccgccatctgatgccggcgagggcacctcgacggtccctgcatcgactgtgccaactggagccagcgaagaccccgcgccaccccccacaccgacggacgaggacgtcttgaaggcggtggtcgagccggctgccgaagaccccgcagccgtggccgggccttcgcaggttccgacgtttgggcctgcgcacgcaaccgctgctgacaatactatttttgtggcggccccgaccgtggtgcctgccagtgatgattcgtgtggttctgtgtctctgtgttttgagtctgatgattctgggagttcggtgtcgtggatggaggagtcttcggatgaaggcttggattattttgcagcgttggatgtggctgcagtggagccttcgccgcgcgtggaaggttctggggggctcccgggtgcgagtactaggtataggcggcgaagggcggtggcgaaaccaagagttagtgaatcgtcgcgaaggggtcatcgtattggtatggagggtgaccgtcttcgcgtggaccggactg

SEQ ID NO: 40726 - DNA, 2667 bp, Zea mays
  Peptide Sequence Number=SeqID_82505
atggagttggacgtgttgctgggggcggaagagattcctgagccggagggtgagatggttgtgtttgaggcgtttttcaccgctggccttcgtctgccagcacatcgttttgtggcggaggtcttgcagagatttgaggtccagaaaagaaagattggaaacaagattgcacagtttggatcgtgcacgtttacgccgaggactggaaagacttcgatggaagtcgtggagttggttccttgtgctcgtaataaatggggcaactggtgggatttctggttttatgtttctgggagcgaagtcgaagacctcccagggcttcctgtggccgtaatgtgctctcactattatgtggcgtacccacaattcgaggtggcggaggatgatgaggatgaggggcccttcgatacgctgcccgtggtacggagtccagccttctccttggatctacgcgaccgagacccggtcacgttcgtgcgtgaagtggaggacggtgcggcgaggattgtggggcgctatgtgccgaggacagagggtctgtggagttgggatatccgggggtccaatgttcgattgaatcgggtcttcgaattaaacggcttgccatacggtggctacctcggggatgacactgctgcgaacgtcgaccgccgtgggaagaagccagtggccgtgactgagaaaggcccttcgcaggaggctgccccagccactaagaagagaaaaataggtactgtagtggggggagtgggggtctctgaacgttttgccgtggagttgatggggacttgcgcggccctcgggggaaggatgtcttcgcccgagctccgggagtcttcggcccgaatgctgaaggttaccgggggtcgatggccaaagaatgttccactcccccgcgcggctggcgaagacatgtttacgtctcgtatgactcgtgacttgaagatttttccttacggacgaaatattgctgctgttgtatcggcagtgatggagaaggatcgacaagacgctgcgcagaaacgtcgggcggtcgttaggatcggtgatcctttccgcgaagcaaagagggcgcgggggggcgtgaagtctgccgcccccggcagcagcaagctagcgccggctgcgaagcgggctgcccctgggcccaggatgtctttggcgggtgcgaaggctggtgcatctggtgcgggcaagtcgccctcgagcgagcccgctaaggggcgaaaggtgccctccctggcatggtctgatatggggcaactgcctcttgtcccggctccggtggcggccccttcaccgacggcggtggaaggggcgaagggtgttctacgggacctgtggtccaccttctgcgcgagcggcgagatatcctcggccgccgttgttaaggatgtggcgggctccgtgtcccagcagctgaggcaagcgtcgcagcagttgcagcatgcggctgacttcaccgaccgtgttgcgtcgggtgtcttgactgcggagtttgctgccgaagttgaacgtctccgggccgatgccaagcttgcgtgggtagaaaacagtctcgcctgccaacacgctgaggacttggaggcgaggctcaacagcctgcgcaaccgcgtggataaagtcgaggcctcgacgcgcgtggaggtcgagcggacgcacgcgcagttcgtggatgcataccgggagctggatgcgcggatcaccgccttcgacgcgcccggccaagaggtgggactccgcttcctggagtggttacaggaggagttggcggtgctcccgaccatcgtgacgggcctcatgtcctttgcctccctcgtcacctacgaaggggccgtgaatgctttgtcccacgacgggtgcgggcatttcgaggtcttcgaccaatcagacgagaacttcgaacgcgcaatcttcgaggtcaaagacccggtgcttaagcagtcggcggggcgctcttcgacaggatgtgggatggcacatgccgaggaggtcgaagacctcggtggtctggacagtgcgctgcccgtgacatcgggggtggaggtgccgccgccatctgatgccggcgagggcacctcgacggtccctgcatcgactgtgccaactggagccagcgaagaccccgcgccaccccccacaccgacggacgaggacgtcttgaaggcggtggtcgagccggctgccgaagaccccgcagccgtggccgggccttcgcaggttccgacgtttgggcctgcgcacgcaaccgctgctgacaatactatttttgtggcggccccgaccgtggtgcctgccagtgatgattcgtgtggttctgtgtctctgtgttttgagtctgatgattctgggagttcggtgtcgtggatggaggagtcttcggatgaaggcttggattattttgcagcgttggatgtggctgcagtggagccttcgccgcgcgtggaaggttctggggggctcccgggtgcgagtactaggtataggcggcgaagggcggtggcgaaaccaagagttagtgaatcgtcgcgaaggggtcatcgtattggtatggagggtgaccgtcttcgcgtggaccggactggtaggcaagaattgttgtcctcgctggttggggcgagcatagatgaaggggagctgcgaaatcttttgagggtgaggaattga

SEQ ID NO: 40727 - DNA, 303 bp, Zea mays
  Peptide Sequence Number=SeqID_82506
atggggatatttttgccagtaacacctaaatcttataggtttctgccatcggggctttacaggataccattcattgttccatattcccagcacaatgatattgcgcgcattgctaggaacttcatcatcaagatgaacctcttcgtgaggcaaatcaccagcatggcgagttcatcggaggagagttattacagaccacgtgaatctgcaatcagaacatatgctttgactaaggccaatggatcatattcgcaggcgtcccggagaatagatcaaatgccaataagtcaaatgtggatatga

SEQ ID NO: 40728 - DNA, 138 bp, Zea mays
  Peptide Sequence Number=SeqID_82507
atggcagtcggggtcagtgaggcattgtacgccaaggcgttttatgctttattgtatttgctctgtgactcaccatcgagtgagattgtggtacttgatcctgtcagtggccttgtcggactagatccgagggattga

SEQ ID NO: 40729 - DNA, 141 bp, Zea mays
  Peptide Sequence Number=SeqID_82508
atggcagtcggggtcagtgaggcattgtacgctaaggcgggtttttatgctttattgtatttgctctgtgactcaccatcgagtgagattgtggtacttgatcctgtcagtggcctcgtcggactagatccgagggattga

SEQ ID NO: 40730 - DNA, 246 bp, Zea mays
  Peptide Sequence Number=SeqID_82509
atgcaagatgctgcacgacgtgcactttcgcagtattgctcgttgttcagtggggtagttgtgtcagaactgcccgaattattccaacttaagtgcctaagtcccgccttagaggctagaccacacttaaatgggaataaccgtcaatccctcggatctagtccgacgaggccactgacaggatcaagtaccacaatctcactcgatgcaaaagtagtcatcattgttcgaagtgcagcggaataa

SEQ ID NO: 40731 - DNA, 390 bp, Zea mays
  Peptide Sequence Number=SeqID_82510
atggcggaactgcccgaattattccaacttaagtgcctaagtcccgccttagaggctagaccacacttaaatgggaataacccgtcaatccctcggatcttgttcgacgaggccactgacaggatcaagtaccacaatctcactcgatgtacaatggatcaagcagtctcattagctgcgagaagaagacgattcgaatcgagtttttatccttgcaagatcagggctcaccgccttggcgtacaatgcctcactgaccccgactgccgtcgtgcagtgaccgcacttgtacccaccataaccgtaatgggagaccacgtctcaggtcgcgtgaggggatatgtccactgccaggttcactcaggatttggtaaacattatgctaagtaa

SEQ ID NO: 40732 - DNA, 495 bp, Zea mays
  Peptide Sequence Number=SeqID_82511
atgcgcgcggcgctccaggaggctcggcggcggcacgcgcggggtgtggtcgcggccgtgggccgcgcggcggaggctcggctccgcgccgcggaggcagagctggagcgcgcccgccgccgcggcgcggatctggaggagcggctccggcagctggccggggagggccaggcgtggctgggcgtcgccaggagccacgaggccgtcgccgctggcctccgcgccacgctcgataaggtgctccagcagcccgccgtcgccgccgccggcggaggagaatgcggcgtggcggaggacgcgcagtcctgctgcttcgtggcatccccgtcggggctcgtcgccggcgactctctcctgtaccttggagaggaccagaaaggacttgggaaaggccaaggtgttgaggaggagcagcaagggcgtccacaacaggaaggagatcaagtccgagtcggctgcgactctatctcgggttccaggaccagtctgcactaa

SEQ ID NO: 40733 - DNA, 315 bp, Zea mays
  Peptide Sequence Number=SeqID_82512
atggcacatttctattggacgaaaacgaggctatactgggagtcgcagaggacgcaaccacagaagatctggatggtgggatttcccgtgctcttcttcaatcaacacgcaggaaccagccttcacagggagaacgaaatcgcgcacaaagggcttgacggtccgccgtgcaggggaagctcaccgatgattatgattatgcttatggtaatgaaaacaccaggttgcctttggtgcaatctatgctcaggtaaagaagaaggcgtcgaggcgaatctccaggagttccaggacttcgacgagttcgaggattag

SEQ ID NO: 40734 - DNA, 180 bp, Zea mays
  Peptide Sequence Number=SeqID_82513
atggggtccaggcacagtgcttgctctgccgaggctgggtgccgaggttcttttgttttgctttttagtcgccctcctgcggggagaggttgcctttggtgcaatccatgctcaagtaaagaagacgacgtcgaggtggatctccaggagttccaggacttcgacgagttcgaggattag

SEQ ID NO: 40735 - DNA, 255 bp, Zea mays
  Peptide Sequence Number=SeqID_82514
atgagggtggtatgggacgcccttggccaagtaattagggaagtcttatgttgggtgctggtttttggtcattgggaaatggaggcatctgttatggcttctatatccttgctcagggatctgggtacgggcatcgtcccacggctttttcctgagggcagaggttacctttggtgcaatctatgctcagataaagaagaaggcgtcgaggcagatctccacgagttccaggacttcgacgagttcgaggattag

SEQ ID NO: 40736 - DNA, 255 bp, Zea mays
  Peptide Sequence Number=SeqID_82515
atgttcagcttacaggtggcaatgagaatgatggttttggtattgactctggtgatggttgcctttggtgcaatctatgctcaggtagagaagaaggcgtcgaggcggatctccaggagttccaggactttgacgagttctaggcgtgggttagcggcaacccctagtcggttgcctgtgaaggccgcgtttatctacgtttcgttttcgcactttgattattgtaaagactatatggatgtcttagacatatga

SEQ ID NO: 40737 - DNA, 339 bp, Zea mays
  Peptide Sequence Number=SeqID_82516
atggctcaccggagttactctggcccgtccgaggcttcctcaccgccgttctcccctctctgcctgtggattcatggcctcgtccctgccattgagttcgccgtggcattctctccctctctgcccaactccggcgaccccagagccaacctagcccgcgccagcctcaacttcggcgacctcaccgctgcagagaggagcggcgccgcccgcaaccgactgtttcacccagacaacgagcagtccgaggttcctgagtgtgttgttggagacctccctgagcaaccacctggtgaaggcaagtatcctctaacccattatgtcctacatactttatga

SEQ ID NO: 40738 - DNA, 372 bp, Zea mays
  Peptide Sequence Number=SeqID_82517
atggccggaatggctcaccggagttactctggcccgtccgaggcttcctcaccgccgttctcccctctctgcctgtggattcatggcctcgtccctgccattgagttcgccgtggcattctctccctctctgcccaactccggcgaccccagagccaacctagcccgcgccagcctcaacttcggcgacctcaccgctgcagagaggagcggcgccgcccgcaaccgactgtttcacccagacaacgagcagtccgaggttcctgagtgtgttgttggagacctccctgagcaaccacctggtgaaggcaagctagaaagggatcacgacttgtgggttgttgggggcttgttctcaaatgctatgaattaa

SEQ ID NO: 40739 - DNA, 675 bp, Zea mays
  Peptide Sequence Number=SeqID_82518
atgccgattgcggcgacccagtgcaccatgccaagcagtgctaggaacgaatgcgctacagtgctgaagacttgggttgcgattcttttgcgagcaccattgcaagtcaatgtggaacaaaagctggatctcaggagaatactctgtgtaatgttctttttggttgcccaggcgctactacacaagggacaaatatcggtgaatcaaatagagcatgcagagaccatggagaggggaaactgcagcccgatggacacagtgaccctcaattgggaaattatttgttgcaatgctcaggccatgcagcgttctggaagacctattgaatcaatttgcagcagactgaaagctatagaaggctgcattagaggaaacttaatgggcaagttgaaggaacccttcgtatatgggcctcaccctcccccagggaagaccggtgcaaaatatattatcatggacgatggtcagaggcttgatcttcaatatgtgaagaaaagaaacgatcagcatctagagcttggttacaagtttattgcagaactaagaaaggatggttccctactggttctgcgtataggaagcttgctatggaacaagaagcaagaaaagtacaatgagcacaagaaagccaagaaagactcaggttacgttgtgattgtcaccataagattatga

SEQ ID NO: 40740 - DNA, 399 bp, Zea mays
  Peptide Sequence Number=SeqID_82519
atgagtaccgaagcactgaataggaacgacccattaaaagctaaatccaatgatttcaggttgaaggaacccttcgtatatgggcctcaccctcccccagggaagaccggtgcaaaatatatcatcatggacgatggtcagaggcttgatcttcaatatgtgaagaaaagaaatgatcaacatctagagcttggttacaagttagtagtttctggattgacactgtatagtggatgcagaactaagaaaggatggttccctactggttctgcgtataggaaggcaaaagctaagaatgcaataattcctatggtgtcatttgatagcttgccatggaacaagaagcaagaaaagtacaatgagcacaagattccaagaaagactcaggttacgttgtga

SEQ ID NO: 40741 - DNA, 507 bp, Zea mays
  Peptide Sequence Number=SeqID_82520
atggatggtggtaataaatatgatgggtctgcatctgagttttctgattttgctgactctgggagctcggttgagtggactgaggagtcgtcggaggaggacttggactattttgcggccttggatgtggcagcggcggaggcttcaccgcacgctgcgggcacagaatatgtgcctggtccgagtactgggcgcaggcggcgaagggcggttgcgaagagtagagtgagcggggcggagggcggtcggcttcgtgcttgtatgatgaagttgtgtgccctcgcacatttggctatgctcgcgaaggcgttacgtgcttggtcaggtgtatttgttatgctggactggtgcgtatatagtcggtcttggcgcggacagtttggtgtggtcgtttttgcttttgttacgcttcgtccgacagtgccctcgggcaacttctgcgcggatggtctttgcagtggacttcgggttttcgcacttgctgtgctagtccggctgcacccttag

SEQ ID NO: 40742 - DNA, 558 bp, Zea mays
  Peptide Sequence Number=SeqID_82521
atgcaggcggcatgcaactgcaccaaggggatgcaccctttcgacttcgacgcgtccgacatggaggcccaggcccacacgtcatgcgggcggaagcggcagtcaaaacgtctgcaggctcacgtcccctcctgggacagcgagagaaccctctcccacggcgtgaagacgacgcgcccgtgttccattcctcgaacgactcgcgcatgcacaacgacagccccgcgaaccactcgtcccgtcgcattaactccgcggcagggcaggcgacacctttggcaggcgaagcgggcgacgattcacctccgccataatgaccgcgtcaaaaaagggaccgggaaaggggatactccgaaagggatccttctccgtgaaggaagcgggccccgagccctcctactgatcagaggttcaaaggctggcccctcgaaagggtttcgacaaccgcctcagagcactcgggctccgcgcccactactggtcagaggttcgaaggctggcccctcggaagggttcgatagctgcctcaggccactcgggctccgcgcccactactga

SEQ ID NO: 40743 - DNA, 948 bp, Zea mays
  Peptide Sequence Number=SeqID_82522
atgcaggcggcatgcaactgcaccaaggggatgcaccctttcgacttcgacgcgtccgacatggaggcccaggcccacacgtcatgtaaccgacgtgccggttactacgtgcgagaaactgcaccgccacttgcgccagtaccgcgccttctcgactgcggaaccggtgccgcgactcgaggtgaccctgcgcatggcccaacagtgccaaccgagcacatcggtcacggggcaggcgacacctttggcaggcgaagcgggcgacgattcacctccgccataatgaccgcgtcaaaaaagcgggccccgagccctcctactgatcagaggttcaaaggctggcccctcgaaagggtttcgacaaccgcctcagagcactcggggctccgcgcccactactggtcagaggttcgaaggctggcccctcggaagggttcgatagctgcctcaggccactcgggctccgcgcccactactgatcaggggttcacaggctggccccccgaagggttcgacagccgcctcagaagcgccataggaagctccgcctcgcccgaccccagggctcgggctcaacctcgaccacggaagacgatctccgcctcgcccgaccctagggctcggactccgcctcgcccgaccccagggctcgagctcaacctcgaccacggaagacgatctccgcctcgcccgaccccagggctcagactcaacctcgacctcggacgacggtctccgcctagcccgaccccagggctcggactcaacctcgacctcggacgacggtctccgcctcgtccgaccccagggctcggacttagcctcgacctcggaggagcctccgcctcacctgaccttgggctcggaccgaccacgtcgcagggggccatcattaccctacccctagctagctcaggctacggggaacaagaccggcgtcccatctag

SEQ ID NO: 40744 - DNA, 273 bp, Zea mays
  Peptide Sequence Number=SeqID_82523
atggcgcccagcaaccgatcccactcccagcttgcagccgcgcccacgaccagcacgccaagcgctgatctcgcccagctcctagcaaccacactcccagcgtgcagccgcgccccacgaccagcacgccaagggaagggtacgagcagcttcggcaagcgccggaacaagacgcacacgctctgcatccgctgcggccgccgcagcttcctcctccagaagagcacctgctcctcctgcggttacaccgccgcccgcatccgcaagttctaa

SEQ ID NO: 40745 - DNA, 268 bp, Zea mays
  Peptide Sequence Number=SeqID_82524
atggcgcccagcaaccgatcccactcccagcttgcagccgcgcccacgaccagcacgccaagcgctgatctcgcccagctcctagcaaaccacactcccagcgtgcagccgcgcccacgaccagcacgccaagggaagggtacgagcagcttcggcaagcgccggaacaagacgcacacgctctgcatccgctgcggccgccgcagcttcctcctccagaagagcacctgctcctcctgcggttacaccgccgcccgcatccgcaagt

SEQ ID NO: 40746 - DNA, 243 bp, Zea mays
  Peptide Sequence Number=SeqID_82525
atggccgaagctctggcggcaatggcgggcggaaataagctcgccggagctaagggaaaggggttggccggtgaggggacagggagttgtagcgtcaccaaggtgccagtgtcagaatgcctggttccgaggttaagctgcgccaaaaccgtgtcaaatgaatttggtttgagttcaaactttcccagaatgtgttcaagaaaaaccctgagtgacactggggtgtcacagaggtcttcttga

SEQ ID NO: 40747 - DNA, 179 bp, Zea mays
  Peptide Sequence Number=SeqID_82526
atggcgggcggaattaagctcgccggagctaagggaaaggggctggccggtgaggggacagggagttgtagcgtcaccaaggtgccagtgtcagaatgcctggtcccgaggttaagctgcgccaaaaccgtgtcaaatgaatttggtttgagttcaaactttcccagaatgtgttcaag

SEQ ID NO: 40748 - DNA, 375 bp, Zea mays
  Peptide Sequence Number=SeqID_82527
atggcgggcggaaacaagctcgccggagctaagggaaaggggctggccggtgaggggacagggagttgtagcgtcaccaaggtgccagtgtcagaatgcctggtcccgaggttaagctacgccaaaaccgtgtcaaatgaatttggtttgagttcaaactttcccagaatgtgttcaagaaaaaccctgagtgacactggggtgtcacagccttccccccttaaaggaatctcgtctcgagattcgggccagagtcctcccggggtgaagcgaagggtgagactgataggaaaaagggtgatgattgttattattagggcaaaactgctcttcgaatgtcattctctttgcaacttcagaaggaagtccttttaa

SEQ ID NO: 40749 - DNA, 375 bp, Zea mays
  Peptide Sequence Number=SeqID_82528
atggcgggcggaattaagctcgccggagctaagggaaaggggctggccggtgaggggacagggagttgtagcgtcaccaaggtgccagtgtcagaatgcctggtcccgaggttaagctgcgccaaaaccgtgtcaaatgaatttggtttgagttcaaactttcccagaatgtgttcaagaaaaaccctgagtgacactggggtgtcacagccttccccccttaaaggaatctcgtcccgagattcgggccagagtcctcccggggtgaagcgaagggtgaaactgataggaaaaagggtgatgattgttattattagggcaaaactgctcttcgaatgtcattctctttgcaacttcagaaggaagtccttttaa

SEQ ID NO: 40750 - DNA, 363 bp, Zea mays
  Peptide Sequence Number=SeqID_82529
atggcgattctaggagttcccctgcgtgcggtttcaagtttcaatgtagaagatagaaaccgggatccgatcgcgattcgtttccgagcttcgaggaatcgacagtcaagcttcggtgaccaaatgattcagttcttcgggttctacgagatcgaagaccctgagcatctgtttggtgaaggcaagaactggggtgtagttcgcttcgccgtcgtgccgttaatggggctcggtgtatgcggcccgctctgccaaggtggtgatgagaatgatggttttggtattgactttggtaatggtaaagaagaaggtgtcgaggcggatctccaggagttccaagacttcgacgagttcgaggattag

SEQ ID NO: 40751 - DNA, 207 bp, Zea mays
  Peptide Sequence Number=SeqID_82530
atggcgattctaggagttcccctgcgtgcggtttcaagtttcaatgtagaagatagaaaccgggatccgggggctcgagcggtttctcgagtggctctccgtggtgatgagaatgatggttttggtattgactttggtaatggtaaagaagaaggtgtcgaggccgatctccaggagttccaagacttcgacgagttcgaggattag

SEQ ID NO: 40752 - DNA, 144 bp, Zea mays
  Peptide Sequence Number=SeqID_82531
atgggggggcaggcggacggcggcacgacggtgtgcgctgcgggctcccgctgccctagggtgccgttccgctttgtgattgctgccttgctcgatgtcaagaggaatatatggaccccgcaaggacagggccaggcggactga

SEQ ID NO: 40753 - DNA, 129 bp, Zea mays
  Peptide Sequence Number=SeqID_82532
atgggggggcaggcggacggcggcacgacggtgtgcgctgcgggctcccgctgccctagggtgccgttccgctttgtgattgctgccttgctcgatgtcaagaggaatatatggaccccgcaaggacag

SEQ ID NO: 40754 - DNA, 312 bp, Zea mays
  Peptide Sequence Number=SeqID_82533
atgattggggctgctgttggagctgtttttgggggttcagctgcttatttaataaattcagctttacctggtaatgctgctgttgcacagccacaagcttatgctctggttggaatggctgctacactagcttcagtctgttcagtcccattgacttcagtactgcttctctttgagctgacaaaggattacatgattttgcttcctctcatgtgcccttatgacaccacaacagtaagcaagactataggacatctatgcgaaatgcagctagccagctacactgatgtagagatcattcaagcagtttaa

SEQ ID NO: 40755 - DNA, 795 bp, Zea mays
  Peptide Sequence Number=SeqID_82534
atggccgccccctccctcagccgtggcgggtgccgccgccacctcactcttgtgctcgccgagctcgccctcagccctgtcgtcccccttcctgctgaggccaacaccccatcccctcgcccttccctgctcgacagccccatccctggtcttccaaggctgcgccctcacctccttcccatggttggaatggctgctacactagcttcagtctgttcagtcccattgacttcagtactgcttctctttgagctgacaaaggattacaggattttgcttcctctcatgatcggtcctgaccagattgaagctctgtatcagtatgccaaatttcagtttgagtgtggtaactactcaggggctgctaattacctttaccagtatggtgctttgtgcacaaacagtgagcgaaatgtgagtgccctctggggaaagctggcagcagaaatcctaatgcagagctgggacctagctttggaggaactcaaccgcttgaaggaaataattgattcaaagaacttctcatcacctctgaatcagctccagaacaggatatggctgatgcattgggctctgttcatcttctttaaccatatcaggtacttgaatgctatacagacaaatgcacaccatcttattaggtatctagctactgcagttgttgtcaacaaaaggagaaggaatatgcttaaagagttgattaaggtcattcaacaggagcaccatagctacaaggatcccataactgaatttctggaatgcttatatgttaactatgtagttgtgggcttttga

SEQ ID NO: 40756 - DNA, 453 bp, Zea mays
  Peptide Sequence Number=SeqID_82535
atgaggcccttctgcttaacgacggacagcgcggtgcagctgctctggaccgcgtccaagcggtggcttcgcgggagcttgtcgtacacagcggcgcatgcgaccacgggcgtgcccatccctccaatgtggccgatctgcctcgccgtgaatccagtcgtccacgcgtcggacgaggtcggccccatgcgtataagcccttcgggcaactggtccgcgtggacccatgagcagctggagcgagcggatgatgcagcccgctgcgtggacatcgtcgccgaaaccgccgccacacagaccacagttcaacagtgccacatcatgggcaccgaccttgttctcggtaccttctcttatacgcccatcctcgattcactttttagagaacagatctaccatcgtactgagtcccgctctctttcttttgaggttctagccaaacaccgtccttag

SEQ ID NO: 40757 - DNA, 183 bp, Zea mays
  Peptide Sequence Number=SeqID_82536
atggacagcgcggtgcagctgctctggaccgcgtccaagcggcaacttcgcgggagcttgtcgtacacaacggcgcatgcgaccacggccttcgggacccgcgactacggcaagcctccgcatcttgatgcttatggttacggcgacgacatcggcgctgggaaggccgcatgcgaggcctag

SEQ ID NO: 40758 - DNA, 333 bp, Zea mays
  Peptide Sequence Number=SeqID_82537
atgtacgacaagctcccgcgaagtcgccgcttggacgcggtccagagcagctgcaccgcgctgtccattgttaagcaggggggcctcatggttgtcgccaacgtcgacgactctcgggggtactacctcgctgatgagcccggggtgcacttcgtttggcagcccaaccaagagtcattggtactcgtcatgttgcgtgcgttcgatgactactatatcgaggattgtggcgtcatcttggcgccggaggtgacacagaggaggatcgacaacagtgaccagttcgtcatcctcgccaccgtcagggtagcttttgtgtcggcctgcctttaa

SEQ ID NO: 40759 - DNA, 303 bp, Zea mays
  Peptide Sequence Number=SeqID_82538
atgggggagattgaaagcgcattcatccattttgtgagttttggtgatttagataacaacacatttaaaggtctaacaagtttacttgggtactacctcgctgatgagcccggggtgcacttcgtttggcagcccaaccaagagtcatcggtagtcgtcatgtcgcgtgcgttcgacgactactatatcgaggattgtggcgtcatcttggcgccggaggtgacacagaggaggatcgacaacagtgaccagttcgtcatcctcgccaccgtcagggtagcttttgtgccggcctacctttaa

SEQ ID NO: 40760 - DNA, 283 bp, Zea mays
  Peptide Sequence Number=SeqID_82539
cgcccaaatccaaagcaccccggcgagcgccccagacgccccagcttggctgtctcggcgcgacctcttcttctccggcgagtccttcgaccagcctgttgctcggccccggccgacgtgccccctgtgccgcaggccgctcgacctgctcctccggcctccgcatacatgctcccctgcgcagggcgtggcgcggcagccggcctgcgcggctccagccgcagcgtgcctaggtgcccagcgccctcacctcggctatggccatggccagcccccagcctag

SEQ ID NO: 40761 - DNA, 495 bp, Zea mays
  Peptide Sequence Number=SeqID_82540
atggcgccaaggctagggagccagggccggatgcctgagcacgcgggcgagccgccgcgctggcgtgtctaccgcgcaggccggctgccgcgccacgccctgcgcaggggagcatgtatgcggaggccggaggagcaggtcgagcggcctgcggcacagggggcacgtcggccggggccgagcaacaggctgccatgccaagtcggagaagcagggcgcggctgcgtgcgtgggaggcgcaagctcgatggagcgaggatagcagcgcgcgacaacttagctagacaacgcgcgcaggacaattcggtcacgaaactgcatggcaagtttgccgaggacgaaaaaagaacgcgctacgaaggttcaatccaacacaaagaaaaggaggagaactcacctggtcgaaggactcgccggagaagaagaggccgcgccgagacagccaagctgggcgtctgggcgctcgccggggtgctttggatttgggcgctgtga

SEQ ID NO: 40762 - DNA, 813 bp, Zea mays
  Peptide Sequence Number=SeqID_82541
atggcgccaaggctagggagccagggccggatgcctgaccacacgggcgagccgccgcgctggcgtgtctaccgcgcaggccggctgccgcgccacgccctgcgcaggggagcatgtatgcggaggccggaggagcaggtcgagcggcctgcggcacagggggcacgtcggccggggccgagcaacaggctgccatgccaagttggagaagcagggcgcggctgcgtgcgtgggaggcgcaagctcgatggagcgaggatagcagcgcgcgacaacttagctagacaacgcgcgcaggacaattcggtcacgaaactgcatggcaagtttgccgaggacgaaaaaagaacgcgctacgaaggttcaatccaacacaaagaaaaggaggagaactcacctggtcgaaggactcgccggagaagaagaggtcgcgccgagacagccaagctgggcgtctgggcgctcgccggggtgctttggatttgggcgctgggatcggcaaccaccaggcgttcacgaccaccggctaacccccttaacatgggtgttgatatgcacttggtgaagatgttgccgactctgatcttgactgatttggaggagttggaggttgccaaatggacaggtgcaagagaaaagaatagcgagaaaagcgatgaaaaggaggaggctttaaagggtaggttgaaagtaggcatgtggcaagggcataggtatcacgagggtttaaaggtaataatggacaaggatgtacaagatgaggtaaatgggtataagaaccaaggatataaataccacaaagggtggagttaa

SEQ ID NO: 40763 - DNA, 330 bp, Zea mays
  Peptide Sequence Number=SeqID_82542
atggagcgctgggccatgcgggggggagaaggcgcggctgctgggctgggcgcgctgctgcgctgcggatgctcgaaaccgattgatgcaattcttgaggatctcctggacctgtgggttaggacccacacacgttttcaatgtgccactctgatcttgattgatttggaggagttggaggttgccaaatggacaggtgcaaggggaaagactacagatagaaaagggaataactactctctaaggttgttgaaggacaaggagaagaacaagacgtgcagaacagggacacgagcaccacaaagaatgaagttaaagcgagcattgtaa

SEQ ID NO: 40764 - DNA, 327 bp, Zea mays
  Peptide Sequence Number=SeqID_82543
atggggctaccaatagaggatgcagcaatggttattcgatggacttcccatcagcgcccgtcaaatccaaggaaaacgatgtggaccacaagcaccacaattaagccctgccattcggctaacccccttaataggagcgttgatatgcacttggtgaagatgctgccgactctgatcttgactgatttggaggagttggaggttgccaaattgaaagggaaatgtgcccttgggccatttctaagtattttggtgattgagtgcaaacacaagggcctaaatgtgaatttatgtacatggatgaacaaggtgaaaatcatgaagtaa

SEQ ID NO: 40765 - DNA, 180 bp, Zea mays
  Peptide Sequence Number=SeqID_82544
atggggctcgacgaggatgaaggagacgtcgaagcaagggctgcggctaacccccttaacaggagcgttgatatgcacttggtgaagatgctgccgactctgatcttgactgatttggaggagttggaggttgtcaaatggacaggtgcaagagtaaagaatagcgagaaaagggaataa

SEQ ID NO: 40766 - DNA, 288 bp, Zea mays
  Peptide Sequence Number=SeqID_82545
atgggcgttgatatgcacttggtgaagatgttgccgactctgatcttgactgatttggaggagttggaggttgccaaatggacaggtgcaagtggaaagaatagcgagaaaagacaaaacttgcaaggtgtcaaagaacgaggaacagtcaatgatgaaatagatgaggcattatccccgaacaggaatggaaaagagggggcttcaagggctaggttcaaggtatggtcgagatatgggaaaggtcaaggcaacactaaacagaggcacaacaaaggatggagctga

SEQ ID NO: 40767 - DNA, 288 bp, Zea mays
  Peptide Sequence Number=SeqID_82546
atgggtgttgatatgcacttggtgaagatgttgccgactctgatcttgactgatttggaggagttggaggttgccaaatggacaggtgcaagtggaaagaatagcgagaaaagacaaaacttgcaaggtgtcaaagaacgaggaacagtcaatgatgaaatagatgaggcattatccccgaacaggaatggaaaagagggggcttcaagggctaggttcaaggtatggtcgagatatgggaaaggtcaaggcaacactaaacagaggcacaacaaaggatggagctga

SEQ ID NO: 40768 - DNA, 687 bp, Zea mays
  Peptide Sequence Number=SeqID_82547
atgacgcgcgggcccgacctgtcagtgcccgtttgggcgcgcgcgtgggttaaatgggccgcacgggggagaaaggccaagtgggccgaattccaggttgcggcccagttttcagatttcttctaccaattccaaattcagaatttgggtgttacaaatcctaccccccttaaaaataatctcgtcctcgagatttacttgagttggtgctcatccttccttgatgtcgttgatcctttcttctccggtcttgagctcattaattcgaggtcaaaggttaaaacaaaggggttatgcaactatctcatgggtaagatgagatctagattggtatcaccagatgcaattgtggacattactccacaacccatcacactcaatcaaagatccaaatcagacaggattaggtctcctattcctaaagtcactttaggcacagggtttcaaagtgtgaaatccatttttgtctttagaaaagaaaaggaccgccatcacagcgaaatcctcccgagggcctccccaggaatcccttgcaggaccgccatcacagcaaaatcctcccgagggccttcccaggaatcccttgcaggaccgccatcacagcaaaatcctcccgagggcctccctacactgaccactcccctactgcccttgcccctttcgggtaaggaaagtccagggggctag

SEQ ID NO: 40769 - DNA, 321 bp, Zea mays
  Peptide Sequence Number=SeqID_82548
atgcaggaatcccttgcaggaccgccatcacagcaaaatcctcccgagggcctccccaggaatcccttgcaggaccgccatcacagcaaaatcctcccgagggccttcccaggaatcccttgcaggaccgccatcacagcaaaatcctcccgagggcctccctacactgaccactcccctactgcccttgcccctttcgggtaccaggatgatcttcagatgacacgtgtcctcactgctagtcgtagcaatacaacaaacatgctccccgcggcggattacccaggccacgacgaaaccgaggcccacggcggcgcacag

SEQ ID NO: 40770 - DNA, 588 bp, Zea mays
  Peptide Sequence Number=SeqID_82549
atgcaggaatcccttgcaggaccgccatcacagcaaaatcctcccgagggcctccccaggaatcccttgcaggaccgccatcacagcaaaatcctcccgagggccttcccaggaatcccttgcaggaccgccatcacagcaaaatcctcccgagggcctccctacactgaccactcccctactgcccttgcccctttcgggtaccaggatgattcttcagatcctcgtgacctcactgctagtcgtagcaatacaaacatacatggtataggaaagtgcagggggttctggcgcaagaatcccgagacacagggaacagggtccctggacggcgggtttatttcaaataagtggaggggctctttaacaaaagcgccagcgcgaaggggtatcggatgggctgagccgtccgatcagaaacggagggctcagattagatctgggttcccgtggaccggtatgcacccagagccgttggatcccagatccgcggtccacgatttaaaacggcatgaccctaacgctgtccgtccgatctcatctcaacggctccgatccaaacgcgtgaaggggtatcctttggcctaa

SEQ ID NO: 40771 - DNA, 1022 bp, Zea mays
  Peptide Sequence Number=SeqID_82550
gaaagtgcagggggttctggcgcaagaatcccgagacacagggaacagggtccctggacggcgggtttatttcaaataagtggaggggctctttaacaaaagcgccagcgcgaaggggtatcggatgggctgagccgtccgatcagaaacggagggctcagattagatctgggttcccgtggaccggtatgcacccagagccgttggatcccagatccgcggtccacgatttaaaacggcatgaccctaacgctgtccgtccgatctcatctcaacggctccgatccaaacgcgcgaaggggtatccttacgatctaatctcgaccgtcgatgatcagatcaacggtgaccatgcgtcttcctcttcccaccaaccgagcagggtgcttcgccgtcgtcgtgctgtggagatgaacggctgtgaccccaatcggccacccccgagcaccattgtcaaattaaacgaagctacacggtgtgcgcggcatcacggtcacaatggctgtattcttaccggcattaaggtatggatgaagctcggccacggcgcggtgcggatccacggtggtgatgaactacgacgagcaattgctgcccactggccatcgaatccgacccgggatcggttcctacacctgcggcggaaccctccaatgctctcggtacgcaccgccgctgccaaggaatcgacagcagcagcgtcgacggcggcggcgcgtagagtttctggtggcggcgatttttgttcagggggaaagggtctgcgcaagcctctgaccggacccaaagttccggcaacagcgagggagcagctacggcggaaactgagcttcacggccctccatcctcaatgcgctctctcaactctctctcggttcggcgatggtggcccagcccttgattcttatacccaggttgggggggtcggacccggcaggtacggcgagttgttgcacggaccccgagggaagcggcggcagattcggctggagagggcgagggcgagattcgcgcgatggtga

SEQ ID NO: 40772 - DNA, 882 bp, Zea mays
  Peptide Sequence Number=SeqID_82551
atgcagcattctatcccatcagtggcggctgtcagggccgtggatccggccaccaaccgccagccgcaggcgcgctggacctccagccgcgggcagcaggcacacgctcagccgccattgcgggcgcgctgctcggacgccagccgcaggcacgcgctggatcgccagcgctgctcggccgccatcgtgggcgcggcctccagccgcgggtcaggccgccagggggacagagaatcctccctctcctcatcagagaagaggaatccagattcgctggcgccatcagagtttggggattcgactttgacggagttgaggttcgcccacagtccgatttgtgcacctcgactgcgttcaatcaaggtaggggatggcatcgggaccacgaatggtggtggtggtatgaccttgtcgtcgttgaagaatggtggacaccctgttcttgccgccctggttggacgactaccgaaacctggcggtgccggtgttggtggtctccaacgcggtgcagtaggttccacctatggtgtcgactccggtggcaccggtgttgaccaagttcaccattaccctgtgaatggcaaacccaatccgattgtcgtcgaggattccttcacggtatgcgcggatgaactccctgatgacggcacggcggatcacctgaacgacgcgtcgaagagttcggcatcaacgatccacgatgaaaactgtgttagcggtgctgttgggcatgtgatggccggggggcgctccaagaacgatttctctgtggccttcgtcgatctgctgtctgcaactgtgcgtaaccgctcggtggacgctcggtggagagacagtgctgataacgtgttaaatgtaaatagttgtgtgaacagagaatga

SEQ ID NO: 40773 - DNA, 894 bp, Zea mays
  Peptide Sequence Number=SeqID_82552
ccgccggcaccagacgccatcgcgggctcggcatccatccgctggtcaggccaccatccgcgagcgcggcctccagccgtggatccggccaccaaccgccagccgcaggcgcgctggacctccagccgcgggcagcaggcacacgctcagccgccattgcgggcgcgctgctcggacgccagccgcaggcacgcgctggatcgccagcgctgctcggccgccatcgtgggcgcggcctccagccgcgggtcaggccgccagggggacagagaatcctccctctcctcatcagagaagaggaatccagattcgctggcgccatcagagtttggggattcgactttgacggagttgaggttcgcccacagtccgatttgtgcacctcgactgcgttcaatcaaggtaggggatggcatcgggaccacgaatggtggtggtggtatgaccttgtcgtcgttgaagaatggtggacaccctgttcttgccgccctggttggacgactaccgaaacctggcggtgccggtgttggtggtctccaacgcggtgcagtaggttccacctatggtgtcgactccggtggcaccggtgttgaccaagttcaccattaccctgtgaatggcaaacccaatccgattgtcgtcgaggattccttcacggtatgcgcggaggaactccctgatgacggcacggcggatcacctgaacgacgcgtcgaagagttcggcatcaacgatccacgatgaaaactgtgttagcggtgctgttgggcatgtgatggccggggggcgctccaagaacgatttctctgtggccttcgtcgatctgctgtctgcaactgtgcgtaaccgctcggtggacgctcggtggagagacagtgctgataacgtgttaaat

SEQ ID NO: 40774 - DNA, 681 bp, Zea mays
  Peptide Sequence Number=SeqID_82553
atgcagattattgaaagaaagtgtgaggctcaaaggggtgctgggataaggtctaaactgaatttttatgtggttttgtgtactgtaggaaaaaaactcgttaaactcaccgatcaacctggaaatctgataccacttgatagagctggagtgtccgatctttcgttcaattctcttgcacgggcccgagtcactggcccaggtggaaggggtggcgcctggactggggaagatggtgcctgggctagagaaggtgctgctggtgtagatgtgctcgtgttggtgttgatgtcctcatcagaaccatttcttcgtttttcgcaacgaacatgcccaatccactactttaggtccaaaactcatgtttggggtggtttcgcgcaatttcgctgccgcacgtcacccattccgaaaacgggtgtcgggtgcatacaaagcacgagttttttgccaccggaaccatttcttcgtttttcgcaacgaacatgcccaatccactactttaggtccaaaactcatgtttggggtggttttgcgcaatttcgctgccgcacgtcactcattctgaaaacggttatcggggtgcatacaaagcacgaggttttgccaccggaggcattttttcgtttttcgctacaaacatgcccaatccactactttaggtccaaaactcatgtttga

SEQ ID NO: 40775 - DNA, 543 bp, Zea mays
  Peptide Sequence Number=SeqID_82554
atggcgctttcccccctcctccttgcggaaaggcgacacatgggcgtatgtaaaaaagacgagtctgtccttgaccgtcctctcgccctgtgcagaggctcgggggctgctctcgcaaacccggctccggccaaaccgttggcagcgtcaacataccagcccgagaacttgggacccgaccgtgcactcggtctatggccagctcgcatgagggaacaactagaccagccgaacgccgcctgcgccgctccgactgctgagccacccgacagagtgaggctgacagcagccaaggccggcctcgggcgtcataggaaactccgcctcgcccgaccccagggctcggactcgggctcagccccggaagacggcgaactccgctccgcccaacccagggctcggactcgggctcatccccggaagacggcgaactccgctccgcccgacccagggctctgtgacggaacctcccaagaacgtctcacccgtcttgcagacattacagcacatcagagatatagatatgcggaagcgattacataa

SEQ ID NO: 40776 - DNA, 978 bp, Zea mays
  Peptide Sequence Number=SeqID_82555
atgggaggccatggtgcactgacaatttacttgaaaaacaccgataaatacaagtcagtatcagcatttgctccaattgccaatccgataaactgcccctggggacagaaagcattctcaaattacctgggctctactaaatcagattgggaggggcagtctgacaagttcctggctgagcagcagttgctacctcgcaactttgaggaggcgtgcaaacatggtcccgtcgtaccgtccactgaagcgttcaagatgtcctgcgatctgaccaggaaaaaccaaattgccatctgccttacctgccagtcgttctggtgcttctgtgctgccctcgacgaatggcacatcttcagccgaatacggaagattgcgtccaaccaccgggaccaagctaaagctgcccgactcgccgctggatatattttgatcgccgcctgcgccgctccgactgctgagccacccgacagagtgaggctgacggcagccaaggccggcctcgggcgtcataggaaactccgcctcgcccgacccagggctcggactcgggctcagccccggaagacggcgaactccgctccgcccgacccagggctcggactcgggctcagccccggaagacggcgaactccgctccgcccgacccagggctcggactcgggctcagccctggaagacgacgaactccgcctcgcccgaccccagggctcggacacgggctcagccccggaagacggcgaactccgctccgcccgacccagggctcggactcgggctcagccccggaagacggtgaactccgctccgcccgacccagggctcggactcgggctcagccccggaagacggcgaactccgctccacccgacccagagctcggactcgggctcagccccggaagacggcgaactccgcttcgcccgaccccatggctcggactcagccctggcctcagccgacggtctccgcctcgcctga

SEQ ID NO: 40777 - DNA, 192 bp, Zea mays
  Peptide Sequence Number=SeqID_82556
atgacggatgcggagaaggaggtagcaacagaaagacagatggactcaccgcctcgatgcgattgtggagaccgtgctgtcatcgacgaagactatgagaagcagttctgttgtccgaacattgattatgagacgaggaaatgcagttgggagagttacgacgacaaaggagagagattggaagcggcgtaa

SEQ ID NO: 40778 - DNA, 531 bp, Zea mays
  Peptide Sequence Number=SeqID_82557
atgacgtcgatggttcttagctccctacggaagcaaggaaacgtcagcaggatccatgccgcaccgccagctgcgcttctacaaggctcaagcacttctccgacggccacggaacctagaggatttgggttcatccaatactttgatcctgaggatgcttctgatgcaaagaagaagcctgctgacatgagggccagggaaaaaataagtgttagatgccgttcttatgatgggaggttgtgctcaaggtcacttgggttgaacgattctcctggggtagatcatggtcccaaagccgaagctactcaccagcacttaagcgaaagcactattcaagggaacctagaggatttgggttcatccaatactttgatcctgaggatgcttctgatgcaaagcccaaagccgaagctactcgccagcacttatgcgaaagcactattcaaggtccccagctcctcgacctcgggagagatctttgtcgcgttccccagttgtcaacagatcaaggagtgcaagccccattgttag

SEQ ID NO: 40779 - DNA, 432 bp, Zea mays
  Peptide Sequence Number=SeqID_82558
atgcagaaagagagtttcagggaacctagaggatttgggttcatccaatactttgatcctgaggatgcttctaatgcaaagtaccatatggatgggaagatgctgcttggaaggaaaattgctgttgtttttgtagaggaaaacaggaagaagccttctgacatgagggccagggaaaaaataagtggcagaggccgttcttatgatgggaggttgcgctcaaggtcacctgggttgtacgattctcctagggtagatcacggtcccaaagccgaagctactcgccagcacttcagcgaaagcactattcaaggatatctgaacgtgtactatgtgggtattccaaaatctctgatgagtgaagtaagttgtgaaccaatgaaccttgatgttggacgtgctgaccagtgcgcaggtgcctatgtggtgtga

SEQ ID NO: 40780 - DNA, 858 bp, Zea mays
  Peptide Sequence Number=SeqID_82559
atgtccttggactcgagcgcgttcaaggtgctcgaccaaatgtccaagagcgcaagagccgacgatctagtggtgaacccgttcgaggagctggaaagcggctcgatggcacttctcgcggaggtgacgggcgaaaaggtgatcgtcgttgggtctgtcttgctatgccgctcaccaagtctctaccctcaatccatgtcgtgtgacacgaggcgatgcatggcgtggctggatgccaaggcgcccaagtctgtggtgtacgtgagcttcggcagtgccaaatgcatgccacccattcagctcaggcagctcggcatggcgtttgcctcatgcccctcgcctgtgctctggctcatcaaggacgctgactccctgcccaacaacatcaaggatttgctacacgagaacactgttgcagacgatgtcgcaggaagcaagtgcctggtggtgcgcggttgggcgctacatgtggccatcctggcccatcctgccagtgacggcttcatggcgctctgtggatggggctccactctggaggttgttgcagccggtctgcccatggctgcctggccctttttcgccgaacaatttatcaacgagcagctcatcatggacgtgcttggtattggattgtctgtcgctgtgatgaagccaattgaaaatgttttgattgccagtaacatgggtggtgctgttgtgatgatatatgctcctgttttttggtcttgcctgacaagcttcacacttggaatccatggtcagatagttggggttctatttttgccatttttggtaattcaactgaatatcagtatagctgtccagcaaaggttcttgtgggatccaggtggtgattag

SEQ ID NO: 40781 - DNA, 1932 bp, Zea mays
  Peptide Sequence Number=SeqID_82560
atggcgtcttcttcaccggtccatactcagctcattcaagcgttggagcttcagacgcgcgccctcctctcggagttagacaagcgtctcgactccaagtgggggaccaaatgggaatcccgtgttggagcgatcgaatcgcgttccgccgattcgactcgcgccatgtccgatttctcctctgctcttcactccgacgtggaagcgcacctcacagcagctgacgccgccaccgactccaaccttctccagatcgaagccgagctggacccccgcgtgtcggcgctcaaatcctcagtgcacgccctcgatctgtggtgtcctcgcgtggattcatcgatcgaggggctccacgcgtcggtggatttcatcagcaccgaagtgtccaagatggggattctatggaaccacgacgtgtgtgtcgacgacttagccaggccgggcttgttcggagcacacagatcggcggcgtgcttcgacgcgtccgccagcgcgccgtccatcccagcctcggtcatcgccgacaactggggagggttcttcgacgatggcgagcagtactgcgcggcgctggacgcgctgcccaacagcatccactcagacctcctcaacacattcgcgcgtcacagccacgaccatctcttcgtcctcaaccccgtggccgcccaggattcctctgccgaggaggccatggccacgatggaagcagccgcggacgcgggggatcccgcgaggctcgtccagtcctctccgtccccttccctactcatcgcggggaacctgctgccaccctccctcacgatgccgcagctgcaagctgaggtggtggacaagcagtaccgcgtcgcgatgagtccaccgcctcctcttcccgtcgtcgacgagctgtaccgcgaagaggcaagtcctccgcctcccatccacgacgacgctgcaggggtgatgtccttggactcgagcgcgttcaaggtgctcgaccaaatgtccaagagcgcaagagccgacggtctagtggtgaacccgttcgaggagctggaaagcggctcgatggcacttctcgcggaggcgacgggcgaaaaggtgatcgtcgttgggtctgtcttgctatgccgctcaccaagtctctaccctcaatccatgtcgtgtgacacgaggcgatgcatggcgtggctggatgccaaggcgcccaagtctgtggtgtacgtgagcttcggcagtgccaaatgcatgccacccattcagctcaggcagctcggcatggcgtttgcctcatgcccctcgcctgtgctctggctcatcaaggacgctgactccctgcccaacaacatcaaggatttgctacacgagcacactgttgcagacgatgtcgcaggaagcaagtgcctggtggtgcgcggttgggcgctacacgtggccatcctggcccatcctgccagtgacggcttcatggcgctctgtggatggggctccactctggaggttgttgcagccggtcttcccatggctgcctggccctttttcgccgaacaatttatcaacgagcagctcatcatggacgtgcttggtattggattgtctgtcgctgtgatgaagccaattgaaaatgttttgattgccagtaacatgggtggtgctgttgtgatgatatatgctcctgttttttggtcttgcctgacaagcttcacacttggaatccatgatattggagcgacatctggtcgtcccaaccttcctcgttggcaacatgggaagacttggaagcactcaagcacacctttcctcaggctccagcttgggggcaagctggttctcatggaggagggaatgtcagtatcccttcatcagtcactggaggtcaggcagagcatgttcgaggagatgcagcagataatgaagctacaaggctcgcaggccaagcaccaaggtttatag

SEQ ID NO: 40782 - DNA, 513 bp, Zea mays
  Peptide Sequence Number=SeqID_82561
atgtggaaatggtccccactctctttgctctggccgacaagtgcgccagggctgctaaggggccatgcgtggcactcagcgccacagactggggctgcccaagcgaagggctcaggtgccgtcgctcaggatggcaagaaaaagaagaaaaagaaccgcgacaatgagaagccgcactccgccgctctggtcgtggcagctgcgactgggggccggggcgaccatagcaaacgcccacgaccaccgaggggtaacggcggcacatgccccgtgcaccccaacggtcgccacagcgccgtagaatgccacgagttcatcgacctcgcgaatcgtgttagcgcgcggcgcgagcagtcttccggggatggctcttcacctcatcaccgatccggcaaggaaaaggccgacgacgaagaggtggctgttgccgaaccggacctcgagtatcagtcacccgagggggtcctgaaggatgtcttcactggagactccaattccggtgaaggcaactag

SEQ ID NO: 40783 - DNA, 504 bp, Zea mays
  Peptide Sequence Number=SeqID_82562
atggtccccactctctttgctctggccgacaagtgcgccagggctgctaagggccatgcgtggcactcagcgccacagactggggctgcccaagcgaagggctcaggtgccgtcgctcaggatggcaagaaaaagaagaaaaagaaccgcgacaatgagaagccgcactccgccgctctggtcgtggcagctgcgactgggggccggggcgaccatagcaaacgcccacgaccaccgaggggtaacggcggcacatgccccgtgcaccccaacggtcgccacagcgccgtagaatgccacgagttcatcgacctcgcgaatcgtgttagcgcgcggcgcgagcagtcttccggggatggctcttcacctcatcaccgatccggcaaggaaaaggccgacgacgaagaggtggctgttgccgaaccggacctcgagtatcagtcacccgagggggtcctgaaggatgtcttcactggagactccaattccggtgaaggcaactag

SEQ ID NO: 40784 - DNA, 354 bp, Zea mays
  Peptide Sequence Number=SeqID_82563
atgtcggaggccatcctcgtagaaaggggcaggcgacgtgtcctctccgcaataaacgcgggaggccgcgcggcccagagcccttacgtcatgctccgcccgctggcctacgtcacggacaataagccatgtggcagcattagaccctcgactgggtggggagcagaggcgctccggatagagcctggacacgcgtcaataccggacctatgcctaggtcacgttactgccggcccggctatggtcacgctgactgccatgcctgcccccgtggttgactggcccatgacctccgtacttaatgtctttgttgggccatgcgcggggtgcctcgagtcgctgcgtcggttctaa

SEQ ID NO: 40785 - DNA, 450 bp, Zea mays
  Peptide Sequence Number=SeqID_82564
atggcccttggtgaggctgtggagcttggagggtgtcgcagcaactccctggctgctgacaatgctccaggagtcgccctcgacggagtccgagatgtctgtgcagctggtggccctgtcgccgcctgccagcggaatggacaggacgtaataaatgtcgtgggggcacatcacctgtcagaaagcattagacccttgactgggtggggagcggaggcactccggatagagcctggacacgcgtcaataccggacctatgcctaggtcacggtacttcctctcccgggaccttgttatgggtggtccggagctcacttggtggggtctggaccctatccaacggctccgagctgctttacttcgggggtccgggttgtgcgcacaggggtcctgtgtcttctgggcccgatggcgttgcctccgagaacgccacctcaaccgctcacgag

SEQ ID NO: 40786 - DNA, 819 bp, Zea mays
  Peptide Sequence Number=SeqID_82565
atgcctccttctacgcgcggctttctcccccaccaacggcgccctttctccccaacacgttgcggcggccgagatgaacgcactgctctcgccgagatcccgcgtcgattcgattcacctgtggtgctcgcgacgaaggcgcgtcgattctccttcccgttgacgaagacggcggagatcgtggaggcgctgcacagctacagtatcttcctcggcctcttccttgctagcgttgtcagggagccaccagcccacaactccatccaccggcaccacatcgtctgtggcagcggctcctccatcgcacatgtcgttgtccccggaggcgaagcgatgtggcctcgagcgctctacatcgtcgtcttctcgcagacagagagtgagtgccttccttgcatcctccctctgcccctcgttcccctggacaggatccaacaaggaggctcatgtgtttgcttcctgcggattcatgagtttgagctggacaaaagtcagtttgacgagaggacagagaatggcctatactccgatttctacttacatggcgctcgacaagccgaagcaccacaacgtgaaggtggcgaggggatgggagacgcctacgcgaagcgggtgctgctcactgcagctggtgacacaggcacagctctgggtctggggccaagactggggacgctcaaaaatgccaaattcacagagtggcagacaaatgcagctcgctttccaggcgttggctcagagcccacgtcgctcagtgggtactctgggccagtgacaaaagaaaggctacaacagtacaacgccaaagctggtgactga

SEQ ID NO: 40787 - DNA, 479 bp, Zea mays
  Peptide Sequence Number=SeqID_82566
ttgtttcgctcacatttctgaataaatgtccagtggtttctgtgagcgctgaacaccgaaatattcagacagcaaacgcacagctctgggtctggggccaagactggggatgctcaaaaatgccaaattcacagagtggcagacaaatgcagctcgctttccaggcgttggctcagagcccatggtatgcaacttcttcagggcctctttgccgcactgcacacactggctggctgcatcagcctatctcagataatttgggtctatacagtattttgcagatcgagacattttatgtgctcgccgtgtcactgaagaagatttgcaacgtgttgctacagcaactggtactcgggtcctgtgaggtattcgaggaaaagcaagtaggcaatgaaaggttcaatatatttagtggttgcccttctggccagacaatgactattgttctccgtggtggtgcagaccaggtcttctattga

SEQ ID NO: 40788 - DNA, 294 bp, Zea mays
  Peptide Sequence Number=SeqID_82567
atggttcgggcagacgccgcggccatcaacttggaccggaggctccaccaacttctcaacgagcatgaggagtccgagagtcgtgccgaccatgcgacagcgatccctgtgcaggaatgggggcagaggagaaaaggttactttgcacagggacatgttccaagtttttctatgtcttgggacattgagagtgatgatgaggaccttgatgatgaggttgatgatggagctgaggatgaggacctttgcttatattatacggaatccttctacaaggaatgggaattcatgtag

SEQ ID NO: 40789 - DNA, 507 bp, Zea mays
  Peptide Sequence Number=SeqID_82568
atgccaaattcacagagtggcagacaaatgcagctcgctttccgggcgttggctcagagcccacggtatgcaacttcttcgaggcctctttgccgcactgcacacactggctggctgcatcagaaaagtaaaagagaaggttactttgcacagggacatgttccaagtttttctatgtcttgggacattgagagtgatgatgaggaccttgatgatgaggttgatgatggagctgaggatgaggacctttgcttatattataccgaatccttctacaaggaatgggaattcatggccaacatcagtggtccttgcaggtttattagcaacactcaagatggttcgtgtgacacaaggcatacagaaatacagtacctaaccctaggcactggtctcaaaagtggaagttcttgcagcgtggtccggcccgaggagattccgaaggtcttggaaatcagcggcaagagcagcctcatcgacaacttcttcttctcctaccacgtgtaa

SEQ ID NO: 40790 - DNA, 531 bp, Zea mays
  Peptide Sequence Number=SeqID_82569
atggccaattcatcagcacctgtcagggtcaaagccatcaccctggggagcattatcaagtttgattatttcaacttcctcgccaccgccaatggcaagctctgccttgacgagcccaaggcaaccgacgtcgaatgcacaggccccgaatgccccacagagggccgggtggcaaggcaacattccgaaaggaggcatgccgccccagggcggtgctcccaccggaccatgggtaacgctgaagaggaggaaacacctttgtcgggaggcacagccggaggcaaccgccatcgggcgcccgataacaagcaccaacacaaagaccatgagcgcccgcgcaagggtatctctcctccttggtcctcgcaagaaccaagtgctcactacgagatgatcctttgccactccggcgcggtggatccctcgagatcgcttacaaacatgagtcgggtcaccaacaagatcttcacggtgatcaccgagctcccaatgccaccaagccgtctaggtgatgccaatcaccaagagtaa

SEQ ID NO: 40791 - DNA, 846 bp, Zea mays
  Peptide Sequence Number=SeqID_82570
atggaaataaatcgtgatcggttttgtttaagtggtatgcttaagtgttgcgctcaagaggttgatcttcatggtgatgaagttgcagatgaagttatgatgctgagctccatggatgctagtctagtgatacccccgatcctggcacacatttgctatgcattcgattttgcccttaaaaccgggtgtgacacagatccagtgccagacattcaggctgaggatgaggcattctgccagttcgagacccagggcacagctgttgctgctgctgatgatgatgatgatgatgacgacgacgactttgggatcccgccaccaccccatgtgcctcctcgctcacatgatcacgaggcagggagttccagtgctgcccctcctgccattgaccctgctctggctacgatactccagtcccttacacagcagcaggctcatctggcagccgagcaggctcgacaggcaaaggtccagcagcagatgtctgagcggatgctatctatgtttcagacgattcaggaccatcaggacactctgcagcagcgacttttagcagacagggctgagcatcaggctttcatgactcacattcttcagcatacgagacaaatggacagtgactgttcactatccggtgtgccaactgccaaacggctagctgtcagaactagccgttggggcatcagtggcgcaccggactgtccgaacctcattaatgcaagcgagagccacatagagcacacaccgcatgcattaggcttctcttggtcaagtgaaagtctacggcttgttactcttggtgatcggcatcacctagacgacttggtggcattgggagcacggtga

SEQ ID NO: 40792 - DNA, 384 bp, Zea mays
  Peptide Sequence Number=SeqID_82571
atggcgcctgaggccggacttggctgctgtcagcctcactctgtcgagtggcacagcagtcggagcggcgcaggcggcgctgtcctcttgtcagaccggtcagtggagcggcgaagtgactacggtcacttcggctcttttgactggggggcatgcgtcaggataaaggtgtcaggccacctttgcattaaatgccccctgcgatttggtcggttggcgtggcgatttgtccaaggttgcttcttggcgaagaccgggcctcgggcgagccgaaggccacataggtattggtcaatggggactagcgctctccgggcagaaagggaatcacaactcatgggtaaagtgtgcaacctctgtagaggaatgaaactgatatattag

SEQ ID NO: 40793 - DNA, 369 bp, Zea mays
  Peptide Sequence Number=SeqID_82572
atggcgcctgaggccggacttggctgctgtcagcctcactctgtcgagtggcacagcagtcggagcggcgcaggcggcgctgtcctcttgtcagaccggtcagtggagcggcgaagtgactacggtcacttcggctcttttgactggggggcatgcgtcaggataaaggtgtcaggccacctttgcattaaatgcccctgcgatttggtcggttggcgtggcgatttgtccaaggttgcttcttggcgaagaccgggcctcgggcgagccgaaggccacataggtattggtcaatggggactagcgctctccgggcagaaagggaatcacaactcatgggtaaagtgtgcaacctctgtagaggaatga

SEQ ID NO: 40794 - DNA, 150 bp, Zea mays
  Peptide Sequence Number=SeqID_82573
atggtggccgcgaggaggagctgcgcaggggccgtcgggacctgggcgtccctgctggaatggagctcggctaggggaactgctccctgcgccatggagagaggagagctgggggtcacgcccatggagagcaggagatttcgtctgtaa

SEQ ID NO: 40795 - DNA, 402 bp, Zea mays
  Peptide Sequence Number=SeqID_82574
atgggcaagagcaagaaaggtggcggctcttcgcaccactcgggcgacaagcgcaaacgcgagccgactcctccctcggaggacttcggtgactcgaaggaggagttctcctccgagtccgagggctctccggctcctgcctcttgtgacaccccatgcgcctccagctcttatccatggcgccctcacctcctgctctccatgggcgtgacccccagctctcctctctccatggcgcagggagcagttcccctagccgagctccattccagcagggacgcccaggtcccgacggcccctgcgcagctcctcctcgcggccaccatggccgctccctatgctgtccagggcgcaggcgagcttcgctcgcccctgctctcccctagccagatcggcccctag

SEQ ID NO: 40796 - DNA, 5145 bp, Zea mays
  Peptide Sequence Number=SeqID_82575
atgtcggctgaacaaaggaatgagtacaataacaagcgtcgtcaaatgcgtcaacgaaataagggacaaaatgtgatgccagctatttcaggagatggcgacaaaaaagtaaatgtggatccagatgatgatagcgactggctgcatcggaacgagacattccagtcaaatgactatgtcgcaacgatagaccttctgccaccaggcagtgtgcatgaatctgttggtaccattggggaatcgggtatcggcgtgagggagtataggcttgaacgccttaggttgtataatcagacaccaaagcggaaagaggcaaagatagagtacatgagaaaacgtagagtgctacaggctgacactttgaatgttgtgtccatcgccatggaagacccaacatatacccctgaggttgtgcaccctgcaacggaaccttcaacagttaccgcctgtgactgggtcatccctgaattcgttaggacacctttcctaccagctcaaacacagaccgaggatgtcggttcatttgatatgtctactgaagcaataaaacgtaaacatcatgtgccgcgtggggaaagacaagctatcttagcccgtcgaaaccagcaatttcaagcatccattgcacggaacgtgactactttgaatggggatactatcggtgacgccaacaacaatgatgatgatgatgaggctgtcatattcggagaagatgacgacgacgacgagagatacatattcgctggccaatatgaggagactgacgaggacattaaaatcgatggtactcaagatgaatctactggcactgatgtgcctgacccgtacgacaaggtatacagtaacctccctgaagaaacgcatatgctgaagccagttcctgactgcggttattgcactgcgaagaagtttgagtacgagccacctgggttttgctgccgtggtgggaaggttgagctagcaccactggatacccctccccagctcaggaggttgtgggatagtgcagactctgatgctaagcactttcgtgataacattaggttttttaatggccatttctctttcacttctctgtactgttgcctcgatagtatgacaactaatgtgcgagattctggtatatacacgttccgagcacaaggcatgatgtaccacaatatcaagtcattcggtaaggaaggtgggtcggagcataaacatctagagctttacttttacgatgatgatcccagtctcgagcatcggtaccgtaagtgtcgtgaagagcagcttcagaaagacaaagaggtcattaaacagatagttggcatactccatggaaacccgtactccgagcaccttaggagcatgggccatgttgagaaccttgatgactatcatatcgcattgaaccttgaccagactttgaaccagaagacatataacacgcctctcacttcggaggtggctgctgtatggatcgaggggagcgaacggcgaggccagttcagcaagagtgttatgctacatgggaaggataggtcaagccacggcattcgctcataccatggatgctacgatgcactatcgtatccactgttcttccctagaggtgaacttggatggcatgcaaatatcccaaaggttggtgtatccatggatgaagtggatgcataccgtgcgacacatagggcaaacaattcaaacgatgaagatgcagaatctcctacccatttatgtgtgtccgtacgtgactactactgctacaaattccagattcgtcccggtgtattcaatccaatacttcatggaaagcggcttttccagcagttcgctgtcgacacgtacatcaagattgagagctctcgtttagattttatacgtaagaatcaagatcgtttaagggcagacctataccagggcttggtggatagcatgttagacggagatatcagagcagaaaaggtcgggaagcgaactgtgctgtctacgtcgtttattggcggtcctcgtgacatgaaacgtcggtatatggatgctatggctctggtgcggaagtttggtaaaccggacatctttcttaccatgacatgtaaccccaactgggatgagataaggagggagcttctccctggccaaacaccgcaagatcgtcctgatcttgtagtgcgtgtctttcatgcgaagctacaggagttaaagcataggctgactaaacatgatattctcggtaaggtccgggcctacgtctacgtcgtggagtttcaaaagcggggtttgccacatgcccattttctactcatcatgcagaggaagtacaagctaacgtgccctgagcagtatgaccttttgatctcagccgagatcccacacaacaagtaccctgaactacgaaagatggttatcaaacatatgatgcatggtccgtgtgggtcgctaaaccctaactgcccatgcactaagggccatgcatcatgcaagaatcattacccccagccttttagtgacacaaccttgcaagggaaggactcatacccgatttacagacgtcgtgatgatgggcgtaaggaaaaggttcgagggtgcgaattggacaatagatgggttgtcccttacaacccttacctccttcgtctcttcaactgtcacatcaatgttgaggcgtgtgggagcatcaaggctgttaaatacctgttcaagtacatatacaaaggccatgatcgcgcgtctgttgttatgagagatgcaagcaaggcagatgatgatgtagatgagatcaagcaatacagagatgcaaggtgggtgactcctccagaagcgttatggaggatatacggctttgagcttagtcaaaactctccacctgtgatgcaactgcaactccatcttccaaacatgcacatggtggcgtttcacgaacggcaaatggtcgagcgagtcgtcaatcgtccaggtgctgataggtcaatgctcacggcatattttgaagcgaataggctacatgagggggctcgtggcattctgtatcgtgacttccctgagtggtacacttggcagagtggtaagggcaaagtatggcaacggaggaagcgtgatacgggtggacaagtcggtagaatagtctctgctcatcccgctgagggggagcgctactatctccgtgttctcctaaaccatgtgacttgcgccacctcctatgtagatctaaggacagtagatggtgtcacgctaccaacttttcgtgaggcagcagagagaaggggactgcttgagtcggacaacacactggatgagtgtctcactgaacgtgctcttttccagatgccatcggcgctgcgacgactttttgccacaatactggtgtattgtgagccaagcgacgtggcggtactctggcaaagacacctagatgctatgtctgaggactatcaacacaggagtcagagtaaaactcatgttgagcagatggtattgattgacattaggaacatgctgcagtcaatgggaaaggacataaagacattccctcttcctcctatcatcgacacgtatgacgatgctattggtactgctagggaggtttacgaggaggaaagtatcgaaccgggagtgggagatgtggctctcaaagactctcttaacaaggaacagggggccgcctacgataagattctatctgccgttgacactgatcagggcggattgttctttgtggatggacctggtggcaccgggaagacttatctatacagagtgctgctcgcgacgctacgcagccagggcaagattgcagtggcaacagctacatctggcgttgcggcttccataatgcctggaggaagaaccgcccattcacgcttcaaaatacctctcactattgacgatggcgctgtatgtagcttcacgaagcagagtggaactgcagagttgctacggaaagcatctctcattatctgggacgaggcttctatgaccaagagacaagctgtggaggcactggacaatagcatgcgcgatataatgggtcggcccgaactaccattcggtggtaaaaccattgtcttcggtggggattttagacaagtcttgcctgttgttcgtaaagggtcaagggctcaagtggtcgcttcttcgctacggatgtcttacctatgggagtccatgtcccacttaaagcttgttagcaatatgagggcaaaaaatgacccttggtttgcggagtatttgctgcgcgtaggcaatggaactgaggacacaaatagtgacggtgatatatgtcttcctgacgaggtatgtgtgccttatagtgggagtgacagcgatcttgacaacctaatagacttcgttttcccaaatctcaacgaaaatatgtctgattcgacctacatcacttcaagggcgatactgtcaacgcggaatgactgggtggatatgataaatgctaagatgatcgaacgttttcaaggggagcatatggtgtaccatagtttcgatagcgccatggatgatccacataactactacccacctgagttcctaaacacactgacgcctaatgggctgccaccacatgttttgaagctcaagattggatgcccggttatattgcttcggaatatagaccctgccaatggactttgcaatggcaccaggctggtcgttcgtggtttccaaagaaatagcattgacgcagaaattgtgctgggccaacacgctggaaaacggattttcttgccgcgtatacctctatgtccctccgatgaagagatgttccctttccagttcaaaagaaagcagtttcctgtacgccttagctttgcaatgacggttaacaaagcacagggtcagactattcccaatgttggagtgtacttgcccgaaccggttttctctcatggccaactatatgttgctctatctagagcgacagctcgatcaaacataaagatccttgccatcccagccgtcgatgtgaagaagaggtcgaggaagggcgtaaaaaagaaccccacaatagattgtgggacatgcaccaagaacatcgtctacaaggagaaaacgcttggaaaatttgatgatttgaaagctggagtactaggacccataactagacatggcttgggggtcggggtagtgactatatcatttgcagtccaagtttaa

SEQ ID NO: 40797 - DNA, 5034 bp, Zea mays
  Peptide Sequence Number=SeqID_82576
atgtcggctgaacaaaggaatgagtacaataacaagcgtcgtcaaatgcgtcaacgaaataagggacaaaatgtgatgccagctatttcaggaggcagtgtgcatgaatctgttggtaccattggggaatcgggtatcggcgtgagggagtataggcttgaacgccttaggttgtataatcagacaccaaagcggaaagaggcaaagatagagtacatgagaaaacgtagagtgctacaggctgacactttgaatgttgtgtccatcgccatggaagacccaacatatacccctgaggttgtgcaccctgcaacggaaccttcaacagttaccgcctgtgactgggtcatccctgaattcgttaggacacctttcctaccagctcaaacacagaccgaggatgtcggttcatttgatatgtctactgaagcaataaaacgtaaacatcatgtgccgcgtggggaaagacaagctatcttagcccgtcgaaaccagcaatttcaagcatccattgcacggaacgtgactactttgaatggggatactatcggtgacgccaacaacaatgatgatgatgatgaggctgtcatattcggagaagatgacgacgacgacgagagatacatattcgctggccaatatgaggagactgacgaggacattaaaatcgatggtactcaagatgaatctactggcactgatgtgcctgacccgtacgacaaggtatacagtaacctccctgaagaaacgcatatgctgaagccagttcctgactgcggttattgcactgcgaagaagtttgagtacgagccacctgggttttgctgccgtggtgggaaggttgagctagcaccactggatacccctccccagctcaggaggttgtgggatagtgcagactctgatgctaagcactttcgtgataacattaggttttttaatggccatttctctttcacttctctgtactgttgcctcgatagtatgacaactaatgtgcgagattctggtatatacacgttccgagcacaaggcatgatgtaccacaatatcaagtcattcggtaaggaaggtgggtcggagcataaacatctagagctttacttttacgatgatgatcccagtctcgagcatcggtaccgtaagtgtcgtgaagagcagcttcagaaagacaaagaggtcattaaacagatagttggcatactccatggaaacccgtactccgagcaccttaggagcatgggccatgttgagaaccttgatgactatcatatcgcattgaaccttgaccagactttgaaccagaagacatataacacgcctctcacttcggaggtggctgctgtatggatcgaggggagcgaacggcgaggccagttcagcaagagtgttatgctacatgggaaggataggtcaagccacggcattcgctcataccatggatgctacgatgcactatcgtatccactgttcttccctagaggtgaacttggatggcatgcaaatatcccaaaggttggtgtatccatggatgaagtggatgcataccgtgcgacacatagggcaaacaattcaaacgatgaagatgcagaatctcctacccatttatgtgtgtccgtacgtgactactactgctacaaattccagattcgtcccggtgtattcaatccaatacttcatggaaagcggcttttccagcagttcgctgtcgacacgtacatcaagattgagagctctcgtttagattttatacgtaagaatcaagatcgtttaagggcagacctataccagggcttggtggatagcatgttagacggagatatcagagcagaaaaggtcgggaagcgaactgtgctgtctacgtcgtttattggcggtcctcgtgacatgaaacgtcggtatatggatgctatggctctggtgcggaagtttggtaaaccggacatctttcttaccatgacatgtaaccccaactgggatgagataaggagggagcttctccctggccaaacaccgcaagatcgtcctgatcttgtagtgcgtgtctttcatgcgaagctacaggagttaaagcataggctgactaaacatgatattctcggtaaggtccgggcctacgtctacgtcgtggagtttcaaaagcggggtttgccacatgcccattttctactcatcatgcagaggaagtacaagctaacgtgccctgagcagtatgaccttttgatctcagccgagatcccacacaacaagtaccctgaactacgaaagatggttatcaaacatatgatgcatggtccgtgtgggtcgctaaaccctaactgcccatgcactaagggccatgcatcatgcaagaatcattacccccagccttttagtgacacaaccttgcaagggaaggactcatacccgatttacagacgtcgtgatgatgggcgtaaggaaaaggttcgagggtgcgaattggacaatagatgggttgtcccttacaacccttacctccttcgtctcttcaactgtcacatcaatgttgaggcgtgtgggagcatcaaggctgttaaatacctgttcaagtacatatacaaaggccatgatcgcgcgtctgttgttatgagagatgcaagcaaggcagatgatgatgtagatgagatcaagcaatacagagatgcaaggtgggtgactcctccagaagcgttatggaggatatacggctttgagcttagtcaaaactctccacctgtgatgcaactgcaactccatcttccaaacatgcacatggtggcgtttcacgaacggcaaatggtcgagcgagtcgtcaatcgtccaggtgctgataggtcaatgctcacggcatattttgaagcgaataggctacatgagggggctcgtggcattctgtatcgtgacttccctgagtggtacacttggcagagtggtaagggcaaagtatggcaacggaggaagcgtgatacgggtggacaagtcggtagaatagtctctgctcatcccgctgagggggagcgctactatctccgtgttctcctaaaccatgtgacttgcgccacctcctatgtagatctaaggacagtagatggtgtcacgctaccaacttttcgtgaggcagcagagagaaggggactgcttgagtcggacaacacactggatgagtgtctcactgaacgtgctcttttccagatgccatcggcgctgcgacgactttttgccacaatactggtgtattgtgagccaagcgacgtggcggtactctggcaaagacacctagatgctatgtctgaggactatcaacacaggagtcagagtaaaactcatgttgagcagatggtattgattgacattaggaacatgctgcagtcaatgggaaaggacataaagacattccctcttcctcctatcatcgacacgtatgacgatgctattggtactgctagggaggtttacgaggaggaaagtatcgaaccgggagtgggagatgtggctctcaaagactctcttaacaaggaacagggggccgcctacgataagattctatctgccgttgacactgatcagggcggattgttctttgtggatggacctggtggcaccgggaagacttatctatacagagtgctgctcgcgacgctacgcagccagggcaagattgcagtggcaacagctacatctggcgttgcggcttccataatgcctggaggaagaaccgcccattcacgcttcaaaatacctctcactattgacgatggcgctgtatgtagcttcacgaagcagagtggaactgcagagttgctacggaaagcatctctcattatctgggacgaggcttctatgaccaagagacaagctgtggaggcactggacaatagcatgcgcgatataatgggtcggcccgaactaccattcggtggtaaaaccattgtcttcggtggggattttagacaagtcttgcctgttgttcgtaaagggtcaagggctcaagtggtcgcttcttcgctacggatgtcttacctatgggagtccatgtcccacttaaagcttgttagcaatatgagggcaaaaaatgacccttggtttgcggagtatttgctgcgcgtaggcaatggaactgaggacacaaatagtgacggtgatatatgtcttcctgacgaggtatgtgtgccttatagtgggagtgacagcgatcttgacaacctaatagacttcgttttcccaaatctcaacgaaaatatgtctgattcgacctacatcacttcaagggcgatactgtcaacgcggaatgactgggtggatatgataaatgctaagatgatcgaacgttttcaaggggagcatatggtgtaccatagtttcgatagcgccatggatgatccacataactactacccacctgagttcctaaacacactgacgcctaatgggctgccaccacatgttttgaagctcaagattggatgcccggttatattgcttcggaatatagaccctgccaatggactttgcaatggcaccaggctggtcgttcgtggtttccaaagaaatagcattgacgcagaaattgtgctgggccaacacgctggaaaacggattttcttgccgcgtatacctctatgtccctccgatgaagagatgttccctttccagttcaaaagaaagcagtttcctgtacgccttagctttgcaatgacggttaacaaagcacagggtcagactattcccaatgttggagtgtacttgcccgaaccggttttctctcatggccaactatatgttgctctatctagagcgacagctcgatcaaacataaagatccttgccatcccagccgtcgatgtgaagaagaggtcgaggaagggcgtaaaaaagaaccccacaatagattgtgggacatgcaccaagaacatcgtctacaaggagaaaacgcttggaaaatttgatgatttgaaagctggagtactaggacccataactagacatggcttgggggtcagggtagtgactatatcatttgcagtccaagtttaa

SEQ ID NO: 40798 - DNA, 261 bp, Zea mays
  Peptide Sequence Number=SeqID_82577
atggcgcctgaggccggacttggctgctgtcagcctcactccgtcgagtggcacaacagtcggagcggcgcgggcggcgttgtcttcttgtcaggctggagccgccgacgacctccaccgcctgcgctcgtggccagggcagctccgaccacctctgacgccgacccgcacaccgacgtgaccgccgtgacctccccgacgtcactgaccaccccgccggagctctactgccgccgagaacttaataaatgcataacttga

SEQ ID NO: 40799 - DNA, 447 bp, Zea mays
  Peptide Sequence Number=SeqID_82578
atgtctcagcgggaggccctcgcaacagagctccgggccaagctgagtgccctggacaagatcctggaagagcagcggatccagcagaccacgactgtggagaggctgcaaaagttgcagcaagagctcgagggcaaggccagcgacgccgccttcgccgaggagaaactcaaggcaaaggagcagtccctggaaaaacacctccacgtgttcgacgcgcccagacctcgccagagcacgcccggcgcccgaccccgcgtgccctgcgctgtgcccagccaagctcgtgccactgcccgcgcccgcgcctataaagccagccgaggcttcaaccgtacgcccccgctggctctcgacctcgccggagcgcaagatcgccggcgtttgccctgcacacagtgtgccagcggccgcccgagcacccaccaccgtagaccggccaactga

SEQ ID NO: 40800 - DNA, 519 bp, Zea mays
  Peptide Sequence Number=SeqID_82579
atggggaagcctatcccatcactcctcatgctcctcctcagccgagcattctacatcttttgccaagtcaacacatttccacttgttactcaatgcagtataatggatcaagcagtctcattagttgcgagaagcagacgattcgaatggagtttttatccttgcaagaagtttgaggctgaatttaatccagatactacttgtgcaaaatttacaaaagttaatccaagggtacggggaacttcatggggtgctaatgagtcgacccgtgtaaggaatcgaagaataactcaccgtggagctcggtctacgttcgccggcggtcggatgaagtctggtgaccttgatccggtgtctcctgcgaggcagagcttgattcctcgctctgagagcttcaccgaggcacgcagagtctctctcgagggtcagacggggcggggaatggctcagttggccggtctacggcggtgggtgctcgggcggccgctggcacgctgtgcgccgggtaaacgccggtga

SEQ ID NO: 40801 - DNA, 246 bp, Zea mays
  Peptide Sequence Number=SeqID_82580
atggggcagcaagcagtaagggtgctgaatcccgataggagcgggagaaccaccatcctcatagtggcacgctacacgctcaacacgcaattccgcaaccttcgctcgaaccttgcccaactcgtcaagggcgacgatgcaatctctccagatggccagactgacatgtcactgtgcggcgcagtgggcactccgccaggcgagagggcaaaaaggggatcactgacttacgtgcagtgcatctaa

SEQ ID NO: 40802 - DNA, 741 bp, Zea mays
  Peptide Sequence Number=SeqID_82581
atgccccttgcaccaccacaatgcattccggctgttggaggagaccctgacggagacaacaacgacaatgccagtggtagttcgagctacaacacggagctctcgaaggagcaggagctggagggatggatcgctagacccatcactcgcgacgctgctcgcgggtgtcacctccatgacgctctcgacaccttgttgcgtcgagcctttgaccgacacacttggtctattgagtaccgttgtgtagtctaccagcatcgtcgtgggttatattcgaaccagtgggaggctacttgcttgaggccttctcagagcattattctatcactgagggatactaccgaggcagccatgcaagatgctgcacgacgtgcacttttgcagtattgctcgttgttcagcggggtagctgatggcctcgacctgaagtactaccctcttcgttcgaccagcagtgctggaggtgtgattgtctcacctataggtgagggcaatcccaggctaaacagtatggtcaacctggtcttcgtgctcaacaccgagctggaccacacccttgacgagttgggcaaggttcgagcgaaggttgcggaattgcgtgttgagcgtgtagcgtgccactatgaggatggtggttctcccgctcctatcgggattcagcacccttactgcttgctgccccatggtcgctttgattacggcacccctgactacaggacccagatagatttagagccatag

SEQ ID NO: 40803 - DNA, 450 bp, Zea mays
  Peptide Sequence Number=SeqID_82582
atgcagccaggctgcctgatgaaaatccttgaagccgaacgatggctgaaaggtaccaacttccgcgaagttgcattcctccaacgacgacaaggcggaagaaccgtgggcgctccccatccgggggctcggaaggacaggcggcacctttggcaggcgaagcaggcgacgcttcgcctccgccatgatgaccgcgtcaaaaaagggaccgggaaaggggatactccgaaagggatccttctccgcgaaggaagcgggccccgagcccccctcctgatcagaggttcgaaggctcgccccttggaagggttcaacagccgcctcagagcactcgggctccgcgcccactactggtcagaggttcgaaggccggcccctcggaagcgttcaacggccgcctcaggccactcgggctccgcgcccactactgatcagggtttcgtaggctag

SEQ ID NO: 40804 - DNA, 1296 bp, Zea mays
  Peptide Sequence Number=SeqID_82583
atggggagcgcccgcgttgctttcgtcttgtcgtcgttggaggaacgcaacttcgcggaagttggcaatccggctgcatcccctcgccggtggtcacccaagacggtgaccaccagtttgatggtggggagaagcgagtcgggctgcgacctctgccccgccctcaacttcaaggatcttcatcatcctggctggggcggaggccgggctgagccagagctctacctcctgcacgggttcgtgggtcaccctctccttcagcattcaggggagagggcgctcaccggcctagcggaaggggcagacttcgacaacgcggggctgcttccggtgccaccttccaccgctgggcggagtgcggctatctgcccgtcgtacgggtggctatcgcgccgcgcgcaccgggggaccgcccaagacgtcgcgctgctagggcggtgttcgtgttcttgggctgtcctgcctttgctccggtacgacgcccctacgcggaggtcggtgttcgcccgtccgggaggacccaagtggggatttgccggtgggcagacggatgccgtcgtcggtgctgaggtggtggcggctgaagaagtcctcgtcgccgacgagaccaccgccaccatccgcgctccaggcctccagctctttggctttgatagcttgtcctcgcccctcgagtggggacgtgggcgaggggctcgtcgcagcagcgtccaccctgaggtcatcgctgctgctgtttggccacccggagcggaggtcgttgtcgctgctgccggagcgggcgtcggcgagccacctggggttttgtcgccccgcaggccctccaatgagtccctcggctcggtcggccttgctgcccgaggcttctcttgcttagttaaagaaacccccggccgctctgcgatgagccggagccggaggcagcggtgccagcatgggcagaggcagagttggcttgaaaagaagcttcatcggccggagcctggccgggccgtccactggcgggaccgacgccggagtcgggttgccgaggccacgagccggtctgatgtcctcaggggacagctggctgaggctacgaagcggccggccgagccgtctgctcgggccgggttcctggaggagaccccggcaacgatggccatgcgcggtgcagataggctccttcgaggtggagatccttcgaccgtgtcgtcgtccgaggccgggtcggattccgccgaaggtggagtcgccgccgagggtgctgctgctcccccactgatgtctgttcctgcaggaacagtttatctgtag

SEQ ID NO: 40805 - DNA, 435 bp, Zea mays
  Peptide Sequence Number=SeqID_82584
atgaggatgcgggctgtcgacgcggccgagtgctacccattcgtcggtggctgctgcagcgaaggggagggggaactgccgccgcggttcccgcagatggaccggaagccgctgccacggtggtggaagcacgagctcgcggcggggcaggctcagcttttggctggcgccaagggcggagaggctgcggcagccggctgccgcggcggtgggctgcggaaggggaccaagaggaagggatctcactcgagctccacgggcgagagggccaggaaacggcggcgtgttaggtcctttttgacgaacaaggtatggctttgcttcatggctgcatgtgctttagcttggtgggctggtaggttttatacctttagggtgagccacaagcacattgtactgaacaatcaacaatgtgcaagaaatttggtcctgtag

SEQ ID NO: 40806 - DNA, 420 bp, Zea mays
  Peptide Sequence Number=SeqID_82585
atggcgaagcccgccgccgctgagccattctccatacggggttacgccatgaggatgcgggctgtcgacgcggccgagtgctacccgttcgtcggtggctgctgcagcgaaggggagggagaactgccgccgcggttcccgcagatggacccgaagccgctgccacggtggtggaagcacgagctcgcggcggggcaggctcagcttttggctggcgccaagggcggagaggctgcggcagccggctaccgcggcggtgggctgcggaaggggaccaagaggaaggcggggggggggggggggagggaggggatgggggcggacctgagcggggtgagcgggggccacggaggcgggggcgggggcacggtctacaattggctcttaatagttgtagaggtagtactcttgcccctttaa

SEQ ID NO: 40807 - DNA, 234 bp, Zea mays
  Peptide Sequence Number=SeqID_82586
atgtacgaagcacttgagaacaagtccccaacagggaggatcaccgttcagtgtatgagcgcactataccgcctacaggccctgcagagcgatgccatggcacaccttactaaccttgctcagaccactaagatcaccctcgaaagtcgagaggacttcgtggtcgacttgtcttcagaattggtggagaaggacctacaggtggaacagttaagcctcacgatgcgagcttag

SEQ ID NO: 40808 - DNA, 354 bp, Zea mays
  Peptide Sequence Number=SeqID_82587
atgaacgtatgtgagctcactcttgttgtctcacaccccccacatgtcaagaacagggctgacgacaccaccgaggccgcaactatgaagaccctgatgaccttctgtggataccatcccttggagatggtaatgcacccactgggactcttccccgctgagaagagggatgaccccatgtggtgcaaccgagtgagccacatgaaggacgtgtgggatatgcatcttgacaaaattgggaggatcaccgttcagtgtatgagcgcactgtaccgcctacaggccctgcagaacaacgccatggcacacctcactaatcttgctcagaccactaagatcaccctcgatagttga

SEQ ID NO: 40809 - DNA, 159 bp, Zea mays
  Peptide Sequence Number=SeqID_82588
atggccagggttcgtggagattgtcttggccgtgttgtgcccgttctttgttcctcacaggggtactataccaaagtagtagagctatatctaaggaataactttggtaatgtgaacatggtctgttgctgtgtaaaaattggagaaaaggttggctaa

SEQ ID NO: 40810 - DNA, 504 bp, Zea mays
  Peptide Sequence Number=SeqID_82589
atggccagggttcgtggagattgtctcggccgtgttgtgcccgttccttgttcctcacaggggtgctataccaaagtagtagagctatatctaaggaataactttggtaatgtgagcttgttctatgaactgaattacagcaggatgcctagtttggaatttagttgtgactggttcgtgggtttttggattaaagtttccatagcaaatctggagaccatagtaaagagattttgggtccttgtggtaattaatccaagaagaattgggattgggaaaatggattttccgtgtgtttgctcaactttaatgcaccctaacgcttgttgcataagcataaacatccatgatcatgtcattcatatagaactcctaccagaaggaatgaagattcaagctgaagtggtgactgaagaggaatctactctagtggctgctgatcaagtggaggagccatctaactggggtttaatagagggatcgagtacctcttcactgcaataa

SEQ ID NO: 40811 - DNA, 1140 bp, Zea mays
  Peptide Sequence Number=SeqID_82590
atgccagagacactttacttgaccgtctacatcatcgaccagtacttatctatggagagtgtaccaagaaaggagctgcagttcgtcggcataagtgccatgctgatagcaagcaagtacgaagagatatgggctccactgtccattcttcgattagcttacacaacaagcagcgatattttacaggttaaggacttgatgtgcctctgtgacaacgcatttaccagagaccaggttctgaccaaggaaaaggccatcctggacaggctccattggaacctgacggttccaacaatgtacatgttcattgttaggtacctgaaagctgcaatgtgtgacacagagcttgagaacatggcattcttctactccgagctggcattggtccattactcgatgctggtttaccctccatcggtgaccgcagccgctgccgtctatgctgccaggtctacacttgggatgaatccaccgtggactgatattctggaacatcacactggcctagctgagccacagttactgctatggcagacattggaaagaaggatgggcttaagggttactggaaaggaaaccttctacacgtgcttgatgttccctatcatccattgtttatcttgctgtgctgtgcagattcctatccatctcccattaacttgtccaggtcattcgcataattccttacagtgcagtgcaactcttcccgtaacttacccactggatgttctccagctcaggctagcagttcaatctggacacaacactttatctcaggttgctcttaacatgctgagagaagaagggctggcctccttctatggaggcttgggtccatctcttgtagcaattgcaccttacattgctgtgaacttctgtgtttttgacctgatgaagaaatctgtaccagagaagtacaagaatagaccagaaacatctctagcaaccgctcttctttcagcaacatttgcaactttgatgtgttatccgctggacactgttaggagacagatgcagatgaaaggcacaccatacaatactgtttttgatgctattccagccacaagtcaggccgactactcatgggactacccacacacaaaagttacaaactggctggcagtagaggcacaaagataa

SEQ ID NO: 40812 - DNA, 1390 bp, Zea mays
  Peptide Sequence Number=SeqID_82591
cgccgccacctcccgcatggcagccgcctcccgaccgagatatcctgccgccgcccaccttgctggtgccgggcttctggcccccagctcggacaacggcgaggcaaaggggggaggagggaggacgcccggcggcggcgcggcgagggcaccccgagccgcctacgggaacgacgcgggggaggagctcacgcagtgcgcacctatgagtttcagtttcagactggtcaggaagccaatggatacatttccacagccagcggcggcaagaggccgtagggcacttgtcgacgttggcaatcttatgaatggtcggccttctcttgtgaaccatcagaagcaagcggttgcggcagcggcaaccagtcataaaccactcaacgttggcaacaagaagccacttgttcctcaggcagcagcaagaggcatgcgaccccttgccgacgttacgaatcttatgatcaatgaccgtgctgctcctgcaaatcgtcagaagcctctagatgctgtgtttaacaggaacgggaaggcagtaaagctgaaggaatgcaaggtgaagcctgaagtcattgtgaccattccagattccgagaaggagaagaaaggcaaattgcctggaggtcagagagtctgtaggagggcctctgatgggattaccaccccgaagaagaaggatccatatgacattgatgcacctgattcttgcaatgagctggcagtcgttgaatatgttgaggacatttacagattctacaagagcactgagggcacctgccgtcctctcagcagctacatgagctcacaggctgaaatcagtgagagaatgagagctatccttatcgactggattatcgaggttaaggacttgatgtgcctctgtgacaacgcatttaccagagaccaggttctgaccaaggaaaaggccatcctggacaggctccattggaacctaacggttccaacaatgtacatgttcattgttaggtacctgaaagccgcaatgtgtgacacagagcttgagaacatggcattcttctactccgagctggcattggtccattacgcgatgctggtttaccctccatcggtgaccgcagccgctgccgtctatgctgccaggagtaacttgttggttgctgaggatgatgcttttaaccgtaaccacagggagtgcgctaggcggcttatcagcttccataccctggctccggaaagcaagcagaaggcggtgtacaggaagtactccaagcccaagctcggctccgtcgcgcttcaatcccctgtcaagaagctgttgtcagtaaagcaacataaggttgatccgaattcaggttcacaagtttttcttaaagcaatacaatacatgggaagaacactgaagtgccctgag

SEQ ID NO: 40813 - DNA, 549 bp, Zea mays
  Peptide Sequence Number=SeqID_82592
atggtggacgttttcaccgccttcggcttcgtcaacctgtgtctggccttcaccttcctccagatctccaccttcccggacccgcagctcgctgcggacagcaccatggcatccgctgaagccccactgccttcggcggcggtcctcttcctcgccgccgtccccgtggccggcgcgggcaacgggcggcggcgctcgatctcggggcttctcatcttcgttctatgcgtctccgccggcacgctcgagctcatcgtgttcgggaaggccgccgttggtggtactgcggaggctcgcgcgctcggcctgcctgatctcccagcgttgcctgccgcggcgacggccacgttcttttcggggatgacgctggtcatcgtcgccgcgcaccgccgcgccggcggcgaggacgagggcggtggcggtggtgccgtcgccggagacgggcggccgacccaggggctcctgcgcctcacggccggagcggcggcggcggcgcttgttggcctgatggccatgcccctcatcgtcatcctctacggagctaagtaa

SEQ ID NO: 40814 - DNA, 723 bp, Zea mays
  Peptide Sequence Number=SeqID_82593
atggaggcgttccttgagaagaagactcgtggagaggagtctatggataggtgtatccgcatatttgaagctatggaggacttgacagatgaggagaaggccattgcagcagagcttcgtcaacctgtgtctctggcggccctcaccttcctggacccgcagcccgctgcgggcagtaccatggcgtccgctgaagccccactgctccacatcgcggccgaggttttgccgctattagcttcggcggcagtcctcttcctcgccgtcgcaatcacctacggccatctgacggtgatgggtcgccacgtcgccgccgtccccgtggccggcgcgggcaacgcgcggcgctcggtctcggggcttctcatcttcgtgctatgcgtctccgccggcacgctcgagctcatcgtgttcgggacgacgaaggccgccggtggtggtgcggcggatcacggtgcgcaggctcgcgcgctcggcctgcctgatgatccccccgcgttgcttgccgcggcgacgggcacgttcttttcggggatgacgctgatcatcgtcgcgcaccgccgcgccggcggcggcgagggtggtggcggtggtgccgtcgtcgccggagacgggccgatccaggagctcctgcgcctcctcatcaccaaggtcgcggctggagcggcggcggcgctagtcggcctgatggtcatggctctcaccctctacagagctaagtaa

SEQ ID NO: 40815 - DNA, 459 bp, Zea mays
  Peptide Sequence Number=SeqID_82594
atgagcgtggcgatcccgctggagcagtccatcacgccggtgcttcaggactttatgaatctcaacatattctatctaccagtgtattactgtggaggtctgcgaggtagtaccatcgacgaggcttctccatcccctccggcgagctccccttccaaaaaaagtggtgagcaggattattgcttaacaatggcggtgaatgaaggaatgaacgaaattgacgtgtggtctgtgggctgtatctttgcggaaatggtgaaccaaaagccactattccctggtgattctgagatcgacgaactgttcaagatattcagggtgctaggtacaccgaatgaacaaagttggcctggagtcagttgtttgcctgacttcaagactgctttccccaggtggcaatctcaggacctggcaacaatagtcccaaatcttgaacctgctggcttggaccttctctct

SEQ ID NO: 40816 - DNA, 918 bp, Zea mays
  Peptide Sequence Number=SeqID_82595
atggccacggtcgcgctggcgtccatcgaggggttcaactgcgccgccaaccgcacgtacccgtgccaggcgtacgtgctctaccgcgccggcttcgcgggcgtgccgctcgatctcgcggccatcggtgacctcttcgccttcggctgcccctcccggtcccccagctcatacacaccgatgcagtaccagatcggcccggcggacacctactggatcgtctccactaccaagctgcagaacctcacgcagtaccaggccgtggagcacgtgaaccccacgctggtgcccaccgacctcgacgtcggcaccatggtcacgttccccgtcttctgccagtgcccggccgctaccgacaacgtctcggcgctcgtcacctacgtcatgcagcccggggacacgtacgcgtctgtttgccgccgccttctccgtcgcctatccacagtgaaagacacgatgcggcggtcgcctgtgcatgcactgaggctgagcgcgctgctcactaccggaatttgtctctttgccgagtgccaaattctttaccgagtgccagattggttcctcgacaggaatgactacaaggacaacaggttctcacaggtcatctccaacgccctcggtatgaagctcagggacaacctcaacaagctcaaaaagatccaaagctcgctctgtaggaaggatgctcccagcccccgttgtgccccacggcccctcccaaccctcgtcgtcgtaatggagggtgctgtgacaagccagcggatgagcgtggcgatcccgctggagcagtccatcacgccggtgcttcaggactttatgaatctcaacatattctatctaccagtgtattactgtggagagttctatgatttgcgctacagccttgtcgtcgactcccacgtccatgagaccacctag

SEQ ID NO: 40817 - DNA, 1776 bp, Zea mays
  Peptide Sequence Number=SeqID_82596
atggaatctctatttgtaggcttgtctcataacaagccaaaaaaatcggtggcaaccgcaatagttcgagaagttttatctcatgactggttgctcctagactatatttgcacgcaaggtgatcttgctctcatcaattttatcaaggaaatcccttgtgaaccaagggtagaagtcgttcttattgatgatgcctttgttgaaaggaagtggatggagtgtttatttcagccgagcgcatatttaggtgacgaggtgtttattccgataaacatccgagagacgcattggtatcttgctgtgatccatgcaagaaatatggagatacaagtgctcgattcacttggtacttcacaagaccgcaaagacctcactgactctattaaaggactgcaaagacaaatagatatgatatctcaacgtaaggagttaaaagaccacaggtggccagacctccaagttgcttcttggccgctcagagaaatagacatgggatatgcaaagcagacagatagctcttcatgtggcctctttcttttgaactatatcgaatactggacaggggatgaactgtctgacagttttacccaagatgacatgtcacactttaggaaaaaaatggctgttatattactatcttcagacctgaataagagaagggggtgtctgttatacaaaaatgaaaaagaacttgactctggaagcccatctgatgttgagatattagaaaacccaacagattctaataagaggaaactactccacgtgcttgatgatagcgaagtagtgtttgaagatgaggaaggccctattactcaagcagacttgcaaaggtggtttgttgataattgggataaaagagctcctgtaaaagtctctaacgatggttgcaccaatgactttttaatggttggtctttccacaaagaacatgccagtgaccaaagccgattcaatagatgttttatgtgattatatcatggcaatagaagacgatacgacactagagagaacatgggtgcgaagtttcaatccttttaagatagaaatatctgtcaaagacctgcaaaacatattaacgacaactcaagatatgattctaagatgttttgatatggctgttcggctgcttgccaataaagagtcacgtaaaccgaaagaagaaatcataaataatagaaagcattatatggacatgcgtttttggagaatggttggttttggtaaaattccaaagtaccatcaggatcctacaacagaagagttggccaaaacactagattgttggccatcaatgaattattatatcacgggttgtagatatgttctcatgccatggaaattcaatggatgtcacgcccttttcgtaatagatcatgttaaaaagcatgtgacttttatcgattttacaccgactcaagattggtgtaaacacatgccatacaagaggttcgcagaagcgattatcatggcctcaaaaaaatataagattgcttacagcaagaaacgttctggatgggcggaggatatctttaagtgggaacatacaattcagactggtgttccaattgacttaagagggtttaataccagctacctcgttctacaagctatggccatgtgggggaatgacagacgactgaaatttgttggggatgcaaagactcttcgaagaaactttgtgattgatcttttaagttatgaggacaattcgtgccgatatgccatccctgcaaacatacaacaaagacttgtcgatatcgctaaaaaggattag

SEQ ID NO: 40818 - DNA, 483 bp, Zea mays
  Peptide Sequence Number=SeqID_82597
atggaggatgaggaagagtcggggttggaggatgaggaagaggcgactgtgacactatccatggagaaggacgcgttggagtgcgacatctgctgcctacccttccagtccgaagttttcatggcaagtcagattaccatgcatgatgaggaagagtcagggttggaggatgaggaagaggcgactgtgacactatccatggagaaggacgcgttggagtgcgacatctgctgcctacccttccagtccgaagttttcatggcaagtcagattaccatgcatgatgaggaagagtcggggttggaggatgaggaagaggcgactgtgacactatccatggagaaggacgcgttggagtgcgacatctgctgcctacccttccagtccgaagttttcatggcaagtcagattaccatgcatctgatgatgctgattctgttccaatcagtcataaacttcggtacagaatttgaatacatctga

SEQ ID NO: 40819 - DNA, 243 bp, Zea mays
  Peptide Sequence Number=SeqID_82598
atggaggatgaggaagagtcggggttggaggatgaggaagaggcgactgtgacactatccatggagaaggacgcgttggagtgcgacatctactggctgcctacccttccagtccgaagttttcatggcaagtcagattaccatgcatgctttgagctcttttctactagtgcaacgataatggatgtcctttttaaaataaccataaacccaactactttgagtcacgaccctaaaccctaa

SEQ ID NO: 40820 - DNA, 1059 bp, Zea mays
  Peptide Sequence Number=SeqID_82599
atgggttttacccgatatgaaggcgggtacaggatgatttctctacccgcggttatgttaatgggtaaaacctctacccgttgggtagataggtacgagtatgggttggtagtacctaacccatctacccatgtgtcggagggggaagcttcttgtagaagggataacacagtgcgctgcctggcacgggcgcactgtttgccagcactggatgaccttgacgccgccttccaacgaatgggacgagacacattaaatgctaagagggcacgtcgcccgtcagcgcagtggcaggtgttcgacttttcgaccgctggttccggcgaagatgagggagcgtttaaccgcgtggcggttgcatgctcctttgtacggcggttcaccttcctgactgctggttgccccgagaataaaggggcgcgtaactgtgggacagttgcacactccctgcgcggtggttcaccttcttcgcgcttcagaggagcgcaacctcgaggaggttggtgctcttccaccattgcttggcttcaagaattttcatcatgcagcccggctgcagtcccccgccagtggtcatccagaaggatgactaccagcctcgtggtggggagaagcaagctgggttgcgacctccctcctgccctcagcttcaaggatgttcatcatccttgctggggtgggaggcgagccgagtcggggtccttccttctacatgggccgatgacctgcttcttcctccagcattcgggggagacgacgttcaccggccttgcggagggggcgaacttcggctacacggggccggctggctgcaagcgctgtcagctgccgcgtgcctggctccttggctcagatggccctagggccgcctccgacgctgcctcctgccgcttggtcggggcgtggctgttcgtccaccgcacgttcgacagtcgtgccgtgcgcgggtctgccacatccatggcttctcccgcgccactggccgtactgggggtcgattttagcctgggaagccaagtcgtgtgttcggaccccctagatggtggcttcaagtactaa

SEQ ID NO: 40821 - DNA, 714 bp, Zea mays
  Peptide Sequence Number=SeqID_82600
atggcaccattccccaacggctgtgaacgccaacgcgcttccccaatggctacgaacgcccttccccaacggctgcgaacgccaacgcgcttccccaacggtggatctcgccccaacggagcccgagcccatgctgctttctacgacgcgagcgccaacggagctagagcccgagcccatcccgccttcaacgccggatctcgccccaaatcctcgcccgccttcaacgccggcagccgcaccccaaattcctccccaccaaacgcgcccttccccaaacccctgcccgtgccgttgtggaggcccattctcgcagagggtgttgctcatggtggaggagaagaacccctacgaggtgaagctcgtcgacctcggcaacaagcccaaatgtcgcgaccggttcggcaaagtgtcgcgcttcatttccagaggtacggtgacctcactagagatggcaatgggtacccgaaacccgaatacccgacgggttttacccgatatgaaggcgggtacggaatgatttctctacccgcgggtatgttaatgggtaaaaacctctacccgttgggtagacgggttgttgaagccttgccggcagaagacaattccatagatgtggtgatcagcacactggtattttgttctgtaaataacatcgacatggcactgagagatcgttcgaatcacaccaaaatgtatggggtctcattttga

SEQ ID NO: 40822 - DNA, 294 bp, Zea mays
  Peptide Sequence Number=SeqID_82601
atggccgaaaacaaagaagagagtgaagtgactaaagagaagacaccaccaccttgggaatctcaggtagggacttggctctacttcgacatctgcgggtccgagcctgactcacctatcaatgaaggcaagccccggcttgatgaccgaggaccctttaactggtcacatgcctcgtcatgggtgaggaagcgacaaatttttgttgcttttgctccaaggtggttcccaaggaagaaaaacaagagtgaagccgcgggaggacttggtcctccatatagaacttttgtttaa

SEQ ID NO: 40823 - DNA, 294 bp, Zea mays
  Peptide Sequence Number=SeqID_82602
atggccgaaaacgaagaagagagtgaagtgactgaagagaagacaccaccaccttgggaatctcaggcagggacttggctctacttcgacatctgcgggtccgagcctgactcacctatcaacgaaggcaagccccggcttgatgaccgaggaccctttaactggtcacatgcctcgtcatgggtgaggaagcgacaaatttttgttgcttttgctccaaggtggttcccaaggaagaaaaacaagagtgaagccgcgggaggacttggtcctccatatagaacttttgtttaa

SEQ ID NO: 40824 - DNA, 1794 bp, Zea mays
  Peptide Sequence Number=SeqID_82603
atggcctccttgtccgcctccacctcccgccgccgttcaacccgttcctcctttcccgcctgctccgccgcctcgccgcgctccctcgcccgcccttggggcgcgccgctccgctacgcggtcgccgtattctcctccctctcgccgccggacccgttcctcgccgccgcgctgctccgcttcgcgcacctcacgcagccgcccctggagaccttccgcctcttctcccgcctacgctgcgcgcacggcagcgacctccctttcctcccgttcgccttctccccgctggccaagtctgccgcggcggcgcgctcgctgcacgccgctgccagtgcgcacgcggtgtcgctccttctcggagggttcgataagcatcggtttgttgagaactcgctgatcagtgcctatgttgcgtgcggtgatgttggtgccgcgcgtaaggtgtttgatgaaatgctggtgaaggatgtcatttcgtggacaagcattgtggtggcgtattctagaatccgtgatatgggttcagctgaggaagtgtttgcgctctgcccggttaaggatatggtggcatggacggcaatggtgacagggtatgcacaaaatgccatgccagtgaaggcactcgaggcatttgagcagatggcggtggccggcatgcccattgatgaagtttcactcaccggtgctatctcagcttgcgctcagctcggtgcggtgaagcgagccgcctgggttcaggaaattgcagaacggaatggtcttgggaggaatgtggttgtcgggtcagggttggtggacatgtatgccaagtgcggtctcattgacgaggcgcgcaaggtttttgaagggatgcacgataagaatgtgtatacctatagctcaatgattgttggcctagcatcgcatgggagggccaatgatgtaattgctttgttcaatgatatggttaggagggcagatgtggaacccaaccatgttaccttcattggagtattgacagcctgcagccatgcaggtatggtaaaagaagggcgctactactttgcgcagatgaaggacaggtatgggatattgccttctgcagaccactacgcttgtatggttgatttgcttgcacggtctgggctggtaactgaagcccttgaccttgtgaaatcaatgactgtggagcctcatggtggtgtctggggggcactgttaggggcttgccgaatccatggaaatactgaagttgctaaaattgcagctgaacatctttttaggcttgagccagagggcatagggaactacgtgttgttatcaaatacacttgcatcagcaggagaatgggatgaagtttcaaagcttaggaaactgatgagaatccgggggctgaaaaaggatcctgcagtgagctggtttgaaggccgtgatggatttgtgcatcagttctttgctggtgataatacccacccatcgatgcatgaaataaagaaaagattattggagctacgggaaaaattgaatcttgcaggttatgtgccaatccttagttcagttgtttataatgtaagcgaggaagagaaagaaaggttgttaatgggccatagtgagaagcttgctctgtcatttgggttgctcacacttgagtctagatcctcaattaggatagtaaaaaatctaaggatatgtgaggactgccatttgtttataaggttggtgtcaaaagttgagcccatcgagattctagtcagggacaatatgagatttcatcacttcagagatggagaatgctcatgcggcggattttggtga

SEQ ID NO: 40825 - DNA, 1980 bp, Zea mays
  Peptide Sequence Number=SeqID_82604
atgacgcctccgcaccgccgcatggttcacctcgccccgcgccacggccacccgcccgcgcagcttcccgctccacaactgcccccgacagacttgccgctatcgctcctcccgccgccgtcgctggcctcgctgctgctcgcggccgtcgcgtcctcgccctcctttcctcacctccgccacctccatggcctccttgtccgcctccacctcccgccgccgttcaacccgttcctcctttcccgcctgctccgccgcctcgccgcgctccctcgcccgcccttgggcgcgccgctccgctacgcggtcgccgtattctcctccctctcgccgccggacccgttcctcgccgccgcgctgctccgcttcgcgcacctcacgcagccgcccctggagaccttccgcctcttctcccgcctacgctgcgcgcacggcagcgacctccctttcctcccgttcgccttctccccgctggccaagtctgccgcggcggcgcgctcgctgcacgccgctgccagtgcgcacgcggtgtcgctccttctcggagggttcgataagcatcggtttgttgagaactcgctgatcagtgcctatgttgcgtgcggtgatgttggtgccgcgcgtaaggtgtttgatgaaatgctggtgaaggatgtcatttcgtggacaagcattgtggtggcgtattctagaatccgtgatatgggttcagctgaggaagtgtttgcgctctgcccggttaaggatatggtggcatggacggcaatggtgacagggtatgcacaaaatgccatgccagtgaaggcactcgaggcatttgagcagatggcggtggccggcatgcccattgatgaagtttcactcaccggtgctatctcagcttgcgctcagctcggtgcggtgaagcgagccgcctgggttcaggaaattgcagaacggaatggtcttgggaggaatgtggttgtcgggtcagggttggtggacatgtatgccaagtgcggtctcattgacgaggcgcgcaaggtttttgaagggatgcacgataagaatgtgtatacctatagctcaatgattgttggcctagcatcgcatgggagggccaatgatgtaattgctttgttcaatgatatggttaggagggcagatgtggaacccaaccatgttaccttcattggagtattgacagcctgcagccatgcaggtatggtaaaagaagggcgctactactttgcgcagatgaaggacaggtatgggatattgccttctgcagaccactacgcttgtatggttgatttgcttgcacggtctgggctggtaactgaagcccttgaccttgtgaaatcaatgactgtggagcctcatggtggtgtctggggggcactgttaggggcttgccgaatccatggaaatactgaagttgctaaaattgcagctgaacatctttttaggcttgagccagagggcatagggaactacgtgttgttatcaaatacacttgcatcagcaggagaatgggatgaagtttcaaagcttaggaaactgatgagaatccgggggctgaaaaaggatcctgcagtgagctggtttgaaggccgtgatggatttgtgcatcagttctttgctggtgataatacccacccatcgatgcatgaaataaagaaaagattattggagctacgggaaaaattgaatcttgcaggttatgtgccaatccttagttcagttgtttataatgtaagcgaggaagagaaagaaaggttgttaatgggccatagtgagaagcttgctctgtcatttgggttgctcacacttgagtctagatcctcaattaggatagtaaaaaatctaaggatatgtgaggactgccatttgtttataaggttggtgtcaaaagttgagcccatcgagattctagtcagggacaatatgagatttcatcacttcagagatggagaatgctcatgcggcggattttggtga

SEQ ID NO: 40826 - DNA, 294 bp, Zea mays
  Peptide Sequence Number=SeqID_82605
atggcatccggggccgcgcaaatcgacggggatcgctgcattttggagcagggagcgggggtcagcgccctgactgccagcggccaagagagcagagagcacaaaaaggaaaatggagtcaggcagcgccaagagatggtgcctgcgccgaccaagggagagtggaggtcagccatggccacgctcaaggtgagcagggcgtcgagaggagtagccatggccatggaggcccctgccgctggaggtacagaaagggggcgccgagccaatgggggagggagctcgctgccataa

SEQ ID NO: 40827 - DNA, 471 bp, Zea mays
  Peptide Sequence Number=SeqID_82606
atggcgccctcctccctggcacttgctccctgcaggagagcagccggcgccccattttcctccttccctgcttggtgcgcgcaggagcagaagctccttgggagcacgccgacgcccagctcatccccagcgccccttcttcttcatggcagcgagctccctcccccattggctcggcgccccctttctgtacctccagcggcaggggcctccatggccatggctactcctctcgacgccctgctcaccttgagcgtggccatggctgacctccactctcccttggtcggcgcaggcaccatctcttggcgctgcctgactccattttcctttttgtgctctctgctctcttggccgctggcagtcagggcgctgacccccgctccctgctccaaaatgcagcgatccccgtcgatttgcgcggccccggatgccatcgtttcccagcacgtcggcgccgagctccgctag

SEQ ID NO: 40828 - DNA, 321 bp, Zea mays
  Peptide Sequence Number=SeqID_82607
atgactagtattggtgctgccagtggcgcaccggacactgtccggtgcccaggtcaaggcaccaatgaactggccactctcgggttttctgggaggcgcttcgctataattcaccggactgtccgatatgcaccggacagtgtccgccttactctgtgctttctttgtaatctcaattgtaagggcgagagactccaaactgtggagattcctcgcaaacgggaaaaatactctaaaggaaaagaccgtggtgtcggtgtttgggacccgactgcgcacccggggttacccctcaaggtgcttttgggtaggacggtgtaa

SEQ ID NO: 40829 - DNA, 552 bp, Zea mays
  Peptide Sequence Number=SeqID_82608
atggatcacggtaagcgtccaacttcggaatgctctcaccaagtgactagccttccttatagagtagtgggcccaagcataggaggagaagtcatatcgctttcgtcttccagctcgtcagatggggaatcgaaggctggtccttgtgacagcgagcctacatcgtcggttctgtcggccgacgctatcggcgccccggtcatcgctggtcgtcccgagacagacgtgaggtttattggcgctggctgccaaccttatcgtgttatcttatgcccgagggtcgccacttcttcctcatcctccccttttgtgtcgtcttgcgagatgcccaacacattaattgagttcttatgtgcaaaatgtgtgaaaagtgcaaatcaaagcataagatttgagtcttgcgtgtgttgctctcccaaccttactctgtgctttctttgtgatctctattataagggcaagagactccaaactgtggagattcctcgcaaacgggaaaaatactctaaaggaaaagaccgtggtattcaagttgatcattggatcgcttga

SEQ ID NO: 40830 - DNA, 891 bp, Zea mays
  Peptide Sequence Number=SeqID_82609
atggacaatgtttacagtggacccgggggatatctgtcccccacagtcttcgaccgatccgatgaagattttgggagcgagatttttaaggtcgaagaccctgtggtgaaggacgccgggggggccctcttcgaccggatgtggggcccccacggttgggaggcggttagggaccgggctgaccgggcgagggatcagcgtctgaacagcgcgctgcccgaagcggaggctgacccggtgatggccgaggctgaggtctgcccagcaccgctcccggagaccggtgaaggttcccacactgcccctgcgtctactgtggctggtggaggctcgccggcagccaccataccgatggcggaggatcccccgaaggcggcgacggagccagcggcggaagatcccgtcgcggctgctgggtcttcgcaggattttgggcctgcgcacgcaaccggtactgctaattttgtggtggcttcgaccgtggtcgccggaaatgaatcggatgggtctacgtctaagttttctgcgtttgacgactctgggagttcggttttgtggacggaagagtcttcggatgaaggcttagattattttgcggccttggatgtggctgaggcggaggcttctccgcgtgttacggatgctgaaattttgcctggtccgagtgttgggtgtaggcggcgaagggcagtggcgaagcgtagagtgagcgggtttgatgatggtcggtttcgtgtgggcagggctggtaggcaggaattgttgtcctcgccggttggggcgagtatgggtgagggggagttgcgaaggctttttgaggctgaggagctgaggataatgctatttaactatagggagatggggatcattccgaaggttgagcctatgtaa

SEQ ID NO: 40831 - DNA, 887 bp, Zea mays
  Peptide Sequence Number=SeqID_82610
atggacaatgtttacagtggacccgggggatatctgtcccccacagtcttcgaccgatccgatgaagattttgggagcgagatttttaaggtcgaagaccctgtggtgaaggacgccgggggggccctcttcgaccggatgtggggcccccacggttgggaggcggttagggaccgggctgaccgggcgagggatcagcgtctgaacagcgcgctgcccgaagcggaggctgacccggtgatggccgaggctgaggtctgcccagcaccgctcccggagaccggtgaaggttcccacactgcccctgcgtctactgtggctggtggaggctcgccggcagccaccataccgatggcggaggatcccccgaaggcggcgacggagccagcggcggaagatcccgtcgcggctgctgggtcttcgcaggattttgggcctgcgcacgcaaccggtactgctaattttgtggtggcttcgaccgtggtcgccggaaatgaatcggatgggtctacgtctaagttttctgcgtttgacgactctgggagttcggttttgtggacggaagagtcttcggatgaaggcttagattattttgcggccttggatgtggctgaggcggaggcttctccgcgtgttacggatgctgaaattttgcctggtccgagtgttgggtgtaggcggcgaagggcagtggcgaagcgtagagtgagcgggtttgatgatggtcggtttcgtgtgggcagggctggtaggcaggaattgttgtcctcgccggttggggcgagtatgggtgagggggagttgcgaaggctttttgaggctgaggagctgaggataatgctatttaactatagggagatggggatcattccgaaggttgagcctat

SEQ ID NO: 40832 - DNA, 396 bp, Zea mays
  Peptide Sequence Number=SeqID_82611
atggcctcagggcggacgccgctgcaacaacgccctcgcccacgtctccgctcgagaggcgaggacaagctatcaaagccaaagagccggaggcccggagcgcggatggtggcggtgatcccatcgggcgacgaggacttcttcagccgccaccacctcagcaccgacgacggacgccgtctgcccaccggaagatccccactcggatcctcccggacgagcggagcaccgacctccgtgcggaggcgccgtaccgggggcaaaggcaggacagccccagaacacgaacgtcgccctagcagcgcacgacgtcttgggcggtcctccggtgcgcgcggcgcgacaaccgctcttgcggtgggagggggcaccgggggccgagccagagccagctga

SEQ ID NO: 40833 - DNA, 648 bp, Zea mays
  Peptide Sequence Number=SeqID_82612
atggccgcagaaaacatacgcacactacaagatgaaccgatcctgcaggctcagacgtcgatggagggggagcagcagcaccctcggcgtcaactccaccttcggcgaagtccgaccgagcctcggacggcaacacggttggagggtctccactccgaaggacgatgtcaggaccacgcctgggtcatcgccgccggggtacgaacaaccccccacgttggaggacctgtggagcaacagaaggccgacggatggctcgttgacgcccgctccggcagcagcgacaacaacctccgctccaggtggccaaacagcagcagcgatggccttaggacggacgctgctgcaacaaggccctcgcccacgtccccgctcgaggggcgaggacaagccatcaaagccaaagagtcggaggcccggagcgcggatggtggcggtgatcccgtcggcgacgaggacttctacagccgccaccacctcagcgccgacgacggaagccatctgcccaccggcagatccccacttggatcctcccggacgagcgcagagggcaccgtactggggcaaaggcagtacagccccagaacacgaacgccgcccctagcagcgcacgacgtcttgggcggtcctccggtgcgcgcagcgtga

SEQ ID NO: 40834 - DNA, 513 bp, Zea mays
  Peptide Sequence Number=SeqID_82613
atgcaagccacgctccagaaggttgagcaagggatgctgcaaatcaaggcagcagtgcaacatgagcaacaccagctggcgatgtccacacggctccgggcgtcggcggctgtgggcatacaagctgctgctcgtggcttccttgcacgacagaaagtgcgggagatgcgccggcagatgcttgaggcagccttggtgacggttgacctcggcacacgtcgacgcgacctcaccctgtcggacggccatcaacagtggcaccaggccgctatctccaagtgcgagcatggtatgtgtcccgcgggcgacgaacttcaactctacgacagcggcagtagggaaggcactcctctcgtcatcggcaagggcgcactatttagcgccaccacattccgctaccgtccgccacgagggcgcctccgctggttattgttgcgacctacgccaggacccgtcatgctgcagctcgaggacgagctgcttgtccaggaggggtgtagtgtcagggcctaa

SEQ ID NO: 40835 - DNA, 738 bp, Zea mays
  Peptide Sequence Number=SeqID_82614
atgggagatttgtggaccaacataagggctgatctcacaaagatgcaagccacgctccagaaggttgagcaagggatgctgcaaatcaaggcagcagtgcaacatgagcaacaccagctggcgatgtccacacggctccgggcgtcggcggctgtgggcatacaagctgctgctcgtggcttccttgcacgacagaaagtgcgggagatgcgccggcagatgcttgaggcagccttggtgacggttgacctcggcacacgtcgacgcgacctcaccctgtcggacggccatcaacagtggcaccaggccgctatctccaagtgcgagcatggtatgtgtcccgcgggcgacgaacttcaactctacgacagcggcagtagggaaggcactcctctcgtcatcggcaagggcgcactatttagcgccaccacattccgctaccgtccgccacgagggcgcctccgctggttattgttgcgacctacgccaggtgcccgtccatgtgctcccctttcgtctagatggcgtccatgggatccaggtggctgcacacatgcaagtccaatgcgcggagggtgtctggttttgggtcaagtagactcggtctttgaggacccgtcatgctgcagctcgaggacgagctgcttgtccaggaggggtgtagtgtcagggcctaaggaggcccatggaggggctgcggtagcagcagcgatgggccctctaaggaggattagataa

SEQ ID NO: 40836 - DNA, 297 bp, Zea mays
  Peptide Sequence Number=SeqID_82615
atggagcagagcaacactggcggaagacctcaactccgggaaagaaaccagggcgacccggtcaccaatcaaattcgacgaggccacgaagacacgcggattctaccgtgggtaccccacaacgaccagccgaggcccaggcactggttggttgagagtgtaggcaacgttggccatggcggcgactggaacgcgatcacaccaatccaagcaatggatgcgttctgtgttttcgtgcgggcaacagtaggaaaggggagggagccgcagggcgtccgggttttatccccaggatga

SEQ ID NO: 40837 - DNA, 297 bp, Zea mays
  Peptide Sequence Number=SeqID_82616
atggagcagagcaacactggcggaagacctcaactccgggaaagaaaccagggcgacccggtcaccaatcaaattcgacgaggccacgaagacacgcggattctgccgtgggtaccccacaacgaccagccgaggcccaggcactggttggttgagagtgtaggcaacgttggccatggcggcgactggaacgcgatcacaccaatccaagcaatggatgcgttctgtgttttcgtgcgggcaacagtaggaaaggggagggagccgcagggcgtccgggttttatccccaggatga

SEQ ID NO: 40838 - DNA, 1503 bp, Zea mays
  Peptide Sequence Number=SeqID_82617
atggataaggatcgtcaggaagctgcgcaaaagcgtcgggcggtcgtcaggctgcccgaggctaggccgaagagggcgcgggggaccgtgaaggctgccgcccccggcggtagccagccgacgctggcggtgaagtcggccggccctgggtccagcaaggtgtcggatgtcgtgaaggcagcaggcgccgacggaaccaagtctacctcggccgaagccgcgaaggcccgagaattgcctccgccgggaaagcgcattgccgatttcggcactgatattagtgtagatgattatctcactggatcgggcgaggggcaactggttgttgttccgcctgcggtggcgacaacggtgtctgccacagtgcctatggcgaagggtggcgctctcagcgctggcgatgagattacggcgctcgctgccgtcaaggacgaggcgggcgctgtgtctcgccggctgaaggaggcgtcgcagcggctaagtcaggcggctgacttcgctgaccgcgtggcgtcgggggggccctcacggcagttgtgtctgccgaagtcgagacacttcgggcgcaacatgctgaggtcgtccgggaaaagtcggtcgccgatagcaagtgccgcaaactggcggagaaggtggcccgtgctggagggcgagaggactgagctccggcgccagctggcggaggagaggagggaagctaatcaggccctcgccaaggcgcagtctgcgcaggcggaggccaatgtggcgcgggtggagggtagcctcgccaggcaacgcgccgaggaatgggaggagcggttcaacgctctgcaggcctgcgtggagagggccgaggcttcgacgtgctcagaggttgagcggacgcgcaagcagcttatggactcataccacgagctgggcgcgcggaccgctgacttcgaagtgcctgaccgagagtcaggccttcgttgcctcgagtggctgcaagaggagttgttggcgctcccgaccattgtggagggatttatgtcctatgcctccctggtcacctacgaaggggcgatgaacgcgctgtcccgcgaagggtgccgtcactatgaggtcttcgaccgatctgatgaggatttcgaacgcgagatttacaaggttgaggaccctgtggtgaaggaatctgcgggagccctctttgatcagatgtggggcccccacggtcgggaggtggtcagggagcggtccgacacggcgaggggtcaggcggtgcgtgacgagaaagtggatgacttcggggctttgaacagcgcgcggcctgaggcggagtcgaacctgttggcggctgggcccgaggtcgctccggtgccgcccccaaaaaccgtcaaaggctcccctgatgcccccgcagccactgcggccggcggtggctcgtcgccaaccgctgcgccgacggctgaggatcccccgaagacggcggcggagccggcagcggaggatcccgcggtggctgggtcttcgcaggtggcttag

SEQ ID NO: 40839 - DNA, 811 bp, Zea mays
  Peptide Sequence Number=SeqID_82618
atgggcaagacttcgatggaggtcgttgagttggttccttgtgcccgcaataaatggggcaactggtgggacttttggttttatgttgccgagggcacagtcgaagaccatccggggcttcccgtggccgagatgtgttcgcattgttactctgtgtacccgcagtttgaagtagcggaggaggatgcagacgaaggggcgctgcggtgcacggccggcctaagtagcgggcgcgatctggttgaggagttcgtcgcatatggggtgtggcccttggcgcgtggctgggcgctgggcgaagtatgccctctccagatgccttcccgtggtgggatgctggtgcgaagtcccgccttcgcactggatttgcatagccgtgatctcgccgcattcgtgcgtgaggcggaggatggggcagtgcggattgttggtcggtacgtgccaaggacggagggccagcgtagttgggatattcgcgagtccaacgatcgcttgaacagggtcttcgagttgaaccgtctgccgtatggcgttgatggggacatgcgcggcccccaggggaaggatgtcttcgcccgagctccgggagtcttcggcgcggatgctgaagctggcgctggcggagccaagtctacctcggccgaagccgcgaaggcccgagaattgcctccgacgggaaagtgcattgccgatttcggcactgatattagtgtagatgattatctcactgtgcctgtggcgaagggtggcgctctcagcgctggcggtgagatttcggcgctcgctgccgtcaaggacgaggcgggcgctt

SEQ ID NO: 40840 - DNA, 159 bp, Zea mays
  Peptide Sequence Number=SeqID_82619
atgcaggttatggccccacctgtaggcttgcgccctcccctgaggtgggcccgggggccactgtcggtaccttggattaggggtaccccttgttacaaggaacgtttcacccgtctgacagacagtatgttcatcggagatgcggaaatgcggaagtga

SEQ ID NO: 40841 - DNA, 753 bp, Zea mays
  Peptide Sequence Number=SeqID_82620
atgggcggggccaacagggcgccccacgcgcgcgggggcacgaccgaaccaccatgtgtggggggccacgcgccagtttgccgcaaagacgggcgcgacgattgggagcttacacaggaagagggttacagccccacctgcaggctcgcgccctcccctgaggtgggcccgggggccactgtcggtagcttgaaacaggggccaggacctactgcatggaaggcaccggatcccgtgcatagcgagcggacctccgggacagatcccggacccttccaaatgtggctcggacggttcaccaccgagtcccagatcctaggggcaggaaatacccggacccagccctggaaggggtccggggcagacacgtgtccggggcttgcaccacgccccccgccaaggcggaaaacccctactaccacatggcttgtggcccatgacgtgagccaacggaaggagtctgacgtcgggtcactggagtcgcgcagcgactgcatttattgcagtagggacgcgacgcctgcgccaagccaacgaaagatgtgcccctcggcatttaatgcgtccagtcctctccgctggcagatggtgtcagatagcgcgtctgtccaatctatcatcaaacagcgcgcctgtgccatgcggcagactgtgctcgttgtcccttctgcaagaaagcttccccagcatgccaaggacgcgcagatctccagcgtcagggcatgggaagattgccccagcaacgaacattag

SEQ ID NO: 40842 - DNA, 879 bp, Zea mays
  Peptide Sequence Number=SeqID_82621
atgactactgtctacaatcagtgccttgttattttagcactgtctacattcttgcacattttctggtttcttgtttttggggttgtggagccttggccaggcattgcatggcttgaggaaaaagtaaaaattatgggtagctatgctctcgaattggttttcatcgccgatattaatggcagcgcaagtagccgtgtgcctttgctctctgtagtaactagacgatgccatggcatattaggacttggaaaagtctataaaaccgtagttcgaccaccagttttccataaacagccacatactgctgccaaggtgctccagcaactggcgatagaagatggagtgacgttagtcttggaatttatgaaaggaaccatgtacgatatatgggatgagtttagagatcaaatagaccacgtaacaactttgatgggagggagcatgagctttagcctaccagttattcagattgagaacacttctcagttcagcccatggatctacaagcaattatttccgagaagtcgttttgaaaatcaaataaaacagcacattgataatcgtgctgcaatggctaaggagatcaaatctactgaggatgaaggctatgatgattattcttatgaagtattttttagacgaaggctttttgacttcattgtaatgtggaatgccaccagcatcaggaatgttgaaactcgtgctcttgacccttcagcagccattgaagagacatcgagtttcttggagctgattgcaataagatatcatcaggcacgccgaggagaacaggggcctcctctccgcctcctccttcgacaggcagctgctgcggaaggagttggtgaggagggtcaaggccgcggtggcgggacgtga

SEQ ID NO: 40843 - DNA, 1002 bp, Zea mays
  Peptide Sequence Number=SeqID_82622
atggtggagactcgccggagctccgccgccgccgccgagaagcgcatgtctccatcgccatcctcttcgttcgtaccttcccgaagcgccccaagggccgaggaggattctgtggcgggagcggcacccgcgaggagcgccggctcggtcgatgacgcggcagcggtcgcacagaaagatcaaggagtcgataagccgtcttccgctgctgcagagagttcaaagcggaggaaggagcaggagcaacagcaacccgcagtgccatgggcgaagctgctctcggagtgctcacagatcaaggagtcgataagccgtcttccgctgctacagagagttcaaagcggaggaaggagcaggagcaacagcaacccgcagtgccatgggcgaagctgctctcagagtgctcacaggtgtgctaggcagcattctaaaggtgcttttgggaggagccgagaagggaaagggggccgttccgccgccaagttcgaggacgcggcgatcgaggcctccgacggcacggtctacttcagcgacgccagcacgccggccgttccgccgccagataatccttctggtcttaccactatactgaaggggccattgaaagctgattattgcttctctcatagtcatctgcacttgatggttactttgagccgaacatcacctgatgccaagggcatattaggacttggaaaagtctatataaccgtagttcgaccaccagttttccataaacagccgcatactgctgccaaggtgctccagcaactggcgatagaagatggagtgatgttagtcttggaatttatgaaaggaaccatgtacgatatatgggatgagcacgccggccgttccgccgccaggttcgcggacgaggtcggcgccgccaccgagctgacacaagtgacaagcatcagccgccgagagagggaactgcttctggaagcaaaagctgctgatattcaccagataatccttctggtcttaccactatactga

SEQ ID NO: 40844 - DNA, 1140 bp, Zea mays
  Peptide Sequence Number=SeqID_82623
atgaggcggaaagacggcgggtaccctccatccgggggcttggaagatggaaagacacgacgcataagggaggaagaagacatggtcgccttccgaaaggggcccacgtgtcacgcaaccggctcgccagatgctgcatgcaagcaactgaaccgccacttgcgccaccaccgcgcctcttcggttgcggaaccaataccgcgactcgaggcagcccagcgcacgacccagcggcgccagcctggcgcgacggtcaatgcagccgaaagcgggccgacagtaatgacggtggcaggcgggcgggagcagcggtcacgtcgtcagccagactcacgtcccatccaggggcagcaggagagcctcccctcacggcgtgaagacgacgcgcccgtggtccgttcctcgaacggctcgcgcacgcgcaacggccgccccgccaaccactcgccccgtcgcattaactccgcggcgggacaggcggctccactggcaggagaagcgggcgacgcttcgccttcgccggaccgggaaagggggataccccgaaaaggatccttccctgtgaaggaaccgggctccgagccccccctactgatcagaggttcgaagactggccctccgaggggttcaacagtcgcctcagatcgcgtgggccctacacccactactggtcagaggctggcccccgaagggttcacagtcgcctcagacgccgagcgagggatgaccagggggctcggactcaggctcagccccggaagacgacgaactccgcttcgcccgaccccagggctcggactccgctctggcctctgccgaacaacctccgcctcgcccgacctaggggctcgggctcggcctcggcaatggaagacagactcgaccctagcttcggaggagcccccacgtcgcccggcctcgggcgcgggcccgccacgtcaacagggagcgccatcatcaccctaccccgagccgactcgggccgcagagaacaagaccggaggacgtcagcaaggactcgaccgctccgacagctgtccctccgtcaagctccattgctcctccgacagccacggcatcacgccagcagagtgccaagatctctccggctgccacattggcatgtacttagggcgctag

SEQ ID NO: 40845 - DNA, 630 bp, Zea mays
  Peptide Sequence Number=SeqID_82624
atgtcttcttcctcccgtatgcgtcgcgtctttccatcttccaagcccccggatgggggcccggctgtatccccccgccggtggtcacccaagacggtgaccaccagttcctgggtggggagaagcaagtcgggctacgatcttggtcccaccctcagcttcaaggatgttcatcatcctcgctggggtgggggccgggctgagccggcgctctacctcccgcgcgggtccgtggatttccctctcccgcggcgttcgggggagagggcgctcactggccctgcgggcggcccggacttcgacaacgcggggccggtcgacggcgggcatcgtcacctccagcgtgtcgggctcgtcggcttggctcccggcggcccctcccgccggagggcggctgccgcgccgttctcgcctgttgattatctgaaccgcttcaccaagcatgagtcgccccgtgtcaaggtgacgagtgagaacgaacagaggcagagttggctcgaaaatgggaacctggttggccggagcctagccgggttgtccgtcagcgggaccgacgccggagttgatcagccgaggcctcggaccgggctggcgcccttggaagatggttggccgaggcccctggggtaa

SEQ ID NO: 40846 - DNA, 696 bp, Zea mays
  Peptide Sequence Number=SeqID_82625
gttggcggcgttctcagagaaggtgaggaggtggaaggaacaggtcgcgggtacatcggcaccacctcctcagggagtggcggtggcaagtgggccgtggatcttgtgacggatgggcagagcgaggtggtgggtcacgcgtctgctggtgagtcggaggacgggggagctgggggaggcaaggatcgcgagcgggactggggcgagcggcgccggagcgtggcggccgcgatcgtggaaggtgagcacgagatcggtggaaggggatctaggttgagcgtccgtcgatggaacgggggagcgatttccacctacgcgatggctcttcatcccaggctcgcccccgctggggagtttggggctggaggggagcgaggcaggccggaggggagggaggcgagcatggcgagcgtccgacgcgtggaggagcaggggcggcgagcatcgcggacgcgggataggaaggggatagcgaccatcgcgacgacgaaagcgcgaccacccgggatcgaagcggaggcagaaccgtgcacggggcttgcactggatcctcatgtgcaactttctcttagatttagcttcacgctccatgatttcagtcattattataaagtggttcaaagcattcttaaggcagagcaacaggatggtggggtcaagtatgcattcggtgcagcagcagctctacggacctag

SEQ ID NO: 40847 - DNA, 243 bp, Zea mays
  Peptide Sequence Number=SeqID_82626
atggctcttcatcccaggctcgcccccgctggggagtttggggctggaggggagcgaggcaggccggaggggggaggcgagcatggcgaagaggggttcgaccctccagaaatcgtagctccggaagaaggacaggagcccgacctcccggaaatagagctttcgtgccaagagagcttcgacgaaggcgagtccattctacccttgatgcataaagtacctactctttctaccactacctaa

SEQ ID NO: 40848 - DNA, 312 bp, Zea mays
  Peptide Sequence Number=SeqID_82627
atgggcgaactgggaagaagctgcgcgacgcagagctggaggaacagagggcacggcggccagggcagggagctcagggaaaagctcggcacccatgggagacagggaagaacgcgatgcgctggggaggaaataaagtcatccgttcgctggaagataagaaaactcgagcatatcatcccgcacggcggccgcggactgcgtgtcccaccacctgtccacgcgccgcgggagacgtgcactgcgtgcgtgaggaagccaggcactgggagctacgcgatggaagctgaagtagatacgtggaggagataa

SEQ ID NO: 40849 - DNA, 909 bp, Zea mays
  Peptide Sequence Number=SeqID_82628
atgtccggtgcgccagccacgtcaccaaagccgttgggttctgaccgttggagctctgacttctgggcccgcctggatgtccggtggcgcaccggacattttcccgaagccggcgagttcctgaggccgctcttccttggagcaccggacactgtccgggaagaacgacaaactgggagagttgcacgcgtcctcggcgcgcagggcacatggccaggggatctggcaactatcaacgtgccccggaaaaattcgtcgaggcagaggaagtgccgcgcgcagggagatgctccatgtcgaggagactcagccggcagaggaaaacggagcgccggccatgggaatgggaggacagcagggcgcgacgctgggagatctggccgggctgggagagcgacggccgtaaataacagaggcacggcgaacttgagagagccgagggagatgggcggactgggaagaagctgcgcgacacagagctggaggaacagagggcacggcggccagggcagggagctcagggaaaagctcggcagccatgggagacagggaagaacgcgatgcgctggggaggaaataaagtcatccgttcgctggaagataagaacactcgagcatatcatcccgcacggcggccgcggactgcgtgtcccaccacctgtccacgcgccgcgggagacgtgcactgcgtgcgtgaggaagccaggcactgggagctacgcgatggaagctgaagccttcgtcaaaatgccgagtcctgcgaagggtgtccctgcccgctttgtctccgtcggaccagcggctgcagcgaatgcctcgagcgaagggtggcgtctttgccttcgccccaacatttgccctccgagggaccagttcgacaaagtcacctggtgccgaagacgtcgctag

SEQ ID NO: 40850 - DNA, 564 bp, Zea mays
  Peptide Sequence Number=SeqID_82629
atgaccccgattgctgtcgatccccgtgtaagcttccaaggtcccttggtgacgacacacgggcccccactgaggctaagtcgtcggcgaatcgaagttggcccgcggcggcggcgaatggccagagaggggcgcgcggcagcaggggttctagagaacagggatgtcgcgagcgaggacgaggagagaggaggtcgcgagggtatggagcgaacgcgccaatttataccccgcagtagcgcgcggagtccgagcttggccgacccggaattccgcgtaggtggttgcggtcagcgccacggacgcgcggaggtggagctcgcgcagaccagcgggtttatgggcgagcagggctgcagtgccgcggatcccggccgccgatccgatccacgcccacgactcccgcgcgcagtgcttggttcgttgcaatcccccgatttcggcgcgcggacttcgcacgattcaacggccggaaccacccgacaaatgcgcggggaagaaggtggcgcatggttcaaccataaaatgggaattgattgcataacaaatgaagttccaccatga

SEQ ID NO: 40851 - DNA, 516 bp, Zea mays
  Peptide Sequence Number=SeqID_82630
atgaccccgattgctgtcgatccccgtgtaagcttccaaggtcccttggtgacgacacacgggcccccactgaggctaagtcgtcggcgaatcgaagttggcccgcggcggcggcgaatggccagagaggggcgcgcggcagcaggggttctagagaacagggatgtcgcgagcgaggacgaggagagaggaggtcgcgagggtatggagcgaacgcgccaatttataccccgcagtagcgcgcggagtccgagcttggccgacccggaattccgcgtaggtggttgcggtcagcgccacggacgcgcggaggtggagctcgcgcagaccagcgggtttatgggcgagcagggctgcagtgccgcggatcccggccgccgatccgatccacgcccacgactcccgcgcgcagtgcttggttcgttgcaatcccccgatttcggcgcgcggacttcgcacgattcaacggccggaaccacccgacaaatgcgcggggaagaaggtggcgcatggtag

SEQ ID NO: 40852 - DNA, 459 bp, Zea mays
  Peptide Sequence Number=SeqID_82631
atgggcaatgggaaccctaattggagccatgatcaaaagatcatgagccgccgacgacccccgccgcctgtgctcgtggccagggtagctccgaccacctccgacaccgacccgcacaccgacgtgaccgtcgcgacctcccggacgtcactgaccaccccgccggagctctactgccgccgttttaccccttattctatgatatgcttaaggataaggaaaatagaaaaggataacttagaaaaaccctacaaaaatgaccccaaggcaataccaatccactatgttatcctaaaaggaaacctaagcttaaaagactgtaatcttgctgacggagagtacatcctcgtgccggagcaaggagctgctcaggaggtagccccagatccagcacccgagcctgcaccagaggacctgcctgccactgctttggaaggcaagccccggttttatgcataa

SEQ ID NO: 40853 - DNA, 741 bp, Zea mays
  Peptide Sequence Number=SeqID_82632
atggcccgcgcccgcgcttataaaaccctcccagacttagattgtacccttccgcgcaccctcaaacctcaccggagtcgagctcgtcgccgtttgcccgtgcgcagcgagtccgcggccgcccactccctctgccaccgtagaccggccagtggagccattcccaactccgtccagccctcggagaagattgtgcacacctccgtgaggctccccgagcgaggaatcggagtttacttcgccggagaggccagtccacgctcgccggagctctcaaccccgccggagtacgtggaccgggtaaatccctcaaccatccttcgattccttgcgcacacggtcgctacgataccccgtgaagctcaccttgccctcggattgaaccagttcgccgtggtttggccggtatactcgccgccgacgagaacacccgcctgcacgcgtggaccgggcgattccggccatctccgacgtcaagccgtacctcgacgtgaccgccagagtctccccgagccaaccccacccttcgccggacctccctcgccgccgttttaccccttattctataatatgcttaaggataaggaaaatagaaaagactgtaatcttgctgacggagagtacatccttgtgccggagcaaggagctgctcaggaggtagccctagatccagcacccgagcctgcaccagaggacctgcctgccactgctttggaaggcaagccccggttttatgcataa

SEQ ID NO: 40854 - DNA, 2282 bp, Zea mays
  Peptide Sequence Number=SeqID_82633
gagagcttcatctgtaccctgttcctgtcaggacacaatctggtgaaaagctcgagctgcagctaagcccaggagattctgttattgatgttaaacaattcctcttggatgctcctgaaacatgcttctacacatgctatgatttgatattgcatactgaagatgggtcagctcatcagttagaagactacaatgaaatatctgaaatagcagatataacttctggtggatgttcactggagatggttgctgcaatatatgatgagaggtctattaggtcacatctccgacgtgtgagggagttactatctctgtctactcttcatgtttccctatcgacatccttaactctgcagcaggagtctgcccagggaaaatctgcagattctggaaaaagccctattcaggagcttgatggtttaaattttatggaggatagtgctggtgctctcactaatttattggcatctacaccagcagagataaaatgtgttgaaagcatggttttttcttctttcaatcctccgccgacctatcggaggttacatggagatctcatctatattgatgttgctacattggaaggaaacaaatactgcattactggaagctccaaatctttttatgttaacagtagcaacaaaaatatatttgactcgaaacctacaaaacaaggactggaggccagcactctcgtaggcctactacagaagatcagtgccaaatttaagaaaggttttcgtgaagttttggatcgcagggcatcggctcatccatttgagaatgttcagtctttgcttccagtgacttcttggctaggagcgtatcctgtgcccgaacatagaagggatgcagccagggctgaagattctgttgtgttgtcatatggcactgagttaattggcatgcaaagagactggaatgaagaattgcagtcctgccgggagtttcctcatggcaatcctcaagaaaggatactgcggggcagagcgctctacaaagtaacatgtgattttgttgatgctgcagtaaaaggtgcagttggtgtcatcaatagatgcatacccccaataaatccaactgacccagaatgttttcatatgtatgttcacaacaatattttctttagttttgctgtcgactccgactatgaagacatttcaaaggaccacaagccagattgccaaaatgggtccagcagaagcaccaaggtttcctccccagatgtgataactaagccagatgcaaaccatggcaaatctgctgaggtagttgattcaaaatctgaagaggcacaactcgcagatagtgagcaggcgacatatgcttctgcaaacaatgacttaaaaggaactaaggcttatcaagaagctgatgtttctggccttcacaatcttgcgatggcaatagttgattacagaggtcacagggttgtagctcagagtataatacctggtattcttcaaggagacaagtccgattcccttctgtatggttctgttgataatggcaagaagatatcttggaacgaaacgttccattctaaggttgttgaggctgcaaagcagctccatttgaaggaacatgtggtattggatggttctggcaatcctataaaattagctgctacagtcgaatgcaagggtattgttgggagtgatgacagacattacattttggatctgatgagagtgactcctcgagattctaactacattggacaagagcaccgcttctgtgtgttgagacctgaacttatagcatcatttgttgaggttgaatccataaaacaatcgttgaagcaaaaggttccagatgctccagttgcaagtacttctgatgctaaggctacctctgttgaaggagatgacaagtctgaagaaagctctgttcatacacacgaggaaaatgacaactcaagctccgagattcttttcaatccgaatgtgtttacagagtacaagcttgctggcagtgcagaggaaatcgctgctgacgaagagttggtaaaaagggctggtacatatcttgtagatatagtgatcccaaagtttgttcaggatctttgttcccttgatatctcccctatggatggacagactttaacagatgcattgcatctccatgggataaatattaggtatctgggcaagattgcaggcatggtcaaacatttaccacacctatgggacttgttttctactgagataatagttagatctgcaaagcatgttatcaagttaaatgcagttagggttttcgggctatcaatatggaaatga

SEQ ID NO: 40855 - DNA, 3917 bp, Zea mays
  Peptide Sequence Number=SeqID_82634
gagagcttcatctgtaccctgttcctgtcaggacacaatctggtgaaaagctcgagctgcagctaagcccaggagattctgttattgatgttaaacaattcctcttggatgctcctgaaacatgcttctacacatgctatgatttgatattgcatactgaagatgggtcagctcatcagttagaagactacaatgaaatatctgaaatagcagatataacttctggtggatgttcactggagatggttgctgcaatatatgatgagaggtctattaggtcacatctccgacgtgtgagggagttactatctctgtctactcttcatgtttccctatcgacatccttaactctgcagcaggagtctgcccagggaaaatctgcagattctggaaaaagccctattcaggagcttgatggtttaaattttatggaggatagtgctggtgctctcactaatttattggcatctacaccagcagagataaaatgtgttgaaagcatggttttttcttctttcaatcctccgccgacctatcggaggttacatggagatctcatctatattgatgttgctacattggaaggaaacaaatactgcattactggaagctccaaatctttttatgttaacagtagcaacaaaaatatatttgactcgaaacctacaaaacaaggactggaggccagcactctcgtaggcctactacagaagatcagtgccaaatttaagaaaggttttcgtgaagttttggatcgcagggcatcggctcatccatttgagaatgttcagtctttgcttccagtgacttcttggctaggagcgtatcctgtgcccgaacatagaagggatgcagccagggctgaagattctgttgtgttgtcatatggcactgagttaattggcatgcaaagagactggaatgaagaattgcagtcctgccgggagtttcctcatggcaatcctcaagaaaggatactgcggggcagagcgctctacaaagtaacatgtgattttgttgatgctgcagtaaaaggtgcagttggtgtcatcaatagatgcatacccccaataaatccaactgacccagaatgttttcatatgtatgttcacaacaatattttctttagttttgctgtcgactccgactatgaagacatttcaaaggaccacaagccagattgccaaaatgggtccagcagaagcaccaaggtttcctccccagatgtgataactaagccagatgcaaaccatggcaaatctgctgaggtagttgattcaaaatctgaagaggcacaactcgcagatagtgagcaggcgacatatgcttctgcaaacaatgacttaaaaggaactaaggcttatcaagaagctgatgtttctggccttcacaatcttgcgatggcaatagttgattacagaggtcacagggttgtagctcagagtataatacctggtattcttcaaggagacaagtccgattcccttctgtatggttctgttgataatggcaagaagatatcttggaacgaaacgttccattctaaggttgttgaggctgcaaagcagctccatttgaaggaacatgtggtattggatggttctggcaatcctataaaattagctgctacagtcgaatgcaagggtattgttgggagtgatgacagacattacattttggatctgatgagagtgactcctcgagattctaactacattggacaagagcaccgcttctgtgtgttgagacctgaacttatagcatcatttgttgaggttgaatccataaaacaatcgttgaagcaaaaggttccagatgctccagttgcaagtacttctgatgctaaggctacctctgttgaaggagatgacaagtctgaagaaagctctgttcatacacacgaggaaaatgacaactcaagctccgagattcttttcaatccgaatgtgtttacagagtacaagcttgctggcagtgcagaggaaatcgctgctgacgaagagttggtaaaaagggctggtacatatcttgtagatatagtgatcccaaagtttgttcaggatctttgttcccttgatatctcccctatggatggacagactttaacagatgcattgcatctccatgggataaatattaggtatctgggcaagattgcaggcatggtcaaacatttaccacacctatgggacttgttttctactgagataatagttagatctgcaaagcatgttatcaaggatatactgagacaaagtttggaccatgatattgcgccagctattgctcatttcttaaactgtttcgttgggaaagttttaggtgcttccacaaagagtagtcttagcaacgcacagtcaaaaactctgaagggtcacgaaaatagccaaactcaaaagtctactaaaggccctaaactgagccatgctgccgtttcaagaaaaagcttatcaacttattctcatctaacctctgatggaatttggtttagcattaaggaatttgcaaaatcaaaatatcagtttgaagtgccagatgaagctaggctttcagccaaaagggtagctgttctccgcaacctatgccgaaaggtaggaataacaattgctgcacgaaaatatgatatggatgcttcaagtccatttgaggcctcggatatgttaaatctccaaccagttgtcaagcattctgttccaacctgtacagatgcaaagaatcttatggaagcagggaaagtcaggatggctgagggaacattgaatgaggcatatgcattgttttctgaagccttttcactgcttcaacagattactggtcccatgcacaaggatgctgcaaattgttgccggtaccttgctatggttttgtaccatgctggtgatacagccggtgcaattgtgcagcagcatagggaactcatcataaacgagagatgtcttggtcttgatcatccgggacacaagccccacagttatggtaacatggccttgttctatcatgggctcaatcaaactgaattggcactgcggcacatgtcccgtacactgctgctgctaagtttggcgtcaggacctgatcatccagatgttgcagcaactctcataaatgttgcaatgatgtaccaggatgccagtaatatgaatactgctcttaggtatcttcaagaagcccttatgaagaatgaacgacttcttggccctgaccatgttcaaacagccgtatgctatcatgctcttgccattgcattcagttgtatgagcttatataagctttcaattcagcatgaaaagaagacctatgatatactggtaaaacaattaggggaaaatgactcacggactaaagattcagaaaattggttgaatacatttaagcttcgagaagaacaggtcaacgcccagaagcagaaggaccagggagctaatgcatctgataacgctgttaaattcttgaaggcaaaccctgcatttttacaagcaatgaaggctgctgcgctccaatcaggtgacaggtcagcaaatgtcaacaggtccctcaatgctgcagtagttggagaaggtgtaccacgactgagaggagtggatgagcgagctgctcgagcgaccgcagaagctcggaagaaagctgttgcaagaggcctgaatgtccgtaatggccctgcggcaaaccatgcgtctgatgaactagctcagattctcaaactcatcaatactgcttcggggtcttccacttcggcatctgcaaaaaccgaggaatctgcctctgaagggcaggcaacaaatggatctgttcaaaacggagctgcaaccgatgcgaagtctgcagatatcaacgtgccacctgcacctgccaaccaaccagttggattgggggcaacattggagttgaagaagcagaaatcaaagcaaaagtcgtag

SEQ ID NO: 40856 - DNA, 1205 bp, Zea mays
  Peptide Sequence Number=SeqID_82635
gcctcagctccgcaagacgctttggagacaagacgaccgcagtcggcaaacaggatagcactagaaacaacagtcccagcaaaatgcgtgccggtgccaggttgatcgagaaggagcagcaggagcagcgcgcaccggtggagaagcctccgttcaccttgggtcagatcaagaaggccatcccgccacactgcttcgagcgctcggtgctcaagtccttctcctacgtgctccgtgacctcgtcaccgccgcggcgctcctgtacttggcgctggtcaccatcccggcgctcccgagcccgctccagtacgccgcctggccgctctactggatcgcacaaggctgcgtgtgcaccggcctgtgggtcatcgggcacgagtgtggccacaacgccttctcggagtacccgctcctcgacgacatcgttggcctggtgctgcactcgtcgctgatggtcccgtacttctcgtggaagtacagccaccggcgccaccactccaacattggctccctggagcgcgacgaggtgtttgtgcccaagaagaaggaagcgctgccgtggtacacgccgtacgtgtgcaacagccccgtgggccgtctgctgcagatcgtcgtgcagctaaccctcgggtggccactgtacctggccaccaacgtgtcgggtcgcccgtacccgcgcttcgcctgccactacgacccctacggcccgatctacagcgaccgggagcgcgcccaggtcttcgtctcggacgccggcgtcgtggccgcgtggttcgggctgtacaagctggcggcgacgttcgggttctggtgggtggtgcgcgtctacgccgtgccgctggtgattgtgaacgcgtggctggtgatcgtcaccttcctccagcacacccacccggctctcccccgctacgactccagcgagtgggactggctgcgcggcgcgctagccaccatggaccgcgactacggcgccctcaaccgcgtgttccacaacatcaccgacacacacgtcgtgcaccatctcttgtccaccgtgccgcactaccacgccgtggaggctaccaaggcgatcaagcccatcctcggcgagtactatcagttcgaccccacccccatcgccaaggcgatgtggcgcgaagctagggagtgcatctacgtcgagcccgagaacggcaggggcatcttatggtacaacaagttctag

SEQ ID NO: 40857 - DNA, 1434 bp, Zea mays
  Peptide Sequence Number=SeqID_82636
atgacaaaatatatttcaaagaattccatcactagaaggaaactttgtaaagatccggttaatggcagcttagcatcacgccatcaccacaccagaacctataactcaaaggccaagcccctaaagctgcaggtctcagagccgaccaaaggccatcatgctatccctcaggcctcagctccgcaagacgctttggagacaagacgaccgcagtcggcaaacaggatagcactagaaacaacagtcccaggccgcggtaaccgcatctgccatttgcctgtttgctttgctctcttccaggccaatcccaaaatgcgtgccggtgccaggttgatcgagaaggagcagcaggagcagcgcgcaccggtggagaagcctccgttcaccttgggtcagatcaagaaggccatcccgccacactgcttcgagcgctcggtgctcaagtccttctcctacgtgctccgtgacctcgtcaccgccgcggcgctcctgtacttggcgctggtcaccatcccggcgctcccgagcccgctccagtacgccgcctggccgctctactggatcgcacaaggctgcgtgtgcaccggcctgtgggtcatcgggcacgagtgtggccacaacgccttctcggagtacccgctcctcgacgacatcgttggcctggtgctgcactcgtcgctgatggtcccgtacttctcgtggaagtacagccaccggcgccaccactccaacattggctccctggagcgcgacgaggtgtttgtgcccaagaagaaggaagcgctgccgtggtacacgccgtacgtgtgcaacagccccgtgggccgtctgctgcagatcgtcgtgcagctaaccctcgggtggccactgtacctggccaccaacgtgtcgggtcgcccgtacccgcgcttcgcctgccactacgacccctacggcccgatctacagcgaccgggagcgcgcccaggtcttcgtctcggacgccggcgtcgtggccgcgtggttcgggctgtacaagctggcggcgacgttcgggttctggtgggtggtgcgcgtctacgccgtgccgctggtgattgtgaacgcgtggctggtgatcgtcaccttcctccagcacacccacccggctctcccccgctacgactccagcgagtgggactggctgcgcggcgcgctagccaccatggaccgcgactacggcgccctcaaccgcgtgttccacaacatcaccgacacacacgtcgtgcaccatctcttgtccaccgtgccgcactaccacgccgtggaggctaccaaggcgatcaagcccatcctcggcgagtactatcagttcgaccccacccccatcgccaaggcgatgtggcgcgaagctagggagtgcatctacgtcgagcccgagaacggcaggggcatcttatggtacaacaagttctag

SEQ ID NO: 40858 - DNA, 695 bp, Zea mays
  Peptide Sequence Number=SeqID_82637
cggggcactcttcgataggatgtggggtctgcacggccgagaggcggtcagggagcggttcgaccgggcaatagagcagatggtgcatgccgaagacgtcgacgaccttggtggtctggatggcgcgctgcccgaggcagcggaggtcgatctagtgccgccctcggatgccagtgaaggcccctcggcgacccccgcgcccactgcggccggcgaagaccccgcatcagcccctgcgccgacgggcgaagacgccttgaaggtggtggccgagccggcagccgagccggcagtcgaagaccccacagccgcggctgggccttcgcaggttctggggtttgggcctgcgcacgcaaccgctactgacattgctatttttgtggcggcttcgaccgtggctgccgatgatgattcgtttggctctgtgtctaagtgttttgagtctgatgattctgggagttcgattgcgtggacagaggagtcttcagatgagaacttggattattttgcagcattggatgtggctgcagcggagccttcgccgcacgcgaagggttccgaggagctctcggttacgagtactgggtataggcggcgaagggcggtggcgaaatggagagtgagtggattgtcgcgaagcggtgggcgtcatcgtagtgagatggagagtgggcgtcttcgcgtggacgggactg

SEQ ID NO: 40859 - DNA, 177 bp, Zea mays
  Peptide Sequence Number=SeqID_82638
atggcgggggtggccggaatcgcccggtccacgtgcgcaggcgggtgctctcgtcggtggcgggtgtgccggccaaaccacggcgacctagtccaatccaatggcacggttattaagtgtactacaacttttatatttggcccaagccatgatcataaggttttcatgaccttttga

SEQ ID NO: 40860 - DNA, 312 bp, Zea mays
  Peptide Sequence Number=SeqID_82639
atggcccgcgcccgcgcctataaaacgcccagggaccttgatcgtacccctccgcacgcgctcaacctcgccggagctcaaactcaccggcgtttaccccctctacgtcaccccgtgaagctcactgtgccattggattggactaggtcgccgtggtttggccggcacacccgccgccgacgagagcacccgcctgtgcacgtggaccgagcgattccgaccatccccgccgtcgagccgtacaccgttgtgaccgtcagaacctcccggagccaaccccgcccctcgccggacctctctcgccgccggtaa

SEQ ID NO: 40861 - DNA, 291 bp, Zea mays
  Peptide Sequence Number=SeqID_82640
atggccaccgccgccgccgctccagcatctgtggcgccgtcccttgtacccaaggccaacgacagcaggaaggcggtggtgcccgtggacgcgtcggagctggagaatcacgtgttggcggtggacgacaaatccgtggaccgcgccgcgatcgccaggatcctgcgcggctccagcatgatcatcactgactactggatgcctgggatgaccgggtacgagctgctcaagcgcgtcaaggagtcggcggcgctcaggggccatctacgtccgtcattatgtcgtctatga

SEQ ID NO: 40862 - DNA, 294 bp, Zea mays
  Peptide Sequence Number=SeqID_82641
atgctggcggtggacgacaaatccgtggaccgcgccgcgatcgctaggatcctgcgcggctccaggtacagggtaaccgccttgaagtcggcgacgcgcgcgctagagttgctcgcgatgggcctgctccccgacgttagcatgatcatcaccgactactggatgcctgggatgatcgggtacgagctgctcaagcgcgtcaaggagtcggcggcgctcaggggcatctacgtcgtcatcatgtcgtctatgatcatcgtgatttatacattttcaaacaaaattttacgatag

SEQ ID NO: 40863 - DNA, 1104 bp, Zea mays
  Peptide Sequence Number=SeqID_82642
atgacggtggcaggcgcgcgggagcagcggtcacgtcgtcagccaggctcacgtcccatccaggggcagcaagagagcctcctctcacggcgtgaagacggcgcgcccgtgatccgttcctcgaacggctcgcgcacgcgcaatggccgccccgccaactactcgccccgtcgcattaactccgcggctggacaggcggcgcttctggcaggagcagcgggcgacgcttcaccttcgccgaaacaaccgcgccaaaaaagggaccgggaaagggggatactccgaaagggatccttccccgtgaaggaaccgggctccaagccccccctactgatcagaggttcaaaggctggccctccgaggggttcaacagtcgcctcagatcgcgtgggccctacacccactactggtcagaggttcgaaggccggccccccgaagggctccatggccgcctcaggctactcgggctccgcgcccattattggtcaggggttcgaaggctggcccccgaagggttcacagtcgcctcagacgccgagcgagggatgaccaggggtaccctaggacatttccgagaccagcgggagcgatcttgcaacggaatcccatcggagggaggcatcgagccctcggaccccgtcgccaggggaccgggtccggcagatcacccgcagaggctcgggggctgctctcgcaaacccggctccggccaaaccgttgacagcgtcaacataccagcccgagaacttgggccccgaccgtacacccgggctacggccagctcgcatgagggaacaaccagactagccgaagcattacgcaaggcattaagacctcgaaggagtgaaaccactcctccgaggcctcgggggctacacccggcgggtgcgctcgcgcgcacccaccggaacaaaatgcaaccgagaaaggctggtccccttgcaaaaaagtgcgacgaaagcctccaagcgagtgctaacactcccttcgaggctcgggggctactgtcggggaccataattaggggtaccctcaagactcctaattctcagctggtaacccccatcagcataaagctgcaaaggcctgatgggtgcgattaa

SEQ ID NO: 40864 - DNA, 528 bp, Zea mays
  Peptide Sequence Number=SeqID_82643
atgagaaaggggtctggaggggcaaccttcgaggtggttctaggcccagtatatgccatccgaacttggggtcctgtgacgccacaagtccggactggtgcggctggggctcgggcccctcgagggtccccaatcagagagggtctaggaatgtcgtgtctctcggggaccataattaggggaatcctcaagactcctaattctcagttggtaaccccatcagcacaaagctgcaaaggcctgatgggtgcgattaagtcagggatcagtccattcgagggactcgatcacgcctcgcccgagcctaacctcgggcaagggcagccgatcccggaggatctccgcctcgcccgaggcccccctccagcgacgaacatacttccggctcacccgaggccctgtcttcgccaagaagcaaccctgaccaaatcgccgcgccgaccgaccaaatcgcagaagcatttattgcaaaggtggcctgacacctttatcctgacgcacgcccttcagtcagcagagccgaagtga

SEQ ID NO: 40865 - DNA, 612 bp, Zea mays
  Peptide Sequence Number=SeqID_82644
atgattggcaaagaagctggatgcatcctttgcattggtgtattcttatcaccaagcagtaacgtgaagcaagtcctgaccagattgaagctctgtatcagtacgccaaatttcagtttgagtgtggtaactactcaggggctgctgattacctttaccagtatcgtgctttgtgcacaaacagtgagcgaaatgtacttgaatgctatacagacaaatgcacaccatcttattaggtatctagctactgcagttgttgtcaacaaaaggagaaggaatatgcttgaagagttgattaaggtcattcaacaggagcaccatagctacaaggatcccgtaactgaatttctggaatgcttatatgtaaactatgattttgatggtgctcaacagaaactcatagagtgtgagcagatggttggtgactgggtaaccacctattgcctcgaagaagatggtttcctgaaggtgctctatgccacaactgtccgcctcggcatcatggatcgtccggagtatgttggcaaagtatacatggagcgtggaaccaaagcctgccaggtctccgtccacatcggcaccagcgacaagtttccagaagtgaggccctag

SEQ ID NO: 40866 - DNA, 426 bp, Zea mays
  Peptide Sequence Number=SeqID_82645
atggaaattgttgaatatgccgaagctacccccttggctttggagataatacctgatatgactgccgaagctactgtcgctccggtagaagaaacagaagcaaatagctcaaagacagaggagcatccaaagctgcagagtcccctaaccatgacgagggcggctcctcctggaccacctgctcttctcctatggggggttttatatatcacaagtgtgagctcacaaaagatcatagctcaacaagttgtggggaataatgtgcatgaactcaccaaagtttctaggaagagcaatgcaggaatcccccgtctgaccgccatcgcagcaaaatcaacccaggaacctccctacatgcctactcctactgcccttgcccctatcaggtatagcaatagcattgactacccaaaaattcaggggtaa

SEQ ID NO: 40867 - DNA, 210 bp, Zea mays
  Peptide Sequence Number=SeqID_82646
atggctgttcggccttgcgtctgggctgaaaacgaggtgttcgccatgacgcgcgggccgaaaacaatgaactccccgaagtcctgggagggggtctcctcggccgagccccgcaccccctcgtggcctagccgtggccggtcggcaccctaccgcgcccagctccggctggcgctgttggctgcctggccggccgtggttcggccgtga

SEQ ID NO: 40868 - DNA, 270 bp, Zea mays
  Peptide Sequence Number=SeqID_82647
atggcgaacgggccaaaaacggattttcggccacggccgcgaaaacgggcacgcggaagggcacgggaccctcccgtggtccccccgcgtgagacgtggaagttcgggtccacccgtgagggaaaacggaactccccgaagtcctgggagggggtctcctcggccgagccccacaccccctcgtggcctagccgtggccggtcggcaccctaccgcgcccagctccggctggcgctgttggctgcctggccggccgtggttcggccgtga

SEQ ID NO: 40869 - DNA, 228 bp, Zea mays
  Peptide Sequence Number=SeqID_82648
atggcgaacgggtcaaaaacggttttcggccacggccgcgaaaacgggcacgcggaagggcacgggaccctcccgtggtccccccgcaactccccgaagtcctgggagggggtctcctcggccgagccccgcaccccctcgtggcctagccgtggccggtcggcaccctaccgcgcccagctccggctggcgctgttggctgcctggccggccgtggttcggccgtga

SEQ ID NO: 40870 - DNA, 633 bp, Zea mays
  Peptide Sequence Number=SeqID_82649
atggcgaacgggccaaaaatggattttcggccacggccgcgaaaacgggcacgtggatgggcacgggaccctcccgtggtccccccgcgtgagacgtggaagttcgggtccacccgagagggaaaacggaactccccgaagtcctgggagggggtctcctcggccgagccccgcaccccctcgtggcctagccgtggccggtcggcaccctaccgcgcccagctccggctggcgctgttggctgcctggccggccatgcggctacgctggcgcatgagttgtcttggacccgtgactgcttggaggacccccgctaccgtgcggccgactcccggcgcccgtgtcccatcgctcgtgcaggcatcctatgcctgctgcgctgagaagtgcttgcgtgctgctacccgtcccacgggaagccgtgctcgatacacgttgccttcgtcgagctcaccccccggggtgcggctcatcggctcgagagcgcccgcggcgtttgcctcgtgccgccgtcggcctatggccggcggcaccgaggacacctcgctggcgcttttggtctcggatgtggctcacgctgaaggccggagacgcgttggcgtcacgcgcccaagaatcggtccgcccgaatga

SEQ ID NO: 40871 - DNA, 171 bp, Zea mays
  Peptide Sequence Number=SeqID_82650
atgctggtagactacacaacggtactcgatagaccatgtgtgtcggtcgaaagcccgacgcaacaggtctctccagctggctggactgacctgacaccatgcgacacagtggacgcttcgccatgcgagaaggcaaaaaggggatcaccgacttacgagcagtgcacctga

SEQ ID NO: 40872 - DNA, 984 bp, Zea mays
  Peptide Sequence Number=SeqID_82651
atggggtctgggcatagtacttgctctgccgagcattgtgtgatgatgtccaattatgtaatcgttgtgtacgtgacttctgatcctggcacgtacatggttcgcgttcggtttaccttccaaaaccggatggctcgtatcaggtgcactgcacgtaagtctgtgatcccctttttgccttctcgtctggcggagcgtccactgcgtcgcatggtgtcaggtcagtccagccagctggagagactgcatcgtcgcctgcacgaggagcaggagcgtcgatgccaggagcaggagcagcaggactcttcccccttgcctcagcaggaggtggagtatgagaggccaccttcccctgcacctcagctagagatgccccctgcaccacctcagggcatcccggctgctggaggagaccctgatggagacggagacgacgacgatgacgacgccggtggcagttcgagccacgacaccgagctttcggaggagccagagccggagggatggatcgctagacccatcactcatgacgttgctcgcgggtgtcacttccatgatgctctcgataccctgctgcgtcaggcctttgaccgacacacttggtctatcgagtaccgttgtgtagtctaccagcatcgtcgcggcggggtagctgatggccttgacctgaagtactaccctcgtcgttcgaccggcagtgctggaggtgtgattgtctcgccagtgggtgagggcaatcctaggctgagcagtatggtcaacttgatcgccgtgctcaacacagagttggaccacgcccttgacgagttgggcaaggttcgggcggaggttgcggaattgcgtgctgaatgcccgacacgccactatcttgatggtggttctcctgcccctgttgggattcatcacccttaccattcaccgccccgtagtcgcttcgactatggtaccccagactgcaagacccgcatagatttagatccatag

SEQ ID NO: 40873 - DNA, 768 bp, Zea mays
  Peptide Sequence Number=SeqID_82652
atgcaggtggcatgcaaccgcaccacgggggcgcaccccttcgacttcgtcgcatccagcatggaggcccaggcccacacgtcatgtaaaaaacgcgccggttactacgtgcgagaaactgcaccaccacttgcgccaatgtcgcgccttctcgactgcgtaaccagtgccgtgactcgaggcaaccctgagcgtggcccaacagtgccaatcgagcacatcgatcacgggtcagacatccacgggaggaggcgcgatggtcgatatggccaaaagtgggccggcagtaatggcggcagcaggcgagcggaagcagcagtcaagtcgtctgcgggctcatgtcccctcctggagcagcaggggagccctctcccacggcgtgaagacgacgcgcccatgttccgttcctcgaacggctcgcgcaacgaccgccccacgaaccgcctgtcccgtcgcattaaggggttgtttggttcgtggcaaaatgtgccacactttgccgaagccgcctcaaagcactcgggctccgcgcccactactgatcaggggttcgaaggctggcccctcgaagggttcgacagccgccccagagcacgcagagcgagggatgactctgggtacgtccgatacatggccgaggctcgggctacgctcccgagtcgctggtctgacagagacaaaacgggcaggggcacccttcgctccattcggcaccagacgaaggcctgcggcgacgtcatcccgcagcgcggcctcgtccagctctga

SEQ ID NO: 40874 - DNA, 942 bp, Zea mays
  Peptide Sequence Number=SeqID_82653
atgtgggcctgggcctccatgctggatgcgacgaagtcgaaaggggtgcgcccccgtggtgcggtgttggtgggtaggtggtcgccgtcgtcggtgctgaggtggtggcagccggagaagccgcccgaagcggaggtcattgtcgctgctgctgtagtggtcggcgagccggaggcagcggtgtcggctcgagaagaggcttcgtcgacccaggagcaggtggcttcccaggccgaggaggtgcagcggcggcggctagagcttggccaggtcgtccgccagcaggaccaacctcggagtcacgctgccgaggccgtgagccgggctgatgtcctcgggggacagctggctgaggctacggagcggccggtcgaggtgtctgcttgggccagaacccttgcggagaccctagctacgatggcccaagcacggtgctggcgtcctccttcgagatggagatccttccgcctgtgtcgccgtccgaggccgggccagatcccgccgaaggcagaaacgacgccgaaggacttgttcgtcggtagcagaatcatttattcgagcgagagttacttttcgcggaaggtgatgagtgaggtatccgtatcccggaggcgtaggagtccctcggctcggtcggcctcgtcgcttacgtgcactcttactcgttcgttggattctgttatcgatatagtcgagaaggcacgaaaattgttctggcagaaaagttttcgagcgttaagacttgtttggcagcagaatcgcttatccgggcgtgagttacttatcgcggaaggttccactatcgaagcagtcgaaaagcgcgaaagacgttctggcagaaagactttttccgaggaaaattttgacgcgcagagggggttcccccttctagcccccgagggagggttgggctttgccgaggcaaggctgacccttccttga

SEQ ID NO: 40875 - DNA, 939 bp, Zea mays
  Peptide Sequence Number=SeqID_82654
atgaaaccattggggcggcaatacagttttcttcgttacaaaatccggaaggtcaatttcgtgatatttgttgttgatggtgttgctgtcctcgagtcaatggatgacagcaataaaggatacactgagatacttcgtcaaacttttatgtatccgttcttgtcgattggagatgataaacctgttgttgttgtcacacatggtgatagactgttgatacagcaacgtgttcacgttcaagctgagttagcagagctactagatattcctgcccagcaaatttatgatataccagagcagaacctccctgttaagttaaactaccatttggaggtgcttgggcgtgaaactctcaataaaatggcagagcaattgatgggcttagatgcagtcattgaagccgccatattttcctatgcatcctgcgacttcctgctcgatttgctgtataataaatactacgagaggatgctggtgtttcataagataatcgtgcaactcatgaaaatccagtgttggtcatcattttcctgtctggttgcattgcctcttcttgttattcttgcagtcagcatgagcgaggtcgaggcattgtacaagctgttcaagaagatcaacaacgccttcatcgatgatgggctgattaacaagtaccattgccaaagatgtggaggcttgttctacagcagttgtacccagcaaaggatgatattacgtggacaagatgaactcaacatcgaagatgcaaatattgtgccattcaagtgcatacaagatcatcaaataaaaatcggtctaaaaacacaaaaagataacaatttaagaaaaacagatttgactcatgggtctgaggtgtcagcgagaggagcatgtgagacagttgtgtctgcgcgatacgacgagggcggggagaaggttgcacgcacgagagttgcgtga

SEQ ID NO: 40876 - DNA, 939 bp, Zea mays
  Peptide Sequence Number=SeqID_82655
atgtggactccatccgctacttcaaccgccaactgcgtgaggcgaaagagttcatcaggagaaagtcaacctttgagcaggtataagcctggggactggattgagggagtcggaagtgcaaaggctggacattttgtcttgcctgaggtcaccacattgctcttggtgggccctagaggttctggcaagagcacacttgtaaaccgaattactagggtctttgacaaggatgatgatccttttgcaccagatcgagcacaggtgtcatgcaattcaaaatcaaatggtacaatgtttcttcgcgagtatccaattccaaggaattcaagtgccgtatgtatttacgatacacgtggctggtcaaacgacctagagaaaaatttcaaaatgctgcatcagtggatgacaaaaggaataagccatggggagacaacaatgtgggatgatgatgaaggcaataagatagggaacatgaaaccattggggaggcaatacagttttcttcgttacaaaatccggaaggtcaatttcgtgttatttgttgttgatggtgttgctgtcctcgagtcaatggatgacagcaataaaggatacactgagatacttcgtcaaacttttatgtatccgttcttgtcgattggagatgataaacctgttgttgttgtcacacatggtgatagactgtcgatacagcaacgtgttcacgttcaagctgagttagcagagctactagatattcctgcccagcaaatttatgatataccagagcagaacctccctgttaagttaaactaccatttggaggtgcttgggcatgaaactctcaataaaatggcagagcaattgatgggcttagatgcagtcattgaagtcgccattattttcctatgcatcctggtcctgctgcttcgattttccgataaattggtgcagccgtag

SEQ ID NO: 40877 - DNA, 912 bp, Zea mays
  Peptide Sequence Number=SeqID_82656
gctcccgtcccgcgccggaggaggcaaaggggccagttcccccatcgtcggcggccaataatccgaccgaggagggccgttcctgtcctcggtggcggattgtgtggaggaagcaagtggttccctccggggtcgcgttctcctccacggcgagatccacgctgctctccaaggaaggacggggacttgctctaccccgcgatccactcccccaccgagctgctttccgagcgggcgctgtcgcatcacccccgcctcccccccccccgctcagcccctccgtaccccgcctacgcgtcccctccctcgcatccccagcccctcctccaccgagctacgctgaaaacctccacggcgtccgattttccgggatccactcccccaccgggctgctttccctccggggtcgcgatctcctccacggcgagatccatgctgctctccaaggaaggacgaggacttgctctaccccgcgatccactcccccaccgagctgctttcctaccgaggtcgcgaactcctcctatgcgagatccacgctgctctccatggaaggccgtggacctactgtaccccgatgtggaaatctcctcggcgattcaagcaacacgagaggaaagaatttggccgtgagtcgcgaccagggagctgtgcagatgccgaccatcatcgtctcggtggacctggaatgcagctgctgtcgtgccaagatcgagaaggtgctcaacaggatccaagagaagggtgagttctgcatcgacgacatcgacttggacgagaagagcaacaaggtcaccacattgctcctggtgggccctagaggttctggcaagagcacacttgtaaaccgaattactagggtctttgacaaggatgatgatccttttgcaccagatcgagcacaggtgtcat

SEQ ID NO: 40878 - DNA, 1026 bp, Zea mays
  Peptide Sequence Number=SeqID_82657
atggagctggtgctcctctgccgccgccatgcgtcgacctttgccgcgcccagccccttgtcgcgccaaatgccaggaccacctcgtggccaagtgccgagcaccgcgcccagaccaccacgtggccgagccgccgtcggtcttctccatccggcaccagggagtcaggcgccctccaggaaaccgcgccatgaagcaacagggcctcgcggcatactccggtggcgcgggcactgcacagttgtacgggcgcggccccaacggcgcggcctctcgacggcgcgcactagcggcaccccggcacgcacgggtccggccaagtgggcgtcctcagccccggcggcgcatgagtacggcaccctggcacgcaggcgcgggatccggccatggcaagtgcgggccggtgcgcagcccaggcgcgagcgatcctgccccaggcacaggcggcaaaggagaggcgcagccgcctggattagacccaagaacccgccgatctgcggcgaccagggcgaccagcgacatggatggcggtggctgaggagaggagtgggaggggcccccggctacgtgctctcgctcccggcggcggcgctgcccctgcccgtcgccgtctcctgcctggacgccaccgtccggcgcaaggggcgcagccatatccgccaccgtggccatccgtcgggctggtgggccttcagtctccccatccccgcgtcggaggaggcaaaggggtcggttcccccatcatcggcggccaataatccgaccgaggagggctgttcctgtcctcggtggcggattgtgtggaggaagcaagtggttccctccggggtcgcgatctcctccacggcgagatccacgctgctctccaaggaaggacggggacttgctctaccccgcgatccactctgtaacaccccaggttctctggaggacatggttgctggagtgacttggccgtccgccttgccaccgggttggactgtcgagtgggaccccgcctcggctgaggaggagcatgcggagtga

SEQ ID NO: 40879 - DNA, 333 bp, Zea mays
  Peptide Sequence Number=SeqID_82658
atgacttcacccacccccatcaaaggaggagacactcgttttagtttcgactacctttcccacgagggttttccctccatcttgtgggaggtgctcagctccgccggttaccctacaccacctctatacacgctgggttggcgttcccttgattctgagactatcgggttcagggcagaagacaccaccgaggctgcagcacttaagaccctaaccaccttctgcggatatcatcccctggagatggtgatgcatccactaggactcttccccgctgagaagagggatgaccccatgtggtgcaacagagtgagccacgtaaaggacgtgtga

SEQ ID NO: 40880 - DNA, 228 bp, Zea mays
  Peptide Sequence Number=SeqID_82659
atgcggctgaaggagcttctgcttagcatgatgacaatggtgaagaatggaaccgacctaaaggagaatggactgcttagtcctcgacagcttgccttatggttaatagaaaatgttagggacatgaatatgaacagtaacaccatactggacacgctgcgttgtaatcgctcccgcgtctctcacactcttgccttccgtcaagccgaaggtatcaatgaaatataa

SEQ ID NO: 40881 - DNA, 462 bp, Zea mays
  Peptide Sequence Number=SeqID_82660
atgcggctgaaggagcttctgcttagcatgatgacaatggtgaagaatggaaccgacctaaaggagaatggactgcttagtcctcgacagcttgccttatggttaatagaaaatgttagggacatgaatatgtcagaccttggaatgtcaactataagtgatttcactaaatgcaaagaatgtgttgatgaattgcaaagttttccgaaaaggaaacatcacaaggatgcccagccccaagaagaaacacatgagtgtttcattgatggatggactattacttgcacacagtttaagccccgtggtcgcatcaggtccaagaaacaaaaagggaaacatggaaaaagtcaagaaataacttcaagaaaagcttgctatcaatgtggacgtgaaggtcattacttttgtaactgtcccgagaagagttcactacagatcacctctgagataaagctatcttag

SEQ ID NO: 40882 - DNA, 1317 bp, Zea mays
  Peptide Sequence Number=SeqID_82661
atgaggaggggcctaagcgttttgcttgttagttggaaaagtgggaagaacacaagaacacacaaggatttagagtggttcgggccgccggagcgggaaacttcttgtagaagggatgatgagtaccgtacgccgctcggcatgggcgcactgttccccaacagactggtcaggctcgccgtcttctgggagtccggtgtccctctgtggaggtttggacccatcgatacaccccgggatcatcttcatactgtagaagagggtacccccgattcagggtaccgacagtggcccccgggcccacctcaggggaggatgcgagcctgcaggcttcttgcgtggcggttcgcctttttgaccgctggttatggcaaagatgaaggggcgcttaaccgcggggcggttgcatgccccttatggggtgcgccggtgttctctggaggaattcgcgtcagggccgtctcctccggcgatctcatcgccgaggagctcgcgctcgtggtggtgccgccgatcatcccggtcgcaacctccgaccggtggtcatccacaaggatgactaccagtcttgtggtggagagaagcgagccggcctgcggcctcccccctgccctcagcttcaaggatgttcatcatccacgctggggaggagggcgagccgagtcggggctgcgcctttcacgtgggctggcggcccgcttcttcctccagcattcgggggagaagggcgttcgccagccttgcgaaggaggcaaacttcggctacgcggggttggccacatccacggcttctcccgcgccgccggccacaccgggggggggtcgtacaagacgtcatacgccgcgggggctgcggcagcgttcttggatggtcttgtcttcactcccgcagcgaggacgggagcgaggacctcttcgcacgtgctggggcagctgccgcccatcggtgcagaggtggtcaatgccgctggtggggctcaggtggtcgctcccgctggtgaggctgcccactgcagaggtggttgcctttgctggcgataccatcagtgccacctgataccggacctccggctctttggctttaatggcctcgttgtcgcccctgtagggagacgggggcgaggacctttccacagcggcgtacatgctgaggtgatcgccgctgctgaggtggccaccaccgtcggtgctgatgtggtcgcctccgtcggcgagccgctcggagctagctatcccgcggtccttactggtgtggaggtgcttggggagggagatgatgttcttgccatcggattctcatccaacggtggtgattag

SEQ ID NO: 40883 - DNA, 1257 bp, Zea mays
  Peptide Sequence Number=SeqID_82662
atgaggaggggcctaagcgttttgcttgttagttggaaaagtgggaagaacacaagaacacacaaggatttagagtggttcgggccgccggagcgggaaacttcttgtagaagggatgatgagtaccgtacgccgctcggcatgggcgcactgttccccaacagactggtcaggctcgccgtcttctgggagtccggtgtccctctgtggaggtttggacccatcgatacaccccgggatcatcttcatactgtagaagagggtacccccgattcagggtaccgacagtggcccccgggcccacctcaggggaggatgcgagcctgcaggcttcttgcgtggcggttcgcctttttgaccgctggttatggcaaagatgaaggggcgcttaaccgcggggcggttgcatgccccttatggggtgcgccggtgttctctggaggaattcgcgtcagggccgtctcctccggcgatctcatcgccgaggagctcgcgctcgtggtggtgccgccgatcatcccggtcgcaacctccgaccggtggtcatccacaaggatgactaccagtcttgtggtggagagaagcgagccggcctgcggcctcccccctgccctcagcttcaaggatgttcatcatccacgctggggaggagggcgagccgagtcggggctgcgcctttcacgtgggctggcggcccgcttcttcctccagcattcgggggagaagggcgttcgccagccttgcgaaggaggcaaacttcggctacgcggggttggccacatccacggcttctcccgcgccgccggccacaccgggggggggtcgtacaagacgtcatacgccgcgggggctgcggcagcgttcttggatggtcttgtcttcactcccgcagcgaggacgggagcgaggacctcttcgcacgtgctggggcagctgccgcccatcggtgcagaggtggtcaatgccgctggtggggctcaggtggtcgctcccgctggtgaggctgcccactgcagaggtggttgcctttgctggcgataccatcagtgccacctgataccggacctccggctctttggctttaatggcctcgttgtcgcccctgtagggagacgggggcgaggacctttccacagcggcgtacatgctgaggtgatcgccgctgctgaggtggccaccaccgtcggtgctgatgtggtcgcctccgtcggcgagccgctcggagctagctatcccgcggtccttactggtgtggag

SEQ ID NO: 40884 - DNA, 1293 bp, Zea mays
  Peptide Sequence Number=SeqID_82663
atggagtactccagtttctcgtctggcaccgagcgagctgtcaagacatggcaggcaacggtaggagcttcagagaacggggtgatgacatcggagctgcttgagtggctattctcggggaagaccggggaagacgtgaaaaccaaagatggcacaaacggagcagcggttcctgctgtaacagggatcgcggaggtacgcaaaactacggttgcagaaaacggtgtctcgggagttggggtctccgagcacagagtgtttcttctcggtgaaaacaggtgggaagacccaaccagactgacgcataacaaaaagacagccagcaccggcacagttgcatctactaagacttgcatctcctgtcgaggcgaaggccgcctcatgtgcttagaatgtgatggaacaggtgagccgaacattgaaccgcagttcttggagtgggtcggtgaagatacgaagtgcccatactgtgaaggaattggttccattttgtgtgatgtttgtgatggaaagaaattttatcacagaactggagaatgcgttcaaatggcagttcgagtggactgctgtcccgcagaaagcggagacataagcaacagtgtaacacttttatggtacaataggagatggaaaaatacgagggaagaagaggattcctttcccaaatcaggccgatttgtgaactccagcaatatatgcagactgcctacatgcacaaagaagtcatcgcatatacacattgtgccaatgacgcagcatcctctggagacagggtccctgtcagatcggaatgaagaacctgctctccatgccttttcccagtcctcccactccagtttctcccaccattcaactgaaccgcacacctgcttcagtttcccacagctgtacttgtacgcgctgctcagtggtatgcttctcagactcgggcaatcctccacccggatggtctcaaggctgggaaaatctcttggcctgcatatgcttctcaggctcctgacatcagtcagcacgattgatcttagattcagtaactcggcacgcgtattgtcagtccactcatcttcctgccctttattagaaggatggccccgcctcatcaccactaccttcttcaacaatcttcagcaacccatcgcaatgggttatgacgagcctctcgagcattccaagcttcaggacccatgtgatgttcttcagcctgggccaactagaaatggtcaatttgcggatgtgctgaaaatggtggggcgttgttgcaacgatgacgttctccagtgcaggaagaactga

SEQ ID NO: 40885 - DNA, 1152 bp, Zea mays
  Peptide Sequence Number=SeqID_82664
atgatcgccgccgccgtcgcggcaggcgcggccaccgccttcccgttcgtctccaccgcctaccgccgcccgcgcctccagcagccctgtccgcgccgcgccgcggccgtcctcccggcccgcgccaccggcggtgcctcgtcctgggaggagcgcgaggaggcgcggtggctccgcgaggagcagcgctggctgcgggaggagcagcggtggctccgcgaggagtcgcgctggcgcgccgagcgcgaggccctcctcgccgaggtggccgcgctgcggctccgcctccgcgcgctcgagggcgctcgccctgaccacctcgcggtcgccgtcgacgccgtggcctcgcctgcgcccccgcccgcggtgcccgcgccgcagccccaggccggcgctcatccaggaggcagccgcggtggaggtcgaggtcgaggtgaggaaggaggtggtggtggtccaagagaagaaggtggcgcccaaggccgaggcggcggtgagcggcgcagctggtgccagcgagagcaggaggacgctgaggacgggggccgagggcgaggacgtgcgcgcgatgcaggtgatgaagctttgcagaagctcggtttttactcaggcgaggaagacatggagtactccagtttctcgtctggcaccgagcgagctgtcaagacatggcaggcaacggtaggagcttcagagaacggggtgatgacatcggagctgcttgagtggctattctcggggaagaccggggaagacgtgaaaaccaaagatggcacaaacggagcagcggttcctgctgtaacagggatcgcggaggtacgcaaaactacggttgcagaaaacggtgtctcgggagttggggtctccgagcacagagtgtttcttctcggtgaaaacaggtgggaagacccaaccagactgacgcataacaaaaagacagccagcaccggcacagttgcatctactaagacttgcatctcctgtcgaggcgaaggccgcctcatgtgcttagaatgtgatggaacaggtgagccgaacattgaaccgcagttcttggagtgggtcggtgaagatacgaagtgcccatactgtgaaggaattggttccattttgtgtgatgtttgtgatggaaagaaagtaatggcaagttaa

SEQ ID NO: 40886 - DNA, 363 bp, Zea mays
  Peptide Sequence Number=SeqID_82665
atggcacagcggggcgagctagggcggcagctcccgctgagaggccccctcaaagccctagaggcagacatccaccacgctaacgccatggcagatgctattcagaggaattatggtggatcatgtgtgcagatgaggctgtcgttcagctctctagctccattgttcttgtacttcatccaatggttggactgcggctgctgttatgcccttcccagctatttaggactatttcacattctcatatgcaaggtttatgctgatggagatagctcagtgtcgacatatgaaaggcgggcaagccttagggaattctatggggactggctatgcaacttggatatggatttcgagtctaattaa

SEQ ID NO: 40887 - DNA, 537 bp, Zea mays
  Peptide Sequence Number=SeqID_82666
atgccactgggcgacgacgcggaggcgaaggacttcgtgctgccggacgagctcctggcggcgctgccgcgggacccctacgagcagctggcctcgacgaagaggagctccccactgacgatgagacggtttatgctgatggagatagctcagtgtcgacatatgaaaggcgagcaagccttagggaattctatgcagcttgagagtagtttgatcgagagggacctaaaagggaagggccgatgcaaggatatagtgagtaggaggaggatggaggattggaaaaagccgccgcggcgcctccaggagtccaggccgccatcgcctgtgccaggcagcgccatccctgtccgcgtccgcccatccgccgcccccacaaggccacaacagggacgtccgccacccgccaagcagggccagtccgcctgctcgcttgctccagcactatctggtatgctcaagcactatccccatcagacgacgtttaatctatctggtatgctcattgctcaagcgaacaacattgcattcagttga

SEQ ID NO: 40888 - DNA, 1197 bp, Zea mays
  Peptide Sequence Number=SeqID_82667
atggtcttgtttacaaaagtcgtccttggagttttaccatctcctatgtcaatctcctccaaaggatcagctgatgcgtccacacaacagattggggcacggttctgccgatctctcccacgcacgcgcttggaagcaggcaccttccccgccgccccggatcgcaccctagcggatcttgcgccagcccccgccctacccccgcctgcccttccactcttccctcgccgccccgccgcggatctcgcgctagccacacaaccgcgcaccctcccacgcgcgatggaagcagcccgctccaaagcgcaacagcgggcaaaaccaggcacccgcccgatccgattaggcttctgtctcacccatctcgcccggcctccacggagagatctggcggtggaggcgatgccactgggcgacgacgcggaggcgaaggacttcgtgctgccggacgagctcctggcggcgctgccgcgggacccctacgagcagctggcctcgacgaagaggagctccccactgacgatgagacggtttatgctgatggagatagctcagtgtcgacatatgaaaggcgagcaagccttagggaattctatgcagcttgagagtagtttgatcgagagggacctaaaagggaagggccgatgcaaggatatagtgagtaggaggaggatggaggattggaaaaagccgctgcggtgcctccagtccgcgccgtccctgtccctgtccgcccacgcccatctggtgcagccgccgcggcgcctccaggagtccaggccgccatcgcctgtgccaggcagcgccatccctgtccgcgtccgcccatccgccgcccccacaaggccacaacagggacgtccgccacccgccaagcagggccagtccgcctgctcgcttgctccagcactatctggtatgctcaagcactatccccatcagacgacgtttaatctatctgttgagaacgccgcggtgggcagcgaggtggagcaggaggagccaaagaaggaggcgatggcaggagtaggggagactctccgcagcttcatggaggagtttggtgatcaaggagaggactccattatcttgtcaccgcggttgaaggagattagtactcctgaccgccccgctgccctccgtttcctaggggcgaaagttttgtgttatacttgtgcactaacaatgttcctttga

SEQ ID NO: 40889 - DNA, 1115 bp, Zea mays
  Peptide Sequence Number=SeqID_82668
atggagccggatccggtcgccgctggggcatcctcctcgccgccgccttcaccagcgccggccacgtccccgccgtggcaaacgcgagatgacgatgagccgggagcggtggattgcgcggatcccggaggagacctgaatcccgcgccgccgccgtcgcttcagcagggtacagttgagaacgccgcggtgggcagcgaggtggagcaggaggaaccaaagaaggaggcgatggcaggagtaggggagactctccgcagcttcatggaggagtttggggatcaaggagaggactccattatcttgtcaccgcggctgaaggatattagtactcctgaccgccccgctgccctcggtttcctaggggagaagtataacaacctcatggagaggtacaagaagtacaagaagcaggtggtcaagtgttccgaggagtgtgaaccaagatataatggcctgaagaagaagtacacagacgagtgtgcagagaggcggcgtctgtacaatgagcttattgagctaagaggtaacattagggtgttctgcagatgcagacctctgagctccgatgaggtcaaccgtgggtgtttatctgttgttgagattgacccatcacaggagagtgagctgcagtttgtgcccagtgaaaaagaaaggaagccctttaagttcgatcatgtttttgggccagaggatgaccaagaggccgtcttttcaaaaacagtgcatgttgttaggttggatattaagcaaaatgctgatggaacacaagaagttcatggtttggttgaggctccagtttataacatagatgatgtgtgggagaaactgaagtttggtgctcaaaatagatctgttggctcaaccaattctaatgaactcagcagccgctcccacagtttggttagggtcactgttaggagcgagcatttggtgacttatcagaggagcagaagccacatgtggctggttgaccttgctggaagtgagagaatagctaaaactggggtagaaggagatcggctgaaagagtcacagttcatcaacaaatcactatctgccttgggtgatgttatatctgcccttgcctcaaaaaattcccatattccataccg

SEQ ID NO: 40890 - DNA, 502 bp, Zea mays
  Peptide Sequence Number=SeqID_82669
ggaggtgaagccaaagaaggctctcccttggcccatggttatttacgaaaatgggtctctgatgatgtcctgcggtctcgcctacaaggccatctacggtgacctcaacaccaaggatgagggtagcacccatcgacatcaagatggggttcgccaaggacgccaggtcaggcgggtgctcgagatcgtcgaccaggtgttgtacatcgacaactacagctacggcggtggtggtcggtcgctatcgtgggtgaggggccgaatcgagttcaaggacgtggagttcacgtacctatcgcaggcggaggccatggtcttgtacaacctccacctcaccatcacgtcgaccaagatgctagcgctatgggacatgtgtctataccgacttctcaagaagacatcatacgaactcctaaccgcgaagcaaatcagcggtccaacagccacaggcaaggttgggaacaggcgtaactcttacccgatcaacgatcttcttctctga

SEQ ID NO: 40891 - DNA, 552 bp, Zea mays
  Peptide Sequence Number=SeqID_82670
atggagagaccgacgtcgcatctcttctatcttcgcttcaagtccccaacggaggtgaagccaaagaaggctctcccttggcccatggttatttacgaaaatgggtctctgatgatgtcctgcggtctcgcctacaaggccatctacggtgacctcaacaccaaggatgagggtagcacccatcgacatcaagatggggttcgccaaggacgccaggtcaggcgggtgctcgagatcgtcgaccaggtgttgtacatcgacaactacagctacggcggtggtggtcggtcgctatcgtgggtgaggggccgaatcgagttcaaggacgtggagttcacgtacctatcgcaggcggaggccatggtcttgtacaacctccacctcaccatcacgtcgaccaagatgctagcgctatgggacatgtgtctataccgacttctcaagaagacatcatacgaactcctaaccgcgaagcaaatcagcggtccaacagccacaggcaaggttgggaacaggcgtaactcttacccgatcaacgatcttcttctctga

SEQ ID NO: 40892 - DNA, 513 bp, Zea mays
  Peptide Sequence Number=SeqID_82671
atggagttcgaagctttgcgcaaagagttatttgtgaaggttcagtcattgtaccgggagccagagcagatcagatttgagaacaagcagatacctgctataagagaaggattgcatgatatacaagaggagatttcgagggctagtataaatgtagatgcttatgcactttggcatatgcatgatatgtcaatctctacttatctcgatgaagaaggcagtctagaagatcacgagggaaaggagcacaatagaaagaaaaagggaattttgggagaattaaataatgtacaaccaaaactttccaaggatctcatgaaacataaaaatataatcaaagggtgtaagttcattcaaaatcccaaaggtgaagactgtaatctcgctgactcgtacatcctcgttccggggcaaggagttgctcaggaggtagtccaggagccagcaccagagtctgccatcgaggatctgcctaccccagccttagaaggcaagccccggttttatgcataa

SEQ ID NO: 40893 - DNA, 267 bp, Zea mays
  Peptide Sequence Number=SeqID_82672
atggagttcgaagctttgcgcaaagagttatttgtgaaggttcagtcattgtaccgggagccagagcagatcagatttgagaacaagcagatacctgctataagagaaggattgcatgatatacaagaggagatttcgagggctaggtcctcaatgggccacgcttacaataggaagtgtggcgtgtacaactttggaaactacctgtgggagatatactgttgtaacatgccataccctgatctcagcttttcgttcaccaggtga

SEQ ID NO: 40894 - DNA, 354 bp, Zea mays
  Peptide Sequence Number=SeqID_82673
cttaaaacattattaagctactttgttcattttgtattggcatggtactgcttgatggttaaactcctttctttctccccgctaaaagtttctgccgcacatactggaactgaggatcaagtcggccctaacaactctgatagtgaagatgtggatgatgaagaagaggaagaggaattggagggttatgattctccacctatgacgtcaaagagccccgccagggaggccgacagcagcgcacgcgtctgcgccggtcatgccgagcaggggcctgcgccggacctgacaaggggtgttgacggcaccagtgacgggagaagctcgaagtgggaggcgctgtcggggcgttag

SEQ ID NO: 40895 - DNA, 435 bp, Zea mays
  Peptide Sequence Number=SeqID_82674
atgacagggggctgcacaggcagagataccggcacaggggagaggcgcgcaggtgcgagagcggccgaggggaaggaggccctcacagccagagaggcagcggagcagacggccaacatgaggaccggcggcgacgaccagccctgtcgagtggagccatgccgcgcgcgccgggttggggtcgaacggcgaaggggagcaggtgcggccgccggggagggaggggcggccgtcgccggtgtggaggcgcgggcgccgccgggccgcgagagcggggcgtcagcagcaggcgtggcggcgccagtgggcgaggggtgcaggaagaagccggtctgcgcgatggtcgtgcgctcggcgacctcgtcctcctccgtgccctgcgaccggttgagggggtcgggcagcagcgacgtgacggggaggcggcggccgtag

SEQ ID NO: 40896 - DNA, 1092 bp, Zea mays
  Peptide Sequence Number=SeqID_82675
ccgtcgccccccgggaggctcatccttccctcccgggggcggcctccctcctcccagccgccgctctacctccctgcagctctccctctcagcggccgcgcgaatggaggttgctgcggcgaagcaactcctccccatggcgcggggccccaactcctcttcgtcctccacctcctctccctcgtctacggccgccgcctccccgtcacgtcgctgctgcccgaccccctcaaccggtcgcagggcacggaggaggacgaggtcgccgagcgcacgaccatcgcgcagaccggcttcttcctgcacccctcgcccactggcgccgccacgcctgctgctgacgccccgctctcgcggcccggcggcgcccgcgcctccacaccggcgacggccgcccctccctccccggcggccgcacctgctccccttcgccgttcgaccccaacccggcgcgcgcggcatggctccactcgacctgcgcagcgacggctctgccccacgcgactggactcgctgccccctgcagtcgcgacaccagccatgggcctcgcggcttctctccccaaccccagatccgggctgcccgagtccgcgccgccgccgcgtacagggctggtcgtcgccgccggtcctcatgttggccgtctgctccgctgcctctctggctgtgagggcctccttcccctcggccgctctcgcacctgcgcgcctctcccctgtgccggtatctctgcctgtgcagccccctgtcatcgcgctagccacctcctaattgctcgcgctatcgccccggcagcgcctcccacttcgagcttctcctgtcaccggtgccgtcaacaccccttgccaggtccggcgcaggcccctgcccggctggacacgccctgccgcccaccccctttctttgccttcgctggatccgtcgctgccgcggccttcccggccggatccacgttgttgcgacctttctggctcgatccgccgtccctttggctggatcgtgtcttcccgactgcatccgtcgctgccgtggccttcccggccggatctgtcgtttccccttctattctgccgcgggcgcggacaccatga

SEQ ID NO: 40897 - DNA, 1548 bp, Zea mays
  Peptide Sequence Number=SeqID_82676
atggagctgagccataacttgatgaagaagggtcccaatggtgccagcaccacatgggaaagaatacaagatgaggatcgaacgccggattccgtctccgtcaggacgttggcaagattaggacgctggcaagattggtggacggtctccctctccccgaacgtcttccaggaccacgccggctcggaccaaggagctgtatccgccgtcgccgcctctggccaacagcacgggacaccggcacgcgggacgccggcacctgatgcgcgcgggacctctgcacagcgcctccggagatctgcacggcgcgggacctctgcacggcgcgcgggacctgatgcctccggagatctgcacggcgcggcaactgctgcgcgcgggacgaggcaggggctaggcggcgggatcctgttgggcggcggccttctccgatgcgacaggaacaaaaacgattcggtgaattataatggcaatgctgtttcagaccaagacctcagcttagctttgcatcaggcctatgcgagctacgactacactctccctctcagcggccgcgcgaatggaggttgctgcggcgaagcaactcctccccatggcgcggggccccaactcctcttcgtcctccacctcctctccctcgtctacggccgccgcctccccgtcacgtcgctgctgcccgaccccctcaaccggtcgcagggcacggaggaggacgaggtcgccgagcgcacgaccatcgcgcagaccggcttcttcctgcacccctcgcccactggcgccgccacgcctgctgctgacgccccgctctcgcggcccggcggcgcccgcgcctccacaccggcgacggccgcccctccctccccggcggccgcacctgctccccttcgccgttcgaccccaacccggcgcgcgcggcatggctccactcgacctgcgcagcgacggctctgccccacgcgactggactcgctgccccctgcagtcgcgacaccagccatgggcctcgcggcttctctccccaaccccagatccgggctgcccgagtccgcgccgccgccgcgtacagggctggtcgtcgccgccggtcctcatgttggccgtctgctccgctgcctctctggctgtgagggcctccttcccctcggccgctctcgcacctgcgcgcctctcccctgtgccggtatctctgcctgtgcagccccctgtcatcgcgctagccacctcctaattgctcgcgctatcgccccggcagcgcctcccacttcgagcttctcctgtcaccggtgccgtcaacaccccttgccaggtccggcgcaggcccctgcccggctggacacgccctgccgcccaccccctttctttgccttcgctggatccgtcgctgccgcggccttcccggccggatccacgttgttgcgacctttctggctcgatccgccgtccctttggctggatcgtgtcttcccgactgcatccgtcgctgccgtggccttcccggccggatctgtcgtttccccttctattctgccgcgggcgcggacaccatga

SEQ ID NO: 40898 - DNA, 2084 bp, Zea mays
  Peptide Sequence Number=SeqID_82677
atgaggaggtggtggccggctgccctgctgggctgcgcagtggcggtgtccgttctggtggccgccgtggaatgcgctgtgacttacgacagaaggcgaatctatggatctgaaatgtgggaagggctgattcagaaagctaaagacggaggcttggatgtcattcagacctatgtcttttggaacggacatgagcctacgcctggaaatgattcggatggtattttttttcgcttcgagcagtactatttcgaggagagcggcttcccagtttggttgaagtatgtaccgggcatcagcttcaggacagacaacgaacctttcaagacggccatgcagggtttcactgagaaaattgtgggaatgatgaagagcgaaaacctctttgcatcccaaggtggcccaattatcctctctcaggcaagtataatcttttccttagatttgattgagaatgagtatgggccagaaggcagggagtttggtgccgcaggtcaggcatatatcaactgggcagcaaagatggcagtcggattgggtactggtgtgccgtgggtgatgtgcaaggaggaggatgcacctgatccagtgatcaatgcatgcaatggtttctactgtgatgcattttctcctaacaaaccttacaagcccacaatgtggactgaagcttggagtggctggttcacggaatttggtgggaccatccgccaacgaccggttgaagatcttgcatttgctgttgctagatttgtacaaaagggtggttcttttatcaattactacatgtatcatggaggaacaaattttgggcgcactgctgggggtcccttcatcacaacaagctatgattatgatgctccaattgatgaatatggacttgttagagaaccaaagcacagtcatcttaaagaactccacagagctgttaagttatgcgagcaggctttggtttctgttgacccagcaattactacccttggtaccatgcaagaggcccgcgtcttccaatctccatctggttgtgcagctttccttgcaaactacaattctaactcctatgcgaaagttgtgttcaacaatgagcaatacagcctaccaccttggtcgattagcatccttcctgattgcaaaaatgttgtttttaacagtgccacagttggtgttcagacatctcagatgcaaatgtggggagatggtgcctcatcaatgacgtgggagaggtatgatgaggaggttgattctctggcagctgctccattgctcaccacaactggtttgcttgagcagcttaatgtcacgagagacagcagtgattatttgtggtacatcaccagtgttgacataagctcatctgaaaactttctacaaggtggcggcaagcctctgtctctcagtgtgcagtctgctggtcatgccttgcatgtctttgtcaatggacaacttcaaggttctgcttatggtaccagggaagatcgaagaatcaaatataatggcaatgctagccttcgagctggtactaacaaaattgcactgctgagtgttgcctgtggattgccgaatgttggagtgcattatgagacgtggaacactggtgttggtggtcctgttgtgcttcatgggctggatgaaggttcacgagaccttacttggcagacttggtcctatcaggttggcctgaaaggcgaacagatgaatctgaactccatagaaggctcaagctcagttgaatggatgcaagggtcattgatagctcaaaaccagcagccattggcctggtatagggcttactttgagactcccagcggggacgagccattggctttggatatgggtagcatgggcaagggccaaatctggataaatggacaaagcattggacgctactggacagcatatgcagatggggactgcaaagaatgcagttacacgggaaccttccgggcacccaaatgtcaatcaggctgtggtcagcccacgcaacgatggtatcatgtgccaaagtcctggctgcagcccaccagaaacctgctggtagtcttcgaggaacttggtggggattcatcgaagatcgccctagtgaagag

SEQ ID NO: 40899 - DNA, 2430 bp, Zea mays
  Peptide Sequence Number=SeqID_82678
atgaggaggtggtggccggctgccctgctgggctgcgcagtggcggtgtccgttctggtggccgccgtggaatgcgctgtgacttacgacaagaaggcggtgctgattgatgggcagaggcggattctcttctccggatccatacactaccccaggagcacccctgatgtaactgcattctacaaaatctcttctccccccactattccctggagaggtttatggctgcgaatctatggatctgaaatgtgggaagggctgattcagaaagctaaagacggaggcttggatgtcattcagacctatgtcttttggaacggacatgagcctacgcctggaaatgattcggatggtattttttttcgcttcgagcagtactatttcgaggagagcggcttcccagtttggttgaagtatgtaccgggcatcagcttcaggacagacaacgaacctttcaagacggccatgcagggtttcactgagaaaattgtgggaatgatgaagagcgaaaacctctttgcatcccaaggtggcccaattatcctctctcaggcaagtataatcttttccttagatttgattgagaatgagtatgggccagaaggcagggagtttggtgccgcaggtcaggcatatatcaactgggcagcaaagatggcagtcggattgggtactggtgtgccgtgggtgatgtgcaaggaggaggatgcacctgatccagtgatcaatgcatgcaatggtttctactgtgatgcattttctcctaacaaaccttacaagcccacaatgtggactgaagcttggagtggctggttcacggaatttggtgggaccatccgccaacgaccggttgaagatcttgcatttgctgttgctagatttgtacaaaagggtggttcttttatcaattactacatgtatcatggaggaacaaattttgggcgcactgctgggggtcccttcatcacaacaagctatgattatgatgctccaattgatgaatatggacttgttagagaaccaaagcacagtcatcttaaagaactccacagagctgttaagttatgcgagcaggctttggtttctgttgacccagcaattactacccttggtaccatgcaagaggcccgcgtcttccaatctccatctggttgtgcagctttccttgcaaactacaattctaactcctatgcgaaagttgtgttcaacaatgagcaatacagcctaccaccttggtcgattagcatccttcctgattgcaaaaatgttgtttttaacagtgccacagttggtgttcagacatctcagatgcaaatgtggggagatggtgcctcatcaatgacgtgggagaggtatgatgaggaggttgattctctggcagctgctccattgctcaccacaactggtttgcttgagcagcttaatgtcacgagagacagcagtgattatttgtggtacatcaccagtgttgacataagctcatctgaaaactttctacaaggtggcggcaagcctctgtctctcagtgtgcagtctgctggtcatgccttgcatgtctttgtcaatggacaacttcaaggttctgcttatggtaccagggaagatcgaagaatcaaatataatggcaatgctagccttcgagctggtactaacaaaattgcactgctgagtgttgcctgtggattgccgaatgttggagtgcattatgagacgtggaacactggtgttggtggtcctgttgtgcttcatgggctggatgaaggttcacgagaccttacttggcagacttggtcctatcaggttggcctgaaaggcgaacagatgaatctgaactccatagaaggctcaagctcagttgaatggatgcaagggtcattgatagctcaaaaccagcagccattggcctggtatagggcttactttgagactcccagcggggacgagccattggctttggatatgggtagcatgggcaagggccaaatctggataaatggacaaagcattggacgctactggacagcatatgcagatggggactgcaaagaatgcagttacacgggaaccttccgggcacccaaatgtcaatcaggctgtggtcagcccacgcaacgatggtatcatgtgccaaagtcctggctgcagcccaccagaaacctgctggtagtcttcgaggaacttggtggggattcatcgaagatcgccctagtgaagaggtcagtctcaagtgtctgtgctgatgtatctgaggatcacccaaacatcaagaactggcagatcgaaagctacggcgagcgcgagtaccacagggcccaaagtgcacttaagatgtgcacgtgggcagtccatttccgcaatcaaattcgcaagctttgggacacctacgggaacctgtggagatttccagcaaggagattgccactcagctaa

SEQ ID NO: 40900 - DNA, 381 bp, Zea mays
  Peptide Sequence Number=SeqID_82679
atgcctcgacagtgcagaggtgtggagacgctgtggatctgtgcaacgacgatttcgacgaggagggtctatgggacagcatgggcgaactggcggaagggtacgacagggtatggcgaaatttcacggacagacgtacagtggcaaacagatttgttctcacggggaagacggagatgggcggagcacggccgggttagagcggatgcggggcccgcgtgccggatgccatcgcctctcccggagagccggtcgcatgtggcaacgcccatgcccacgcacagcgacggatgcggaggtgagctgcttgcgtggggagctgagactgagacagcggcgaacgacgtaggcgtgggttcaagatcagcgagccgtacctga

SEQ ID NO: 40901 - DNA, 213 bp, Zea mays
  Peptide Sequence Number=SeqID_82680
atgccgggtggggcccacggcgccggcgccgcggacccgatgcaggtggaccagccgctcccccctgccgccgcaggcacagcacacgcccccgccgacgccaagctgctgcgtatgggtctatgggacaacatgggtgaactggcggaagggtacgacgaggtatggcgaaatttcacggacagacgtacagtggcaaaacagatttggtag

SEQ ID NO: 40902 - DNA, 1194 bp, Zea mays
  Peptide Sequence Number=SeqID_82681
atgggcgccgaacatggtgtctccggtgagctgcaagcggggcccacgcgatctgaggcggctgttgaacccttcggggggccagccttcgaacctctgatcagtagggaggctcggagcctggttccttcacggggaaggatccctttcgggcatccggcgcgccggttgtgcgacgcgtgggcctgggcctccacgctggcgtgtcgggagtcggagaagcgcgtccacctggcgcggttgcatgccgcctgcatggctgtccgcctctttcgcccgttggtctgggcaaaagtggagggtcacttcccggctgcatccctccaccggcggtcacccaagatggtgacctccagcttgatggtgggggaaagcgagccgggctgcggcctctgctcctccctcagcctcaaggattttcatcaccagggctggggaggagaggaagggcggccgtcgtccgtggcgccggcagctgcaccgtgcctggctctcggacgcgagtggcttcggagccactcgcagtgccggcgtctgccacggcagctggaagaggttcttccgccggcgctgatagccaaggccggccacgggctgacctccaactctacagccttctgcccgtccttgcctcacgagtttgggcatgggcgggggcctcctggcaacagcatccgccctgaggtcagtgctgccgctgttcggccccccggagcagaagtcgtcgtcgtcgccgctgctggagcgggtaacgacaagccgttcgtcggtcttctgttgctccgcaggcccacccctatcgagtggggttactcgtctgttgattatctgaaccgcttcaccaagcatgagtcgccccgtgtcaaggtgacgagtgagggaccccttggccgctcttcgatgagccgaggccagggccgaggcctcaggtcgggctggcgcccttgggagatggtcggccgaggctccaggggcaaccggccgagccgcctgctcgggccggattcctggagaagtccctggcagcgattgcccgggcgtggtgatgacgtcgtccttcggagcggagatcctcggaccgcgtcgccgtccgaggctaggtcgggcctcgccgaaggtgtcgtcgatgccgagggtgttgctgcccccttccagcgtcaagacccgagcctgcagggtcagagtgtcttgtag

SEQ ID NO: 40903 - DNA, 150 bp, Zea mays
  Peptide Sequence Number=SeqID_82682
atgggcgccgaacatggtgtctccggtgagctgcaagcggggcccacgcgatctgaggcggctgtcgaacccttcggggggccagccttcgaacctctgatcagtagggaggctcggagcctggttccttcacgggtgatagtcgcctag

SEQ ID NO: 40904 - DNA, 210 bp, Zea mays
  Peptide Sequence Number=SeqID_82683
atggaggtcaagttccaatttcacccagtggatcccaaccttcatcaatttcgtctgcgcgggctgcatccaagtctacatcagcagactctgtcccaactggagactatgcacttcgatgtagcgtgcaaggtcgccaacgccactatcaaaaggtgggtcctcagctaccaggcaggttgcgaggaagatattgggaggctcaactga

SEQ ID NO: 40905 - DNA, 1419 bp, Zea mays
  Peptide Sequence Number=SeqID_82684
atggcggcacagggaaaacctgtgaacatcggatcaaaaggaaagatagtacttgtcattgattcctcaggtgttgcttctttgctaatgcctaaaggacgaaccgcacattcacgtttcaagatacctttcgacatgaacgaaacagccatgtgtactattaggcgagggaccatgcttgctgaactcatacaggtatcctcattgattgtatgggacgaagtgccaatgacgcatcgacattgctttgaggccttagacagaaccatgcgcgataccctctcggaggacgaacctgcgaacgcgattatcccgtttggtggcaaagtcgttgtcttgggcgacatttccatcagattctaccagttgttcgtaagggatcatgatctgcgattgttaatgcttgctttaccaactctaggctttggcgccatcaaatgggttttatccattggagattgtactattcctgttgagaagatggacgacgaggctgagcctttgtggatcatgattcctcccgatctattgattcacgatgacggtgaaaagggtggcagtgctcatgctcaaatataccctccactcgctgtcgttttcaagcccatgataaaggagggcaatgtctacaacatctcctatattcagatcaagaaagcaaataggatgtaccacttcactgacaggtggatcgtcttgcaaatggtacgtgaatccgcaggttctagaggcaacaagccttgcaaccagcataaaaggagcccaattatgtctgctactggttcaacgcagcgtgtgccgaggatttctaccgctgagcataagaaaaaagttgggtggttggtaacagttaccgttcttaagattgatcaactatggtggtacgagtcctgtagaaagtgcctcaagaaaacaaagcctcatggtgatgcctacaaattctcggacgctggttgtggccatgttggtctgcctaatccaaggttgctcatcacagtaggagatgagacaggcgagactgatttcatactatttggacgtatggcacaacgcattgttaagaaaccacttgacatcttgatcacggataatccagctggatttattcccaatgaaataactaggctgatggaaaaggtgtacacattcaacgtaagcttcacagacagcaccattgctttaggtaatgtgtgcttccaagttaagatgattgttgccaagattggtgatggaggtcaagttccaatttcacccagtggatcccaaccatcatccatttcgtctgtgtgggctgcatccaagtctacatcagtagactctatcccaactaaagcgtgcaaggtcgctaacgccaccatcaaaaggtgggtccacagctaccaagcaggttgcgaggaagatattgggtggctcagctga

SEQ ID NO: 40906 - DNA, 222 bp, Zea mays
  Peptide Sequence Number=SeqID_82685
atgcgggggccctcgcctcggccttcttggggtctcccgctggtgctcgtccgacgtttgggctctaagggttggcgcggcccagaagacctagtttgtgtgttcgtcggcgttgtggaggctctttgtcactccgcttggctcggtggtgtcgaggccattgtcgcttttggcgtctgcttgctcccggagttcggcggtgtggatctttgctcgtggtga

SEQ ID NO: 40907 - DNA, 510 bp, Zea mays
  Peptide Sequence Number=SeqID_82686
atgcctgcttgcgggcggacagcggtgacacccgcgggcgccacccctaccctattgagggtgccgtctttggacctctcaccaccatgcgggaaccctcgcctcggccttcttggggtcttccgctggtgctcgcccgacgttggggctctgaaggttggggctgctgggttggtgggtcggcggacgacaagaggtcttcggaggaaactttgcttggttggtactaggcgggcggcgacgacttttcgacgtcgtttctccttcttgaaggcgcggcccagaagacctctagtttgtgtgttcgtcggcgttgtggaggctctttgtcactccgcttggctcggtggtggcgaggccattgtcgctttcggcgtctgcttgctcccggagttcggcgttgtgaatctttgctcgtggcgaagaatcgaagctgcctcgtgtgggagctcctgccattatgttcaaaaaaatatggagtctattgagtggtttctatgggctaagtga

SEQ ID NO: 40908 - DNA, 492 bp, Zea mays
  Peptide Sequence Number=SeqID_82687
atggagcagggaggggagggaggacgccatggctgccgaggggaggagctcctgcgcttgctgctgtcgccgtgggaggagccttgtgccagccaaaacagagaaaggggagttggcgtgggggagaaggagaagggctggagccgccgacgacacccgccgcctgtgctcgtggccagggtagctccgaccacctccggcgccgacccgcacaccgacgtgaccgtcgcgacctcccggacgtcactgaccaccccgccggagctctactgccgccgttttgaattaaataagaaaaccactcaaaactcaatattagaaggaaaaataggaatattgtttgaccaggactgtaatcttgctgacggagagtacatcctcgtgccggagcaaggagctgctcaggaggtagccccagtgccagcacccgagcctgcaccagaggacctgccagccactgctttggaaggcaagccccggttttatgcataa

SEQ ID NO: 40909 - DNA, 675 bp, Zea mays
  Peptide Sequence Number=SeqID_82688
atggacgtcggcgagctcgctgcccgagctcggacccaaggagatgccgcgccctggctggagcagaggggcccgcgaccaagggaaactccactgtcctctgctggccgtggtgtaaggagcaggaaaaaaaatggcagaggaggggaaatcggcctgcctgctggagggagaaggagagggaggagggaagggcgccatgggggctctgtgtgtcctgctgtattagcgtcgagcaaatggcgaggaggaacggggttccctgctgctggcgtgagggagcagtgggagagctgcagccgtagggaggaagaaggtgagaggagccgccgacgacacccgccgcctgtgctcgtggccagggtagctccgaccacctccggcgccgacccgcacaccgacgtgaccgtcgcgacctcccggacgtcactgaccaccccgccggagctctactgccgccgttttgaattaaataagaaaaccactcaaaactcaatattagaaggaaaaataggaatattgtttgaccaggactgtaatcttgctgacggagagtacatcctcgtgccggagcaaggagctgctcaggaggtagccccagtgccagcacccgagcctgcaccagaggacctgccagccactgctttggaaggcaagccccggttttatgcataa

SEQ ID NO: 40910 - DNA, 327 bp, Zea mays
  Peptide Sequence Number=SeqID_82689
atggacgtcggcgagctcgctgcccgagctcggacccaaggagatgccgcgccctggctggagcagaggggcccgcgaccaagggaaactccactgtcctctgctggccgtggtgtaaggagcaggaaaaaaaatggcagaggaggggaaatcggcctgcctgctggagggagaaggagagggaggagggaagggcgccatgggggctctgtgtgtcctgctgtattagcgtcgagcaaatggcgaggaggaacggggttccctgctgctggcgtgagggagcagtgggagagctgcagccgtagggaggaagaaggtgagaggtga

SEQ ID NO: 40911 - DNA, 579 bp, Zea mays
  Peptide Sequence Number=SeqID_82690
atggggttctcaccgagggccgacggcgtcgtgggcggagctgtctacaacaccaagcctttcacaggcatttcgtcgagcactcccatggcatgcacagcgtgggactgcagggggggtggcgccatggacaaagtcctgcgcatcctgcagcaagggcgccatgccagggtcgaggggagaaaccgagctgggggtcggtcagaggtggaagaagagggcgctgcgggagggagagcagaggcgccgcgccatggacgtcggcgagctcgctgcccgagctcggacccaaggagatgccgcgccctggctggagcagaggggcccgcgaccaagggaaactccactgtcctctgctggccatggtgtaaggagcaggaaaaaaatggcagaggaggggaaatcggcctgcctgctggagggagaaggagagggaggagggaagggcgccatgggggctctgtgtgtcctgctgtattagcgtcgagcaaatggcgaggaggaacggggttccctgctgctggcgtgagggagcagtgggagagctgcagccgtagggaggaagaaggtgagaggtga

SEQ ID NO: 40912 - DNA, 720 bp, Zea mays
  Peptide Sequence Number=SeqID_82691
atggatatgggtacgaggatatggatagttatagctttatgggacggacatggcccatttgtccatctatacctccgcacgataatgattgtcctcgcctcagtttccgccagctcgttcaccatcctgccttcttttctctctcccctatgtctccgcctccgcgccaccccattctcaacagagggcataggagcaggcgtctcctccccgtattcgtctgacaccaaccccgacaccgacccgtgcggctattgcacgtccatgaggacgtttcacagcatgcgcgcaccatcgttttcgccgtcgtcggacgtcccgttcgtcttcctgcccttcgccctgtcctttctccccaacctactgcccccgcccacggttgcagccgcgagccaaccgaggcttatcaacgcgggtatggggcgactcggtcttgctcctggcctttcttcgtgcgtgccgccgatgaggacacggtggcgcttgtcacgcttaggttatcttgtcgatgaggagtccagcggtatactacttatgccgcctccagatacccaggtcttcgtcgtgtccttctccgacaacgaacagggggatatctatcccccacaagcccccgatctttgggttgatttagagaggtcggcattttggattgtaagattctggacttcattgggtgcaccggaggtgcacccaatgggtgtagccctcgacctttga

SEQ ID NO: 40913 - DNA, 552 bp, Zea mays
  Peptide Sequence Number=SeqID_82692
atggatatgggtacgaggatatggatagttatagctttatgggacggacatggcccatttgtccatctatacctccgcacgataatgattgtcctcgcctcagtttccgccagctcgttcaccatcctgccttcttttctctctcccctatgtctccgcctccgcgccaccccattctcaacagagggcataggagcaggcgtctcctccccgtattcgtctgacaccaaccccgacaccgacccgtgcggctattgcacgtccatgaggacgtttcacagcatgcgcgcaccatcgttttcgccgtcgtcggacgtcccgttcgtcttcctgcccttcgccctgtcctttctccccaacctactgcccccgcccacggttgcagccgcgagccaaccgaggcttatcaacgcgggtatggggcgactcggtcttgctcctggcctttcttcgtgcgtgccgccgatgaggacacggtggcgcttgtcacgcttaggttatcttgtcgatgaggagtccaggtctgagatattggacaaacaaggcccgtag

SEQ ID NO: 40914 - DNA, 1407 bp, Zea mays
  Peptide Sequence Number=SeqID_82693
atggtgcgaagtcctgccttcgcgctgaatctgcaaagccgcgatctggccgcctttgtgcgtgaggcggaggatggggcggtgcggctcgttggtcggatttttgaattgaatcaactgccgtatgacggctatcccggccaagacgatgtggaccgccgtgggaagaagccggtggtggagactggagacgaccctgcgccggcggccgccccatcctctaaaaagaggaaattagggtcggacgaaggccaacttgctgttgttgcgcctgccgcggcaaccacggcggctgccgtagtgccgaaggcgaaaggcggtgctcttagcaccggaggcgagatgtcggcactcgcggccgtcagggatgaggcgggcactgtgtcccgccggctgaaggaggtgaaggaggcactaagtcaggcggctgacttcgccgaccgcacagcgtcgggggcccttacggcagttgtgtctgccgaagtcgagagacttcggacgcaacatgctgacgccgtctgtgaaaaatcggccaccgacagtaagtgccgcaagctggcggacaaggtggccgcactggagggggagaagactgacctccggcgccaactggcgggggagaggagggagaccaacgaggccctcgccaaggcacaggctgcgcaggcggaggccaaactggcgcgggcggagggcaatcttgccagggagcgcgccgagcagctgcaggagcggctcatcgccatggagagccgtgtggagagggccgaggccgcgacgtgcgcggaggctgagcggacacgcaaacagcttatggattcataccatgagctgggcgcgcggaccggtgacttcgaagtgccggaccgagagcccgaacttcgctgcctggagtggggggcgatgaacgcgctctcccgcgaagggtgccggcactttgaggtcttcgaccaagctgatgaagattttgagcgagatatctacagggttgaggaccccatagtgaaggaatccgccggagccatctacgaccggatgtggggtccgcacggtcacgaggtggtcagggagcgggccgagacggcgagggctcaggcggcgcgcggcgagagggtggatgacttcggggcgttgaactgcgcgctgcctgacccggagccgatcccggcggaggccgtgtccggggccaccctggagccgcccccggagactgcggaaggcgctccggatgcccccgcatctgctgcggccggcggagacctgcccccagagaccgccgaaggcgcgcctgatgcccccgcagccggtgcggcgagggctgaagatcctgcggcggtggcggcggaggcgacagtggaggcaacgacggaggctcccgcaacggctgggtcttcgcaggtggcgtag

SEQ ID NO: 40915 - DNA, 2478 bp, Zea mays
  Peptide Sequence Number=SeqID_82694
atgtggagaaggtcggcaacgacggagctatggatgtcggcgcggagtcgcttgcctgcaccgaaggcgatatcgtcgaagtcgatcgatgaaggaagccggaagtcgcctgcacggaagaccccatcgaagaaccgcacgaacaataaaaaagtcatatgtcctcatgtctatgagcccagagaaacccgcgtcgataggaaggaaaccccagtgaccacgccgtccttccttgcgtctgaggcgactcgccagcgatttccgccgctccaatccagcgccgctccaatccagctgagctctttcaatctccgagcattggagctcgattcaagagccaatgctttcccagaagttccagatgtttatgaacattggacaagatttattcagtgtttaatcatgagatctgttgatcgccctccaagtaatccaaaaagactaaccattgagtccagtcaggagaaattgaatatccgctgcattccttatgatgttattgtctcaacttggataatgagcgatcggcagcgcgatgcagtcgctaggttgggattttctagtatatttgatttgcgaactgatgccttagattgcagatctctcatcaggtggttgatggataaattggatccacatgacatgaccatacgcccaggggctggcaaggaactgaagataacaaaagagacggttcgtcttattttgggtttgccatgtgctggagggggcagggagtttactgattggtatggtgaagtgaatgctgctgcaaaactgagacatgatctcaaagttggtaaagaagaatttgatgttgtcaagcttcaggacaagatagtgcttggcaatgatgatcagttatcaatcagatgcttttttctgattctattcaatcgacttctttttccatctgcttcatggggcattacaaacaatgaagtactaatgacttcaaacatggcccgaatggctgatattgactggtgtcaactagtttacacggatttgtgtgatgctgccacacgttggcacaaaaggaacaaaacaaatattactgcaacaatatatgggtgctcactcattgttctaatttactatcttgatcacttacatcaccctgcatctcctgataacaaatatggtactccccgcattaagttttttgataatgagaccataagagatttggccaggggtgacagacgtcccccccgtaaaactggtgaaccattcggccatgcagagcatcgaccaatgtttgaatcaatgtttgatgctcatgacaaagaggtggataagtactatgattctcttcagctgagccatcagatgattgtttcgaagcagattgaactatctgaaacatttggtgaaatgatcgatgaagtcctgagggctgcaacgcagcgcgattcacagcaagaagatatcccccccactacctcaatgcatccaacaaatgatccagtatccactccatctgttccaacccctgataatcagcaacatgatcaggaaatacatgttcctactgatgatatcaaagtatcagaacatgaaggacaaaaaactgttaaacatgatactcccgtatctggtgcaccacagtttgacaaaaccccattgacagaagcaactactgaacttgttgaaaaggatatttcctctaaatctgcagttgctgaacctccccacatatcacgtgaagaatgtgctcgcaaactatttaagttcattttatcaggacaactagatccaagcatgactattatgattttgaaggatttggaggttctgtcctggatgttgtccaatcgtttggtcctaataaatgccttgagaacattttcatgcaggcatttatcgaataccgttttgaatatcgaggagttcgaacagcacagttcaaatccccagcccttctcaacatcagttcttaaagaacaactagaaccgacgcttcctccagatgaagttctgaaccaaataaaattgatcctggttcctatgctacgccgtagtcattggaccctttatgcaatcaactttcaacttcgtcgaatagacattttagattcaaatccttatgggacattgcttggaggcactacctggaaacaaatccacaatgatcaattgttgataaatggaacgaagataccttggtccagattaataatgagaagacttagcattgcgttacatgaagctcgaccagatacaagtttaccaaagtttggcaactacaagattgggcttcttcccaattgtccaaccatgttaccagggtcaaacgattgtggtttttttgtcgcaaacttcctccgatactatgattttgatgatggcgacttatcagaattttatgtaccggatgaaccattggaccaacgcgcttttgttctgcattacctgacctttcatcgcaacaacagggtttaccccatcccggcagaactgctgcctttcaaatag

SEQ ID NO: 40916 - DNA, 252 bp, Zea mays
  Peptide Sequence Number=SeqID_82695
atggcgtgttgcatatgcttattcacacatgcagccacgctgctgctgctgctgagtgctgacgacctcagcgttgccatgtgcttaattttatgcccgtgtgagagcgacttctggcttccttcatcgatcgacttcgacgatatcgccttcggtgcaggtaagcgactccacgccgacatccatagctccggcgttgccgaccttctgcacatctccgcagccaagcaactctgcgtcgccgcaacatag

SEQ ID NO: 40917 - DNA, 336 bp, Zea mays
  Peptide Sequence Number=SeqID_82696
atggcagcaagcctctcccatgcgcaacagcaaatcccatgcagcgagctcctcccccatgcggtgtccggccaccacttcttcacctgcgcaggatcccctagcccaaccccttgcggcgggagcacagccgacgtttctcttggtgctcagctcctaggcgcagatccctacatgaccgagcatctccatggctggcgctcccctttccttggtgccccatggctgctcgttcagctagtggtcgacgtcgcgctttgctcgttcgacgaaataccgagccatgtggacagccatgcgcctagtcacgactcgttcaggttgattgatttatag

SEQ ID NO: 40918 - DNA, 117 bp, Zea mays
  Peptide Sequence Number=SeqID_82697
atgccgtcaaaacccttgctagtggtcgatgtcgtgctttgcccgttcgacgaaataccgagccatgtggacagccatgcgtctagtcacgactcgttcaggttgattgatttatag

SEQ ID NO: 40919 - DNA, 762 bp, Zea mays
  Peptide Sequence Number=SeqID_82698
atggcgcagcagcaaatcccatgcagcgagctcctcccccatgcggtgtccggccaccacttcttcacctgcgcaggatcccctagcccaaccccttgcggtcggagcacaaccgtcgtttctcttggtgctcagctcctaggcgtagatccctacatggccgagcatctccatggctggcgctcccctttccttggtgccccatggctgctcgttcaggtgtcctgctccacctcgcacagcgcctgctcttcccctactcgaagcttgccatggcgccccctgctcccagccatggcgcccaaaaaaatcccccagccgagctccctgttccctgctccatggctcgagctcgagtttcctcatggcgctccccctgtccatggctgccagcccttgctccccttcgccccactgcgcagcagctctgcgctccaccccctgcaatggacgctgcgcgagatccccctggcgcctctgtttttcccagccgtgcagctccctattcgacttccatggccgcccagctcccatggacgcccagaaattccagcagtgagcccccttcctcgctgttcgtcgtggtgcccgccggatgttcgacaaaatgcgcagcaagccgcgcgatgcagcagcccatctgcgacgccgtcaaaacccttgctagtggtcgacgtcgcgctttgcccgttcgacgaaataccgagccatgtggacagccatgcgcctagtcacgactcgttcaggttgattgatttatag

SEQ ID NO: 40920 - DNA, 126 bp, Zea mays
  Peptide Sequence Number=SeqID_82699
atggcggcgcagcagcgagcccccttcctcgctgttctccgtggtgcccgccggctgttcgacaaaatgcgcagcaagccgcgcgatgcagcagcccatctgcgacgccgtcaaaacccttgctag

SEQ ID NO: 40921 - DNA, 654 bp, Zea mays
  Peptide Sequence Number=SeqID_82700
atgtggacccattggccatccaccacatcatgccgcaaccagctgcagttaccaccaggcgccgacatcctgactccacgtggtggactcacatcgtccgcgcacctgaacaccccgtccttaccaatgggcccgcttggtcatacgaccatcagtcgcgtcacctacgttctgggcccgcggatcagaccttctcccaccagggttgttacaaccaacactgccatatgcggcggcgctctggctctccacccggggatttcggcctcacgtcgcacgcctcgcctggagtctggattcgtgggctatacaagccaatcgtgcgcacatttcttcttccccaaccacagacgtgaaccaaagctgcgctgccaagaaccgtcagtcgtcgtgagagggggaaaccagctcattgtggcagaatcttgcgtctgcgggccgatagccagccggggagctcaagcagggtcgcgcgggtgcccagacgatgagtcagtggccgagaattcaggtgttcagcaggtagaagttgctgagcaggagctcattgaaggtatccggaaccgcgcaaggtcccgactaatccttgttggtgcccctacgcaaaggggagcccacgcgagggccaagcacctcggtcgagtaactccgtag

SEQ ID NO: 40922 - DNA, 417 bp, Zea mays
  Peptide Sequence Number=SeqID_82701
atgaagagggcaatcagccagcgcactggtggtgcaccggatagtgaacagtacctctccggtgtgcaccgggactgtccggtgggacagtcggacagtctgcgcagaaaggcccataccgggcgctctgaggctgtagcaccggactgttcgggcatccgactgtctggtgcacccgtcgacagaaagcggctgcttctatccaatggctataattgtgggggaggctataaatacccgcaaccaaccatttcaagaagctcgtcagtggagacggcaaggagcatccgagaggagccggaagcggagcaccacttgcgcgtggagaaggctcatgactctctacttagttactcgaccgaggtgcttggccctcgcgtgggctaccctttgcgtaggggcaccaacgaggattag

SEQ ID NO: 40923 - DNA, 201 bp, Zea mays
  Peptide Sequence Number=SeqID_82702
atgtcgcgcgcgttcgacgactactatatcaaggactgtggtgtcatctcggcgctggaagtgacgcagaggaggaccgacagcaatgaccagttcgtcatcctcgccaccgttggggtgtgggacgtgctctccaatgatgagacgatgcaaatcgtggcatatatcaaagtctgcatgttattgatggttgcaatgtag

SEQ ID NO: 40924 - DNA, 216 bp, Zea mays
  Peptide Sequence Number=SeqID_82703
atgtactacctcgctgatgagcccggggtgcacttcgtctggcagctcagccaagagtcatcggtactcgctatgtcgcacgcgttcgacgactactatatcaaacactgtggcgtcatctcggcgccggaggtgtggaacgtgctctccaatgacgagaccatgcaaatcgtggcatatatcaaagtctgcatgatactgatgatcacaatgtag

SEQ ID NO: 40925 - DNA, 261 bp, Zea mays
  Peptide Sequence Number=SeqID_82704
atgaggtccccaccaccatcggccatccctacaaactccacatcatcgaaggctcccgaagtggatgtccgctctgggggtatattcaatgcggggccaccgctggccctcgtggtcgcgccaagaatcctcgacggaggaggtcaggcttcaacgtccctgaccgcctcgccttcaccgatgaaggggaagtcaaggctcccaaaacggatgtcattttgggagacagattggtgtcgcggttggccatccggagcttga

SEQ ID NO: 40926 - DNA, 603 bp, Zea mays
  Peptide Sequence Number=SeqID_82705
atggaggtcctagacctaactcgggggtccggtctgcttatacaggggtccggtacttttccatgggggtccggggccactgttaatacctcggagggtattgtcttctctggccatgtggcggctctggagccgtccacgtggtggggccgggtgctgctcatcacgcgactagagatagccgcacgggcaccgcaccttcatactgtagtaaggggtacccctgttccagggtaccgacatagtcaaattcctaattgcactggtgcaacccgattcagctgggttgattgcaattatacactccgatccgagtccgagtccgtgcagagtgcatcgaaaatgaggtccccaccaccatcggccatccctacaaactccacatcatcgaaggctcccgaagtggatgtccgctctgggggtatattcaatgcggggccaccgctggccctcgtggtcgcgccaagaatcctcgacggaggaggtcaggcttcaacgtccctgaccgcctcgccttcaccgatgaaggggaagtcaaggctcccaaaacggatgtcattttgggagacagattggtgtcgcggttggccatccggagcttga

SEQ ID NO: 40927 - DNA, 537 bp, Zea mays
  Peptide Sequence Number=SeqID_82706
atgttttgcatgggtgaaagacaagctatcttagcccgtcaaaacaagaaatttgaagcaaacattgcacgtaacgtggctactttgactgaggatactatcagtgacgtcggaaaaatggatgattcgacacagcccggttcaactatagagatcaacaacactgtacaatataggaatacacgccaaagtgcaatcgtggcaacaaatgggagtgcaaacatggtcgaacaaggaagtgggttggagcaaagccagtcgatcccaaggttcatttccaatgttgatgacgatgatgagggtgtcatatttagagaggataatgatgagaacgagggatatctattcgccgatgaggagactaacaaggacttcgagatagatggtactcaaaatcaatctattgccactgatgtgcctgacccgtacgacaaggtgtacagtaacatccctgaagaaacacatatgttgaagcatgtttccgactatggttattgcactgcgaagaagtttgagtatgagccgcctgggttttga

SEQ ID NO: 40928 - DNA, 1461 bp, Zea mays
  Peptide Sequence Number=SeqID_82707
atggagttgtatatgacccaacaaactgtcatagagccatacgctgtcccagttcaaatgccaccatttccaaaacatatattcttgaaccttgatgatattgccgagttgccaaacatgactttagttgacattatggctattgtagtccacttggatacaatccatcgcacaatgtggggtatattcaggaagattgttataatggatgctagtgtctcgaatcaactgaccatacaacaatacacttcaaaccgttccatcacaacacccattattttgaacatcagatgggacataatgccgctcgcaaaccattcacagacatctctagcaatatcattagaggttatccctgaatacaccagtacacctttcatgccagcttcaacaaagaccgaggatatcagttcacacaatatgtctaatgagacattaagacgtaaacaccatgttttgcatggtgaaagacaagctatcttagcccgtcaaaacaagaaatttgaagcaaacattgcacgtaacgtggctactttgactgaggatactatcagtgacgtcggaaaaatggatgattcgacacagcccggttcaactatagagatcaacaacactgtacaatataggaatacacgccaaagtgcaatcgtggcaacaaatgggagtgcaaacatggtcgaacaaggaagtgggttggagcaaagccagtcgatcccaaggttcatttccaatgttgatgacgatgatgagggtgtcatattcagagaggataatgatgagaacgagggatatctattcgccgatgaggagactaacaaggacttcgagatagatggtactcaaaatcaatctattgccactgatgtgcctgacccgtacgacaaggtgtacagtaacatccctgaagaaacacatatgttgaagcacgttcccgactgtggttattgcactgcgaagaagtttgagtatgagccgcctgggttttgctgtcgaggtgggaaggttgagctagccccactagagacccctccccaactcaggaggttttttaatggccatttttctttcacttccctgtactgttgcatcgatagtatgacaactaatatgagggattctggtatatacacattccgtgcacaaggcatgatgtaccataatatcaagtcattcggtagtgaatgtggggcagagcataaacacctagagctttacttttacgatgatgatcccagtctcgagcatcgataccataagtgtcgtgaagatcagattcagaaagaccaagaggttattaaacagatagttggcatacttcatggaaatctgtactctgagcaccttaggagcatgggtcatgttgagaaccttgctgactatcacatcgcattgaaccttgaccagacgttgaaccagaagacatataacacacctctcacttcggaggtggccgctgtctag

SEQ ID NO: 40929 - DNA, 588 bp, Zea mays
  Peptide Sequence Number=SeqID_82708
atgcagaagatgaaggccaggaaggagagcggcgggctggtggacctcgtccacgacatttcggccaagtcagttaccacagctatgcaaagactacctcgttttataaatcattttgttagaaggaaaaagagtataatcaactctatacaaagttctcagctgggcgccgcgacggacgggttcagctcgcagaacctgctcggagaaggcggcttcggacgggtgtacaaagggctcctcgaggacaccgaagaggttatcgccgtgaagcatctgaacagggacggtctccagggcaacggcgagttcctcgtcgaggtgctgatgctcagcctcctgcaccacccaaacctcgtcaagctgctgggctacagcaccgactccaaccagcgtccatgtgcctgcaggaggacgctgccacccggccggggatcagcgacgtcgtcgcggcgctctccttcctcgccgacccgcaatactaccatcccgaaggcacgagagctgagcacaagagcacgcatagtgggacagacaatgatagcagtcctcctagggctgaaatggtcagggcagacgacgacatga

SEQ ID NO: 40930 - DNA, 843 bp, Zea mays
  Peptide Sequence Number=SeqID_82709
atgcatcctatagctccattctggaaccattgttatgccaccaggatcaccgccactaaccatctcatgcaagattgtgcggatttggtaaagggaaccaaggacaagcatttgagggttaagatacctgacaggatccgtactaaggttctccacatcaccactcgcgtgtccccttgcggtgaaggcacatggacgctggttggagttggtgctgtagcccagcagcttgacgaggttcgggtggtgcaggaggctgagcatcagcacctcgacgaggaactcgctgttgccctggagatcgtccctgttcagatgcttcacggcgataacctcttcggtgtcctcgaggagccctttgtacacccgtctgaagccgccttctccgagcaggttttgatggagccagccgtattgaaccgtgaaagagttgcattggacaagaaaaacaggatgcctatgttgttcgacgactatagcgatgaagatttttatggggtacaacggaagtatagtattgtcgctcgagttgaagttaaattcccgattgaaccacgttatcgtgacaggcaacattacattctgtctgacatcaatggagccaagatcgtggccattgcaactcggtatgagatagtcaaatacttcaacagtttgctccatgaaaagcatgtctacaagatgcacaacgtatggtttggtcttaatctgggtgcattaattaattttcgacatctaaatggtaccatggagttgtatttcacccaacaaactgtcgtagagccatacgctgtcccagttcaaatgtcgccatttccaaaaacatatattcttgaaccttga

SEQ ID NO: 40931 - DNA, 480 bp, Zea mays
  Peptide Sequence Number=SeqID_82710
atggcggattttgatacccatgggtattttattgggtcatttgttatgcccatcgggtatggcgaagcttccgaaaaacgcccgccggaaggagctccacccccctacctgcccgcgctggcaggaactccggccgccgcgtcccggtgcctgacggacactgggttcacccgtgccgcccctgcctccacacacaaaaaaactgcatctccacactaccaggattcttccgggcgcttcccccctcccagaatccccctcctcacactgtacctcactgccatgcccttgctgctgcctcctctccttccccgtcgcctctgtgccgcggtgactcccgccgcagagcaggtggacgtggagatgatgaatgactcggaacggatgttcacgcagatgtccctcaccgacgacacgcgcctcgcgtcgatgctcgccagcatccctccactgcgccgtcacttcgcttccgtgttctga

SEQ ID NO: 40932 - DNA, 419 bp, Zea mays
  Peptide Sequence Number=SeqID_82711
gcgaagcttccgaaaaacgcccgccggaaggagctccacccccctacctgcccgcgctggcaggaactccggccgccgcgtcccggtgcctgacggacactgggttcacccgtgccgcccctgcctccacacacaaaaaaactgcatctccacactaccaggattcttccgggcgcttcccccctcccagaatccccctcctcacactgtacctcactgccatgcccttgctgctgcctcctctccttccccgtcgcctctgtgccgcggtgactcccgccgcagagcaggtggacgtggagatgatgaatgactcggaacggatgttcacgcagatgtccctcaccgacgacacgcgcctcgcgtcgatgctcgccagcatccctccactgcgccgtcacttcgcttccgtgttctga

SEQ ID NO: 40933 - DNA, 738 bp, Zea mays
  Peptide Sequence Number=SeqID_82712
atggaagaaacacacctccacgtgttcgacgcttcctgcccgcgccagagcacgctcacgtgcgcccccgcatgcccagcgccgcgcccgagccaagccagcgccgtggcccgcgcccgcgcctataaagccctcccaagcttcgactgcactcttccgcgcaccctcaaacctcaccggagtttagctcgccgccgtttgcccgtgcgcagcgtgtccgcggccgcccaatccctctgtcaccgtagaccggccaatagagccattcccaaccccgtccagccctcggagaagactgtgcacatctccgtgaagctccccgagcgaggaatcggagtttgcttcgccggagaggccagtccacactcaccggagctctcaaccccgccggaatacgtggaccggttctccgtggtttggccggtacactcgccgccgacgagaacacccgcctgcgcgcgtggaccgggcgattccggccatccccgacgtcaagccgtacctcgacgtgaccgccagagtctccccgagccaaccccacccttcgccggacctccctcgccgccgcagattgccctcctcacgcgacctgagacgaggtctcccattccggttatggtgggtacaagtgcggtcactgcacgacggccagtcagggtcagtgaggcattgtacgccaaggcggtttaccttgcaaggataaaaactcgatttgaatcgtctgcttctcgcagctaa

SEQ ID NO: 40934 - DNA, 549 bp, Zea mays
  Peptide Sequence Number=SeqID_82713
atggttaaaaattttggcaggaaaacagtgcaaatagcaatgaatgctgtggtaacttcacacctactcgtctgtttatatagtgctgcaggtgaacagtacccccgtactgttcacgttgacttggcatttgcttttgcgtcacacttgtattttcatctccttccaagccgaagttgctttatgttgtgttggcataaatcaccaaaaagggggagattgaaagggaaatgtgcccttgggccatttctaagtattttggtgattgagtgccaacgcaagtgcttttgtgttgatctatgcaatgtggtggacaaagtgcaaatcaagtcaaaagtgctggaaacaggaaagattgaattggaaatgagatggctatgttcagccaaagtcagctcggtctgggtgcaccggactgtccggtggtgcaccggacagtgtccggtgtgccaggctgactctggtgaacttgctactctcgggacttcggcggcggtgtacgtctataaatcaccggactgtccggtggtgcaccggactgtctggtga

SEQ ID NO: 40935 - DNA, 342 bp, Zea mays
  Peptide Sequence Number=SeqID_82714
atggcgctcttcggacgcaggttgaaggatgcacgccaaaatttacaggacggagatgttgatctcaccttagggatcgtgcgtggaagggatgggtgcccgaggcactggggatgggtgaaagggaaatgtgcctttgggccatttctaagtattttggtgattgagtgccaacgcaagtgcttttgtgttgatctatgcaatgtggtgaacaaagtgcaaatcatgtcaaaagtgctggaaacaggaaagattgaattggaaatgagatggctctgttcagccaaagtcagctcggtctgggtgcaccggactgtccggtggtgcatcggacagtgtccg

SEQ ID NO: 40936 - DNA, 357 bp, Zea mays
  Peptide Sequence Number=SeqID_82715
atggggaagcctgtcccatcactcctcatgctcctcctcagccgagcaatcaacaacttttgccaagtcatcacatttccacttgttactcaatgtagcagcatggatcaagcagtctcattagctgcgagaagcagacgattcgaatcgagtttttatccttgcaagatcagggctcaccgccttggcgtacaaggcctcactgaccccgactgccgtcgtgcagtgaccgcacttgtacccaccataaccggaatgggagaccacgtctcaggtcgcgtgaggagtaaagtctgcgggcaggttcactcaggtactaggcttaccgatttaccatatttctcggcatatgtttag

SEQ ID NO: 40937 - DNA, 357 bp, Zea mays
  Peptide Sequence Number=SeqID_82716
atggggaaccctgtcccatcactcctcatgctcctcctcagccgagcaatcaacaacctttgccaagtcatcacatttccacttgttactcaatgtagcagcatggatcaagcagtctcattagctgcgagaagcagacgattcgaatcgagtttttatccttgcaagatcagggctcaccgccttggcatacaatgcctcactgaccccgactgccgtcgtgcagtgaccgcacttgtacccaccataaccggaatgggagaccacgtctcaggtcgcgtgaggagtaaagtctgtgggcaggttcactcaggtaataacatgcttctgtgcgaaaaatcacagaaggttacttag

SEQ ID NO: 40938 - DNA, 264 bp, Zea mays
  Peptide Sequence Number=SeqID_82717
atggcaagaaagcgtgccaagtgtgctcacggtaccttcggacttaggacaaaactacagtgtgaagaagcacaaagactacgaaggatggcgcagagccaaagctatgcgcaggaaaacttcggcgtgataacagaaaagggaaccgacttaaaagggaaaagactatttagaccccgatggacgatcatagagttattagcaaatgtaaagggcatgggtgtaattttacatgggttacgtcccgtgcctataaatagatga

SEQ ID NO: 40939 - DNA, 273 bp, Zea mays
  Peptide Sequence Number=SeqID_82718
atgcagatcaaccaataccccttcgtcgtgcctcctttgcgtaccttcggacttaggacaaaactacagtgtgaagaagcacaaagaatacgaaggatggcgcagagccgaagctatgcgcaggaaagcttcggcgtgataacagaaaagggaaccaacttaaaagggaaaaggctatttagaccccgatggacgatcatagagttattagcaaatgtaaagggcatgggtgtaattttacatgggttgcgtcccgtgcctataaatagatga

SEQ ID NO: 40940 - DNA, 405 bp, Zea mays
  Peptide Sequence Number=SeqID_82719
atgctaaaccaggactcaattgccattgagaacccaaagtttaccccggagcttcagtggagtccagcggattctcaagcgcctcatgggtctctgtcttgctccaaggacatggtcatctctgagttgagcgcaataccttttgttcctgctccgtcgcagcctgaggatgttgaggaagacaaaataacacagtctcctagacgaaaacgacataagcgtcatgtatcgtctggtgaaaaacagaacctggtatctcgtcaaaaccagaaatgtcaatctacaattggaggaaactttgctactgcaactagggatcgtgaaatggataccaatgagaacaatgaaattgatcatccgactgcttctgagattgatacaatggttatactaatccatctttaa

SEQ ID NO: 40941 - DNA, 705 bp, Zea mays
  Peptide Sequence Number=SeqID_82720
atggacccgtttcaaaataatgatgttccttatccattaagagaattgtctagcaacactgttgaaggagaatgtgttgatgcaagtcaacattgcaatatccctataaacaagaataactctcatcaaagcaccaatattgaggacataaactccatacatttgtcagaagttttagatgcaagggaacgtaagagaatccgcgaaagaactcgatttgcaactcaaacaacggaacaaagggcattgcgtaatagggaatcatgtaataagaaggcaaggaaagactatagaataagacaacgaggaatgctaaaccaggactcaattgccattgagaacccaaagtttaccccggagcttcagtggagtccagcggattctcaagcgcctcatgggtctctgtcttgctccaaggacatggtcatctctgagttgagcgcaataccttttgttcctgctccgtcgcagcctgaggatgttgaggaagacaaaataacacagtctcctagacgaaaacgacataagcgtcatgtatcgtctggtgaaaaacagaacctggtatctcgtcaaaaccagaaatttcaatctacaattggaggaaactttgctactgcaactagggatcgtgaaatggataccaatgagaacaatgaaattgatcatccgactgcttctgagattgataacaatggttattactaa

SEQ ID NO: 40942 - DNA, 396 bp, Zea mays
  Peptide Sequence Number=SeqID_82721
atgctaaaccaggactcaatcgccattgagaacccaaagtttaccccggagcttcagtggagtccagcggattctcaagcgccgcatgggtctctgtcttgctccaaggacatggtcatctctgagttgagcgcaataccttttgttcctgctccgtcgcagcctgaggatgttgaggaagacaaaataacacaatctcctagacgaaaacgacataagcgtcatgtatcgtctggtgaaaaacagaacctggtatctcgtcaaaaccagaagtttaaatctacaattggaggaaactttgctactgcaactagggatcgtgaaatggataccaatgagaacaatgaaattgatcatccgactgcttctgagattgataacaatggttattactaa

SEQ ID NO: 40943 - DNA, 285 bp, Zea mays
  Peptide Sequence Number=SeqID_82722
atggtcatctctgagttgagcgcaataccttttgttcctgctccgtcgcagcctgaggatgttgaggaagacaaaataacacagtctcctagacgaaaacgacataagcgtcatgtatcgtctggtgaaaaacagaacctggtatctcgtcaaaaccagaaatttcaatctacagttggaggaaactttgctattgcaactagggatcgtgaaatggataccaatgagaacaatgaaattgatcatctgactgcttctgagattgataacaatggttattactaa

SEQ ID NO: 40944 - DNA, 396 bp, Zea mays
  Peptide Sequence Number=SeqID_82723
atgctaaaccaggactcaattgccattgagaacccaaagtttaccccggagcttcagtggagtccagcggattctcaagcgcctcatgggtctctgtcttgctccaaggacatggtcatctctgagttgagcgcaataccttttgttcctgctccgtcgcagcctgaggatgttgaggaagacaaaataacacagtctcctagacgaaaacgacataagcgtcatgtatcgtctggtgaaaaacagaacctggtatctcgtcaaaaccagaaatgtcaatctacaattggaggaaactttgctactgcaactagggatcgtgaaatggataccaatgagaacaatgaaattgatcatccgactgcttctgagattgataacaatggttattactaa

SEQ ID NO: 40945 - DNA, 558 bp, Zea mays
  Peptide Sequence Number=SeqID_82724
atggtcatctctgagttgagcgcaataccttttgttcctgctccgtcgcagcctgaggatgttgaggaagacaaaataacacagtctcctagacgaaaacgacataagcgtcatgtatcgtctggtgaaaaacagaacctggtatctcgtcaaaaccagaaatttcaatctacaattggaggaaactttgctactgcaactagggatcgtgaaatggataccaatgagaacaatgaaattgatcatccgactgcttctgagattgataacaatgataatcatgacgaggatatactttttgaagctgatgatgacgaagaagagggatacctgttcgcttatcaagatggtgaatccggtgaggatatcaatattgatgatacccaagatgcctttgctgtaacccctgacgtacctgatccgtatgacaaggtgtatagtaacatacctaaagaaacacatttgctaaacgctgttgctgactgtgactactgtaaagcgaagaagtttcaatatgaaccacctggattttgttgtcgtaatggtgagagcacctag

SEQ ID NO: 40946 - DNA, 4587 bp, Zea mays
  Peptide Sequence Number=SeqID_82725
atggacccgtttcaaaataatgatgttccttatccattaagagaattgtctagcaacactgttgaagaagttttagatgcaagggaacgtaagagaatccgcgaaagaactcgatttgcaactcaaacaacggaacaaagggcattgcgtaatagggaatcatgtaataagaaggcaaggaaagactatagaataagacaacgaggaatgctaaaccaggactcaattgccattgagaacccaaagtttaccccggagcttcagtggagtccagcggattctcaagcgcctcatgggtctctgtcttgctccaaggacatggtcatctctgagttgagcgcaataccttttgttcctgctccgtcgcagcctgaggatgttgaggaagacaaaataacacagtctcctagacgaaaacgacataagcgtcatgtatcgtctggtgaaaaacagaacctggtatctcgtcaaaaccagaaatttcaatctacaattggaggaaactttgctactgcaactagggatcgtgaaatggataccaatgagaacaatgaaattgatcatccgactgcttctgagattgataacaatgataatcatgacgaggatatactttttgaagccgatgatgacgaagaagagggatacctgttcgcttatcaagatggtgaatccggtgaggatatcaatattgatgatacccaagatgcctttgctgtaacccctgacgtacctgatccgtatgacaaggtgtatagtaacatacctaaagaaacacatttgctaaacgctgttgctgactgtgactactgtaaagcgaagaagtttcaatatgaaccacctggattttgttgtcgtaatggacagattgatctagctccattcgagacaccgtcccagcttaggaggttgtgggggtgtgcagatgctgatgcgaggcacttccgtgataacattcgattttttaacgactatttctcattcacttctttgtattgttgccttgatagtatgactacaaacatggattgtggtatctacatgttccgtgcacatggcatgatgtaccacaacttaaggtcgttcggtagggaagttggggcggaacataaacaccttgaactttacttctatgatgatgatcccagtctcgagcatagatatcgtaaatgtcgtcaagagcaacttgagaaagacaaggcagttattaaacagttggttgaaatacttaagggaaacccatactctgagcaccttaggagtatggggcacgttgataacattgaagactaccatatcgccttgaaccttgaccaaacattgaaccagaagttatataatgtacccatcacttcggaggtcgctgcagtttggattgaggggagtgaacgtcgaggtcaattcagtaatagtgttatgctgcatgggaaggataggtcaagccacggaattcgttcatatcatggatgctatgatgcactatcatatccattgttcttccctaaaggtgaacttggatggcatgccaatattcctaagtccaatgtttccatggacgaagtagacgcgtaccgcgatcaacataggagaagtgatgcaaacaatgatgatacagaacgacctagccatctatgcgtgtctgtacgtgactattactgctacagattccaaattcgtccaagtatattcaatccaatacttcatgggaagcggcttttccaacagttcgcggttgacacctacatcaagattgagagctctcgtttggatttcatacgtaaaaatcaagacagattaagggcggatctatacaagggtttggtagatagcttgcatgaaggcgagaacagagcagacaaaattggaaagcgaaccgtgctgtctacatcatttatcggtggtcctcgtgacatgagacgccgatatatggatgctatggcccttgtgcggaagtttgggaagccagacatattcctcactatgacgtgcaaccccaattgggatgaaataacgagagagcttctccctatgcagtcaccacaggatcgtccggaccttgttgttcgcatattccgtgcaaaactagaggaactgaagaagagattgactaagcatgatattcttggaaaaatccgggcttatgtctatgtcgtggagttccagaagcgaggtttgcctcatgtccatttcctactcatcatgcagagaaagtacaagctaacttgccccgatcagtatgatctccttatctccgctgagatgcctgacaagaagaagtaccctgaactatacaagatggttatcaagcatatgatgcatggaccgtgcggattgctaaatcctaaatgtccatgcactaagggtcgtgcttcatgcaaaaaccattatcctagagcttttagcaatgcaacgtctcaaggaaaggattcatatcctatttataggcgtcgtgatgatgggcgtaaggaaacggttcgaggttgtgaattggacaacagatgggtcgtcccttataacccttacctcctccggctcttcaactgtcacatcaatgttgaggcgtgcgggagcatcaaggctgtcaaatacttgttcaaatacatatacaaaggccacgatcgtgcgtctgtggctgtgacagatgcaaacaaggctgatggtgacgttgatgagatcaagcagtatagagatgctaggtgggtgacccctccagaagccctttggaggatattcagctttgatctaagtcaaaactctccaccagtgatgcaactgcagctccatcttgaaaacatgcatatggtgtcatttcacgagcgtgctaaagtaaatcatgttgtccaatgtctaggtgccgataggtcaatgcttacggcatattttgaggcaaataggctacacgaggaggctcggggcatcctttaccgtgattttcctgagtggtacactttgcagcaaggcaaagtgtggcaaaggaggaaacgaaacacgggtggacaggttggtagaatagtctctgcttatccagctgagggggagcgcttttatcttcgacttctcttaaaccatgtgacgggtgctacctcctatgcggatctaaggacagtagatgcactacgaaggttatttgcaacaatactggtatactgcgagccgaacgatgtggcagaattatggcagagacaccttgattcaatgtcagaggactatcaccgtagtactcaaagcaaaacccatgtgcaacagatggtcttgattgacattagaaacattttgcagtcaatgggtaaagacataaagacattccctctccctgctatcatcgacaaatatgacgattcacatggtactgatagagagatttacgaggaggaaagtatcgagccgacagcagaagacgttgctatgaaagaaaccctaaatgaggagcagaggtctgcctatgataagatcctatctgtcgttgacaccaataatggtggagtgttctttgtggatgggcctggtgggactggcaagacctatctgtataaggcactgcttgcggcactacgcagtcaggacaagattgcagttgcaacaactacatctggtgttgcggcttccatattgcctggggggaggactgcccattcacgcttcaagataccacttactattgatgatggtgctgtatgtagcttcacgaaacaaagcgggacagcaaagttgctacaaaaagcatcgctcattatctgggatgaggcatcgatgactaagagacaagcaattgaggcgctagacaatagcatgcgtgatataatgggacggcctgagctgccctttggtgggagaactgttgtgttcgggggtgatttcagacaagtactccctgttgtacgcaaggggtcaagggctcagatagttgctgcctctctacggagttcttacctctgggaatccatgtgccacctaaagcttgttcaaaacatgagggcacagagcgacccatggtttgcagaatatttgttgcgcgtcggtggtggaactgaggaagcgaacaacgatggtgatgttcgtcttccagatgaggtatgtgtgccatatactggtaatgatcgcgaccttgatagactgatagatgacatttaccccaatctaaatgaaaacatgtctaacacaagctacatcacttcaagagcaatattgtctacacggaatgactgggtggatatgataaatatgaggatgatcgatcgtttccaaggggagcagatgatgtaccatagttttgacactgcggtggatgatcctaataactattacccatcagagtttctaaacacgctgactcctaatggactacccccgcacgttctgaagctcaaagttggatgcccaatcatgttgcttaggaatatagaccctgctaatggacttttgcaatggcacgaggttggtgttaacaaggcccagggccagacgattcctaatgttggtgtgtacttgccggaaccagtgttctctcatggtcaactttatgttgctctatcaagggccaccgctcgatcaaaagtgaagatacttgccatttccagtccacgatga

SEQ ID NO: 40947 - DNA, 297 bp, Zea mays
  Peptide Sequence Number=SeqID_82726
atgaccaagatgtacatccacaaaaggcaagacatcatctgtgacgtgttcagactgcaggctaagaaggacctaatggaggttacccacaaggtctacttcgatgtcgagattgacggcaagcccgcagtgcttagaaaatcttcagcagctttcataggtcggattgtcatggggttttttgggaagactgttcctaagacagcagagaacttccgagttactgttggcccagcatacgacaggaatggaagcaacaacaggaatgtaagcaagaaggcacagagaggcagatga

SEQ ID NO: 40948 - DNA, 504 bp, Zea mays
  Peptide Sequence Number=SeqID_82727
atgaccaagatgtacatccacaaaaggcaagacatcatctgtgacgtgttcagactgcaggctaagaaggacctaacggaggttacccacaaggtctacttcgatgtcgagattgacagcaagcccgcagtgcttagaaaatcttcagcagctttcataggtcggattgtcatggggctttttgggaagactgttcctaagacagcagggtttctggattgtttttacttgagtctggaacgacaggaatggaagcatacgagttactgttggcccagcatacgacaggaatggaagcaacaacaggaatggaagcaagaaggcacagagaggcagaggctgtacctagaatcagcaatgccagaagccaagtcatggccatcaccagttttatcagctgagcctcctaatatcttcctcgcaacctgtctggtagctgaggacccaccttttgagagtggcgttggcgaccttgcacgctacatcgaagtgcatagtctgtaa

SEQ ID NO: 40949 - DNA, 1158 bp, Zea mays
  Peptide Sequence Number=SeqID_82728
atgtcgacgtcagctgaatgtaggatgtacaagcctgttgacaacgatatcatgatcggtttcacaaaatggacgacagtcgaggagcttattgaagtgccaccggcttttccagagcttgtttactccctcactccctttgaccagcttacaacccttgtggacattagggagtatttcatagatgtcattggcgcggtcaccatgatctcggatgtcgcaaccattcgtacaaagatgcgccagactcaaacagcaaagagatctgtcactatacaaaatgagagctgtactccccttgaggttgtgttgtggggtgagcaggcaacctccttcccggcggatcagattagtattgcaggccaggactcactccagattattatctttgttggtactcttgctagatcctatgctggtaccacttcgctgacaggtggatcgtcttgcaaatgcttgcagcataagaggagcccaattatggctgctgctggttcgacgcagcatgtgccgaggatttctaccgctgagcataagaaaaaagttgagtggttggtaacagttaccgttcttaagattgatcaactatggtggtacgagtcttgtagaaagtgcctcaagaaaacaaagcctcatggtgatgcctataaatgctcggactctggctgtggccatgttggtccgcctaatccaaggtacaggttgctcatcacagcaggagatgagataggcgagactgatttcatactatttggacgtatggcacagcgcattgttaagaaaccacttgacatcttgatcgcggataatccagccggatttattcctgatgaaataactaggctgatggaaaaggtgtacacattcaacgttaacacggttgtcgccgagattggtgatggaggtcaggttccaatttcacccagtggatcccaaccttcatcaatttcgtctgcgcgggctgcatccaagtctacatcagcagactctgtcccaactggaggtacctcttctcagacaccacagagcaccaaaagctacagcaaggataagactatgcacttcgatgtagcgtgcaaggtcgccaacgccactctcaaaaggtgggtcctcagctaccaggcaggttgcgaggaagatattgggaggctcagctga

SEQ ID NO: 40950 - DNA, 1323 bp, Zea mays
  Peptide Sequence Number=SeqID_82729
atgaaagtcgctgagttcataactgatatcagggagggaaagacgtttggccctgtacttgtagcgctatatactgtggagttccagaaacgtggcctaccccacatccattgccttgtttggctggcaaaccgctccttcgacttagatgcctccactattgatggatttatctatgctgaggtacctgatttcatgactgacccattgggatatgcatttgttgacgaattcatgatgcacgacccatgcggtgttgcttctttgctaatgcctaaaggacgaaccgcacattcacgtatcaagatacctttcgacatgaacgaaacagccatgtgtactattaagcgagggaccatgcttgctgaactcatacaggtatcctcattgattgtatgggacgaagtgccaatgacgcatcgacatttctttgaggccttagacagaaccatgcgcgatatcctctcggaggacgaacctgcgaacgttattatcccgtttggtggcaaagtcgttgtcttgggcggtgatttccatcagattctaccagttgttcgtaagggatcacgatatgcgattgttaatgcttgcattaccaactctaggctttggcgccatgtcagcttcttgagcctacatacgaacatgcgtcttgccaacccatgcctaccgtcgaaaaagcgtgctgctcttgctgaatttagcaaatgggttttatccattggagattgtactattcctgttgagaagatggacgacgaggccgagccttcgtggatcatgatccctcccgatctattgattcatgatgacggtgacaagatcctcgcacttataactgagtgtcaacgtgttctgcgatgcataatactcacaggatccaggattggcgatgagatggcagaggttctgattggtagccttatgattgggaattgcagtgaccggttgtgtatccgtgtctcccgtatgtgggaattttatgatcctcaggatgagtcgaagctcctccacgctgatatggtcctcatcgatgaggagggtggcagtgctcatgctcaaatataccctccactcgctgtcgttttcaagcccatgataaaggagggcaatgtctacagagtctcctacgttcagatcaagaaagcaaataggatgtacaagcatgttgacaacgatatcatgatcggtttcacaaaatggatgacagtcgaggcgcttattgaagtgccaccggcttttccagagcttgtttactccctcactccctttgaccagcttacaacccttgtggacattagagagtatttcataggtacatag

SEQ ID NO: 40951 - DNA, 528 bp, Zea mays
  Peptide Sequence Number=SeqID_82730
atgcgacctgagactgggtctccccatgctagctatggtgggtacaagtgcggtcactgcacggcggcagccggggtcagtggagcattgtatgccaaggcggtgaggcctggacgcgaacggggaatcgatggggacggttatcatgtgtggggtcggagtaccctgacatgccgtaccatgcaggaaatggttgatggtgtgacttggcctaccactgcagggcatacggagtgggatcgccttctccctcaacgaattggtgaaggagtttatccattgcgccaacctgtggctttcccgccgcgatcgcgccgctacaagtcgtggaccgggccgcggcggaccgcaccgccgtgtacctcgaaatcttcctccagggcggcgtcgcttttgtgctggttcgccagggcgccgctggtcagcgcaccgccgtctgtgcgggtgccgtcgtactcagaggcttggaaggaagacgatctcgtgaacgtccgatccggatcgtgcggatgggggatagatctggag

SEQ ID NO: 40952 - DNA, 435 bp, Zea mays
  Peptide Sequence Number=SeqID_82731
atggtgggtacaagtgcggtcactgcacggcggcagccggggtcagtggagcattgtatgccaaggcggagtttatccattgcgccaacctgtggctttcccgccgcgatcgcgccgctacaagtcgtggaccgggccgcggcggaccgcaccgccgtgtacctcgaaatcttcctccagggcggcgtcgcttttgtgctggttcgccagggcgccgctggtcagcgcaccgccgtctgtgcgggtgccgtcgtactcagagccttggaaggaagacgatctcgtgaacgtccgatccggatcgtgcggatggggatagatctggggttagtccaaggtggaccatcgatcgtcagtttgaaggcccagatttgttgcaaggtacctctttcactcaatttgatcgcgaccattgagatgtcatcggatggctga

SEQ ID NO: 40953 - DNA, 216 bp, Zea mays
  Peptide Sequence Number=SeqID_82732
atggggaccccctctggcggattctttgccgagtgctatcaggccgacactcggcaaaggtatcttctttgccgagtgtcacctgggacactcggcaaagaagcatgctttgtcgagtgccatatcaagcactcggcaaagtacctgacatggggaccccctctggcggattctttgccgagtgctatcaggcagacactcggcaaaggaatataa

SEQ ID NO: 40954 - DNA, 732 bp, Zea mays
  Peptide Sequence Number=SeqID_82733
atggtggagccctaccgtccgctgcatgcccgcattccttcacgtcactcgttgccaccctacgttgccaccttctacaccggcgtcgtcgggcccgccgtcaccgataagctctacaaggtgagagcaaggagcacgggctcgagtccagccatacgacctcggcacgacagctcgcagcattgcatacaacaactcgagacccaactagaagaagagaggagggaacgtcaagagatggaggagaggataatggcggagcgggaggcggctgatcagaggatggcagagatgttccagtacatgcagcgccttgacgccgcacagggtttcgctccgccacctccattgttccctgcagttgaccctgctctgatccatactcctggaaaacaaataaaaaaggtgtgtactggtcactttgccgagtgttacactcggcaaagcacctctttgccgagtgtcagaaccataacactcggcaaagaaccaagacctgggcaccggtataggttctttgccgagtgtaatggctctggcactcggcaaagaagcacgctttgccgagtgccatatcaagcactcggcaaagtacctgacatggggaccactctggcggattctttgctgagtgctgtcaggcagacactcggcaaagacgtcgtctccgtcaaccggcgccgtaacgactgcttttctttgcctagtgttctctggcactcgacaaagtga

SEQ ID NO: 40955 - DNA, 702 bp, Zea mays
  Peptide Sequence Number=SeqID_82734
atctttcctagccgaaagggtatacgagatctaatctgtgccattcatcctttgatcaacggccaccgcgataccgctccccttcaccagactccgaccggcggcgctgccaggcaacgcgacggcgccatggccggccacggcgatcacgcatcctaccggtctaaaccagacaattctagccctacgcgatgcccagtgaaaagtgaaagtactcgtgggtcacttaccaagaatggaggggccgcagaggctaaccacggcgcggcgcggatccgcggtgatcccaatcgccgacaagcaattgccgaagccaagtgcaggcacaagactcgtccaccaccagagcatgtgccctgcggccacacgaagctctgggatcccgcccctggccaccattctccagtgccaccaagttccacgcgcagagctccccaatctctctctcggttgggtgaagttctctgcagtcgacagtggtgcgagaagaagatggctttggtgcttaggcgcgatggatgcttagggccggtgctagaaacggtggtcgtgggtgtcgcgcgagaatcgcccaacggtgtccgattcttccgccgtccagagcgcttcggcgcgacccatgcgagggaagaggaacaggggcgagtggccgacgctgagggcccacctgtcattggcgcgcgtgaacgggccgctggttga

SEQ ID NO: 40956 - DNA, 417 bp, Zea mays
  Peptide Sequence Number=SeqID_82735
atgggccgccatacctccatttcggcccgctccaacttcccatccgcgcagcccaacttgccacagcaccgtgcgccgacacctgggtcccggctgtcagtcgctggcttccgcgcgttcgatgcccactgccgcgcggggcccactgagctgcgccggggttcctgggtgcttcgtcagcccgcaattccactgtcggtgcctcagggcgcgtgcaattgctcgctggtgttggtgggcagtggcggagcgccgtgcgtcgtggacatccaggctatctccgcgttatcaggatgcatgatcgtcgtggccggccatggcgccgtcgtgttgcctggcagcaccgccggtcggagtctggtgaaggggagcggtatcgcggtggctgttgatcaagggatgaatggcacagattag

SEQ ID NO: 40957 - DNA, 555 bp, Zea mays
  Peptide Sequence Number=SeqID_82736
atgggggggcctgcggagcaacagaagaccgacgaacggcatgccgtcacccgctccagcagcggcgacgacgatgacttctgctctggggggccgaacagcggcagcgatgacctcagggcggatgctgctgccgggaggcccccgcccatgcccaaactcttgaggcaaggacaggcagaaggccgtagagttggaggtcctccccctacggcgcgggggctgggtcccacacgtcatgcaagccggcccagagcagaagaagccaaaccgccgcgcgcggtgcatgcaaccgcccagcggttacaagcgaccctccatttttgccccgaccagcgggcgaaagggcgggcagccatgcaggcggcatgcaaccgcgccaagtgggcgcacctctccgacttccagcgcgcccagcatggaagccgaggcccacgcgtcatgcaaccggcgcaccggatgctgcgtgcgagcaactgcaccgtcactcgcgccactgccacgcctcctcgactgcggaaccagtaccgcgactcgaggcaaccctatgcatga

SEQ ID NO: 40958 - DNA, 630 bp, Zea mays
  Peptide Sequence Number=SeqID_82737
atgcaggcagcatgcaaccgcgccaagtgggcgcacctctccgacttccaacatgcccacgcgtcatgcaaccggcgcgccggtcgctacgtgcaagcaactgcaccgccactcgcaccactgtcgtgcctcctcgaatcggaaccagtaccgcgactcgaggcgacccagcagcgccagctaggcgcgacggtcaatgcggccaaaaatgggccgacagtaatggcggtggcaggcgggagcagcggtcacgtcgtcagccaagcttacgtcccatcctggggcagcggtgcctctggcaggggaagcgagcgacgcttcgccttcgccataatgaccacgtcaaaaaagggactgggaaagggggataccccgaaaaggacccttctccgtgaaggaaacaggctccgagcctccctactgatcagaggttcgaaggctggcccctcggaggggttcaacagccgcctcagaccacgtgggctccacacccactactggtcagaggttcgaaggctggcccctcggaagggttcaacggctgcctcaggccactcgggctccgcgcccactactgatcaggggttcgaaggctggccctcgaagggttcacagtcacctcagacatag

SEQ ID NO: 40959 - DNA, 771 bp, Zea mays
  Peptide Sequence Number=SeqID_82738
atggggcataatgctggtcgcacaccattaatagacatctcaaacacaagcgttacaggtgatcaaataggatcaaactcgcttggaccaatagacgatgctaatgaacgtaagaggcaaagggatagagaaagatatgccacgatgtccattgaacaaaagaatgagaaaaataggaagcgtcgtgaagcacgtcaacgaaatacaggactacccctaaagtctgagtcatctagaggtcctattaaaaacactccattggctggtaattctatcgaacgaaagaggcaaagggatagagaaaggcgtgcaacaatgtcggttgaacaaaggaatgagtacaataacaagcgtcgtcaaatgcgacgacgaaataagggacaaaatgtgatgcccgatgtttcaggagatggcgacaacaaagtaaatgtggatctagatgatgatagcgactggctgcatcggaacgagacattccagacaaacgactatgtcgcaacgacagaccttctgtcaccaggcagtgtgcatgaatctgttggtgtcattggggaaccgagtatcggcgttagggagtataggcttgaacgccttaggttgtataatcagacaccaaagcgaaaagaggcaaagatagagtacatgagaaaacgtagagtgctacaggctgacactctgaatgttgcgtccatcgccatggaggacccaacatatacccctgaggttgtgcaccctgcaacggaaccttcaacagttaccacctgcgactag

SEQ ID NO: 40960 - DNA, 5549 bp, Zea mays
  Peptide Sequence Number=SeqID_82739
atgtccattgaacaaaagaatgagaaaaataggaagcgccgtgaagcacgtcaacgaaacaaaggactacccctaaagtctgagtcatctagagatggcgacaaaaaagaaaatgtggatccagatgatgatagcgactggctgcatcggaacgagacattccagtcaaacgactatgtcgcaacgacagaccttctgccaccaggcagtgtgcatgaatctgttggtgtcattggggaaccgagtatcggcgttagggagtataggcttgaacgccttaggttgtataatcagacaccaaagcgaaaagaggcaaagatagagtacatgagaaaacgtagagtgctacatgctgacactctgaatgttgcgtccatcgccatggaggacccaacatatacccctgaggttgtgcaccctgcaacggaaccttcaacagttaccacctgcgactgggttatccctgaattcattaggacacctttcctaccagctcaaacacagaccgaggatgtcggttcattcgatatgtctactgaagcaataagacataaacatcatgtgccgcgtggggaaagacaagctatcttagcccgtcgaaacaaacaatttcaagcatccattgcaaggaacgtgactactttgaatggggatactatcggtgacgccaacaacaatggtaattactatccaatcttaaatggatcttgcacgacgacgataccatatagtcagactaatcgtgtgtttccatcagcacaatgtagcgttccatgccaagccgctaccttgccaacaaatggaagtgaaggcataaccgaacaaggaaatgaggtggagcatacacaagagaagccaacggtcatttccaatgatgatgatgatgatgatgaggctgtcatattcgaagaagatgatgacaacgacgagggatacatattcgctggccaatgtacttatgtcaatttttattatgattatgataccaaggcttatataaatacacatgtcttagtcgttgttttccaaaaaatatcagacgaggagactgacgaggacatcgaaatcgatggtactcaggatgaatctactggcactgatgtgcctgacccgtacgacaaggtatacagtaacctccctgaagaaacacatatgctgaagcctgttcctgactgcggttattgcactgcgaagaagtttgagtacgagccacctgggttttgctgtcgtggtgggaaggttgagctagcaccactcgatacccctccccagctcaggaggttgtgggatagtgcagactctgatgctaagcactttcgtgataacattaggttttttaatggccatttctctttcacttccctatactgttgcctcgatagtatgacaactaatgtgcgagattctggtatatacacgttccgggcacaaggcatgatgtaccacaatatcaagtcattcggtaaggaaggtgggtcggagcataaacatctagagctttacttttacgatgacgatcccagtctcgagcatcggtaccgtaagtgtcgtgaagaacagcttcagaaagacaaagatgttattaaacagatagttggcatactccatggaaacccgtactccgagcaccttaggagcatgggccatgttgagaaccttgatgactatcatatcgcattgaaccttgaccagactttgaaccagaagacatataacacgcctctcacttcggaggtggccgttgtatggatcgaggggagcgaacggcgaggccagttcagcaagagtgttatgttacatgggaaggataggtcaagccacggcatccgctcataccatggatgctacgatgcactatcgtatccactgttcttccctaaaggtgaacttggatggcatgcaaatatcccaaaggttggtgtatccatggatgaagtggatgcataccgtgcgacacatagggcaaataattcaaacgatgaagatgcagaatctcctacccatttatgtgtgtccgtacgtgactactactgctacaaattccagattcgtcccggggtatttaatccaatacttcatggaaagcggcttttccagcagttcgctgtcgacacgtacatcaagattgagagctctcgtttagatttcatacgtaagaatcaggatcgtttaagggcagacctataccagggcttggtggatagcatgttagatggagatatcagagcagaaaaggttgggaagcgaactgtgctgtctacgtcatttattggtggtcctcgtgacatgaaacgtcggtatatggatgctatggctctggtgcggaagtttggtaaaccggacatctttcttaccatgacatgtaaccccaactgggatgagataaggagagagcttctccctgggcaaacaccacaagatcgtcccgatcttgtagtgcgtgtctttcatgcgaagctacaggagttaaagcataggctgactaaacaggatattctcggtaaggtccgggcctacgtctatgtcgtggagtttcaaaagcggggtttgccacatgcccattttctactcatcatgcagaggaagtacaagctaacgtgccctgagcagtatgaccttttgatctcagccgagatcccacacaacaagtaccctgaactacgaaagatggttatcaagcatatgatgcatggcccgtgtgggtcgttaaaccctaactgcccatgcactaagggccatgtatcgtgcaagaatcattacccccggcctttcagtgacacaaccttgcaagggaaggactcatacccgatttacagacgtcgtgatgatgggcgtaaggaaaaggttcgagggtgcgaattggacaatagatgggttgtcccttacaacccttacctccttcgtctcttcaactgtcacatcaatgttgaggcgtgcgggagcatcaaggctgttaaataccttttcaagtacatatacaaaggccatgatcgtgcgtctgttgttatgagagatgcgagcaaggcagatgatgatgtagatgagatcaagcagtacagagatgcaaggtgggtgactcctccagaagcgttatggaggatatacggctttgagcttagtcagaactctccacctgtgatgcaattgcaactccatcttccaaacatgcacatggtggcgtttcacgaacgacaaatggtcgagctagtcgtcaaccgtccaggtgctgataggtcaatgctcacggcatattttgaagcgaataggctacatgagggggctcgtggcatcctatatcgtgacttccctgagtggtacacttggcaaagtggtaagggcaaagtatggcaacggaggaagcgtgatacgggtggacaagtcggtagaatagtctctgctcatcccgctgagggggagcgctactatctccgtgttctcctaaaccatgtgacttgtgccacctcctatgtggatctaaggacagtagatggtgtcccgctaccaacttttcgtgaggcagcagagagaaggggactgcttgagtcggacaacacactggatgactgtctcactgaacgtgctcttttccagatgccatcggcgctgcgacgactttttgccacaatactggtgtactgtgagccaagcgacgtggcggtactctggcagaatcacctagatgttatgtcagaggactatcaacacaggagtcagggtaaaactcatgttgagcagatggtattgattgacattaggaacatgctgcagtcaatgggaaaggacataaagacattccctcttcctcctatcatcgacgcatatgacgatgctattggtactgctagggaggtctacgaggaggaaagtatcgaaccagcagtgggagatgtggctctcaaagactctcttaacgaggaacagagggtcgcctatgataagattctatctgccgtggacactgataagggcggattgttctttgtggatggacctggtggcaccgggaagacttatctatatagagtgctgctcgcgacgctacgcagccagggcaagattgcagtggcaacagctacatctggcgttgcggcttccataatgcctggaggaagaaccgcccattcacgcttcaaaatacctctcactattgacgatggcgctgcttctatgaccaagagacaagccgttgaggcactggacaatagcatgcgcgatataatgggtcggcctgaactaccattcggtggtaaaaccattgtcttcggtggggatttcagacaagtcttgcctgttgttcgtaaagggtcaagggctcaagtggtcgcttcttcgctacggatgtcttacctatgggagtccatgtcccacttaaagcttgttagcaatatgagggcaaaaaatgacccttggtttgcggagtatttgctgcgcgtaggcggtggaactgaggacacaaatagtgacggcgacatctgtcttcctgacgaggtatgtgtgccttatagtgggagtgacaacgatcttgacaacctaatagacttcgttttcccaaatctcaacgaaaatatgtctgattcgacctacatcacttcaagggcgatactgtcaacgcggaacgactgggtggatatgataaatgctaagatgatcgatcgttttcaaggggagcatatgttgtaccatagtttcgatagcgccatggatgatcctcataactactaccctcctgagttcctaaacacactgacgcctaatgggctgccaccacatgttttgaagctcaagattggatgccctattatattgcttcggaatatagaccctgcgaatggactttgcaatggcaccagactggtcattcgtggtttccaaagaaatagcattgacgcagaaattgtactgggtcagcacgctggaaaacggattttcttgccgcgtatacctctgtgtccctccgatgaagagatgttccctttccagttcaaaagaaagcagtttcctgtacggcttagctttgcaatgactgttaacaaagcacagggtcagactattcccaatgttggtgtgtacttgcccgaaccagtgttctctcatggccaactatatgttgctctatctagagcgatagcccgatcgaacataaagatccttgccatcccaaccgtcgatgggaagaagaggtcgaggaaggcttcaacacatctaaagatgaatcctctaaaaccgtcgatgggagcagagaagcagatgtacggtcagccaagtggtgtaagaccatttggagtatcgctgttgattgctgggtatgatgacaatggcccacagttgtatcaggttgatccctcaggatcatacttctcctggaaggcatcagccatgggaaaaaatgtgtcaaatgcaaagacatttcttggaaagagatacacagaggatatagagcttgatgatgccatccacactgcaattttgactttgaaagaaggatatgaggggcaaatttcctccaacaacattgaaatcggaattattcgagctgaccgtgagttcaa

SEQ ID NO: 40961 - DNA, 279 bp, Zea mays
  Peptide Sequence Number=SeqID_82740
atgaccgggaaaaagaccacggcttcctctgacggcggcactccaaagaaagccaaggtggtggtggaggatgaggaagaggcggggttggaggatgaggaagaggcgactgtgacactatccgtggagaaggacgcgctggagtgcgacatccagtccgaagttttcatggcaagtcagattaccatgcattgcaagaatgggcattctagatgtgcaaagtgctgcatccgcacggacggaagtcgtgtaaaattacatgcttcagtttgtcactaa

SEQ ID NO: 40962 - DNA, 309 bp, Zea mays
  Peptide Sequence Number=SeqID_82741
atgaccgggaaaaagaccacggcttcctctgacggcggcactccaaagaaagccaaggtggtggtggaggatgaggaagaggcggggttggaggatgaggaagaggcgactgtgacactatccgtggagaaggacgcgctgcagtgcgacatccagtccgaagttttcatggcaagtcagattaccatgcatgtatatatacagtacatattgatcggtaggctccagcatgatgctctgctctgtgtaaaatcagtgcaagaacgggcattctggatgtgcaaagtgctgcatccgcacggacggtaa

SEQ ID NO: 40963 - DNA, 267 bp, Zea mays
  Peptide Sequence Number=SeqID_82742
atggcgcagctacaggtggcggcacgctgcctcctagcgccctggcaaggaaagcgtcccatcttcaaacggcggagcccagtcgtcccaacaaacttgcagcagcgcgcggagaggaaggtgattgtgcaggcgagtgcctgcaaggtgtctgcagcggtgcggctgcaggctgcggcgcgtggcctcctagtgtggtggcggccgcaggaggtgtggcggcagatgctcgaggcagccttggtggtggtcgacctcagcacatag

SEQ ID NO: 40964 - DNA, 786 bp, Zea mays
  Peptide Sequence Number=SeqID_82743
atgaccctcgagtgcctcaacgccaagctcgacgctagtcttaccatcatcaccaacaacttcgccactctcaccaccacccctgccaccactggcgccgtcacatcgcccgattggtgccagtgcccccgcaccaacagggctgcccctttacctcaactccatgccaccatcaccatcaccaattccatcgtacgcccactcatcaacgacggcaccggaattcatgatgacaacgtctccttcacccgaccccgtcgttcaccgccccccatgcctgtgccgccacagcagcactacaatgacgtttttctacggggggtgtgggatggtatccgggcatcgatggcgcagctacaggtggcggcacgctgcctccttagcgccctggcaaggaaagcgtcccatcttcaaacggcggagcccagtcgtcccaacaaacttgcagcagcgcgcggagaggaaggtgattgtgcaggcgagtgcctgcaaggtgtctgcagcggtgcggctgcaggctgcggcgcgtggcctcctagtgtggtggcggccgcaggaggtgtggcggcagatgctcgaggcagccttggtggtgatggcgtccatgggatccaggtggctgcacacgtgcaggtccaatgcgcggagggtgttaagtttgtgtcaagtggagtcatcgttagcatcatcgttaggttgcatctcgaggacgagctacatgtccaggtggggtgtagtgtcagggaggcacttcgtggaacagtaccgagattagatcagatttag

SEQ ID NO: 40965 - DNA, 663 bp, Zea mays
  Peptide Sequence Number=SeqID_82744
atgtcttcccccttccttatgcatcgcgtctttccaccttccaagcccccggatggggggaacccgccgtattttcgcctcatcgttggaggaacgcagctccgtgggagttggcacctttcagccaccgttcgacttcaaggattttcatcagccagcccggctgcacccccccgccggcggtcacccaagatggtgaccaccagttcctgggtggggagaagcaagccgggctgcgatcttggtcccaccctcagcttcagagcgggcggcggcgagccgctcgtcagtcttttgttgctccgcaggcccacccccatcgagtggggttactcgcctgttgattatctgaaccgcttcaccaagcatgagtcgccccgtgtcaaggtgacgagtgagccgggttgtccgtcagcgggaccgacgccggagtcgatcagccgaggcctcgggtcgggctggcgcccttggaagatggtcggccgaggccccgggggcgaccggccgagccgcctgctcgggccggattcccggagaagtccctggaccgtgtcgccgtccgaggctgggtcggacctcgctgaaggtgtcgtcgatgccgagggtgctacagcccccttccagcgtgaagacccgagcctgcagggtcagattgtcttgtag

SEQ ID NO: 40966 - DNA, 1233 bp, Zea mays
  Peptide Sequence Number=SeqID_82745
atgaggcgaaaagacagcgggttccccccatccgggggcttggaaggtgaaaagacgcgatgcataagcgcgccggatgctgcatgcaagcaactgcaccgccacttgcgccaccaccgcgcctcttcggttgcggaaccaataccgcgactcgaggcggcccagcgcacaacccagcagcgccagcctggcgcgacggtcaatgcagccgaaagtgggccagcagtaatgacggtggcaggcgggcgggagcagcggtcacgtcgtcggccaggctcacgtcccatccaggggcagcaagagagcctcctctcacggcgtgaagacgacacgcccgtgatccgtccctcgaacggctcacgcacgcgcaacggccgccccgccaaccactcgccccgtcgcattaactccgcgacaggacaggcggcgcctctggcaggagaagcgggcgacgcttcgccttcgccggaccgggaaagggggataccccgaaaaggatccttccccgtgaaggaaccgggctccgagccccctctactgattagaggttcgaaggctggccccctgaggggttcaatagccgcctcggatcgcgtgggccctacacccactactggtcagaggctggcccccgaagggttcacagtcgcctcagacgccgagcgagggatgaccaggggggaccgggtccggcagatcacccgcaggtacttttgggcgtgcctctgggcccctagccgacccccaacgaatggggcacggacgtccactcggattacccgcttgcagctcaccggagacaccatgttcggtgcccatcaaggggctcggactcgggctaagccccggaagacggcgaactccgctccgcccgacccaaggctcggactcgggctaggccccggaagacggcgaactccgctccgcccgacccagggctcggactcgggctcaaccccagaagacgacggactccgcttcgcccgaccccagggctcggactccgccctggcctctaccgaacgacctccgcctcgcccgacccaggggcttgggctcggcctcggccatggaagacagactcgacctcggcttcggaggagcctccacgtcgcccgacctagggcgcaggccagccacgtcaacaggaagcgccatcatcaccctatcccgagccgactcgggccgcagagaacaagaccggtgtcccatctggctagctccgccagataa

SEQ ID NO: 40967 - DNA, 546 bp, Zea mays
  Peptide Sequence Number=SeqID_82746
atggcctgctatcccctagctaatcagcacccacctttgctatgtcaacgaaatctatactacttattaagaagcgccaccttcgaccagatcgactccgcctaccgcgaggccggaggggacccatttgtggccgccagtatcctgtcttccacgcaggacatgcacccgccgcagccccccgccgccactggatctctcgccgcacagtggatctggtggaagaaaggctggtcggaggcccaagcggggttgcggtggccgctacggggcatggtcgcggacgtgattggcaaggagtacacacgatccacggctaattctgtagtaagcatgccaaatgcttggaagggtcgggacagggagagcgatggcgatgggtctggtggccgcaaggacagtgttgaagagacagagcagttcctgtgctccatgctcggggataattccgagcttggcatgggtgttgtcagagacgtgccagctggtgttaatgacataggttgtatggtccttgatgaacaagcaatacctgggggtagctaa

SEQ ID NO: 40968 - DNA, 519 bp, Zea mays
  Peptide Sequence Number=SeqID_82747
atggtcgtgttctgcgaccgcgccggggcggggaacgcgcataggcagaggagcagcagcagcgcattcagcctcagtgcatgcaacaagacaacgacgatcgcagagcctcagaggaaacacgatgggtggcgcctcgctaggttcctcccgcccagccctgttctgcagcagcttgtgcggcttgcatgtggcttgcatgcagtggaggttgagcagcttgtctcgcttggtccgccatcagtgctcgcctggctgctcgacacattcgccagcgccaccttcgaccagatcgactccgcctaccgcgaggccggaggggacccttttgtggccgccagtatcctgtcttccacgcaggacatgcacccgccgcagccccccgccgccactggatctctcgccgcacagtggatctggtggaagaaaggctggtcggaggcccaagtgggttgcggtggccgctacgggcatggtcgcggacgtgattggcaaggagtacacacgatccacggctaa

SEQ ID NO: 40969 - DNA, 339 bp, Zea mays
  Peptide Sequence Number=SeqID_82748
atgagaggaggaataggggcatatgccaagatctcggaggacgagccgaggcacaccaggatgcggctgaacgcgctgctgctcctctgcctgtgcgcgttccccgcctcggcgcggtcgcagaacacgaccatggccatggccgcgccagcatccgtcgaggggttcaactgcaccgccaaccgcacgtacccatgccaggcgtacgcactctaccgcgccggcttcgcgggtgtgccgctcgatctcgcggccatcgacgacctcttcgccgtcagtcgcttcatggtcgcgcacaccaacaacctctccacgacggccgcgccggccaacgggtag

SEQ ID NO: 40970 - DNA, 537 bp, Zea mays
  Peptide Sequence Number=SeqID_82749
atggccacagccgcgccgacgtccgtcgaggggttcaactgcaccgccaaccgcacgtacccatgccaggcgtacgcgctctaccgcgccggcttcgcgggtgtgccgctcgatctcgcggccatcggtgacctcttcgccgtcagtcgcttcatggtcgcgcacgccaacagcctctccacgacggtcgcgccggccaacgggcagccgctgctcgtgccactccagtgcggctgcccctcccggtcccccagctcgtacgcgccgatgcagtaccagatcggcctaggggacacctactggatcatctccaccaccaagctacagaacctcacgcagtaccaggctgtggagcgcgtgaaccccacgctggtgcccaccgacctcgacgttggcaccatggtcacgttccccgtcttctgccagtgcccggccgccgccgccgacaacgccacgacgctcgtcacctacgtcatgcagcccggggacacgtacgtgtccgttgtcgctgccttctccgtcgcctatccacagtga

SEQ ID NO: 40971 - DNA, 438 bp, Zea mays
  Peptide Sequence Number=SeqID_82750
atggcagctgctgggggatggggggcgctgctccttgctcggaccaggggtcactgcagccggctgcttggaggaaggagcttgccacggccaccagcacgagatccggcagggaggcgagctgccaggaaggggacgccatggaggtcctgctcctgtgcgctggggagaaggagcgaggagggagaaggcgccgtggagaggggaggtgctcggccatggcagcagcagggaggggcacatggtataaatagaagggagagagcttcaaccattggtggcgtgggcggcattgctgcagagctctggcatgtcagcctgctggcaggtcataactttgtgctgctgttgatggtgttaagtgccggtgggctcggccttcttataagtctaagtaactcttctatacttcttattgaggatggtcacttgagctag

SEQ ID NO: 40972 - DNA, 159 bp, Zea mays
  Peptide Sequence Number=SeqID_82751
atggcgagagtagcgtgtaccctccgtggcaagaggctggacggtggtcataactttgtgctgctgttgatggtgttaagtgccggtggtgggctcggccttcttataagtctaagtaactcttttatacttcttattgaggatggtcacttgagctag

SEQ ID NO: 40973 - DNA, 333 bp, Zea mays
  Peptide Sequence Number=SeqID_82752
atgggcttcgctccaataccagctgtgacggaacctcataaggtattaggcccacctacagttgtccttgtcctaaggaccttggacaaccttgtagatgcacataatcactcaacaagttcggtgggaggcaaacatcctcccgcgaccaacttcactgttggggctcttccttgggtaccacctttgaacagaaacagcaaaactctgctgctttctcacctacaacaacatgggttcgaaaaccctgagtacggagtgtactttcgcaagtcttacccgacaaaagaaaaagactctcaaggatatgctggcttgagggagtcaaggtaa

SEQ ID NO: 40974 - DNA, 426 bp, Zea mays
  Peptide Sequence Number=SeqID_82753
atgggtttgaaaaccctaagtacggagtgtactttcgcaagtcttacccgacaaaggaaaaagacttctcaaggatatgctggcttgtgggattcaaggcactttgcctacactagccatcttttatcaccccttgagttcactggattgctacgttacaaagaaaagaagaaaggagatggagaagagttggctctgtacagccaaaaccagctcgagcctggcacaccggactgtccggtggtgcaccggatagtgtccggtgccccaggctgctcgacagtcaacttgctgctcttgggaatcggccgggcgacgtggctaaaattcaccgaactgtccagtgagtcttcagcgcccgcgcccgaggtcttcggctacaaactcgtcgctctcaggaattcaccgaggacgccgcgactataa

SEQ ID NO: 40975 - DNA, 225 bp, Zea mays
  Peptide Sequence Number=SeqID_82754
atggcgggcggaagagagctcgccggagctaaggaggggcgtctggccggcgaaggatcgttggcgccaatgtcaactgagaaacgtcacctagatcagatcatactcctcgccttgcggctcctcctgaaccacatgttcttctcctgtggggggtgtgagacagcaagagtgagctcacatacgttcatcgctcaacaagttgtggggaataatgtggcatga

SEQ ID NO: 40976 - DNA, 918 bp, Zea mays
  Peptide Sequence Number=SeqID_82755
atgagctcacatacgttcatcgctcaacaagttatggggaataatgtgtatgaactcgccaaaggtgggagctcatgtgaagtgaccgtcatcgcagcaaaatcctcccgagggcctccctacactgaccactcccctactgcccttgcccctttcggactcaggaatcccagagttggacggcgggttctaatctccaaaaccgtaagggtccttttgcaaaacccgcaccgcgaaggggtatcatcgcggcagagccgttggatcctttctggacgacctagatcagatcgcacatttgtatccaaccggtatactaccagagtcgttgatcgtgagatcgacggccgtgatttaatgaagccgtgcgcgatcggcaccgacggatctaagatgtacggcacggatcgaaccttgtgcaaacgatgggtgtgcccgatcacaaccgttgattccccaatctacggccgacgtacagtctttctattctctcaataccgagtgacggccgacggccagggcggcggcgccatcaccggcgaactcccgggcacgccaggaaggctctatgtccaacgtgattcgatgcgaaacgaagaggggaaggtggcgagcacagaggtgggaactttaccggggattaggtcaccaggaggctcgcccacggcgcacggtggaagtctgcgggtcaacgacgacggtgagcaattcgggccgcttccccgaccgactccacttggctcacccgcggaaagctccaccgtgaacccgcgacgatcaccgacccaacttcagctcacacgcggcccggacgccaagatggtcgtgcggccgcctctctcctcccttttctctctgctcacggcaatggtggcactagatcgttctggtggacgcgcaaggggaaagtggaggtag

SEQ ID NO: 40977 - DNA, 291 bp, Zea mays
  Peptide Sequence Number=SeqID_82756
atggggagctgcggtttcggggcctctcggaaaggcagcaaggggcggcttgggagtgttagtgattactgcgtacaccactgtgtatgtcctgttgtggttgttcgctaccctgatgatgctgcagatgccggtggagatgcatcaggggtgacagatgagtccaccaccactccatcatatggggagcagatggttgtgcaccatgggcatgactatgactggaggagccaaccaattgacctagagacgacatatgctagcacaagaggacaaacccatggacaatga

SEQ ID NO: 40978 - DNA, 222 bp, Zea mays
  Peptide Sequence Number=SeqID_82757
atgggagaccacgtctcaggtcgcgtgaggagggcaatctgcgggcaggttcactcaggtatccgcatgttaatccttattccattttcatctcgtagaccacgcatccccatggatccgtgtccacagaccatcatcattctgttatcaaagtggatacaaccaattcctgacctcgcgcgagtgctagaaaaatcactcgacttctaccgagatccctaa

SEQ ID NO: 40979 - DNA, 225 bp, Zea mays
  Peptide Sequence Number=SeqID_82758
atggggaagcctgtcccatcactcctcatgctcctcctcagccgagtgaccgcacttgtacccaccataaccggaatgggagaccacgtctcaagtcgcgtgaggagggcaatctgcgggcaggttcactcaggtatccgcacgttaatccttattccaatttcatctcgtagaccgcgcatccccatggattcgtgtccacagaccaacatcagtatgatatga

SEQ ID NO: 40980 - DNA, 1173 bp, Zea mays
  Peptide Sequence Number=SeqID_82759
atggggtgtaggggcgacacacagattcgcgtcatgattgggccgatacaccatcaccacctggagatcggagatcggtggcatatggccgccaacgatcacgtcttccgggccaccaacgaggcatccgtcgccctcctgcgcagcctccgcgccggaaccgtcgaccagagattcaaagtcttcatccaccacgcggacgtctacaccgctgcccctgaggagctggtcgccggcctggagccggtgccgggcaccgacgtgacggaggacgggtacaacagacagtggtacatatactgtccaaagcgatacaagaacggcgagggaaggaccagcgggcacaggctgcgcgcggtggagaccgccgggacgtgctggcactcggagactggcccgaagtccatgcagggcttgcccggcgccacggtctgcagcctatcctacggccacaaggagaaggaggacgggacgtcaggtcggcatcgcttccaccgaatgggatggaggatgttcgagtacgacgacacccagggcggcggcggcgaccacgtgctgtgcaaggtgcaccgttcgtcctcgtctctggccaagaacaagtcgaaggccaagaggacggcgacaggcgatcaccccgaggcgccgccaaccaaggtgatccacgacgtgcaggtccagatgcaggaccccgccggcgccatcttcacctgtgcttacccgacgatggatgatcccctgctgatggtcagaggcgaggaggcatcagaggcggagcacggtggtgacttgggcaagttcaacatcggtggcttattgctcaacatcgacaatgtcgattggaaaactttgctagacaatgtcgatggggagcagcagcaacaacaaccatgcactgagccggccaagcagagcagcgtgcaggtgcaggtggaccccgccgccactttgatgccctccaatgttcatggtcatgaacaaggcagggattccatgatggtcggaggcgaggaagaacagcgtcgacgcattgaggagcaggtcagcgtcgacgacttgctcgacgtcaacaatgtcgattggaaagctttgctagatatgctagaagacgatgaggagcaggggctgccgctgcagcagcagccatgcgctgagccggcggccgagcagagctag

SEQ ID NO: 40981 - DNA, 882 bp, Zea mays
  Peptide Sequence Number=SeqID_82760
atggccgccaacgatcacgtcttccgggccaccaacgaggcatccgtcgccctcctgcgcagcctccgcgccggaaccgtcgaccagagattcaaagtcttcatccaccacgcggacgtctacaccgctgcccctgaggagctggtcgccggcctggagccggtgccgggcaccgacgtgacggaggacgggtacaacagacagtggtacatatactgtccaaagcgatacaagaacggcgagggaaggaccagcgggcacaggctgcgcgcggtggagatcgccgggacgtgctggcactcggagactggcccgaagtccatgcagggcttgcccggcgccacggtctgcagcctatcctacggccacaaggagaaggaggacgggacgtcaggtcggcatcgcttccaccgaatgggatggaggatgttcgagtacgacgacacccagggcggcggcggcgaccacgtgctgtgcaaggtgcaccgttcgtcctcgtctctggccaagaacaagtcgaaggccaagaggacggcgacaggcgatcaccccgaggcgccgccaaccaaggtgatccacgacgtgcaggtccagatgcaggaccccgccggcgccatcttcacctgtgcttacccgacgatggatgatcccctgctgatggtcagaggcgaggaggcatcagaggcggagcacggtggtgacttgggcaagttcaacatcggtggcttattgctcaacatcgacaatgtcgattggaaaactttgctagacaatgtcgatggggagcagcagcaacaacaaccatgcactgagccggccaagcaggccctgcaggtgcaggtggaccccgccgccactttgatgccaacgaattcaagctga

SEQ ID NO: 40982 - DNA, 711 bp, Zea mays
  Peptide Sequence Number=SeqID_82761
atgaaaatccttgaagccgagcgacgactggagagcgccgacccccacggggtcgcgctcctccaacagcagcaagaagaaggcaacacagaaccagcgcagcgactcaaggcagccctgcgcgtgacccaacagtgcccattaagtgcgatgatcacaggtcactcagccgcggagggcaagcgacacctccgacaggcgaagcgggtgctgtttcacctccgtcatgatgaccgcgccaaaaaagggaccgggaaaggggatattgcgaaaaggatccttctcggcgaaggaaacgggccccgagccctccgactgattaggggttcgaaggttgcgccctccggggttcggcaaccgccccagagcactcgggctccgagccctttactaatcaggggttcgaaggctggcccctcggaagggttcgacagccgccccagagcatgcagagtcagggatgaccctgggtacgtccgttacatggccgaggcttgggttacgctcccgaggtaccctaggacatttccgagaccagcggaaacgatttgtaatggaatcccaccggagggaggcaccgagccctcggaccctatcgaatgggtccgggtccagcaaatcacctgcagaggctcgagggctgctctcgtgccaggctatggccaaactgttgaccacgtcaacaaaccagctaaaaaactcggagcctga

SEQ ID NO: 40983 - DNA, 240 bp, Zea mays
  Peptide Sequence Number=SeqID_82762
atggagaggcactccgttcccacacacatcaaccgtccccatcgattccccgccagcagagaggggctcaccgccttggcgtacaatgcctcactgaccccgactgccgtcgtgaaacaacgcatccccatggaccattgtccacagaccatcatccgtacgatatacaaatggatacaaccaattcctgacctcgcacgagtgctagaaaaatcactcgacttctaccgagatccctaa

SEQ ID NO: 40984 - DNA, 237 bp, Zea mays
  Peptide Sequence Number=SeqID_82763
atggacactagtatgctaggtcgagtaggtgctttactaattagggatctcggtagaagtcgagtgatttttctagcactcgtgcgaggtcaggaattggtgtatccaattttatatcgtaatgatgatggttctctcgaggacatggttgctagagtgacttggccatccaccttgccaccgggttggacagtcgagtgggaccctgcctcggctgaggaggagcatgaggagtga

SEQ ID NO: 40985 - DNA, 573 bp, Zea mays
  Peptide Sequence Number=SeqID_82764
atgacgcgcgtgcctgacttctgcgcgccagactgcgcgctctggcgcgcatttaatgtgcctgcagggggatctggccatggggagaataaacacctgcgtccagagagccgaatgaaaggggctggagccaaggaaggagacgcagggaacctggatgccgtgaccgctggccggagcactagtcgaggaggagtcttgcctagggcgccgcggggcttgctgctgcgcgagggagaaggagcagagagctcggcggccaccatggctgggccgtggagcagagggaggcgccatggcagcttctgctcctgcgcgagggaagccagggaggagggcaccatggacaggagctcggctggagcatgcccgcgcgagggagaaggagctccagcgctggcgtgcgtgaaggagcctgcggcttcctgtgcgccggccatagaggaaaagctcctgcttgcagccgtgtgggagaaggaggcagaaggctgtggcggctgcaaaagaataggggtgggagtgaaaaatggccaagggcaagggaaggggtccatatttatagacacgtgctag

SEQ ID NO: 40986 - DNA, 471 bp, Zea mays
  Peptide Sequence Number=SeqID_82765
atggagcagggaggggcactgtttgggcgctcggatgggggatggagcagcggtgtagtggatcttgggcatgtcatggggcttgtgctcgcgcgcagggaatcctcggcgccatggctactggccggagcattggtcgaggaggaattgtgcctagggcgccacttacctagaggtggccgagcaggagaggggcggctagccatggagctcttgctgggcttgggcgccatggctgagggcgcgtggaacaggcagcccgctggcggatgtcgctgccgcaaagcagggaggaagaagggcgccgtggggcttcctgctgcgcgagggagaaggagcagagagctcggcggccaccatggctgggccgtggagcagagggaaacgcaggggccgatggccatgtggagggaggagccgagcttctggtttcaacagggtcgcacgtggggaggagggtgccatggataa

SEQ ID NO: 40987 - DNA, 1086 bp, Zea mays
  Peptide Sequence Number=SeqID_82766
atgtccaccgcccgggggatcgacccctttttaaaggcggctctccccactcgcattccaagcgtcgggagcaaagtctccaccgacgagctccagggtaaccaccccgcagttataagcgttcccccattctcgtcgaaaccagcgggcgaaagggcggaccgccatgcaggaggcgtgcaaccgcaccacggttgtgcaccctttcggctttatcgcatccggtggatcagcgtgaaggcctgggcccgcatgtcacgcaaccggcgcaacagttactgtgtgcaagaaaccgcaccgccacttactctaatgccgcgccttctcgactgcggaaccagtaccgcgactcgaggaagccctgcgcatgacccaacagtgccaatcgagcacaacgatcacaggctggcccctcggaagggttcgacagctgccccagagcactcgggctccgcgcccactactgatgaggggttcgaaggttggcccctcggaagggttcgacagccgccccagagcgcccaggctccgcgcccactactgatcaggggttcgaaggctggcccctcggaagggttcgacagccaccccagagcacgcagagtgagggatgactatgggagcgattttgtaacggaatcccaccagagggaggcatcgagccctcggaccctatcgaacgggtctgggtccagcaaatcacctgcaggcttcgtcgagaagcaaccttggccaaatcgcctctccaaccgaccgtatcgcaggaacattcaatgtgaggatcgcttgacaccttatcctgacacgcacgccttagtcggcaaggtcgaagaaaacaacgtcgctcgccccgctccgactactgtgccacccaccagggtgaggatgacaacagccaagttcagcctcgggcgcaacaggaagctccgcctcgcccgaccccagggctcagcctcaacctcggcctcgggaggaatcgcgtccttgcccgaccccggcctcagcctcaggagaagtctccgcctcgcccgaccttgggcactgaccgaccgcgccacgggggatacatcattaccctacccctag

SEQ ID NO: 40988 - DNA, 639 bp, Zea mays
  Peptide Sequence Number=SeqID_82767
atgaagcacaacgagttcacagctagaacggagctcaaatcactaacacagttgatcaagtgcgcgaagacggagtgtggaagacttagaatgctcaaactgtacgccgccgtcgagtcccaagagaggcctgttcaccgagactggtctggcgcaccggacactgtccggtgcaccaccggacagtccggccttgaagatctggagcctagactgctcagcaggaagtggaatgtagatcagctggtcaagacgctctggcctcagcagagcggggtcaatgatatcaggcctgctgaggttgatggttcaaatgagtccaatgactttgagcctgtggtagccacaaaagagattggcctggatcaggatctttctatggaaatcttgattcaggtggtgaatgcggggtaccagctcagaatatgttctacgtgccagcagaaaaccgtgagcagttctggaacggagcagtacaggttcatcgagcactgcctgtcatctgttgatcggcagaaacagccatggctcatcttcctcgcgcaccgtgtcctgggttactcgtcagccaccttctacgccgacgaaggaacgaccgaggagcccatgggccacgagtgccttcagccactctggtag

SEQ ID NO: 40989 - DNA, 291 bp, Zea mays
  Peptide Sequence Number=SeqID_82768
atggcatgcaaacctgcattgaagctatttgttgatggagctgagctgtgcatcactgtccatctagaaagttacagtattttccaacctttttctgtaagaagctctcatcgaacatcagcttataattctaggtactcaacggactacgggatgttccgtttctgcaaacagccatggctcatcttcctcgcgcaccgtgtcctgggttactcgtcagccaccttctacgccgacgaaggaacgaccgaggagcccatgggccacgagtgccttcagccactctggtag

SEQ ID NO: 40990 - DNA, 336 bp, Zea mays
  Peptide Sequence Number=SeqID_82769
atggctcaccagagtttctccgacacacccgagaccttctcacagccgttctaccctctctacccgtggattcatggcctcttcccctccactgagttcgccgtggcgccctcttcccctctgcccaactctagctaccccggagccaccctagctcacgcctgcctcaactccggcgacctcaccaccgcggacaggagcggcgccgcccgcaaccgtctgttccccgacaacgagcagctcgtggttcctgagtgtgttgctgaagatccctctaagcaacaacctggtgaaggcaagtgtcctctgacctattatgtcctacatactttatga

SEQ ID NO: 40991 - DNA, 870 bp, Zea mays
  Peptide Sequence Number=SeqID_82770
atgtgtgtcggtcgaaggcccacgcagcagggtatcgagagcgtcgtggaagtgacacctgcgagcggcgtcacgagtgatgggtctagagatccatccctccggctctggctcctccgagagctccgtgccatggctcgaactgccactggcatcgtcgtcgtctccatctctgtcagggtctcctccagcagccgggatgccctgaggtggtgcagggggcatctctggctgaggtgcaggggaaggcggcctctcaaactccacctcctgctggggcaagggggaagagtcctgctactcctgctcctgctcctggcgtcagcactcctgctcctcatgcaggcgacgatgcagtctctccagaaaccgacggctgagattagatctacgaccgagggcgcgcgcgcgggcgggcgagcactgacatgtgggacagggagtgtcagcaacagagggggagagcgtgctgaccgagcgggcccagcgccagaggggaaacatacgactacaggggttcgaggggggtccgagccgttcgatcgagatcggacgaagggggtccgaagggggtccaaggagggtccgatggggtccaagggggtccgagccgttcgatcaagatcggacgggggaaatcagaccgggaaggatgagcggctgcgggcgacgttgataggcgggatagggcatcaggcacacgtgcgcgaagtggtatcccgcgatctgggccgtgcgatcaagatcggacgggataaaatcagaccggggaacagacggctgcgggcggcgccgctcctctccgcggcggtgaggtcgctggagttgaggcaggcgcgagctagggtggctcctgaattacaagtttag

SEQ ID NO: 40992 - DNA, 1254 bp, Zea mays
  Peptide Sequence Number=SeqID_82771
atggaggccggggagcacgggccacgcaggaggacatcggagacagtggcggatgcggtgagcgcagggctgcgcgcggtggagaccgccgggacgtgctggcactcggagactggcccgaagcccgtggagggcttgcccggcgccacgttctgcagcttatcctacggccgcaaggagaaggaggacgaggggacgtcgggtcggcatcgccatcgcttcgacaggatgggatggcacatgaccgagtacgacgacacccagggcggcggcggcgaccacgtgctgtgcaaggtgcaccgttcgtcctcgtctctggccaagaagaaatgcaattccaagaggacggcgacaggcgatcaccccgaggcgccgccaaccaaggtgatccgcgacgtgcaggtgcagcagatgcaggaccccgccggcgccatcttcaccggtgctactgcttacccgacgatggatgatccccggatggtcggaggcgagttgggcaagtccaacgtcgactacttgctcaacatcaacaatgtcgatggggagcagcagcagcagcaacagccatgcgctgagccgagcagcgacgtgcaggtgcaggtggaccccgccgccaccttgatgcccagctatgttcatggtcatcaacaaggcggggatcccctgatggccggaggcaaggaggaacagagtcgacgcgttgagtcaccagaggcggagctcgactacttcgacgactgtctcaacaatgtcgattggaaaggtttcctagagatactgggagacaatgaggagcaggggttaccgctgcagcagcaaccatgcattgaaccggccgagcagagcagcgacgtgcaggtgcaggtggatcctgccgccaccttgatgccctgctatgttcatggtcatgaacaaggcggggatcccctgatggccggaggcgaggaggaacagagtcgacgcattgagtcagcagtggcggagctcgactacttcgacgactggctcaacaatgtctatcggaaaggtttcctagagatactgagagactatgaggagcaggggttgccgctgcagcagcagccatgcgttgaaccggtcgagcagagcagcgacgtgcaggtgcaggtggtccccgccgccaccttgatgctgggagaccatgaggagcaggggctgccgcagcagcagcaaccatgcgctgagccggcggccgagcagagccagagcagcagaaccgtgccgtccgtttaa

SEQ ID NO: 40993 - DNA, 1353 bp, Zea mays
  Peptide Sequence Number=SeqID_82772
atgggcgtgcctgatctctgcgcgcgctggcgcgcaataaatgcgccgcaggggggtaagcgggagacggcggcgtcgaggacaagggcggggtgcggcatcaaggccgagaagcacgggccacgcaggaggacatcaaagacagtggcggatgcggtgagcgcagggctgcgcgcggtggagaccgccgggacgtgctggcactcggagactggcccgaagcccgtggagggcttgcccggcgccacgttctgcagcttatcctacggccgcaaggagaaggaggacgaggggacgtcgggtcggcatcgccatcgcttcgacaggatgggatggcacatgaccgagtacgacgacacccagggcggcggcggcgaccacgtgctgtgcaaggtgcaccgttcgtcctcgtctctggccaagaagaaatgcaataccaagaggacggcgacaggcgatcaccccgaggcgccgccaaccaaggtgatccgcgacgtgcaggtgcagcagatgcaggaccccgccggcgccatcttcaccggtgctactgcttacccgacgatggatgatccccggatggtcggaggcgagttgggcaagtccaacgtcgactacttgctcaacatcaacaatgtcgatggggagcagcagcagcagcaacagccatgcgctgagccgagcagcgacgtgcaggtgcaggtggaccccgccgccaccttgatgcccagctatgttcatggtcatcaacaaggcggggatcccctgatggccggaggcaaggaggaacagagtcgacgcgttgagtcaccagaggcggagctcgactacttcgacgactggctcaacaatgtcgattggaaaggtttcctagagatactgggagacaatgaggagcaggggttaccgctgcagcagcaaccatgcattgaaccggccgagcagagcagcgacgtgcaggtgcaggtggatcccgccgccaccttgatgccctgctatgttcatggtcatgaacaaggcggggatcccctgatggccggaggcgaggaggaacagagtcgacgcattgagtcagcagtggcggagctcgactacttcgacgactggctcaacaatgtctatcggaaaggtttcctagagatactgagagactatgaggagcaggggttgccgctgcagcagcagccatgcgttgaaccggccgagcagagcagcgacgtgcaggtgcaggtggtccccgccgccaccttgatgctgggagaccatgaggagcaggggctgccgcagcagcagcaaccatgcgctgagccgacggccgagcagagccagagcagcagaaccgtgccgtccgtttaa

SEQ ID NO: 40994 - DNA, 432 bp, Zea mays
  Peptide Sequence Number=SeqID_82773
atggagcaagaagcagaggaagccgcgaccaaggggagagaagagggtgtcgtggttggggaaaggagatggagcagagagctcgcagggaggggcaccggcgtgctcccagggagaagaaggggcgcgctggccatggaggagcttctgcgcggcgtccaaaacagggaaggtggagcccgcgcccatgggagaagaagggcaggggagagagcatgcttgggcgccggcttgaggaagaagggcttgggcgccatggagaggaagggagccgagctccctacgctggctgctgctgccgtgagcagcgaggaagaaggcagggaggctgtggcggctggaaaaagtggaggggtgggaatgcaaaatgaccaagggcaagggagagggatccgtatttatagagaaaccctagggctagggttttcttag

SEQ ID NO: 40995 - DNA, 573 bp, Zea mays
  Peptide Sequence Number=SeqID_82774
atggggaggaaaaggagcagcggcgctgtggatctcgggtgtgtcatgtggcttgtgctcgcgcgcagggaaatccccggcgccgtggctgctggccggagctggggctcggtctgcaacagtgggggtcgacaatggggaagaagttttctgctgaaaattcagggcgccatggagcaagaagcagaggaagccacgaccaaggggagagaagagggtgtcgtggttggggaaaggagatggagcagagagctcgcagggaggggcaccggcgtgctcccagggagaagaaggggcgcgctggccatggaggagcttctgcgcggcgtccaaaacagggaaggtggagctcgcgcccatgggagaagaagggcaggggagagagcatgcttgggcgccggcttgaggaagaagggcttgggcgccatggagaggaagggagccgagctccctgcgctggctgctgctgccgtgagcagcgaggaagaaggcagggaagctgtggcggctggaaaaagtggagggggttttgaatttggtttggacatagagatatttggccgagtcgagtaa

SEQ ID NO: 40996 - DNA, 574 bp, Zea mays
  Peptide Sequence Number=SeqID_82775
atgggcgcgggctccaccttccctgttttggacgccgcgcagaagctcctccatggccagcgcgccccttcttctccctgggagcacgccggtgcccctccctgcgagctctctgctccatctcctttccccaaccacgacaccctcttctctccccttggtcgcggcttcctctgcttcttgctccatggcgccctaaattttcagcagaaaacttcttccccattgccgacccccactgttgcagaccgagccccagctccggccagcagccacggcgccggggatttccctgcgcgcgagcacaagccacatgacacgcccgagatccacagcgccgctgctccttttcctccccatcttccccaccaaacagcaaccgcagcgagctccaccgtcgacctcgcgcagcagccgcgacgccagttcacgcagctacatgggtttccctccgcgtcgcgcccttgtcgtgctcgacgaaatggcgcagcgagcagcagccatgagatcccgtccgtggcgcttgcattgacccgatttgcgcagcgtctgcgcgccgtcgtcgaaacccgtg

SEQ ID NO: 40997 - DNA, 228 bp, Zea mays
  Peptide Sequence Number=SeqID_82776
atggcgtccaagttttctgcgcagcaatgccggttcaaaaaaaacagcagccatgagatcccgtccgtatcgcttgcattgacccgatttgcgcagcgcctgcgcgccgtcgtcgaaacccgtgctagccgtcaatgccagtcgtcgcgcacgcgtgttcgatacaagaccggtcgggtgcaccacgtgcttgcacaactcaaatccaatcccgttcagggtgattga

SEQ ID NO: 40998 - DNA, 792 bp, Zea mays
  Peptide Sequence Number=SeqID_82777
atggccgacgtcgcggcgcactacgatgacctggaggtcgctgtcggctccatcgaggccggcttcgtgcccttcccccgctacggcggctgtggcctaggaatatacatgttgaacatagtcgaaggaaagatgcagtacctatttgatgaggatggccgtcgttacctggatgctttcggtggcattgcaacagtttgctgtgggcactgtcatccagatgtggttgaagccatagtaaaccaggcgaagcggatccagcactccacagttctatatctcaatcatgcaattgcagattttgccgaggcattggcttccaaaatgcctggtgatctgaaggttgttttcttcacaaattcaggcacggaggcaaatgagcttgcactgatgattgcacggctttacaccggttgcaatgacattatctctcttaggaatggataccatgggaatgctgctggaacaatgggtgctactgctcaatccaattggaaattcaatgttgttcagactgaagtgcgtgcattcttcgacgtgcatgatcaagaaggaagtcacccaggaggcatccaccttgaaatgactgggcagaacgtgaccgagtgcattggtggatcaaggactgtgaccttcgatgacctgagcgaccgctaccacacccactgtgacccaaggctgaacgcctcccagtccctggagcttgccttcatcattgcagagaggctcaggaagaggaggatgcggtcggggctctacaacagcctgcctctgccaccactggctttctaa

SEQ ID NO: 40999 - DNA, 660 bp, Zea mays
  Peptide Sequence Number=SeqID_82778
atgcagtacctatttgatgaggatggccgtcgttacctggatgctttcggtggcattgcaacagtttgctgtgggcactgtcatccagatgtggttgaagccatagtaaaccaggcgaagcggatccagcactccacagttctatatctcaatcatgcaattgcagattttgccgaggcattggcttccaaaatgcctggtgatctgaaggttgttttcttcacaaattcaggcacggaggcaaatgagcttgcactgatgattgcacggctttacaccggttgcaatgacattatctctcttaggaatggataccatgggaatgctgctggaacaatgggtgctactgctcaatccaattggaaattcaatgttgttcagactgaagtgcgtgcattcttcgacgtgcatgatcaagaaggaagtcacccaggaggcatccaccttgaaatgactgggcagaacgtgaccgagtgcattggtggatcaaggactgtgaccttcgatgacctgagcgaccgctaccacacccactgtgacccaaggctgaacgcctcccagtccctggagcttgccttcatcattgcagagaggctcaggaagaggaggatgcggtcggggctctacaacagcctgcctctgccaccactggctttctaa

SEQ ID NO: 41000 - DNA, 267 bp, Zea mays
  Peptide Sequence Number=SeqID_82779
atggccttgttagatcctcccgagcgtctccagcccgaggtggcactcaacttggtgcgcaaccttctcggatggggtgcgccggcgttcgccggaaggatctatgtcggtgtctctcctcacaacgatctcaccgctagagagttcacgctctttgtttccaacctccccagcggtctagcgctgccgatttcgtctttcttcgtgctgctgctggatgagcttagcctccaacctcagcacttcacaccctgcttcatcctttag

SEQ ID NO: 41001 - DNA, 480 bp, Zea mays
  Peptide Sequence Number=SeqID_82780
atgctgctgctttcggcggagacgaagaagcgcactaccgcagacggtagcgtgctccacacgcggcggttcaccctctccgcacacggaggacgatgcccaaggagtatgactcgtgggcccgggcccccgtgtcagaggctgggtcaccctggcgcgcgtcgggcgagatcttctgcggtgtcttggggctcttctgccgccctagccgccatggccttgttagatcctcccgagcgtctccagcccgaggtggcactcaacttggtgcgcaaccttctcggatggggtgcgccggcgttcgccggaaggatctatgtcggtgtctctcctcacaacgatctcaccgctagagagttcacgctctttgtttccaacctccccagcggtctagcgctgccgatttcgtctttcttcgtgctgctgctggatgagcttagcctccaacctcagcacttcacaccctgcttcatcctttag

SEQ ID NO: 41002 - DNA, 1599 bp, Zea mays
  Peptide Sequence Number=SeqID_82781
atggatgatgtttatgaagaaagccatcgcctgctcggacttgatgttggtgaggcgtcggaccttgattcacttggagaatttgtcgatggcgaccaacaggccttgagctggcagcccacgcccgcgggccgcttccccctctcgcgctcgcgactacctccccctcggcccacctccggcccactccgcgctcgtgcccacgcaccactaacacgccgtccccactcgtcagtcgcctccccctcgccctcgctcgcgaccgctcccgctggcaggctggccccaccagtcagtcaccccatcgtcctcgccgtgtacggcttcgccgcggtcacctccggccaccgtcctcttcctcgccccgtcccctcgcccatcccctcgccgcatagggaagttcggcaccgccccgtcctcgccgttgtggccgcgtccttgcacggcaccgccccaccgtgcgatctcgtcgtcgccgctccacccatcttccactcgctcgagctcaatcgcgctagcgccgccgtcttcctccactctgaagaagtggggaccgtcgatccggaacccgtagccccggaagaagggccagagcccaacctcccggagggaatccctggtttaggggagggcctaaggtgttggctcagctggtttaggcgtgagcagaaggattgcccctcatataaggaccaggttatgaaggctggggagcaccgggaggataaggacggggaaggttttgtccggtttggacatggtggtggcctgactccttccggtataaccgttaagatggaagactctctggtcattaggacatcctactgctcagaggtggaggggttcccacatctgttgcgaagttgtgcgcttcgcatggggatccgcaagaagccagaatatgtctggaaggagtatctcgagaatggaatggagaaatgctctatggcagtctacctgggagaaagccgaaactacccgaaccatccttctttccaagtcactttcaccggacaccgcttccagatacttgccagaatgttgcccgaaaagccctccgacaactatgccagaactacagcagacaacaaaaatacccccgcctggaggaaaagacttcaggccctgtcagggagagaccctaccgaggatgaccccaccatcgtctacatggctggataccttcacactctcgataaccaatatgatgaccttgcctcccactgcactcacctaaactcccgggtggaaagccttgagcaacaagtccgggaacttacaagggaaaaggtgtcccttcaagagagcctcgagatagcggaaggcgaggaaaccaacacccgtgaggtctaccgcactttgaagatggattacgacaagaagctaaagaagctcgcccccgcaagaaaaatctgcaagaagaccaaaagccaaggatgccaaactgagcagaaggaagaagcccctccagccctacctcctaccagaatagggaactcgtctgacaccgaggaaatgtccctagccagccttgatgaccttctcaaggaatttgggggacactttagagaaggagttcgggagtaccctagatag

SEQ ID NO: 41003 - DNA, 869 bp, Zea mays
  Peptide Sequence Number=SeqID_82782
gtctgcctgtggtgtgggctagggtgccttctatggcgttttatattcgggctctctgggagcttatggaagactctctggtcattaggacatcctactgctcagaggtggaggggttcccacatctgttgcgaagttgtgcgcttcgcatggggatccgcaagaagccagaatatgtctggaaggagtatctcgagaatggaatggagaaatgctctatggcagtctacctgggagaaagccgaaactacccgaaccatccttctttccaagtcactttcaccggacaccgcttccagatacttgccagaatgttgcccgaaaagccctccgacaactatgccagaactacagcagacaacaaaaatacccccgcctggaggaaaagacttcaggccctgtcagggagagaccctaccgaggatgaccccaccatcgtctacatggctggataccttcacactctcgataaccaatatgatgaccttgcctcccactgcactcacctaaactcccgggtggaaagccttgagcaacaagtccgggaacttacaagggaaaaggtgtcccttcaagagagcctcgagatagcggaaggcgaggaaaccaacacccgtgaggtctaccgcactttgaagatggattacgacaagaagctaaagaagctcgcccccgcaagaaaaatctgcaagaagaccaaaagccaaggatgccaaactgagcagaaggaagaagcccctccagccctacctcctaccagaatagggaactcgtctgacaccgaggaaatgtccctagccagccttgatgaccttctcaaggaatttgggggacactttagagaaggagttcgggagtaccctagatag

SEQ ID NO: 41004 - DNA, 1692 bp, Zea mays
  Peptide Sequence Number=SeqID_82783
atgccgtcttcctcctcgtctgctgcgaccacgccgacgaccgaggcgtcttctgaagatctctcgggcactgtggcggcggcggaattacgaccgggcgatacagtggaattcagtgtttcgcggatgtcgttggtccgcatgcaagatatgcaatggttggggtattttggcggcggggttggtcgggtcccgggggcggaggaggtccccgagcccgagggcgaattggttgtttttgaggcatttttcatcgtcggccttcgcctccctgcgcatcgttttgtgtcggaggttctgcagaagttcgaagtccaggacgtcgtcgaccgccgcgggaaaaaaccagcggctgtgaccgaggacgaccccgcgccggaggccgccccatccactaaaaagaggatgctaggtactgcggtgggagaattgggggtctccgatagcttcgctatggagttgatggggacatgcgcggcccccgggggaaggatgtcttcgcccgagctccgggagtcttcggcgcggatgctggaggttaccgggggtcgatggcccaagcacgttcctatctcccgtgcggctggcgaagacttttttatgtctcgcatggcttgtgacttgagagtgtttccttacggacagaatattgctgctgttgtgtcggcagtgatgaacaaggatcgccaggatgctgcgcagaagcaccgggcggtcatcaggctccccgaagctaggccgaagagggcgcgggggactgcgaaggctaccgtccccgtcggtagccagctgacgctggctgcaaagccgaccacccctgggtccagcaaggtgccggagagcgcgaaggcggtcggcgccggcggaaccaagtcagccccggacggagctgcgaaggtccgggaactgccttcgccggggaaacgcgttgccgacttcggcacaaatattagcgtggacgactatctcgttggatcggacgaggggcaacttgttgttgttctgccggcggtggcaaccacgacgtctaccgcggtgcttggggtgaagggtagcgctttcagcgctggcggcgagattttggcggtcactgccgtcaaggacgaagcgggcactgtgtcccgccgactttggtgtttgccgctttcatggggattgtggtctcatcacgctgacaccgtccgggagaagtcggctgcggatagcaagtgccgcaagatggcggagaaggtggccgccctggagggcgagaggacggacctctggcgccagctggtggaggagaggagggaggccaaccaggccatcgccaaggcgcaggcggcgcaggcggaggccaaactggcacgggtggaggggagtctcgccagccagcgcgccgaggaatgggaggtgcggttcaacgctctgcaggcccgcatggagagggccgaggcctccacgcactcggaagttgagcggacgcgcaaacaactcatggactcgtaccgcgagctgggtgcgcggactgctgacttcgaggtgcccgaccgagaggcgggccttcgcttcctcgagtggctacaagaggaattgttggcgctctcgaccatcatggagggattcatgtcctttgcctccctcgtcacttgcgaaggggctatgaacgcgctgtcccgcgaggggtgcagtcactatgagggcttcgactaa

SEQ ID NO: 41005 - DNA, 1101 bp, Zea mays
  Peptide Sequence Number=SeqID_82784
atggctgctatattactatcttcagacctgaataagagaagggggtgtctgttatacaaaaatgataaagaagttgactctggaagcccatcagatgttgagatattagaaaattcaatagattctaagaagaggaaactactccacgtgcttcatgatagcgaagtagtgtatgaagatgaggaaggccctattactcaagcagacttgcaaaagtggtttgttgatgattgggataaaagagctcctgtaaaagtctctaacgatgggtgcaccaatgactttttaatggttggtctttccacaaaggacatgccagtgaccaaagccgattcaatagatgttttatgtgattatatcatggcaatagaagacgatatgacactcgagatgacatgggtgcgaagtttcaatccttttaagatagaaatctctgtcaaagacctgcaaaacatattaacgataaatcaagatatgattctaagatgttttgacatggctgttcggctgcttgccaataaagagtcacgtaggccgaaaggagaaatcataaataatagaaagcattatatggacatgcgtttctggagaatggttggctttggtaaacttccaaagtaccatcaggaccctacagcagaagagttagcaaaaacactcgattgttggccatcaatgaattattatatcacgggttgtagatatgttcttatgccatggaaattcaacggatgtcatgcccttttcgtaatagatcatgttaaaaagcatgtgacttttatcgactttacaccgactcaagattggtgtaaacacatgccatacaagaggtttgcggaagcgattatcatggcctcaaagaaatataagattgcttacagcaagaaacgttctggatgggcggaggatatctttaagtgggaacataccattcagactggtgttccaattgacttaagagggtttaataccagctacctcgttctacaagctatgtccatgtgggggaatgacagacgaatgaaatttgttggggatgcaaagattgttcgaaggaactttgtgattgatctgttaagttatgaggataattcgtgctga

SEQ ID NO: 41006 - DNA, 1128 bp, Zea mays
  Peptide Sequence Number=SeqID_82785
atggctgctatattactatcttcagacctgaataagagaagggggtgtctgttatacaaaaatgataaagaagttgactctggaagcccatcagatgttgagatattagaaaattcaatagattctaagaagaggaaactactccacgtgcttcatgatagcgaagtagtgtatgaagatgaggaaggccctattactcaagcagacttgcaaaagtggttcgttgatgattgggataaaagagctcctgtaaaagtctctaacgatgggtgcaccaatgactttttaatggttggtctttccacaaaggacatgccagtgaccaaagccgattcaatagatgttttatgtgattatatcatggcaatagaagacgatacgacactcgagatgacatgggtgcgaagtttcaatccttttaagatagaaatctctgtcaaagacctgcaaaacatattaacgataaatcaagatatgattctaagatgttttgacatggttgttcggctgcttgccaataaagagtcacgtaggccgaaaggagaaatcataaataatagaaagcaatatatggacatgcgtttctggagaatggttggctttggtaaacttccaaagtaccatcaggaccctacagcagaagagttagcaaaaacactcgattgttggccatcaatgaattattatatcacgggttgtagatatgttcttatgccatggaaattcaacggatgtcatgcccttttcgtaatagatcatgttaaaaagcatgtgacttttatcgactttacaccgactcaagattggtgtaaacacatgccatacaagatgtttgcggaagcgattatcatggcctcaaagaaatataagattgcttacagcaagaaacgttctggatgggcggaggatatctttaagtgggaacataccattcagactggtgttccaattgacttaagaggctatgtccatgtggggaatgacagacgaatgaaatttgttggggatgcaaagattgttcgaaggaactttgtgattgatctgttaagttatgaggataattcgtgccgatatgtcatccctgcaaacatacaacagagacttatcgatatcgctaaaaaggattag

SEQ ID NO: 41007 - DNA, 891 bp, Zea mays
  Peptide Sequence Number=SeqID_82786
atggcgaacgacacgaacgcgcacgggggaaacagccgcgcgcagggcctgttggacgcgcggaccaagcgctgcgcaggggccaaccggcgagacgacggctgggctggggtactcgaccgacggaacgacgggacggagaagaacggggcgtccgggtcggctcagccgagctctagccatggcgaactagcagtacgtcaagagaagggtgggggagagaggaaggaggcagctcacctcgatggcgcgcacgacgacggctgcagcggggcgcggcaacaccgggcgggacgcagcgaggtcggcgagcggaggttgacgacggcggcgcgacggcgagactcgctgcgcagcgagtacggcgagcgcgcacgcggcgacgacggcggcactccgacggcgcaggggacgcagagagcgagggcgaggcaaggaggagcggtgctgggcgagaaactgcgcaggaatcgtgggcagttcgattttggagacgtcgtgggcgagaggaatgcgcagaaccgttttgggaagaaaaacaatgcgcgcaagctctctgacgcgcgggcccggctgggcagcagcggcggcggcgctccatgcgcgggcgagcggctgcgtgcgcgctacgcgcggctgggcgtgcggcctgggctgccaggcgcgctgggctgggggctggctcgcgcggccagctgggctggcgctagctgggctggctgcttgcgcgcgcggggggggggggaagaggggctggcgcgctgggctgccgcggggggaagctggaatgggccgcggcgcggtgggccgagcgggggggggggggaaagagagggggaaaagggggcggctgggccggccgagctgggccaaggaagggagctgggctga

SEQ ID NO: 41008 - DNA, 285 bp, Zea mays
  Peptide Sequence Number=SeqID_82787
atggctagagctcggctgagccgacccggacgccccgttcttctccgtcccgtcgttccgtcggtcgagtaccccagcccagccgtcgtctcgccggttggcccctgcgcagcgcttgtgcgcgcgctcgcgtttgcttgcgcgcagtgcgtcgatgggactccgtctacgttcgcctactcttcgtctacccctagacgactctcgtctacccccgtctacccccccccgtctaaccccgtgcgcgttcgtgtcgttcgccatcgcccgcgcgtcgcgcaataa

SEQ ID NO: 41009 - DNA, 936 bp, Zea mays
  Peptide Sequence Number=SeqID_82788
atggtcatccataaggacgatcaccatccttgtggtggggagaagcaagccgggttgcggcctctgccccgccctcaactacaaggatgttcatcatcctggatgaggaggagggtgcaccgagtcgagggtcgcctccgcgtgggcagcggcccgctccttccctcagtgatcgggggagaagggcgttcgccgccagtggcgctgtcagctgccgcgtctctggctccccggtctgagcggccctggcgcagctttcggtgcctcctcctaccgctggggcggagtgtggctgcccgttcgccgcacgggctggctatgtcagatcctccttgcgtcgtcggctgtaccggggggtcgcctaacacgtcgtacgccacgagggcggtactcgtgttctgggacagccccggcgaggacgggagtgaggacctgccggtgcagtttggggtggccgccgtttgtcggtgcggtgttggtgggcaggtggccgctgtcgtcggtgctaaggtggtggtggtcgccataggtgaggcttcctctgccgacgagaccatcagcgccacctggatccggaccccggccttttggcttgaatggcttgtcctcgtccctcggacgggggacgggttcgagggccttttcttagacgggttcgagggccttttcttagacgggttcgagggccttttcttagacgggttcgagggccttttcttagtagtgtttgcctcgaggcaatcactgctgctgtctagccacccgaggcggaggtcgttgtcgctgctggtgcagtggtcgccgacgaactgcttggagctcgttatcccgcaggccttctggtgtggaggttgtttattcctgcgggaatggacccagagtcctgtttgtagtggtaccatcttgagggcgagatgtaatagatttgagtactaa

SEQ ID NO: 41010 - DNA, 1119 bp, Zea mays
  Peptide Sequence Number=SeqID_82789
atgccttcgcactcctctctcgtatcgctcccttccacctttcgagcccccaaatggggcgcacctgtgtggctttcttcttgctgctgtttgagaagcgcaacctcatgggggttggcgctctccagtcatcgctcggcttcaaggattttcatcatgcagcccggctgcagtcccctaccgatggtcatccataaggacgatcaccatccttgtggtggggagaagcaagccgggttgcggcctctgccccgccctcaactacaaggatgttcatcatcctggatgaggaggagggtgcaccgagtcgagggtcgcctccgcgtgggcagcggcccgctccttccctcagtgatcgggggagaagggcgttcgccgccagtggcgctgtcagctgccgcgtctctggctccccggtctgagcggccctggcgcagctttcggtgcctcctcctaccgctggggcggagtgtggctgcccgttcgccgcacgggctggctatgtcagatcctccttgcgtcgtcggctgtaccggggggtcgcctaacacgtcgtacgccacgagggcggtactcgtgttctgggacagccccggcgaggacgggagtgaggacctgccggtgcagtttggggtggccgccgtttgtcggtgcggtgttggtgggcaggtggccgctgtcgtcggtgctaaggtggtggtggtcgccataggtgaggcttcctctgccgacgagaccatcagcgccacctggatccggaccccggccttttggcttgaatggcttgtcctcgtccctcggacgggggacgggttcgagggccttttcttagacgggttcgagggccttttcttagacgggttcgagggccttttcttagacgggttcgagggccttttcttagtagtgtttgcctcgaggcaatcactgctgctgtctagccacccgaggcggaggtcgttgtcgctgctggtgcagtggtcgccgacgaactgcttggagctcgttatcccgcaggccttctggtgtggaggttgtttattcctgcgggaatggacccagagtcctgtttgtagtggtaccatcttgagggcgagatgtaatagatttgagtactaa

SEQ ID NO: 41011 - DNA, 267 bp, Zea mays
  Peptide Sequence Number=SeqID_82790
atgcctcataatatctgccaagaagggctacgctccgataccagctgtgacggaacctcccaaaagcagcaaaagtctgctacttcctcacctaaaaacaacgaagggataaaccctgagtatggaatactcagcaagtcttacccgactaaagaaaagactctcaagggtatgctggttaagggagtcaagcaatcaagtgagaaagattttaaaatagcaaggaaggtggcaaatgcaccggggcttgccttcgtttacaggtga

SEQ ID NO: 41012 - DNA, 282 bp, Zea mays
  Peptide Sequence Number=SeqID_82791
atggccccgctcggcccggtctacgcgctcgccggagctcctccgcgcgctgccgtcgtcggggacctcacctgtggagaaatagaacctcagggaccccggtgcaagttgtcagtgactgatacaaataaacgtgaagaagagatagaagtcaccgaagacaggacaccaccaccttcggatttgcaagcaggcaactgcttctacttcgatatctgtgggtccgaacccgaatcacctgtaaacgaaggcaagccccggtgcatttgccaccttccttga

SEQ ID NO: 41013 - DNA, 390 bp, Zea mays
  Peptide Sequence Number=SeqID_82792
atgacttctcatggatcctcggacgaagggaatgcacagtcccacacggacggacttgcacgagagggtttcccctgtatcttgtgggaggtacttcagggagctggttacacgacgcctccccagtacgcggtgcagctgttcgagaagcaccgagtgccccgctgtaggccaggctggcgttcgctggactctgagtcttttggatacagggctgaggatactatcgaggcgattgctcttcatggactgaccaccttctgtggtttccaccccttggagctgtccactcaccccattggtttgttccccgcggagaaggaggacgaaccaatgtggaaggaccgagtggagcatgccaaggatatatgggctatctacccaggttag

SEQ ID NO: 41014 - DNA, 918 bp, Zea mays
  Peptide Sequence Number=SeqID_82793
atgacgtgtcacagctgcgagatcaaggcagtagtgacaacaaacttaaggctcacatcaccaacaccatcgatccaagtctttgcggaaaaacactgtagcggcactggagaagtgtcccagaccaactccggggagccgattggtgttgccgagctggggctaccgctgctccatggagtccgtggccagaggagtgagagagcagggacggtggagagggagctggttacacgacgcctccccagtacgcggtgcagctgttcgagaagcaccgagtgcctcgctgtaggggctgaggatactatcgaggcgattgcccttcacggactgaccaccttctgtggtttccaccccttggagctgtccactcaccccattggtttgttccccgtggagaaggaggacgacccaatgtggaaggatcgagtggagcatgccaaggatatatgggctatctacccaggtcagactgctcacttgacggtgcggtgcatgaatgccctgtatcgtctgcaagtgatgcgaggagaggccatgtctcatctgatggcactgttggaggctaccaagatcaccttggataacagggaggaacttgtggtagacttgtccactgagatggtggaaaaagacttacaagtggaacaattgtcaaatgagatccaagagcttgaggagctagtgggcaccagggagaacactatcgaggttctcgaggatcagctaatcaacactcagcagcagcttgcggaggctaaccagcatcttgatatgcaccaccaggagatccaggacatggaggccaatgaggatgtcaacatcaagggaggagaggagcctgcctccagcttggacactgctagctcagggagaccaccttcccctgagtcgagcgttgccttgtttgctcactag

SEQ ID NO: 41015 - DNA, 327 bp, Zea mays
  Peptide Sequence Number=SeqID_82794
atggttaggccggagcactcgccgccgatgagttcacccgcctgcgcacgtggaccggctgattccggccaccaccgccgtcgagtcgtacctcgctgtgaccgccagaacctcccggagccaaccccgcccctcgtcggacctccctcaccaccggaggtagcaccggatccagcaccagagcctgccccagaggatctgcctgcctcagctttggaaggttccctggaggacatggttgctggagtgacttggttgtccatcttgccaccgggttggacagtcgagtgggaccctacctcggctgaggaggagcacgaggagtga

SEQ ID NO: 41016 - DNA, 384 bp, Zea mays
  Peptide Sequence Number=SeqID_82795
atggttaggccggagcactcgccgccgatgagttcacccgcctgcgcacgtggaccggctgattccggccaccaccgccgtcgagtcgtacctcgctgtgaccgccagaacctcccggagccaaaccccgcccctcgtcggacctccctcaccaccgattgtaacctcgcggacggagagtacatcctcgtgccagagcaaggagttgctcaggaggtagcaccggatccagcaccagagcctgccccagaggatctgcctgcctcagctttggaaggttccctggaggacatggttgctggagtgacttggttgtccatcttgccaccgggttggacagtcgagtgggaccctacctcggctgaggaggagcacgaggagtga

SEQ ID NO: 41017 - DNA, 960 bp, Zea mays
  Peptide Sequence Number=SeqID_82796
atggtggcacgccggaccaggagagcggaggccgctgcgagggtgatcgagatgtacagtaagtcagtaacgaccccgcctaccggttcctgcatggccgacctctttgcggggctcatcgcggaggacatgcgcaagctcgcgaccggcaaggtccgggagttctcgctctccgccaagtggtgcccgtcgctggactcctcctacgaccactccacgctcatctggctccgcgctcgagctcgccgcgccgcctcttccccaagggctccacgccgcctcttccccaagggctccgcgttcaaggcctacacacggctctggcgcctgcagcaggagcgccgccgggacctcgtcgccgtcggcctccgccgctgggagatcggcgaggtggcctcccggatcggccagctctactacgcgcgctacctccgcgccaccgagccgcgctcgcttgtcggcgcctacgtcttctacgaggccatatatagccgcgactacttcggcgtggccgcggctacggtggggacgaacagcggcggtggcggcgtcagccggcaccaggcgctcctgatccggtgcaaggagcttcagttcattgcgcggttcctcgtcgtatccatgctgatgtggccaacagtggcatgtctcgcactctcgcaggattggttgctggaccagtttggtgttcttcatgatgggaagaagtcgtacccgaccattctggcatgtatgttggtagtttctcttgagcccccactctgtgttcaggacttagggatgcttgatatccttgaatgggcaccggaaataagttacatatggactacgatgatcgatgccgtgatctccaagttagagagcaaaacaggggagaacctgatggtcaccgaaatcgtcggcccaaaacaaattgcagaggtggtatgtaatacccaatttgtaaaagatcatatataa

SEQ ID NO: 41018 - DNA, 840 bp, Zea mays
  Peptide Sequence Number=SeqID_82797
atggcgggggctgctgctggcgccagcgaggaggcggtggagagggcgcacgggctctgccagggctccatgagggagcacgctgatctactcagctccgtccgagacgatagcccagggccaacggtggcatgtcgccacgagtgcatttgctcagggaacgagcttccattcatggcagcatcaaccagtagaacaattcaacagattcagatcagggtcatggatatgttctcggtcaagagtctttataactacctttggaactgcatagactatctctactcggattggttgcaggacctgtttggtgttcttcatgatgggaagaagtcgtacccgaccattctggcatgtatgttggtagtttctctcgaggattggttgctggacctgtttggtgttcttcatgatgggaagaagtcgtacccgaccattctggcatgtatgttggtagtttctctcgaggattactcaaacccgtttgatctctttgaatccctttttgaagggtttggtgaaatgggtggaatggggggtggccgtgctgctcggaacagaccaatgcaaggtgatgatgagagctacaatctggtactcaatttcaaggaagctgtgtttggtgtggagaaggagattgagataaccagattggaaggctgtaacacctgcgatggaagtgccttaggcaaaatatatgatggtggaatcaggtttagacttgacatttctttcacaaatgctgcaccatgcattcatggaatctgcgcagaggatgctaggaaaatactcaataatcatggtacatgtccaattctaagtatggttgccgagccttga

SEQ ID NO: 41019 - DNA, 573 bp, Zea mays
  Peptide Sequence Number=SeqID_82798
atgaggaaaaaacacggctccgcgccgaaattacataaatgttcaggcctcgacagccgcaatgaacaaaaaacactggcattcgagatgccattaccaacggaactccggttcccccctccgcaggtacgaacgaccccactccgagggggaaggcctgcggagcaacggaaggccgacgaacggcgcgccgtcacctgctccggcagcggcgacaacgacgacttctgctccggggggccgaacagcggcagcactgacctcagggtcgatgccgctgccaggaggcccccgcccatgccaaaacttgtgaggcaaggacgggcagaaggccgagaagttggagggaccgggaaagggggataccccgaaagggatccttctccgcgaaggaaccgggctccgagccccccactactgatcaggggttcgaaggctggccctccgaagggttcaacagtcgcttcagatcgcgtgggcccgacacccactactggtcaggggttcgaaggccagcccctcgaagggttccatggtcgcctcaggctactcgggctccgcgcccattactga

SEQ ID NO: 41020 - DNA, 1114 bp, Zea mays
  Peptide Sequence Number=SeqID_82799
atgaggaaaaaacacggctccgtgccgaaattacatacatgttcaggccccgacagtcgcaatgaacaaaaaacactggcattcgagatgccattaccaacggaactccggttcccccctccgcaggtacgaacgaccccactccgagggggaaggcctgcggagcaacggaaggccgacgaacggcgcgccgtcacctgctccggcagcggcgacaacgacgacttctgctccggggggccgaacagcggcagcactgacctcagggtcgatgccgctgccaggaggcccccgcccatgccaagacttgtgaggcaaggacgggcagaaggccgagaagttggaggtcagcccgtggccgatcccggccgccgcgccggcggaagaacctcttccagctgccgtggcggacgccggcgccgtgagcggccccgaagccactcgcggctgaagaccgggcacgctgcagctgccggaccccacgggcaatacccgcttctccccccatcactgagtgaaaggagcgggccatcgcccacgcaggggccgaccccaactcggcactctcccctcccagccttggtgatgaaaatccttgaggctgagggagggggcagaaggccgcagctcggctcgctttcccccaccatcaagccggaggtcgccatctcgggcaactctccctacgtgcgcccccaggcgccgcgggctgagtcctctccaacgcgctccaaggccctcccctgcgactcgggggctgggtcccgcatgtcatacaaaccagctcagggcagaagaagccaaaccgccgcgcgtggtgcgcacgaccgtccagcggttacaagcgaccccccattttcgcccagaccaacgggcagaaggggcgggcagccatgcaggcggcatgcaaccgcgccagatggacgcgcttctccgacttctgacatgcccagcttggggaacccaggccccacgcgtcgagcaaaccggcgcgcccagttgctgcatgcaagcaaaccgcaccgcccccttgtgcccaccttcgcgccctctttcagtttgcgggagcctaatgcccgcgactcgagggtgaacccaccagcttccggcctgg

SEQ ID NO: 41021 - DNA, 501 bp, Zea mays
  Peptide Sequence Number=SeqID_82800
atggtgagagaacgaagaacacaaacaaccacaatgagcaagaacacaagagacacaagatttatcccgaggttcggtcacaccaccaaggtgccctacttcctcgttgaggcgcccccaaagagccgggtctctttcaaccctaatcctccctttgccgaccacaaaggtcaagctcacacactaatctttgctcaaacgagcggagtgtgggaggtgtatataaaggtgcccacaaaagcaggtggccgttggggaaagttggctaaaaaccggttgaaccggtttgtaaaccggttgaaccggtttccaccaggaagaactcggttcactgacctactcagccggagagtcaaccggactcaaaaccggttgagccgggctcaaatccggttgaaccggttttcccaaaatctgcacacgactttttctgacaggactgactggcagactggcagtgacagagcggaacagtgcagaaaccggttgaaccggttttag

SEQ ID NO: 41022 - DNA, 1131 bp, Zea mays
  Peptide Sequence Number=SeqID_82801
atgccgcgtcttctcggggctacagaaccagtgcaacgacttgaggcagccccgcgcatgacccaacagtgccaattaagtacgacggtcacgggtcagtcagccgcgggaataggcacgacagttgatatgaccataggcaggccggcagtaattgcagcaacagacgtgcggaagcagcgggatcgagaaaggggatatttcgaaaggatccttctcagcgaaggaaacgggccccgagccctcctactgatcaggggttcgaaggttgcgccctgcggggttcggcgaccgccccagagcaatcgggctccaagccctttactgatcaggggttcaaaggctagcccctcgaagggattcgacagccgccccagagcatgcagagtcagggatgaccctgggtacgtccgttacatggccaaggctcgggctatgctcccgaggtaccctaagacatttctgagaccagcaggaacggtttgtaatggaatcccaccgaagggaggcaccgagccctcggaccctatcgaacgggtccgggtccagcaaactacctgcagcctcgggcgcaacagggaactctgcctcgctcgaccccaggcctcggccttagccccagcctcgggagaaggtcttcgcctcgcccgaccccaggcctcggcttcagcctcggcctcgggggaaggtctctgcctctcccgaccccaggcctcagcttcagccttagcctcgggagaaggtcctcgcctcgcccgacctcagcctcggcctcaggagaagtcgtcgcctcgcccgacctcggcctcggaccgactacgttacaggggatacatcattaccctacctctagctagccgtcttaggctacgaaggaacaagaccgatgtcacatctagattactccggcaacagccgcaagaaacatacacatacttaaaacaaattgttccctacaggctcaggtgtcggcagggggaggagcggcaccctggggtcattcctacccgcggcggaatctggcccggcctcggacggcgacacaggcggaaggatctccacctcgaaaaaggaagccagcaccgcgcctgggccctcggcagccgcgtcaagccttcggacctcggatag

SEQ ID NO: 41023 - DNA, 279 bp, Zea mays
  Peptide Sequence Number=SeqID_82802
atggcttcgcttggccaccctgagcgtttccagtctgagggagcactcaacctggtgcgcggcctactcggatggagtgtgccggggctcgccgggagaatccgcgtcggcgccgctcccctcggaggtctcgccgccggggagttcatgttgttcgtctcctacatctcctgcgggttggcgctgcagatctcgcccttcttcttgctgctgctggatgtcggtgggagaaatccaccggccgggtggcggaatgcacgcgctcaaatcctaagatga

SEQ ID NO: 41024 - DNA, 279 bp, Zea mays
  Peptide Sequence Number=SeqID_82803
atggcttcgcttggccaccctgagcgtttccagtctgagggagcactcaacctggtgcgcggcctactcggatggagtgcgccggggctcgccgggagaatccgcgccggcgccgctcccctcggaggtctcgccgccggggagttcatgttgttcgtctcctacatctcctgcgggttggcgctgccgatctcgcccttcttcttgctgctgctggatgtcagtgggagaaatccaccggccgggtggcggaatgcacgcgcccaaatcctaagatga

SEQ ID NO: 41025 - DNA, 669 bp, Zea mays
  Peptide Sequence Number=SeqID_82804
atggctaaggagatcaaatctactgaggatgaaggctatgatgattattcttatgaagtattttttagacaaaggctttttgacttcattgtaatgtggaatgccaccagcatcaggaatgttgaaactcgtgctcttgaccctttagcagccattgaagagacatcgagtttcttggagctgatcgcaataagatatcatcaggcatgccgaggagaacaagggcctcctctctgcctcctccttcgacaggcagctgctacggaaggagttggtgaggagggtcaaggccgcggtggcgggacgacgcctactcaggtggccagccacgcgcagaagtacttcatcaggctcaactccggcggcaaggacaagaggaggtccagcatccacgacatcaccacggtcaacctgacagacgatcagccaccctcaccgtcccagtcctccctgatcaccagcgagtcgaacgcaccagctctagctccggccgtggggatatgccaggtcccattgccgcccgacgccaagcgacacggtgccaaaactctgcccttcagctcaccgaaccggacctctgtcgcgccggcctacaggatggagtttcatgaccaacaatgcctgcggtttggacctctgcatgatcagttgctcaccagccgagagtag

SEQ ID NO: 41026 - DNA, 363 bp, Zea mays
  Peptide Sequence Number=SeqID_82805
atgacgcccgaggccggccttggctgctgtcagcctcactctgtcgggtggctcagcagttggagcggcgcaggcggcgctgtcctcttgtcagaccggtcagtagagcggcgaagtgactgcggtcacttcggctctgtcgactggagggcgtgcgtcaggataaaggtgtcagaccacctttgcattaaatgcccctgcgatttggtcgaaatagttgtctttatgctgcaatatctgctaaaggccacaaggcatgccgaggagaacaagggcctcctctctgcctcctccttcgacaggcagctgctacggaaggagttggtgaggagggtcaaggccgcggtggcgggacgtgagtga

SEQ ID NO: 41027 - DNA, 1125 bp, Zea mays
  Peptide Sequence Number=SeqID_82806
atggctcgaagaagatcccaaaagaacaagaaaacacctccgaaggaaaacaatgaggtaactcttgagatattgctttctgattgttctaattatgactcatgggctaccagggtactaaatgcttttagaaccgtagatccacaattagaacaaatcttatacaagagtattattcctcctagttatgataagaataatacttccgaggaagatcaaagatgtatacgcttaaactatctagcttatgacatcttaagtaattctcttagcaatgaagattatcgtgccttcatatcgaattataatgaatctatccatgatgcgcatgatatttggactagaattaaaatcaaatttgatgagtccaaacatgatagttcattttgtgcttctacttcctttggtatttgtgaaactaaccctttgaaggaagaagaaaatgaacgttggagaccaaacgatgaatccacctctccaaaaggtttgtcttcccatttcgattcccacatatgttgtgtggctaatgaaaatgatagcggaagcacaaatgaggatgaggaggatgaaagaagcttcatgcgactctacgctcaactaagcctagaagataaggcggtcatgctcaaacttctagaaagagcgagagagcaaagcaatgctcgtcaaatgcttgaagatatcctctccctaaaaatgctaagctttgatgagttgactaaagaacatgaggagctaaagtgctctcatgttgatttggtccaaagcaaatcttcctttgagctagaatttgcaggaacaaaagaagatacatatcaaaagctcaaagaagaaaatgagaggctaaaaatgagcttgacacaactaaaagggaagtgcattgctcaaccttctcaagataaccatgatcacatggtgaagaagcttgagacgggaacaaccgtggcatgcactaaatcccttgaagaaaatgtcaaggacttgaggattgccaagaggaaggaacaaaagaagaaaatcaatacctcttccaaaagcctcaaccatgcctccataaaaggaattaaagaattaatcctatgccaaaaagtcgaggtctacaacatggaggaaagccaaaggatg

SEQ ID NO: 41028 - DNA, 1260 bp, Zea mays
  Peptide Sequence Number=SeqID_82807
atggctcgaagaagatcccaaaagaacaagaaaacacctccgaaggaaaacaatgaggtaactcttgagatattgctttctgattgttctaattatgactcatgggctaccagggtactaaatgcttttagaaccgtagatccacaattagaacaaatcttatacaagagtattattcctcctagttatgataagaataatacttccgaggaagatcaaagatgtatacgcttaaactatctagcttatgacatcttaagtaattctcttagcaatgaagattatcgtgccttcatatcgaattataatgaatctatccatgatgcgcatgatatttggactagaattaaaatcaaatttgatgagtccaaacatgatagttcattttgtgcttctacttcctttggtatttgtgaaactaaccctttgaaggaagaagaaaatgaacgttggagaccaaacgatgaatccacctctccaaaaggtttgtcttcccatttcgattcccacatatgttgtgtggctaatgaaaatgatagcggaagcacaaatgaggatgaggaggatgaaagaagcttcatgcgactctacgctcaactaagcctagaagataaggcggtcatgctcaaacttctagaaagagcgagagagcaaagcaatgctcgtcaaatgcttgaagatatcctctccctaaaaatgctaagctttgatgagttgactaaagaacatgaggagctaaagtgctctcatgttgatttggtccaaagcaaatcttcctttgagctagaatttgcaggaacaaaagaagatacatatcaaaagctcaaagaagaaaatgagaggctaaaaatgagcttgacacaactaaaagggaagtgcattgctcaaccttctcaagataaccatgatcacatggtgaagaagcttgagacgggaacaaccgtggcatgcactaaatcccttgaagaaaatgtcaaggacttgaggattgccaagaggaaggaacaaaagaagaaaatcaatacctcttccaaaagcctcaaccatgcctccataaaaggaattaaagaattaatcctatgccaaaaagtcgaggtctacaacatggaggaaagccaaaggatgcttacttatgacaatctacaagaaagtaagtgcaagccacaagcctcaagggttactcttcacccaaagaaagaaagattgatgaaaagtaaaggtacaggcgtgatgcaaaaagcgaatgccaagtcagcatga

SEQ ID NO: 41029 - DNA, 720 bp, Zea mays
  Peptide Sequence Number=SeqID_82808
atggccttgtcattaggtttagatgggcctgaggtaaggcaggagctgattttgctgctcagatatctgaagcaatgcatgtatttctcgaagaagccatacagcgtgtttttggactatggtggttatggccagaatgatgttcttataaagaaatctaaggcgaggatcctgaagcctgccttcacaattgtctgtgacagaagtagccaatgctttctccttttcattaggggggctatcagtgttaaggagcggttgacagcagcaactggcgcagagatcattggacattcaatgggagctgggattgcaacaatactaacatacatccttcgcgagaatgagaagctggcatcatccacttgtattgcatttgggccagatgagtatgatggccaggtgagggaacttaattgtaaatcaatatgccatagtccaatgtgccctccttatgcacacagtagttcaagaaaaaatagcaagaaggagataaatgaactagaagattgtgctgcattaacagggcagttacaaccttttgtcaaagaagaagttttggtccctatattcaatggaacttttccctgtactgcagaacagttcttcagtattcttttaagtgatgattcaaattacataacagagtgtcgaacggatcggaaggataaagatataaatgtaggtatccagctcattgccagccttttgcacatataa

SEQ ID NO: 41030 - DNA, 444 bp, Zea mays
  Peptide Sequence Number=SeqID_82809
atggccttgtcactaggtttagatgggcctgaggttaggcaggagctgattttgctgctcagatatctgaagcaatgcatgtatttctcgaagaagccatacagcgtgtttttggactatggtggttatggccagaatgatgttcttataaagaaatctaaggcgaggatcctgaagcctgccttcacaattgtctgtgacagaagtagccaatgctttctccttttcattaggggggctatcagtgttaaggagcggttgacagcagcaactggcgcagaggttccatttcatcacgttgtggtccaggaaggtcgtgtctccaacctagtgttgggttacgctcactgtggaatggttgtagcagctcgatggattgcaaaacaagccattccttgcctgagtaaagcaatcgagcaattcccagaatatgaggttaagtga

SEQ ID NO: 41031 - DNA, 552 bp, Zea mays
  Peptide Sequence Number=SeqID_82810
atgggcgcgaaggggatggcgacggcggcggggacggcggtgttgctatacctggtgctgtcgggccggctctgcggggacgccgccggcgacggcggcaacctggatgaccagctgatatcgtcggctgtttcggcggcggctgaggcgcggaggcggaggaaggaggacgcccgggcgcggcgggagcagcggcgggcgtcgcgcaccaagtggcggtggcccgagcgcgccccggacgggtggggcgaggcggccgccttggccgcgcgcaccgtgcgcttcacctgggcggagacgctcggcaagtgggccctaggggaggtctccttcggtatcaagcactacatgcgccagcagggcaatctgcagcatgagtatgctggaagtgattctgtactactggatgggcctgaggtaaggcaggagctgatttcgctgctcagatatctgaagcaatgcatgtatttctcgaagaagccatacaacgtgtttttggagtatggtggttatggccagaatgatgttcttataaagaaatctaaggcgagg

SEQ ID NO: 41032 - DNA, 1110 bp, Zea mays
  Peptide Sequence Number=SeqID_82811
atggagatgagggcagccccggacagggctacgcctagaatggtcgcggcgatgagtccgcccacgccggagagggggacgctggggaggagggttgcagctgtggctgtgtcggcgggctcgccgcgaagttcgccggacagagggagaccggcgctggtggagagaagctccgctacagcgctggtgtgcacgccgttgaggaagaaagccagtgacaggaggcgcggttgggacagctggaggagcccgtggctgaggccccggcggcggcgatacacaggccgggtgcaggcgggccggagaaggaaagagcgaaggccgccgacccccaagcgctatgcggacgatagggagatggcgggagttaaagttgttccacaacttttagctcttgcccccaaactgcttagggaaatagcccagtcattttcacaacaaaggaaacaaagagagggcggtggtcctacatatcatgaaacttttgcttatgctcaagggccgtttgctcgtgtacctgaagcattaagttctaagcctgggcatttatctgcttcccaacagagagtgtacgaggactttgttcatgtatggcatccccacaatcaaaatgtgggagctacaggttctggtctgtctggtgttgctactgtctcgagtactcttggtgtacttcgagcttacagtccaaattcgacatcagcatcctccattggtgctgcatctacattttctccattggcatctaatgaccttcctgttagtgaaataagtgctatggtgccccctccatcaacatctgctgatcgtctgggatctattttacctgaacctttgaatactggggatgctttggagagatacaaacaggttgctcagaaggacaaagttgacgctcgccaagccaaggagaaggctagtgccgctgccctggagcgccagcaagcctacgacgcagcccttgcctgcctcgccaaggtagaggatgaggatcatgtccacctcgacgccccggttccctcaccagattgggatcagatggattgcgtcgtcaagtcctggatcctcgactcgctcgtcgatgacctcgccgagaacgtctcctcctag

SEQ ID NO: 41033 - DNA, 642 bp, Zea mays
  Peptide Sequence Number=SeqID_82812
atggtgccccctccatcaacatctgctaatcgtctgggatctattttacctgaacctttgaatactggggatgctttggagagatacaaacaggttgctcagaaggtactgatattttggctcgttcttagagatgtcaatggggacccaatacccgctaacccatggggatttcccctattagggtactggtatgggacaaaaattgtccccatgggtacagatatgggacaaaatcttcacccattgggtaaatgggtttgggaagcaataatccgaacccgattacccatgggtatttcatacgtgtacacctgtcatgtttgtatgaatgagttgaggtcaagccggccaccaagcccagcacgacaacgcaccaggccccagggcaatgttgattgccctgtcactcgactggttggcacatcgcgctggaagttttttacttccaaaatcatgaagagtatatgtgatcttgacaagacccctggacctggccgtcagttacttttgtattcagtgaactgtttggtaatgcggttccttttgtatttagtgaactgtgtggtattgcgtacacactgtaggtccttttgtattaagtgtagtagtgatgaggaactattgttgagtttgtcttga

SEQ ID NO: 41034 - DNA, 447 bp, Zea mays
  Peptide Sequence Number=SeqID_82813
atgtcgtgtggtcctgccatagttagcgcaaacaccaaaacaccaaaaggagaaaaaccaacgacaaaaacaggggtgtactgctcacaaggcgctcacactagtgctgttatcaagttcttatccgttcttaccaagccacagtggtgcaaaggatggatggaactagcagaatggcagtaccgtaaatattgtactagtgatgccaaaaaggcactagtagaaatcacaggaaaaaaaacgctcgataaattcaccgatcaacctggaaatctgataccaattgatgaagctgaggtgcccgatctttcggcgagtagagataattccgatttggcggaagatgacccttgcgatccgactacgacgagcaagcccgaggcgccaatgcaatcgctgaaccaactccctgtggttaccgaccttgctgatgcgagatcggcctga

SEQ ID NO: 41035 - DNA, 348 bp, Zea mays
  Peptide Sequence Number=SeqID_82814
atggcggagctccggctgtgcaagaaccactctggtgagcgagggccggctgaaccaaggagggaaggggcacaccgaagggtgtcccgagtagctgatggcaaggtgaagcttactgtggctctgaacggggcacgggcgcaacggcggccacagaacaggcggtggacgtcggcgagcggtgtcggaggttctcggttcacgtgggcagagcgagagagaggacgagagacctgggcagagggcgcaaatggaagtggggaggtgggcgagcagggtgcggggttcaaaaggggcacgggggctcggtcgtggccggagaacgcgcggtcatgggcgcgtccatga

SEQ ID NO: 41036 - DNA, 360 bp, Zea mays
  Peptide Sequence Number=SeqID_82815
atgggcgcggtggtgccgctcggtcccgcggcaggaactcgtcggagacgagcagaccggccacggtggggcaccagaggcttggggggaaataggggtgcgagggaggttgctcaccttgaggggacgcgctggaggcacggggcaacgacggaggcacagggacgcaacggggcgacggtggcggagctccggctgcgcaagaaccactccggtgagcgcgagtcggctgaaccagggagggaaggggcacaccgaagggccatcctccaaagggctttggcgacctccgagcaactcttccgggacaccgacagatacatcaccgccaataaacgagcccacgacctcatcgactag

SEQ ID NO: 41037 - DNA, 1170 bp, Zea mays
  Peptide Sequence Number=SeqID_82816
atgctggacgcgtcgaagtcgaaagggtgcgccccattggtgcggttgcatgccgcctgcatggcggccttcgcactcccctcatgcattgcgcccttccaccttccgagccctcggatggggagcgcccgcgttgctttcgtcttgctgctgttggaggagcgcaacttcgcggaagttggtacctttcagccatcgctcggcttcaaggattttcatcaggcagctcggctgcatcccctcgctgatggggagagggtgctcacctgcctagcggaaggggcggacttcgacaacacggggccgatcggccgcaagcgtcgtcagctctacgcagcttccggtgccacctcccatcgctgggcggagcgcggctatctacccgtcgtacgggcggttgttgcgccgtgcgcaccggggggccgcccaagacgtcgtgcgctgctagggcggcgttcgtgttcttgggctgtcctgcccttgctccggtacgacgcctctgcgcggaggtcggtgctcgcccgtccgggaggacccgagtggggatctgccggtgggcagacggctgccatcgtcggtgctgaggtggtggtggctgaagaagtcctcgtcaccgacgagatcgccgctgccatccgcgctccgggcttcggctctttggctttgatagcttgttctcgcccctcgagtggggacgtgggtgagggccttatcgtagcaacgtctgccctgaggtcatcgctgctgctgtttggtcgcccagagcggaggtcgttgccgctgctgccggagtgggcgacggcgcgccacctgggattctgtcgtcccgcaggccctccaacgtggggggttgagtccctcggctcggtcggcctttccgcccaaggcttctcttgcccagttaaagaaaccctcagccgctctgcgatgagccggagccggaggcagcggtgtcagcatggacagaggcagagttggctcgaaaagaagcttcgtcggccggagcctggccgagccgtccactggcgggaccaacgccggagtcgggttgtcgaggccatgagccgggctaatgtcctcgggggacagctggctgaggctacggagcggccggtcgagccgtctgctcgggccgggttcctggaggagaccccggcgacgatggcctag

SEQ ID NO: 41038 - DNA, 615 bp, Zea mays
  Peptide Sequence Number=SeqID_82817
atgcaggcggcatgcaaccgcacccagagggcgcaccctttcgacttcgtgcaagaaactgcaccgccactcgcgctagtaccgcgccttctcgactgcggaaccagtgccgcgactcgaggcgaccctgcgcatgacccgacagtgccaaccgagcacatcggtcacgggacaggcggcacctttggcaggcgaagcaggcgacgcttcacctccgccataatgaccgcgtcaaaaaaggtgtgccacgtcattcgatttcgtatccttttccacttcctctttctctctcttgcctcagggatcgggaaaagggatactccgaaagggatccttctccgcgaaggaagcgggccccgagcccccctactgatcagaggttcgaagactggcccctcagaagggttcaacagccgcctcaaagcactcgggctccgtgcccactactggtcagaggttcgaaggctggaccctcgaaagggttcaacggccgcctcaggccactcgggctccgcgcccactactgatcaggggttcgtaggctggcaccctaagggttcgacagccgcctcagacgcagagcgagggatgaccctgggtatgttcgatacataa

SEQ ID NO: 41039 - DNA, 362 bp, Zea mays
  Peptide Sequence Number=SeqID_82818
caaagggaacaacaactggaatttccaacctagcaacaagtcaaggaatagctacaagaggaattgtcgatgacacagatgagtgcactttccgagctttccaactatatgtgttgaatcatatcaaattctttatgctctgtaccattgtctgcaagataattgattttggacacattgacaagttttccgtgcacgagctgcttgcctacactgaggagtacattgatgagcaattctctggaaaccttggagagatcctgatcagaactaggatcttcgatcgatattatttgatcaaagtcaacctacgctctatcgtcgtcgacgtggcgacgctggccatcgacactatccagtga

SEQ ID NO: 41040 - DNA, 366 bp, Zea mays
  Peptide Sequence Number=SeqID_82819
atgccattgagactttttacaggggtgggatgggtacaccttgagacttggagtgctatcgagtttcaaatgaaggaaaattccaatcagttaaccttacacataaggaagttggaaatagatggaggcgaggccaaggcggcagcatcaagaggacgcctctctagctcaaggcagataattgattttggacacattgacaagttttccgtgcacgagctgcttgcctacactgaggagtacattgatgagcaattctctagaaaccttggagagatcctgatcagtttaaaactggagacttattatgaaaatatccaatccttgctatcaacatatgaggacattattgtcaaacgcctgtga

SEQ ID NO: 41041 - DNA, 366 bp, Zea mays
  Peptide Sequence Number=SeqID_82820
atgccattgagactttttacaggggtggggtgggtataccttgatacttggagtgctatcgagtttcaaatgaaggaaaattccaaacagttaaccttacacataaggaagttggaaatagatggaggcgaggccaaggcggcagcatcaagaggacgcctctctagctcaaagcagataattgattttggacacattgacaagttttccgtgcacgagctgcttgcctacactgaggagtacattgatgagcaattctctggaaaccttggagagatcctgatcagtttaaaactggagacttattatgaaaatatccaatccttgctatcaatatatgaggacattattgtcaaacgcctgtga

SEQ ID NO: 41042 - DNA, 531 bp, Zea mays
  Peptide Sequence Number=SeqID_82821
atggaggcgaggccaaggcggcagcatcaagaggacgcctctctagctcaaggcaggttctgctttgatctgtctgtagataatttagtcgatgacacagatgagtgcactttccgagctttccaactatatgtgttgaatcatatcaaattctttatgctctgtaccattgtctgcaagataattgattttggacacattgacaagttttccgtgcacgagctgcttgcctacactgaggagtacattgatgagcaattctctggaaaccttggagagatcctgatcagtttaaaactggagacttattatgaaaatatccaatccttgctatcaatatatgaggacattattgtcaaactcaaggggggcacgtacaaggatgctgagccccaacatgtgggcccaggagcaaaacagatggaatacgttatagaagtatccaatgccagtatcgcccagaagatctccgagcgccataatgtctgtagtccatatagtattgatatctcgcgactgtttcctcggtaa

SEQ ID NO: 41043 - DNA, 234 bp, Zea mays
  Peptide Sequence Number=SeqID_82822
atggggacggttgatgtgtgtggggatgaagtgcctcgccacgtcgtgtgtttaggtttaccttgcaaggataaaaactcgattcgaatcgtctgcttctcgcagctaatgagactgcttgatccattgtaccttcttgatttagttgatggtgtgacttggccttcgtccctgccaccgggacagacggtcgagtgggttactgcttccgcaggagaggaccaggaggagtag

SEQ ID NO: 41044 - DNA, 183 bp, Zea mays
  Peptide Sequence Number=SeqID_82823
atggatcctcaccaatgtggccgttcgaagcgcacttggggactctgggggttcgcgcttaaaaggatcgataccatgtatctacttgatttggttgatggtgtgacttggccttcgtccctgccaccgggacagacggtcgagtgggttactgcttccgcaggagaggaccaggaggagtag

SEQ ID NO: 41045 - DNA, 558 bp, Zea mays
  Peptide Sequence Number=SeqID_82824
atgacttctcacgaatcctcggaaggagggaacacatattcccacacggacgggcttgcacgagagggtttcccccgtattttgtgggaggtacttcagggggctggttatgctacacctccccaggccgaggatactattgagtccactgctctccacgtgctgacgaccttctgtggctttcaccccttagagctatcgacccaccccattggcttgttccccgctgagaaggaggacgacccaatgtggcaggatcgggttgagcacgccaaggatgtgtgggctctctaccctggacagactgctcacctgacagtttggtgcatgaatgccctgtatcgtctgtggacagtgcgaggtgaggcaatgtcccagcttatgggtctagtggtgtctaccaagatcaccctggataaccgggaggtccttgtggtagacctatccactgagctggtggaaaaggacctccacgtagagcagatggccacccaaatccaagagctagaggatcaggtggaggccagggagaacaccatcgaggttctggaagattag

SEQ ID NO: 41046 - DNA, 213 bp, Zea mays
  Peptide Sequence Number=SeqID_82825
atggccacccaaatacaagagcttgaggatcaggtggaggccagggaaaacaccatcgaggttctggaagatcagctccagaccacacaacaacagcttgaggaagccaaccagcacttggatctgcaccatcaagagattcaagacatggaggcagaaggggccgatgaggatgtcgacatcgacggaggaggagcaggagcctgcatctag

SEQ ID NO: 41047 - DNA, 191 bp, Zea mays
  Peptide Sequence Number=SeqID_82826
atggctggtccacggcgggtggcgggctccgcggcggtgagaccgccggcgaggccaacagggcggggaagggggcgagaggtggcgagcaccggcgagctcgccacggcgcacaatggtgacaacgggatggctcgggcagacggggcgacgggatggctcgggcagacgcaaggcgccaaaccaagctg

SEQ ID NO: 41048 - DNA, 351 bp, Zea mays
  Peptide Sequence Number=SeqID_82827
atggccgaggccggggtgaggaattggggagctcggggcggcccttttataggcgcccggggcagggaagggggcgagtggtggcgtgccctagcgagctcgccacggcggagatggtggagcacaatggtgacgacgggatggctcgggcagatggggcgacgggaaggctcgggcagacgcaaggcgccaaaccgagctggtgaacgtgataatggcgaggcgacggggcgggaagtggccggcggcaatcgcgtcgctagccccggtcacggacgcgaggaaggcgctgacgggcggggcccgctcgccagagagagatcgcgagagagcgaggggcgtgcgggctga

SEQ ID NO: 41049 - DNA, 297 bp, Zea mays
  Peptide Sequence Number=SeqID_82828
atggacaagatttgcaggttcgggccgcttagaagcccacgaaagaatgaccttacgaattattgggcccttgggccgttcgtgaggccttttacttctttagtggacccaggggatatctatcccccacaggacgccaaactcaaagagctctctctcctgcttacggccgaacccttcgcattttcacagagcaacatcgccacccatgctcctcagtcctcaccgatgccgcggcaagctgatgttgcctatctcctggaacggcgatcgcttcgagagcacgctgctgagtga

SEQ ID NO: 41050 - DNA, 432 bp, Zea mays
  Peptide Sequence Number=SeqID_82829
atgcgggatcctcgcccaacagccatgcgcgccgactacgcctccaccggatccggccttcctatagtcatcctgtcatccaacagggatcccggccacatagagtttcgcccgaatcgatcgccgattgactccgctagggccgaggcgtgggacgtcaccttcaagcagattatggctggagagtgcaaactggtgggctcggcaagttgctgcgactacagggaaatcttgtggaagataatggagcaagtaaaggcagaatctgatcaatggattgagatgcaagatatgttggagcaggaatccggcaaggaggagatcaagaagcacatcctcatctgctgcgtgaagcgctcactcagcagcgtgctctcgaagcgatcgccgttccaggagataggcaacatcagcttgccgcggcatcggtga

SEQ ID NO: 41051 - DNA, 525 bp, Zea mays
  Peptide Sequence Number=SeqID_82830
acggggtgcggtcacgtgctcgccagatccagctaccgttgaccttctccttgccttccactgcaggcgccggagcagggggtagtactcctaccggcgggggcctgaagaatacggcagccgcctccgcctccacgcgacaagcgacggcggaggcgtgcagtagccacgtccaccacgcgcacctcgcggctctcctcaacgcttccacgcgcttgcctccgctccctctcagccgcctccacctcccgctctcgctccccacggcctcccgcctcgtcgcgtccttccctccactcccgctcctcgtctgcttcctccgcgcgctccacctcctcccctcctcgccgtcgcgcccctttgactcgctcatcaagtcatatgcggaggctgtgagatccgcatccgcggaggctgtgagatccggtagccacggtcttgatgcactaggtggatccggatctgggcggggtggttgtctggatcggggagtggggttcggaggcgatggcggcgtgagtggag

SEQ ID NO: 41052 - DNA, 1098 bp, Zea mays
  Peptide Sequence Number=SeqID_82831
atggatcactctatccaacctttccgacagcggctgtgtgcaagaaaaatagggtttcaatggcggcagttgtacctccactcacgccgccatcgcctccgaaccccactccccgatccagacaaccaccccgcccagatccggatccacctagtgcatcaagaccgtggctaccggatctcacagcctccgcggatgctgcgagccgccatccccactgaagtccgaccagcgcctcgtcgaggtcttcacccccttcctcgagaattcctcgagaagctcatacgcctaccggatctcacagcctccgcatatgacttgatgagcgagtcaaaggggcgcgacggcgaggaggggaggaggtggagcgcgcggaggaagcagacgaggagcgggagtggagggaaggacgcgacgaggcgggaggccgtggggagcgagagcgggaggtggaggcggctgagagggagcggaggcaagcgcgtggaagcgttgaggagagccgcgaggtgcgcgtggtggacgtggctactgcacgcctccgccgtcgcttgtcgcgtggaggcggaggcggctgccgtattcttcaggcccccgccggtaggagtactaccccctgctccggcgcctgcagtggaaggcaaggagaaggtcaacggtagctggatctggcgagcacgtgaccgcaccccgtctgcggccaggcggtgcccagatccgtttcgatttgcaaccctgcgacgatattctcaagtaacatccaatctgatgtcttactatggcatgtgtgggctggcgaaggagtgtctacatcagcggtacttcagcaaggaatactctgaatttctggatgagtttatggccgcagttaggcagaactatggacaaaaggtccttgtccagtttgaggactttgcaaaccacaatgcttttacacttctcgagaagtacatgacaaaccatcttgtatttaatgatgatatccacttatacgatcaagtgactagtgatgtgatttgccatggtgagaaaacttcttacaagatgggcgcaagagctttcctagtggccattctcgcttacacagacctgttttga

SEQ ID NO: 41053 - DNA, 585 bp, Zea mays
  Peptide Sequence Number=SeqID_82832
atggcaattttacccgcgggttcggatatccacggatatccgacccgtcggtttcgggttcgggtacgaaatttaacccgcgggtctcacccatacccgacccatgataaaatcgggtcggtggaaggcaaggagaaggtcaacggtagctggatctggcgagcacgtgaccgcaccccgcctgcggccaggcggtgcccagatccgtttcggtttgcaaccccgcgacgatattctcaagtaacaaccaatctgatgtcttactatggcatgtgtgggctggcgaaggagtgcctacatcagcggtacttcagcaaggaatactctgaatttctggatgagtttatggccgcagttaggcagaactatggacaaaaggtccttgtccagtttgaggactttgcaaaccacaatgcttttacacttctcgagaagtacatgacaaaccatcttgtatttaatgatgatatccacttatacgatcaagtgactagtgatgtgatttgccatggtgagaaaacttcttacaagatgggcgcaagagctttcctagtggccattcgcgcttacacagacctgttttga

SEQ ID NO: 41054 - DNA, 744 bp, Zea mays
  Peptide Sequence Number=SeqID_82833
atggcgacgcttctggtgcagagcttcactgctgagggactgattgtggcctcacgtgaagagactctccagtcatttaagaagcgatatgcacatgagcatgaacctgtcaaagatcttttaggtgctgttaaggctatcagaccaactgcactgataggatcagctggtgtaggtcaaagtttcactaaagaggtgattgaggctatgtcttcgattaatgagttatacgatcaagtgactggtgatgtgatttgccatggtgagaaaacttcttacaagatgggcgcaagagctatcctagtggccattcgcgtccccgcgctccgacggggagcactgcgcgtgcggtgggtcacggctgcgctgttctcatcggggattctcgccggcaacaagccgattctggtgcgtgacttcgtgaggtcagcgttgtacgaccccaaccatggctacttctccaagcgggcgggaccggtgggcgttcttgacgccagcatccgcttcaaccagctcgagggtgccatggtatgcctacacaatagcagcatcgattctgcgtacagcaaatctttcagtcccattgaagtagagattagctcctctcttgctgagaagcaattggaaactgttggtgaagtgcaaagccatttgtcaaagttcacggtggagcaccgggatgcaattaacagacctggatggggccgcacggatcctcatccatgttgggtgcttatgcttgag

SEQ ID NO: 41055 - DNA, 297 bp, Zea mays
  Peptide Sequence Number=SeqID_82834
atggcatcgggtgcctgggcagtgtgcgcatcggcgttgcttcctgggttttggtacgcagatggtctctatggtaatggtggcatctgttatggctcctataatctcgctcagggattttggtacgggcatcatcccacggctttccctgagggcggaggtgacaatgaggataatattggtttctacggtgtttatgattatggttgcctttggtgtaatctatgctcaagtaaagaagaagttgtcgaggcggatctccaagagttccaggacttcgacgagtttgaggattag

SEQ ID NO: 41056 - DNA, 786 bp, Zea mays
  Peptide Sequence Number=SeqID_82835
atggcgcgggcacgatttgcgacttgggcgtcgatcggtcttcgggtgcagcgtcgtcgcggcttgaggcgcgttcctgcgggcgggggatggcatcgggtgcctgggcagtgtgcgcatcggcgttgcttcctgggtgcgcacgacgcggtccttcacggggccggggcggctgcagggcgcggctgccgctcggtgtcgtggctcggcttcggagcttcggtcggggtagcgagcgggcgtcgaggcggctccacggtcggtcctcctggcggcgcgcgtggtacagggcacaggtgcgttgggtccgtgcagtcctgggcgcgactcggtccttgcgcggggtacagggcgcctggagcgcgggctggtagtggtgcagtcgggcaggggcaggggcgctcggcgcggttgctggcggatcgcggcaggggagagggaagcgagggagggagaagcacagggagcagggggtggcgctcggcttggaggaagaagacagaggcggcggctgctatgcaaagaaacaggggcgggttttggtacgcagatggtctctatggtaatggtggcatctgttatggctcctataatctcgctcagggattttggtacgggcatcatcccacggctttccctgagggcggaggtgacaatgaggataatattggtttctacggtgtttatgattatggttgcctttggtgtaatctatgctcaagtaaagaagaagttgtcgaggcggatctccaagagttccaggacttcgacgagtttgaggattag

SEQ ID NO: 41057 - DNA, 3402 bp, Zea mays
  Peptide Sequence Number=SeqID_82836
atgagtgctgaaaagaaaaatgaattgaagaagcgtcgtgagtcacgaaaaaagggaaatgttatgcaccatgagtattcagaagtttgcaacatccctgcaaacaaggacaacaataatcatcaaaacaatgaaattgaggatgttgatgatgattcttatcagttgcataagaataactcatttgaggacttaatcggcattgaggacccgaagtttacaccggagcttgtgtggagttcaacagatgctgaagcacctcatgggtctctatgtagctccgagggcatggctatccctaagttaagtccaacacctttcgttcctaatccatcacagactgaggatgtcgagaaagacagtatgacagagtctcctagacggcaaagacataaacgtcatgtgtcgtccggccaaagacagaccctggtgtctcgtcaaaatcagaaatttcatttagccattggaacaaacttcgctactgcaactagggatcgtgtaatggagaatgatgtggataatgaaattgatcatcagactgtttcagagatcgacaacaatgaggatgatgatgaagctgtactttttgaagatgacgaagacgaaggatacctattcgctgggcaagatggtgaatctggtgaggatatcgatattgatgaaacacaagatgcctttactgttatccctgacatacctgacccgtacgacaagggaagctgggggggggaacagaagcaccttgagctttacttctacgatgatgatcccagcctcgagcatagatatcgtaaatgtcgtcaagagcaacttgataaagacaaggcagttattaaacatttagttgagatacttaagggaaacccatactctgagcaccttaggagtatggggcacgttgataacattgaagactaccatattgccttgaaccttgatcaaacattgaaccagaagttatataatgcaaccatcacttcggaggtcgctgcagtttggattgaggggagtgaacgtcgaggtcaattcaataatagtgttatgctgcatgggaaggataggtcaagccatggcatccgttcatatcatggatgctatgatgcactatcatacccattgttctttcccaaaggtgaacttggatggcatgcaaatattccgaagtccaatgtttccatggatgaagtagaggcgtatcgtgaccaacacaggacaagggatgcaaatgatgacgatacaggtatattcaatccaatacttcatgggaagcgtcttttccaacagttcgctgtcgacagctacatcaaggttgagagctctcgtttggatttcatacgtagaaaccaagacagattaagggcagatctatacaaggaccttgttgttcgcatattccgtgcgaaactagaggaattgaagaagagattgactaagcaacatattcttggaaagatccatgcttatgtctatgtcgtggagttccagaagcgaggtttgccccatgcccattttctactcatcatgcagagaaagtacaagctaacatgtcctgaccagtatgatctactgatctccgctgagatccctgataagaagaagtacccgcagctgtacaagatggttatcaagcatatgatgcatggaccgcgtcgtgatgatgggcgtaaggaaacggttcgatgttgtgaattggacaacagatgggtcatcccttacaacccttacctcctctggctcttcaactgtcacatcaatgttgaggcgtgcgagagcatcaaggttgtcaaatacttgttcaaatacatatacaaaggccatgatcgtgcgtttgtggctgtgacagatgcaaacaaggctgatggtgacgttgatgagatcaagcagtatagagatgctaggtgggtgacccctccagaagccctctggaggatattcagctttgatctaagtcaaaactctccaccagtgatgcaactgcagctccatcttgaaaacatgcacatggtgtcatgtcacgagcgtgctaaagtaaatcatgttgtccaacgtccaggtgccgataggtcaatgcttacggcatattttgaggcaaataggctgcacgaggaggctcggggcatcctttaccgtgattttcctgagtggtacactttgcaacagggaaaagtgtggcaaaggaggaaacgaaacacgggtggacaggttggtagaatagtctctgctcatccagctgagggggagcgcttttatcttcgacttctcttaaaccatgtgacgggtgctacctcctatgcggatctaaggacagtagatggtgacacactaccatcttttcgtgaggcagcacaaaggaggggattgcttgaagcagacaacacaatagatgagtgtctcaacgaagccgctatttaccaaatgccatcagcactacgaaggttgtttgcaacaatactggtatactgtgagccgaacgatgtggcagaattatggcagagacaccttgactcaatgtcagaggactatcaccgtagtactcaaagcaaaacccatgtgcagcagatggtcttgattgacattagaaacattttgcagtcaatgggtaaagacataaatacattccctctccctgctatcatcgacatatatgacgattcacatggtactgatagagagatttacgaggaggaatgtatcgagccgacgatagaagatgttgctatgaaagaaaccctaaacgaggagcagagcttccatattgcctgggggaggactgcccattcgcgtttcaagatatcacttactattgatgatggtgttgtatgtagcttcacaaaacaaagcgggacaacaaagttgctacaaaaagcatcgctcattatctgggacgaggcaccaatgactaagggacaagcaattgaggcgctagacaatagcatgcgtgatataatgggacggcctcggctgccctttggtgggaagactgttgtattcgggggtgatttcagacaagtactccctgttgtgcgcaaggggtcaagggctcagatagttgctgcctctctacagagttcttacctctgtgaatccatgtgccacctaaagcttgttcaaaacatgagggcacagagtgacccatggtttgcagaatatttgttgcgcgtcggtgggggaactgaggaaacgaacaacgatggtgatgttcgtcttccagatgagatgatgtaccatagttttgacaccgcagtggatgatcctaataactattacccatcagagtttctaaacacgctgactcctaatggactacccccgcatgttctgaagctcaaagttggatgcccaatcatgttgcttaggaatatagaccctgctaatggactttgcaacggcacgaggttggtg

SEQ ID NO: 41058 - DNA, 546 bp, Zea mays
  Peptide Sequence Number=SeqID_82837
atggcggcatccatcggccgaaataatgatgtccgtcctccattaagagaactatctaacaatacccttgaaggtatacctactaataaaatgccttatgtgacctctcaacaaggttttaaaatgggaaaaaataatggtttaggaggacgtgctaatgcaatgcaacatgaatgtccagatatgtctataagcgacggaagcatcattgattgtactataccgtgtgataccactccaggaggacgtgatgatgcaagacaacgtaagagggaaagagaaagagtacgatatgctacgatgagtgctgaaaagaaaaatgaattgaagaagcgtcgtgagtcacgaaaaaagggaaatgttatgcaccatgagtattcaaaagtttgcaacatccctgcaaacaaggacaacaataatcatcaaaacaatgaaattgaggatgttgatgatgattcttatcagttgcataagaataactcatttgaggtgcatagaagacttggcagtgaaaaactttccacacatttgtcaggtgctggttga

SEQ ID NO: 41059 - DNA, 510 bp, Zea mays
  Peptide Sequence Number=SeqID_82838
atgacgccggcggctgaagctgctgggcaactgcccagcgcccacgaggcggacgagcgcgtccgcgctttgcccaccggtggctgggccgccgtgggcgtgctgcgcgctgggccacagacgctgccagcggctaacccccttaataggagtgttgatacacactcgatgaagatgctgcagactctgatctcggttgatgcagagaagttggagaatgccaaccggatacgtgcaaggggaaagggtatagatagaaaaggtgtcagagaagggggagcagtcaatgatgagatagatgaggcattatcctcgaacaaggatggaaaagaggaggcttcaaaggataggttcaaagtaaacatgaaggttgaaggaaaggggaggcttttaaaggataagtttaaggtaagaatttacatagaagacataaataacgcaagggtcaaaggcgataatagacaagggcataagggaaaagatgaaggcacagaagagccagtggtataa

SEQ ID NO: 41060 - DNA, 480 bp, Zea mays
  Peptide Sequence Number=SeqID_82839
atgggccacgaggaagaggggctggaccggctgggaactttggcgactaacccccttaacaggagcgttgatatgcacttggtgaagatgctgctgactctgatcttgactgatttggaggagttggaggttgccaaatggactggtgcaagaggaaagaatagcgagaaaaggaaaaacctgcaaggtgtcagagaagggggagcagtccatgatgagatagatgaggcattatcctcgaacagggatggaaaagaggaggcttcaaaggataggttcgagataagcaggagggacaagttcaaggtaagcattcaagtagaagacatcaatattgcaagggtcaaaggcgataacagacaagggtatgagagaaaagatgaaggcattgaagagccagcggtacaagtacaaccaagaatggggtcacgacaagacttgaacatggcaaagatgaggttacgattaagggcggaataa

SEQ ID NO: 41061 - DNA, 1041 bp, Zea mays
  Peptide Sequence Number=SeqID_82840
atggggggcgcggagcccggttccttcgcggagaaggatccctctcgggcaactggcgtgccagttgctcgacgcgtgggcctgggccccaggctggcgtgtcagaagttggagaagcgcgtccatctggcgcggctgcatgccgcctgcatggctgctcgccccttctgcccgttggtttgggcggaaatggggggtcgcctcgccgggtcttcccgtcttccaagcccccggatgggggatatccgccgcctttccgcctcctcgttggaggaacgcaactccatgggagttgctcctggatggggagagacagaccaggctgtggtcccgccctcagcgtcgggtgcgttcgtcatcctcgctggggcgggggccgaggcgagccagggctctaccctcacgtgcgggtcggcgaaccacctcctcttccagcttctggtggtggcaatcgtcctcccgcgctgcgacggagtcgtcctccagtcatgccggggaaggcgaactgttgctgtccagctaggatgcaacattccgtcttccccctcgcattcggggcgaggacggcagcgaagatctaccggagcgcttgggggcggcccgctctttggctttgatggcttgttcgcatcccttgagtgggaccgcgaacaaaagccttccggtgactgcgttcacctggggccatggctgccgctgcagaggtcgttgccccgcaggcccgaggtcgcttgtatcctcggggacggaaccggagtctcggacccctcggccgccctttggtggatcgaggccgggggtagcgatatcagtatgaacagaggcggagttggctcgagaatggggaacctggttggccggagcctagccgtgtcgcccgtcagcggtgccggcgcccaagtcggtcagtcgaggcctcggatcgggctagcgcccttggaagccggttgcccgaggccccagggacgtcgtcgatgccgagggtgctacggctcccctcggcgtgaagacccgagcctgcaggatcagatcgtcttgtag

SEQ ID NO: 41062 - DNA, 945 bp, Zea mays
  Peptide Sequence Number=SeqID_82841
atgtcttcttcctcccttaagcgccgggtcttcccgtcttccaagcccccggatgggggatatccgccgcctttccgcctcctcgttggaggaacgcaactccatgggagttggtacctctcagccattgttcggcttcaaggattttcatcgcgcagcctggctgctcccttccgccggtggccacccaagacagtgacctccagctcctggatggggagagacagaccaggctgtggtcccgccctcagcgtcgggtgcgttcgtcatcctcgctggggcaggggccgaggcgagccggggctctacctcacgtgcgggtcggcgaaccacctcctcttccagcttctggtggtggcaatcgtcctcccgcgctgcgacggagtcgtcctccagtcatgccggggaaggcgaactgttgctgtccagctaggatgcaacattccgtcttccccctcgcattcggggcgaggacggcagcgaagatctaccggagcgcttgggggcggcccgctctttggctttgatggcttgttcgcatcccttgagtgggaccgcgaacaaaagccttccggtgactgcgttcacctggggccatggctgccgctgcagaggtcgttgccccgcaggcccgaggtcgcttgtatcctcggggacggaactggagtctcgggtaaccggttgagccgcctgctcgggccggattcccggaggtgcccctggacctcggcgccgcccgaggctgggtcgggctttgttgtagacgtcgtcgatgccgagggtgctacggctcccctcggcgtgaagacccgagcctgcaggatcagatcatcttgtagcgtgcgctttctgcggccgccgaggccagaagagcacgccctcgtcgcgcttgcgaagctgcgtccttttttcctcttgtttcgagcatctggactctgtcggtaa

SEQ ID NO: 41063 - DNA, 663 bp, Zea mays
  Peptide Sequence Number=SeqID_82842
atgtccggcagcaagggcacaacgggcacggtggaggtggacgcgccgactttttctgcttttcatttgccttgtgcggatctactcgtcgtgctcatctcgcgcagatctgctcgacgtgtgaaccaccgcctcgccgagaaggagatcgtcgtcgtcctctcctctgcctccgcggcctccatcgagagcagtgttgccgtcgtcgaccacctcacctccctcgtctctcacctccatgagacctcaagagcaagaaaattcgtgtctttgtggtgttccctgagcgatgaatgccttctagatggaggatggcgcatgggccgagaaactgccggtgcaacgtgcagtgacctgaaaatgagtgagggggatgctactcagcttgcccttgagaaaggatcaccgcaagtgtctaatgatgatggttcgagtagtcctgcaactgtgcacaagttgaaagttgacacagaagatgctggaagcaaaattgaatcacccactccagagaagcttgaatctagaagcaaatgggttgttgtgagttcgttggcaaggaatttacttgcagagaggtacaaagatagatttgcaaatcagttcctggaagatgagggtgacatagatgatgaagactataatgacagtatttcgcaggcatga

SEQ ID NO: 41064 - DNA, 654 bp, Zea mays
  Peptide Sequence Number=SeqID_82843
atgagtgagggggatgctactcagtttgcccttgagaaaggatcaccgcaagtgtctaatgatgatggttcgagtagtcctgcaactgtgcacaagttgaaagttgacacagaagatgctggaagcaaaattgaatcacccactccagagaagcttgaatctagaagcaaatgggttgttatcattcaccttgtctttcctgttcacaatgccaggcacaaggatttactgaatctttttaatagaatggagagttctataaggttgctacgcctacggaagaggatggctacatttaataatattgccacccaggtggaaatactcgcaaaaaggaagttatcgtactgtcatttggcccaaatgaagtatttgtttccagaagcaatccagattaagagggtacttctacatgacgagaaaagcctatgcatgtatgctgatatgaaaatcatacttgtaatggatgttgtggaatacacaagtcctgatcactctccatccatggcaatttgcgatgctttttactcgaagcttttgacattttcggatgctcatcataaggtcccaaccaaagagcaagttgatgcactatcaaaggaattgtttgcgctttcaactgccacagttgcagctcatgtctatagacaatag

SEQ ID NO: 41065 - DNA, 627 bp, Zea mays
  Peptide Sequence Number=SeqID_82844
atggcaatttgcgatgctttttactcgaagcttttgacatttttggatgctcatcataaggtcccagccaaagagcaagttgatgcactattaaaggaattgtttgcactttcaactgtcacggtccacctcttcaataatcgtccttcatcgcatgctgatctgaaactgaaggttgcaaggcgtccacactttggttctgccatcgctgccatcgcgcgctacgctccctccccgcgccccgtcccgcaattcctccccgcccgtcaatggaaggtcccgccgctcccgcagttcgcgccatcaatgcctcgcccgcagtccgcaggccgtcaatggaaggtcgcgccgcgcattcctcgccggcaacgcccgcagtccccgccgcgcccgcagtccccaaatcggtcgcgccctcaaagctccacgcatcgtcgtctgctccccgccgccgcgtccgccccctcccccaccgatggaatccccacggactccgccccgtgtcgcctccccggctccccagaatgcgatcctctctccctcaatccccgctgcctcaacccagatcgccgccctcgctctcgatcctcgtcacgccatccgacgatccactctcctcggccctaa

SEQ ID NO: 41066 - DNA, 435 bp, Zea mays
  Peptide Sequence Number=SeqID_82845
atggcgcacgtcgcgccggagatccttgccgccgacgacgccgcgccctccacccgcttccacgtcctgccgttcccgcggctgtcggagcgagccacggagatcctcgcgcaggcgcgcaccgcgcgccagctggagccccttatcatcaggccctcctcgcagtggtcgcgccttccacggccttccatggagagccagggtgggtcgacgcgttggggccgaggagagtggatcgtcggatggcgtgacgaggatcgagagcgagggcggcgatctgagttgaggcggcggggattgagggagagaggatcgcattctggggagccggggaggcgacacggggcggagtccgtggggattccttcggtgggggagggggcggacgcggcggcgggatgggcggggagcagacgacgatgcgcggagctttga

SEQ ID NO: 41067 - DNA, 1068 bp, Zea mays
  Peptide Sequence Number=SeqID_82846
atggcaactttggccaaacaagcaaacaagggtctattgtatcttgctgaactgtcccagcaagcagttgttattggtgaaatgggtgaagagtacaatcagagatacttgcacaaaggagagtacagggaaaccccagaaactggaatacaatgggttacgaattgcatgggtcgtccaagcgcacgcacgacttcaacggcgcctaagctcaggctccgcgacggccgccacctcgcctactacgagagcggcgtgccccgggaccaagccaggttcgccgtcgtcttctcccacggattcaccggctcccgagaggacagcgtcagcgcctcccaggtaccgaccgatccaagcaccaccaccaccttgtctacctccccttccctcccccatctgctgccggacccgtacgccggccttcgcttcactcgcccgccaggttcatggacgtacgggcgagatctggagcgcgtctctgccggtgtccttggaacgaagacgacctggcaaagagtccccttttctttggtagcatcgaccccactgactgggccaaactcaatcattggtagagctgttgttgttcacgttgctcctgatgatctttcctataatcaatatatatacctgtttatggggctctcggccatcaggatctcgtctgacacatccgccttcccctacacgcaccgccgcggccaccgcttcgccatccgcatctcctgcatcatctccgagacgttccgcctcggcctccccagcgtgcgctggttcgtcatgggcgacgacgacaccgtcttcttcccggacaacctcctcaccgtgctcaacaagttcgacaaccgccagccctactacatcggctccctctccgagagctacctgcagaacatctacttttcctacgggatggcgtacggcggcggcggcttcgccatcagccggccattggccgagcacctcacgctcaagtacgcattgtggctcagctccaacattgtgctgcagtctgcgttcaaggaccccagaccccacaacgggcatggttgctattcaaccatatga

SEQ ID NO: 41068 - DNA, 411 bp, Zea mays
  Peptide Sequence Number=SeqID_82847
atggggctctcggccatcaggatctcgtctgacacatccgccttcccctacacgcaccgccgcggccaccgcttcgccatccgcatctcctgcatcatctccgagacgttccgcctcggcctccccagcgtgcgctggttcgtcatgggcgacgacgacaccgtcttcttcccggacaacctcctcaccgtgctcaacaagttcgacaaccgccagccctactacatcggctccctctccgagagctacctgcagaacatctacttttcctacgggatggcgtacggcggcggcggcttcgccatcagccggccattggccgagcacctcacgctcaatctgcgttcaaggaccccagaccccacaacgggcatggttgctattcaaccatatgataagtcaagcttgtga

SEQ ID NO: 41069 - DNA, 453 bp, Zea mays
  Peptide Sequence Number=SeqID_82848
atgaagttcaaaaagcgccgacccctgcccccttttataggcagggcgcggctcttcgggaaacccgcaatccaacagggcgcggcgcttcgggaaacccgcaatccaacagtacgccgtcaatcaacggtcacatcaaaaacccccgcggaaccacttcgagcgagggcagcgtctccgccatctagcgacgtcttcggcaccagccgctggtctgacagagacaacaggcagggacacccttcgcttgatcggcaccagacgaagaccggcgatgacgtcatcccacagtgcggcctcgtccagctcagaggcccacgtgcgatccggcccattgtaacgggccctgcgtggccgccgcgcgttacgggcctaatttgtaaaggcatccctgtaattacagtctgtatccccgctttatgggaatattctggggataacctaggtagctga

SEQ ID NO: 41070 - DNA, 312 bp, Zea mays
  Peptide Sequence Number=SeqID_82849
atggcatcgctacgtaccgtcggcggcggcgggcagtctgcttcactcgcgctagatctccggcgaacaagagcacggcgggcagacgagcagcaagacggcgggcggctagggttttcgcggagcgcggaaagtaaagttcaaatagcgcctgcccctgcccccttttataggcagggcgcggctcttcgggaaacccgcaatccaacagagcgcggcgcttcgggaaacccgcaatccaacatatttgagaacgagtccccaacaccagggttagctacacccttagacacttccaaggtgaatggctag

SEQ ID NO: 41071 - DNA, 498 bp, Zea mays
  Peptide Sequence Number=SeqID_82850
atggagataagatgtgattacctgattgaatgccatctccagatgaagaagacatcaatccatcctgagggtcagattttccagcctgcggcttcaatctccaactcatgttgcggttacggttccaagattgggaaccttgggcagaatccttttgtccccaacgattccaagagggattggggatgttcttgttcttcggatccatcccgccaagaatcttgctactacggacagctccagaccccaaccgaggccactcttcttcagacaccggtgagcgcagggaagttacgcaccaaccaccatgaaaaccagatcgagtggagacagggagcgaccaaagacgcgagaggaaggcggcgcagtgagggaaagagtgcgaacccacaaagtcagcaggaaaccctaacctcgacttgggaatcgcagagccaggagacgcggcaggaggaagaacccacgacgaatgggctagggttgagacgagcggcgtaa

SEQ ID NO: 41072 - DNA, 468 bp, Zea mays
  Peptide Sequence Number=SeqID_82851
atgccccttcaaccccacatttttggcaaaaagcgggacgagccggatcaatttctttcttcaaagaagatggagataagatgtgattacctgattgaatgccatctccagatgaagaagacatcaatccatcctgagggtcagattttccagcctgcggcttcaatctccaactcatgttgcggttacggttccaagattgggaaccttgggcagaatccttttgtccccaacgattccaagagggattggggatgttcttgttcttcggatccatcccgccaagaatcttgctactacggacagctccagaccccaaccgaggccactcttcttcagacaccggtgagcgcagggaagttacgcaccaaccaccatgaaaaccagatcgagtggagacagggagcgaccaaagacgcgagaggaaggcggcgcagtgagggaaagagtgcgaacccacaaagttag

SEQ ID NO: 41073 - DNA, 330 bp, Zea mays
  Peptide Sequence Number=SeqID_82852
atggcatcatgcaatcagtacatccaattatttctgcaaaacgtgctcttcagagattttctaattatatggagaagattagtggatgctatgctagactgccaaaagtttggcctgccagtcttgaccaaaccaggaacagaaaagaaaagtaggaagaagaaaatccaaggtgaaaatgatccagcattggagaaggagcaagctaaatgtcgtaagcgtgttaagagtttagttaagaggcggaagatgagtgaagcacagaggttagttcaacaggagttggaattggaggaatggggcacagaagcccaagtgaagcatccatga

SEQ ID NO: 41074 - DNA, 753 bp, Zea mays
  Peptide Sequence Number=SeqID_82853
atggtgaaggcttaccccacggtgaacgaggactacctcaaggcggtcgacaaggccaagcgcaagctccgcggcctcatcgccgagaagaattgcgccccgctcatgctctgcctcgccttgctggagtcgtggcagtcgaggacaagcctgagcctccaccggaaggtcgccttcctggtgccacccaagaaaagtaggaagaagaaaatccaaggtgaaaatgatccagcattggagaaggagcaagctaaatgtcgtaagtgtgttaatagtttagttaagaggcggaagatgagtgaagcacagaggttagttcaacaggagttggaattggaggaatggggcacagaagcccaagtgaagttgggaagtcgcctgattgaattattactagattcagcatttgtgcagccaccagctgatcaaacaccagatagttctccatatattcgacctgcatttaagcatgtgctacgtcatcctataatagaaaatgggaggctaaagaagaagcattgggtgatagagtgtgaccatcttgtgcatgaggggtttgaaagcactgcttggcatgttgatatacccaacctccctatgctggtacctcgtaagaaatggaaaggttatgataaaggtggtcacctttttctgccctcatacattatgaggacacatggtgtgaaggaccaaaaggatgcaattaatagtgttcctagaaaacagttgcgaaaagtatttgaggtttactga

SEQ ID NO: 41075 - DNA, 350 bp, Zea mays
  Peptide Sequence Number=SeqID_82854
gccgtatctgccccggcgtctcacagttgagtgacagccctaggtgccaggaagagcccccggagaagactgtgcacgcctccgtgaagctccccgagcgaggaatcgggctctgcttcaccggagaggccggcccaaggtcaccggacttcaaccgaccgccggcaaccgtggaccgagaccctccccgagccaaccctacacttcgccggaactccctcgccgccgagtacatcctcgtgccggagcaaggagctgctcaggaggtagccccagatccagcaccagagccagcaccagaggacctgcctgccactgctttggaaggcaagccccggttttatgcataa

SEQ ID NO: 41076 - DNA, 454 bp, Zea mays
  Peptide Sequence Number=SeqID_82855
atgaccatggataagaagggaaagagagtgagcaaatgtgcaagcatgggccgtatctgccccggcgtctcacagttgagtgacagccctaggtgccaggaagaggtctgcggcggacttttgcaaagattcgcacgtatgcgacctctggcgacgtttgaacactggaagaaacaaaccgccacgtgttcgacgccgtctgccgcgccagagcacgcccgcgcgcgcgcccgcgccgcgcccaagccgagccagcgccctgccattcccagccccgtccagcccccggagaagactgtgcacgtctccgtgaagctccccgagcgaggaatcgggctctgcttcaccggagaggccggcccaaggtcaccggacttcaaccgaccgccggcaaccgtggaccgagaccctccccgagccaaccctacacttcgccggaactccctcgccgccg

SEQ ID NO: 41077 - DNA, 402 bp, Zea mays
  Peptide Sequence Number=SeqID_82856
atgacgcccacccacgcgtccagctcccttcttagagccccgccagtgccccgcgtacacccctcacctcatttcgcgcagcttcgccctttctcgcgctctgcccacgccgccagtcgccgccggagacccgtgcccgcgttcccggccatccggctcgccggagaccgctccaagcctcccgagctccgccccgaggtgagacacccgtccccatgcccaatttcccttattgcgccctgtgctcggccaattttgccttcgtcggtgctcggccgcggcgacaacgagcagctcgtggttcctcagtgtgttgctgaagatccctctgagcaacaacctggaggtgaagttggcaacatggatgacttcgaggagttcctggaatacgacgagttctag

SEQ ID NO: 41078 - DNA, 1005 bp, Zea mays
  Peptide Sequence Number=SeqID_82857
atgatgattaacaatggtgattataatcctgatctctggtatttcctcttggagggagtgcctctgggaggtgaagttggcaacatggatgacttcgaagagttccaggaatacgacgagttctattctactcttactcctgtgcttacggtgtctcttgtagatggcccgtatcagcaggaggtggagtctgagaggcctccttcccctgcacctcagccagagatgccccctgcaccacctcagggcatcccggctgctggaggagaccctgacggagacagagatgatgacgacgccggtggcagttcgagccacggcacggagctttcggaggagccggagccgaatggatggatcgtgagacccatcactcgtgacgctgctcgcgggtgtcacttccacgatgctctcgataccctgctacgtcgggccttcgaccgacacacatggtctatcgagtatcgttgtgtagtctaccagcatcgtcgcgggctatacccggaccagtgggaggctacttgcttggtgcgtcgtccggacgatgatctccagggtgtagaggccttctcggagcactattctatcactgagagggacactgccgaggcagccatgcaagatgcagcacgacgtgcactttctcagtattgctcgttgttcagcggggtagctgatggccttgacctgaagtactaccctcgtcgttcgaccggcagtgttggaggtgtgattgtctcgctagtgggtgagggcaatcccaggctgagcggcatggtcaacttggtcaccgtgctcaacacagagttggaccacacccttgacgagttgggcaaggttcgggcgaaggttgcggaattgcgtgctgaatgcgcggcacgccactatcttgatgatggttctcccgcccctgttgggattcagcacccttaccgttcaccaccccgtggtcgcttcgactatggtaccccagactgcaggacccgcatagatttatatccatag

SEQ ID NO: 41079 - DNA, 468 bp, Zea mays
  Peptide Sequence Number=SeqID_82858
atgacttcccatggatcctcagaggacggaaatgcactgtcccacactgacgggctcgcacgagagggctttccccgcattttgtgggaggtacttcagggggccagatacacgacaccccctcagtacgcggtgcagcaattcgagaagcaccgggtgccccgcggtagggtgaggatgaccttggagcctcatcccctgcagccaggttggcgctcgttggactctgagtcttttggataccgagctgaggacacgatcgaggcgatcgctctgcacgggttgaccactttctgcggattccacctgttgggggccttcggcttccgaaggtatcttcggactcgtatcagagagggagaagctcaaaagatacgaaggttgacacagcgccgaagctgtgaagcagggaagcttcggcatgttcgcagaaaagggaaccgacttgaagatgaaaaggccatttag

SEQ ID NO: 41080 - DNA, 165 bp, Zea mays
  Peptide Sequence Number=SeqID_82859
atggcccctcctgtcagtgatcctgtgaggtatcttcggactcgtatcagagagggagaagctcaaaagatacgaaggttgacacagcgccgaagctgtgaagcagggaagcttcggcatgtttgcagaaaagggaaccgacttgaagatgaaaaggccatttag

SEQ ID NO: 41081 - DNA, 291 bp, Zea mays
  Peptide Sequence Number=SeqID_82860
atggtcgtcccgcaggcggcgtgcctgtccgctccagtggcaggtagaagcattcaaaccaatatggttaatcctcaacgatttctggcaaactccatatacacaggagtacacactgaacgacagataggggtgttggggcgaaggcgaagacgctacccttcgctccagccttcgtctatctcgctgcgtcaacaggaagcagaacgaccggcgaggtccacccttcgtcttctacactacaagacgaaggcctacgacgacatcgccccgtcccacgtcctcacttga

SEQ ID NO: 41082 - DNA, 672 bp, Zea mays
  Peptide Sequence Number=SeqID_82861
atggaggcaaaacaaccggcgaggtccacccttcgtcctctacactacaagacgaaggcctacgacgacgtcgccccgtcccacgtcctcacccaacctggaggcccatgtgggattcagcccatttctgtaaccctcctttatgggaatattccggggacagtccaggtgcctgaggataaccagaaccgccagatcgacatccaacgacggaggttcacttttgccctaaacccgatcctgatcgctcgacctagaccaacggaccagattgcccgcggcgaaggggggtctagaatgaccgacaacgcggcacggcggatgatgaaccccgacgagaaattacttgcgccccgttggctcttcgatcaccgcgacactgcacactcccaccacaccgagcagcgaagtctcgaccccaagatccggaggcaatgcgtccacgggggtgagccacgaccagcagctctggaagaaggggaggggaagactgcaccacctgccatgcacgggattcggttgaaggagcaactgacaacaccagcccacaggtcagagaaacggtcacgagacgtgcgcgggtcaaacgcgcctggcggatgggtccaagacgccagtgagtacgctatagcgcgcggagcgaccacatgcgggtcccgcctgtcggtgtaa

SEQ ID NO: 41083 - DNA, 1332 bp, Zea mays
  Peptide Sequence Number=SeqID_82862
atggcaggacctgccttaaaacttgagccccacattttgttgaaggaatgcacatgtgtgaaatttcagttctacttaagttatgctgagtttcggagattggctcttatcacgtttcaaaagcatatgacatttaaggatgttgattggttccgatgtgaggatcttttgttggatctgattatttgctctaaagtccagagccgttgcatctcctacaagaagccaatctacaccgtccatctatatgcgtcaaatcatcatcgtccgtctggtcgcctccgcttcaagcctcctccctccattgatcgtaactgctcctctctccgctcccctcttcctcaacagctagatcctccatcagtcttcattcgcgtcgtcgtcggcaacagctccggccttcccacaccgccgtccaacctccccccgactctcctccccacaccgctgccgctcccaccgcccgcaaaaacaccacgcacacgggcgcgggcgcggagaccgaccaccacgacaccacctcctcctctggttgcctccggcctcgccatccctctgtcctcgacttccctccgtcctcccggtagaggtgtactcgccgaccgcggcggcggcggcgcagcagcagcgggagaaggcggcgtcgcaggtgtggcgggcggtggtggggtggatcggcttccttgttcaggttctgctttagatccttcggggcacgccgtcctgcgcccagctctttccttcgtcggcgtcctgtactcgctcctctccgggcccgcggcctcgaacccgtcgccggaggtggcctccatccgtccagctctgagccgggcccttggaaatcgttgccatatcagatcagcttcgccatggaccccatctgcgacccccggtgacgcgctccgcccaccgcccaccgccgcctgggaatggcttgagcgctgctcctgctgcgacgacggcgggggcgaccatgacggggaagaggatggcgtgaagagcggcggccacgtcgattacttggagatgagcgatgaggagctcatggagcagtgcgatatgggcacgttcaaggcgtccggccccggcgccagcgacaccgcggactcctcctcgccctcgccgacgcgcacggcgctgctcgacctaaggcgtggccacgccgcactctggctgtgcgacacggcgggcgcccagcggcacgctgagagtgaccttgtccgcctcgtgtcccccgcgcgccccggcgtcaggctcccgcaggcggcagtgcccgtggcgccagccagcgagcgaggaatagcacttcctattggccatagatggcgatga

SEQ ID NO: 41084 - DNA, 453 bp, Zea mays
  Peptide Sequence Number=SeqID_82863
atgagcgacgaggagctcatggagcagtgcgatatgggcacgttcaaggcgtccggccccggcggccagcaccgcaacaagcgcgagtccgccgtccggctgaaacaccttcccaccggcatcatcgcccagaaaaggaactatagtgcttcagttaggaggccgataaacctggaagactacactccacctgttgagattcttcagatattacccctgaagtccagcgttagaggaaaagatgttggcccccaaatcggtccaaataactcaaaattttctccagaaatgcaagcattattagacctattgtttgctgttgaaggttctgtatcagatgcagcaaagattttaggcctaagcactggtgctttgtcaagattgattctgtcagatgattctctccgaacagccgcgaatgaactgcgagcttcgaagctctttattgtgtga

SEQ ID NO: 41085 - DNA, 621 bp, Zea mays
  Peptide Sequence Number=SeqID_82864
atgggcgcaccggacagtcccggtgcgccaccggacagtgtccgcctaagcactggtgctttgtcaagattgattctgtcagatgattctctccgaacggccgcgaatgaactgcgagcttcgaagtgtttctttgattgcagggcaccgatgctgtactacgtgctcctgacattgcaggacagcgtgcacaaggtcttctacgccgtggtcgaggccgctgcagttcgcgcagacaacaaccatcttggagggttggtgaggtatccggtctctacaactcttccacagattggatccagattattccttacgtggggtgtcttctggagttttcctgaggtgcataaagttcaacataaaccaacaaagaaaagccacttcactaaaaatcaccgaactatccggtatgccaccagactgtccggtgcaccaacggagcaacaatcatcttctccaacggttgactgcattgacgacagtacaatgaatagagcagaagtcagaactgtaaagtcagaacgcaccggactgtccggtgcctcaagaggacaaaggacttcaacggttaatcgctccaaaccccaacggtcggctgacgtggcacgcaccgggcaatga

SEQ ID NO: 41086 - DNA, 792 bp, Zea mays
  Peptide Sequence Number=SeqID_82865
atgctgtactacgtgctcctgacattgcaggacagcgtgcacaaggtcttctacgccgtggtcgaggccgctgcagttcgcgcagacaacaaccatcttggagggttggtgaggtatccggtctctacaactcttccacagattggatccagattattccttacgtggggtgtcttctggagttttcctgaggtgcataaagttcaacataaaccaacaaagaaaagccacttcactaaaaatcaccgaactatccggtatgccaccagactgtccggtgcaccaacggagcaacaatcatcttctccaacggttgactgcattgacgacagtacaatgaatagagcagaagtcagaactgtaaagtcagaacgcaccggactgtccggtgcctcaagaggacaaaggacttcaacggttaatcgctccaaaccccaacggtcaaggctccgtccactcaagggacacgatctcgcctcgcccgagcccagcctcgggcaggagcagcagacccaggaaaacagcgccgcctgccctgctccgactactgtgccacctgccagggtgaggctgacagcagccaagtccagcctcaggcgccataggaagctctgcctcgcccgaccccagggctcggactcaacctcgacccaggaagacggtctccgcctcgcccgaccccggggctcgaactcaacctcgaccccgaaagacggtctccgcctcgcccgaccccagggctcggactcaacctcgaccccggaagacggtctccgcctcgcccgaccctag

SEQ ID NO: 41087 - DNA, 372 bp, Zea mays
  Peptide Sequence Number=SeqID_82866
atgtccacggcggtgttcccgagtgacgacgcggtgttccctaagctacggtgcgataacgttcaattggccgagaccgggagtttcactagcaccagaggatgtagaaacatggatcaaagggacgttaacggacctgagaatggttggccacgcaccaataaagtcaactgggagatgccacctagatcagatcaaactcctcgttgtgtggctcctcctgaaccacctgttcttctcctgtggggggagtgtgagacagtaagggtgagctcacacatgatcatagctcaacaagttgtggggaaaccagtgtgtatgaactcaccaaaggtgggagttcatgtgatgtgtaaggctaatcaacaatag

SEQ ID NO: 41088 - DNA, 738 bp, Zea mays
  Peptide Sequence Number=SeqID_82867
atggcgttgcagacgccttgtgcttctagaaacattctcacctctgctccggtcagacaccgccgcctccatgaggtgctagggttccctggccgacgccacgaccgtcgcacccggccgcctccgtccctgcgggccttcgccaccgccctcgccaaacgtccctgccagggttcctcacagcttctcccaagcgccctccagtctcaccaacccttctgcggttctgcccttggtgccgcgctcatgagcctcaccgaggcgccgtccccgtccccgtcgtcgtcaagcgggagcgatgacttcgcggccttcctcgcctccgagctcgagctcgcctccggtgctgactccgccttccctggtgacccctcctccattttccccgacaccgacgacgagggcgaggacgaggatctggaggagctagagggtttagaagttattgaagcacattatttatttggtgctgaatatgatgacattgagattgtgattcacccacagtctatcatacactctatggttgaaacccagctcagttgggatggccagatatgccgttaccaatcttatacaccttatcatggccagatagaatctattgctctgaggtcacctggccccatctggatctttgcaagtatgacatcttcaaactcctgcgatagttgtgcagtacaattgatgcttttatttggaaatgaccttcaagaattcaagtcttatttttcttga

SEQ ID NO: 41089 - DNA, 651 bp, Zea mays
  Peptide Sequence Number=SeqID_82868
atggcgttgcagacgccttgtgcttctagaaacattctcacctctgctccggtcagacaccgccgcctccatgaggtgctagggttccctggccgacgccacgaccgtcgcacccggccgcctccgtccctgcgggccttcgccaccgccctcgccaaacgtccctgccagggttcctcacagcttctcccaagcgccctccagtctcaccaacccttctgcggttctgcccttggtgccgcgctcatgagcctcaccgaggcgccgtccccgtccccgtcgtcgtcaagcgggagcgatgacttcgcggccttcctcgcctccgagctcgagctcgcctccggtgctgactccgccttccctggtgacccctcctccattttccccgacaccgacgacgagggcgaggacgaggatctggaggagctagagggtttagaagttattgaagcacattatttatttggtgctgaatatgatgacattgagattgtgattcacccacagtctatcatacactctatggttgaaacccagctcagttgggatggccagatatgccgttaccaatcttatacaccttatcatggccagatagaatctattgctctgagggtcacctgggccccatctggatctttgcaagtatga

SEQ ID NO: 41090 - DNA, 255 bp, Zea mays
  Peptide Sequence Number=SeqID_82869
atgagcaagaacacaagagacacaaaatttatcccgaggttcggtcacaccaccaaggtgccctacttcctcgttgaggcgcccacaaagagccgggtctctttcaaccctaatcctccctttgccgaccacaaagatttgaaatgggagaggcaagaggtgtgtgagagagagtgggaggtgtttctcaggttagaaatggagttttgtgcgtgctcttccgtggggaagagaggtgggagtgagtatatatag

SEQ ID NO: 41091 - DNA, 312 bp, Zea mays
  Peptide Sequence Number=SeqID_82870
atggtgagagaacgaagaacacaaacaaaaacaatgagcaagaacacaagagacacaagatttatcccgaggttcggtcacaccaccaaggtgccctacttcctcgttgaggcgcccacaaagagccgggtctctttcaaccctaatcctccctttgccgaccacaaagatttgaaatgggagaggcaagaggtgtgtgagagagagtgggaggtgtttctcaggttagaaatggagttttgtgcgtgctctcctgtggggaagagtgtgggaggtgtatataaaggtgccccaaaagctggtggccgttag

SEQ ID NO: 41092 - DNA, 279 bp, Zea mays
  Peptide Sequence Number=SeqID_82871
atgagcaagaacacaagagacacaagatttatcccgaggttcggtcacaccaccaaggtgctctacttcctcgttgaggcgcccacaaagagccgggtctctttcaaccctaatcctccctttgtcgaccacaaagatttgaaatgggagaggcaagaggtgtgtgagagagagtgggaggtgtttctcaggttagaaatggagttttgtgcgtgctctcctgtggggaagagtgtgggaggtgtatataaaggtgccccaaaagctggtggccgttag

SEQ ID NO: 41093 - DNA, 591 bp, Zea mays
  Peptide Sequence Number=SeqID_82872
atggtgagagaacgaaaaacacgaataagcacaatgaacaagaacacaagagacacaagatttatcccgaggttcggtcacaccaccaaggtgccctacttcctcgttgaggcgcccacaaagagccgggtctctttcaaccctaatcctccctttgccgaccacaaagctctcaaactcactcaaagatttctctccaaagatttgaaatgggagaggcaagaggtgtgtgagagagagtgggaggtgtttctcaggttgggaatgaagttttgtgcgtgctccgctgtggggaagagtgtgggaggtgtatataaaggtgctcccaaaagctggtggccgttggggaaagttgacaaaaaccggttgaaccggtttgtaaaccggttgaaccggtttccaccaggaagaactcggttcactgatctactcagccggagagtcgaccggactcaaaaccggttgagccgggctcaaatccggttgaaccggttttcccaaaatctgcacatgactttttctgataggactgactggcagactggcagtgacagagcggaacagtgcagaaaccggttgaaccggttttag

SEQ ID NO: 41094 - DNA, 456 bp, Zea mays
  Peptide Sequence Number=SeqID_82873
atgcaggtggcgtgcaaccgcaccgcggtggcgcacccctttggcttcgtcgcatctggtatggaggcccaggcccacacgtcatgtaaccagcgcgccggttactacgtgcaagaaaccgcaccaccacttgcgccaatgccgcgccttctcgactgcggaaccggtgccgcgactcgaggcagccctgcgcgcgacccaacggtgccaattgagtgcaacgatcacggggaccaggaaaggggatatttcgaaagggatccttctccgcgaaggaagtgggccccgagccctcctactgatcaggggttcgaaggctggcccctcggaagggttcgacagccgccccagagcactcgggcttcaagcccattactgatcaggggttcgaaggctggcccctcggaagggttcaacagccgccccagagcactcgggctccacgcccactactga

SEQ ID NO: 41095 - DNA, 1604 bp, Zea mays
  Peptide Sequence Number=SeqID_82874
ggatcgggaaaggggacgttgtggaaaggatccttctcggcgaaggaaacgggccccgagccctcctactgatcaggggttcgaaggcaggcccctcgaaagggtttcgacagccgccccagagcactcgggcttcaagcccattactgatcaggggttcgaagccgccccagagcactcgggcttcaagcccattactgataaggggttcgaaggttggcccctcggaagggttcgacagccgccccagagcgctcgggctccgcgcccactactgatcaggggttcgaaggttggcccctcggaagggttcgacagtcgccccagagcatgcagagtgagggatgactctgggtacgtccgatacattgccgaggctcgggctacgctcccgagcgtgcctctgggccaccagccgacccctaacgaacggggcacgggcgtccactcggatcacccgttagcagctcactggaaacaccatgttcggcactctccgagggcaacatggcgctttcccccctcctccttgcagaaaggcgacgcaggggcgtatgataaaaaggctcgggggctgctctcgcacccggctacgaccaaactgttgatagcgtcaacaaaccaacttgataacttggaacctgaccatgcatccgggctacggctaggccgcatgagggaacgatcagacaggccaaggcaccacgaaaggcattcagaccttagaggagtcaaaccactcctccgaggcctcgagggctacacccggcgggtgcgctcgcgcacccaccagaacaaagcaaaaccgagaaaggttggtcccctcaccgagaatgcggcaaaagcctccaagcgagtaccaacactcccttcgaggctcgggggctactatcgggtaccaccaacactcctaatcacggctgcgggcgcctcctcggctctcccgaagcccggctcgggcaggcttcgttgtgaagcaaccttggccggaccgcctcaccaaccaaccgcttcgcaggcgcattcaatgcaggggatgcctgacgccgaaaacagcatcgcccgccccgctccgactgccgtgccaaccacccaggcgaagctgacaacaagtcacaatcaaccaccgagctcggtctcgggcacgacaggaagctccgcctcgcccgacctcaagctccggcctcgggaggaggtctccgcctcagccctaccccccggactcggtttcgacctcgtctttgggaggaatcgcctcttcgccgtccctgcctttagcctcaagagaagtatccacctcgcccgaccttgggctcggaccgaccgcgccaacaggggatacatcattaccctatccctagccagctcaggctacaaggaacaagaccgacgtcccatctggcttaccccggcgacgggtaatgatggtgccccgcgtgcaaccatgacgctggtggctctcagccccttacggcagcaaggagacgtcagcaggatccctgccacactgccagctgtgctcctacagggctcaggcgcttctccgacggccacgctatcacgtgtacagggctcaagcttttccccgacaaccacgttggcat

SEQ ID NO: 41096 - DNA, 357 bp, Zea mays
  Peptide Sequence Number=SeqID_82875
atggagcacaaaaactacagctctcaagctcactcaaagattcctctccaaagatttgaaatgggagaggcaagagatgtgtgtgagggagagggaggtgtttcttgggttagaaatggagttcaaatcgtgctcactgctgtggggagagaggtaggagactacagatcagaggtcagaggggtcagagaccagctgaactgcccctcaggaccagttcaaccggtcttgaccagtgagtttaggagagaaaaccccagctcaactgcccggaggcaagttcagctggtgtatggtcaaagaggttcacagcggaagttgagttcagctgaagttgagaaagctcaactcagctga

SEQ ID NO: 41097 - DNA, 357 bp, Zea mays
  Peptide Sequence Number=SeqID_82876
atggagcacaaaaactgcagctctcaagctcactcaaagattcctctccaaagatttgaaatgggagaggcaagagatgtgtgtgagggagagggaggtgtttcttgggttagaaatggagttcaaatcgtgctcactgctgtggggagagaggtaggagactgcagatcagaggtcagaggggtcagagaccagctgaactgcccctcaggaccagttcaaccggtcttgaccagtgagtttaggagagaaaaccccagctcaactgcccggaggcaagttcagctggtgtatggtcaaagaggttcacagctgaagttgagttcagctgaagttgagaaagctcaactcagctaa

SEQ ID NO: 41098 - DNA, 252 bp, Zea mays
  Peptide Sequence Number=SeqID_82877
atggctctcatcaaggttaagaccagatttgaggggcactgtgagatagctcacactccatttaggcctttcaagaatgagattggcttcctcaccaggcctcttactcctttcccagatgatgaggaggaagctagaaaggatgaaggaaatattcctgagggtgaaacagctgagcagatatcaaatcctaacctccttgtcagatggagcagttctggcagccgggtccaggcttttttgatcggttaa

SEQ ID NO: 41099 - DNA, 429 bp, Zea mays
  Peptide Sequence Number=SeqID_82878
atgggtcatcatgccctgaaagcggccatccatgtgtgtctggagcccttgctacatgttctgaaagtaaggatcaaaatagcctggaccaggctgccaaaactgctgaggatgaggaggaggtggaggaggaggcatctgctcagctacatcagcttcaagagcaactcctttatcatcgccagcttcttcctcatcatctgggaaaggagtaagaggcctggtgaggaatccaatctcattcttgaaaggcctaaatggagtgtgagctatgtggcagaacctcccaagttattgggaccacatgcacatgtccttgtctcaaagacctcagacggctatgcatgtgcacaagataacttaacaggatccgtccgagtgtcccaaggaccccggataaaccacttacaaccaatatcacaagattaa

SEQ ID NO: 41100 - DNA, 402 bp, Zea mays
  Peptide Sequence Number=SeqID_82879
atgatgagcggcgtggtgccttcctccctccatgtcctcctccgcgccgagcgcgccctccgcgaacgcgacgtcggcgaggtccacatcccgctgtccgagctcctctccggcgcccccgacggccccgtccccgccaagttcgtcgcctaccaggtgcgcaagatctcctccggcaagccccagggagtcctcaacctctcgtacaagctcggcgaggtcgccaacggctacgcccccgccccgccgcccagtccgcctacgcccagcctccaccgaccgccgcgtacccgcctccttcaggcaaggctgatgcctacccgcctcccgccgcgtacccgcctccttcaggcaaggccgacgcttgttatcctccaggctctgaacaatagggacatctga

SEQ ID NO: 41101 - DNA, 252 bp, Zea mays
  Peptide Sequence Number=SeqID_82880
atgtcgaacccttcagctaatcccacacagcttacaattttctatggtggatcagtatgtgtgtatgactcggtgccaccagaaaaggctcaggcaatcatgcttatagctgcagctgcggcagctgcggcagccaccaaaggcagtgctgccactgcttttaatcctccaatgatctccccattgccaggaggcactctctccagcgcttccttgagaaacgtcgtgacaggcagggtaaaaataaaataa

SEQ ID NO: 41102 - DNA, 186 bp, Zea mays
  Peptide Sequence Number=SeqID_82881
atggccagtggcgtcctgtcgcagctgtaccaccagggcgtggaggtcgacgcgctggtgcgggtcgaggtttggtcgggtttaaaaaacccacgggttcacgggtttgggtactataggaacaaacccgtacccataaacccgctgggtacagatttatgcccgttaacaaacccatgggtatga

SEQ ID NO: 41103 - DNA, 3246 bp, Zea mays
  Peptide Sequence Number=SeqID_82882
atgatgagcggcgtggtgccttcctccctccatgtcctcctccgcgccgagcgcgccctccgcgaacgcgacgtcggcgaggtccacatcccgctgtccgagctcctctccggcgcccccgacggccccgtccccgccaagttcgtcgcctaccaggtgcgcaagatctcctccggcaagccccagggagtcctcaacctctcgtacaagctcggcgaggtcgccaacggctacgcccccgccccgccgcccagtccgcctacgcccagcctccaccgaccgccgcgtacccgcctccttcaggcaaggctgatgcctacccgcctcccgccgcgtacccgcctccttcaggcaaggccgacgcgaagtaggacgattgctttctacccccgtgtccgcgcacacattctatcctatgccggttttgaacccaccacatggctttctgatatgcttttatctgaaccagtagtgggagtgacatggatctgcctactttccattcagaggtctgcaatgttgccgatgtcgaacccttcagctaatcccacacagcttacaattttctatggtggatcagtatgtgtgtatgactcggtgccaccagaaaaggctcaggcaatcatgcttatagctgcagctgcggcagctgcggcagccaccaaaggcagtgctgccactgcttttaatcctccaatgatctccccattgccaggaggcactctctccagcgcttccttgagaaacgtcgtgacaggcagggtttggtcgggtttaaaaaacccacgggttcacgagtttgggtactataggaacaaacccgtacccataaacccgctgggtacagatttatgtccattaacaaacccatgggaaaataacatatctgagaatcgggatgttcctgtgtattatcctgttctatttggaaaagctggccacttaaagatccagtctcaaggttgcaaactagcaccatttttttttctgatggtcgtgagcaaagctccgtacagccccgccaagtcgttcgatggcatggagtcagcgggaatggagatgactgtggacggcaagcagggtgcaaggcccagtatcttgaaagggagaccaccagcttctcctttccccaagttcgaccagaaccggctccagctctccaccaacctgacgttcaccggaaactccaccgtcagccagggggcgctgcaggtcaccccggacagcggcaacaacttcagcacgtacctcgccaaccaggccggccgcgtcttctactccacgcccttcgtgctctgggcctccaacgcgtccagcgccgccgccgccggccgccgcgtcgcgtccttctccacggtgttccagttcaacctgtaccgcaccaacgcgtccgtcaagggcgaggggctggcgttcgtcgtcgcgtccgcgatagccgacccgccgcccggcagccacggcgggttcctcggcctcaccaacgcgtccacggacgggctcggcgccaacgggttcgccgccgtggagctggacacggtgaagcagccctacgaccccgacggcaaccacatcggcctcgacgtcaacggcgtccgctcctccagcgccacctgcccgctcgcggccctgggcatcgagctcgcgccggccgacaccggcgccagcgacggcagcaacttcgtctgggtcgactacgacggcgccgcgcggcgcctgcgggcgtacatctcgcccaacgccaccaagccgtccgccgccgcgctcgacgcgtcgctggacctctccgcggtcgtcgccgccagggacgcctacttcggcttctccgcgtccaccggcgcggacgactaccagctcaactgcgtcaagatgtggaacatgaccgtagaggtgctgcacgacgacgacgacaggctgccgaagaagctgtccggctggaagctcgggctggccgtcggcgcgccgtgcgccgccgcgctggcggcgctcgcgctgctcgcgggcctgtacctgatgaagaagcggaggaaggtcggggacgacccgagctccgtgtcccacagcgccatcgacctgaggagcatcccgggcgtgcccaaggagttcgactacgaggcgctcaggaaaggcaccaacggcttcgacgacaagatgaagctggggcagggcgggtacggcgtggtgtaccgcgccaccgtgcccggggacaacggccgcagcatggaggtggccgtcaagcagttctccggcgccaacaccaaggggcaggaggacttcctcgccgagctcggcatcatcaaccgcctccgccaccggaatctcgtcaagctcatcggctggtgccaccaggacggcgtgctgctgctggtgtacgactacatgccacacggcagcctggacaggcacctgttcggcggcagggaggcgtcggcggcggcgacgacgacgacgacgctggactggaagcagcgctacaacgtggtcgccggcgtggcgtcggcgctgaactacctgcaccacgagttcgagcagacggtgatccaccgcgacatcaagccgtccaacatcatgctggactcgtcgttccacgcgcggctgggcgacttcggcctggcgcgcgcgctcgagtccgacaagacctcgtacacggacaagctgggcgtgccgggcacgctggggtacatcgcgcccgagtgcttccacacggggcgggccacgcgcgagtcggacgtgttcggcttcggcgccgtggtcctggagaccgtctgcggccgccgcgtctcctgcgacaacccggcggggtgcagccagctgctggagctggtgtggaggctccacggcgccgggcgcctcctggaggccgtggacccgcgcctcgccgccggcgggtacgggtacgacggcgaggaggccgagcggctgctgctgctgggcctggcgtgcagccaccccaacccgcggcagcggcccaaggcgcaggccatcctgcagaacctgcagacgcggtccgtgccgccgctccccgtgcccatgtccaagccggtgttcatgtggcccgcgccgctcgccgacggggaggaggacgcgacgcaggcgtcgtccatgtcgcgcagcggggtcaccagctcgggcgtcacctcctcgtccaactacccctacacgtggtcgtcgtcggggtacaatacccagaccttccaggtgagcagggaggtgcacgacgcggcggagagggacgtggcgaccgtttga

SEQ ID NO: 41104 - DNA, 225 bp, Zea mays
  Peptide Sequence Number=SeqID_82883
atggagagtacgtgctcatccccgagcaaggaactgtccaagaggaggaccaggagcaagcttccgaggctgctatcaaggatctccccgcagccccagctattgaaggcaagccccggtaccattcaggaaatggttgatggcgtgacttggcctaccaccctgccaccgggttggacggtcgagtgggatgctgctctggcaggagaggagcacgaggagtag

SEQ ID NO: 41105 - DNA, 1081 bp, Zea mays
  Peptide Sequence Number=SeqID_82884
atggcgccccgcacgctccttgacgacggcggctctcggcccccttacggaagcaagaagacgtcagcaaggactcgacagccccgacagttgtctttccgccaagctccagcgctcctccgatggccacgacaccacacgaaccgggtgccaaaacctctccggctgccacaacggcatggccctcttacagagggttggccgtgcggggacgaggacgagacaggcgctcgcgtgaggccgctcgctccctctcccgcgtggacgcttgtaaccccctactgcaagcgcacccgacctgggcgcgggacgaacacgaaggccgcgggatttccacctctctcacgcccatctccggccacctcacttccccccttcgcgctcggcctcgcgccgacccatctgggctggggcacgcggcgacattcactcgtcggcccagggaccccccggtctcgaaacgccgacaagagggagatcctcgatagcagcctcggaagcttgctcctggtcctcctcttgaacagttccttgctcggggatgagcacgcgggggagctcgtcggcggcgaggagtccggcctatccagggcgaaattgaccaatcaaatgggtaagagagcttcaccagggatcaaggaaggtccggggcttggaaagcttcacgggccactagcggagctaaccgaagcgctggcgcgacttgggagatttggagcccggaaatccggtctgtctccctgctcaaacccgaggcaaatccagggttttgtcatgtctagggctcgcgtccccaatgccatcttctggcatgtgacagagggcttcctcaatctttatccaccgggtgtagcccccgaggcctcggaggagtggttcgactccttagagtcaacggtttggccggagccgggtttgcgagagcagcccccgagcctgcgcacagagcgagaggacggtcaaggacaggctcgtcttttttcatatgcccctgcgtcgcctttccgcaaggaggaggggggaagcgccatcttgccctcggagggcgccgaccatggtgtctccagtgagatgataacgg

SEQ ID NO: 41106 - DNA, 186 bp, Zea mays
  Peptide Sequence Number=SeqID_82885
atgggagggatgtttttgaaaataaaacttgatggtggatccatcatggccatgatgggttcaacatcggaaaagatgtacctctgccaggtgaggaagcgacaaatttttgttgcttctgttcaaaggtggtacccaaagacgagcaccaagactagagctgcgggagggaaggccctccattaa

SEQ ID NO: 41107 - DNA, 141 bp, Zea mays
  Peptide Sequence Number=SeqID_82886
atggccatgatgggttcaacatcagaaaagatgttcctctgcgaggtgaggaagcgacaaacttttgttgcttctgttcaaaggtggtacccaaagaagagaaccaagactagagctgcgggagggaaggccctccgctaa

SEQ ID NO: 41108 - DNA, 108 bp, Zea mays
  Peptide Sequence Number=SeqID_82887
atggggagaatggcgaccggaatccttcaacaacgtcgggctgcgggtttaacagagactcagacggcggcggggttaatacaccgcaggatccaaggtactcaataa

SEQ ID NO: 41109 - DNA, 1107 bp, Zea mays
  Peptide Sequence Number=SeqID_82888
atggcgcctcccaagctctatgacggcggcggctctcagctctcttacggaagcaggcccgagtatgctctgtcctgggaccttgagaccccattgtgggcggcccggaccccatacgggagggtccggcttgcacacgtggaggtcctagaccaaccttggaggtccggattgtatatccaggggtccggcgctctcccatgggggtctagacttactgttgatgccttggagtatataaccttctctggacacgtggcggctccatacccgcccatatggtgggctcaggcgctgttgtggtcccagagtagtcgcccgaggctagggcgagtcatggtctggtcccacatacagctctttaccaagcgactaaagatagccgcatggtatagccaaactacgcggagagaacgagggatccaagggtcagctcattaccttggatcctgtggtgtattaaccccgccgccgtatgagtctctgttaaacccgcagctcgacgtcgttgaaggattccggtcgccattctcccttggtgagaccccgagcacgcgtagagcttctcagggaatcccacatgactcacccgaggcatcactccgccccccccagagccatggcagcgcgatcacgattaagaggagccgacgtgcgcgagttgcgccagatgagagtgcgcggaactttacagcaggcgaagacgaaggtgcggacgtgccatggtggccgcatcattgcaatcggcgcgtggaagaggcgaatgtggaggagggggcaaggaacacggaggttgcgaggacccagagtcttcccatgatctgcgacacaagcctacccctggcgaccgcgcgatttcagtggattcagttgtccgcccgcaggcaacggcgcaaggtggatgctggacctgagcacggggcccgcaagtctgtggcacggggcgcgtgttctgttccaaggtggacggatgacctgacaatgggccccaccaatcagtgtcgtgagcgtcaccagggcgtgaggccggccggtggctccggtgtgtcggcgccaacaatagaaactgagctggtggtggggagaaaagcgggccacgcagaatag

SEQ ID NO: 41110 - DNA, 297 bp, Zea mays
  Peptide Sequence Number=SeqID_82889
atggagcaccccaacgccttcggttccgcacgacgagcattcctggagatgatgcttcgagttgatagagttggtgcattatatagggcaaaggccaccaagatcggtgggatggttgcaacagtctccgagttcggcgggagatccggccatggcgcgcgcgcggcaaaggcggccagctggggctgcggggagatcctcgatggcagtctcgggagcttgctcctggtcttcctcgtggacagctccttgctcaaggatgagcacgtactctccgtcaatgagattgcaatctaa

SEQ ID NO: 41111 - DNA, 966 bp, Zea mays
  Peptide Sequence Number=SeqID_82890
atggcgggtttgaataagaaaaagcgcaggggctcttctacaaatcggacgggccgaaggggattagatcttggctttatcaaaccggtacgcaatccaatccctcggatccaaaagcaacgtcccagatttaaaacccctaagaccagatctcacccgatcaatccaagtcggacggttgagattcagaacgctttatcgttatcccatgatttgatctcggccggtcccaaccagatcaacggtcgcagtccatcgtgcccacacgccatcccaagctccgcggcggcggcagccgcgccgcccaacacggcatggcacgccgacgaggagaagcatcagccaccccggtgccccaatccatacgggagtaagcgcataatgggcagaagatcatggcagatccgaacgaatcatccttacctgaactggcgcggcacaatcctccgcacacgatgcaccatggcccaccacggaaatctattttccggtgagaaattcaccgagcaccaggaacttcccagtccagccaataccgcagatcgcttccccgaaggtcgacaaatggcccaaactcgctctcgcttccggaacactgtcacaaccaccaatccccgatggcggagcaaccccaacgcctttggttccgcacgacgagcattcctggagatgatgcttcgagttgatagagttggcgcattatatagggcaaaggccaccaagatcggtgggatggttgcaacagtctccaagttcggcgggagatccggccatggcgcgcgcgcggcaaaggcggccaggtttgttccgccgccagactctgtcgcgagggaggagctgatagcggggggggtcccaccaacagtgagaagaaagcgcgagcacacgactaagggctggatagtggggatccggtgtcagtggcccagaggagtcatgcgtggccgaggcgggctgcgcgcgtga

SEQ ID NO: 41112 - DNA, 537 bp, Zea mays
  Peptide Sequence Number=SeqID_82891
atggatggcacgctcgtggtggcagagcatggcgaaccctcgtctgttatggcggcggcggaggcggcgccaccgccgatactcgagctggacccgtcgcacgatcgagccgtcagcgttgtcgaggacatcgtgcgtctagagcggaggatctttccgaagcacgaatcgctggcgcggtcactgcacgacgagctaaagcggcggaactccgggctgatctacaagacgtccagcgccgacgggggggaggtcatcgggtatgccatgtacacctgcaacacatccctctgcgccaccatcaccaagctcgccgtgaaggagaactggaggcggcagggccacggcgaggcgctgctgtcgggcgcagtggagcggtgccggcggcggaaggtccagcggctctccctccacgtcgaccccacgaggacggccgccgtggcgctgtactgcaaggccgggttccaggtcgacaccaccgtcgagggctactacgcgcctcacagggacgcctaccggatgttcttggatctgtag

SEQ ID NO: 41113 - DNA, 708 bp, Zea mays
  Peptide Sequence Number=SeqID_82892
acaatccttgcattgaatgctcctgcgatacggtcggttggcgaggcgatctggccaaggttgcttctccgcgaagcctgcccgagctgggcctcgggcaagtcgaagcccatcaggcctttgcagctttgtgctgatggtggttaccagccgagtttaggagtcttgaggctccgccacttccgcacgcacgagctcgacctcgcctgtttccgccagctccgccacttcctcgcccccgacctcgatgtgtgggattcgataccaaatgaagagacaagaggagaatacgagccctcagcctcgcccttgtcctcggtgttccccattcaccgctcaggcgcactccatcgctccttcgacgaggactccaatgactacagctccatcgctcctcatggtgatgccgccaagggaaccacaacgactacaacgaagccgtccacgatgccatcagtggttgcccacataggagcatgctccaccatgcgcgcaccttgccctgcacaccggcagacacaccctgcggctgcccacacaaggctgctaatggcggaggctgagcgccgccatggatctgacacggtgtggaatggggaggagccgaagtggagattggatcaaagtggactaggcaggagccaagcaaatcaatatgagaaaggttttttgacactcactatttcgattgaagatacttttgactag

SEQ ID NO: 41114 - DNA, 510 bp, Zea mays
  Peptide Sequence Number=SeqID_82893
atgccgtcagtggttgcccacataggggcatgctccaccatgcgcgcaccttgccctgcacaccggcggacacaccctgcggctgcccacacaaggctgctaatggcggaggctgagcgccgccatggatctgacacagtgtggaatggggaggagccgaagtggagattggatcaaagtggactgggcaggagccaagcaaatcccgccaacttgagatgtcatgcgatttactccctccccaaagtctcgcgtcgcacccgatcggcctcgcccgcgcaatccacgcgtcctaaccttcaatcaaggctccggggcaaggtttgcatcgacggcatcattgaggcgataaaatgtcatgcgttggtgaggcaccaactcccatccttctcggcgctctcccaggaagactacagccagttttggattgttggcagggtccaattttatgaaaggaatgcttttgctccccttgccttttcggatcgaaatcttggtgttgactgctaa

SEQ ID NO: 41115 - DNA, 1086 bp, Zea mays
  Peptide Sequence Number=SeqID_82894
atggacagcggtggttccgctgccggtggtggagtgtggactccccactgcattcccgtcgccacaggcgccggcaccaccaccgcctccacccactgcagcggcagttgctcgccgttcgccatctccaccagtgccctgtggtcgtcgggaccatcgctgcccgtcgtgggcagcctgctcgcgctgttgatgcccccgagaggtcgcatcatctttcaccggccatcacccaaatggggtggccccatcttcctcctccaatcggaggggcctaatgggccctcgatccggccgccacgtcggccgtttgggggagggggtggggagtggcgcgacaaaccccggcgcgagctccctttgcggtgcacggctcagcgctctgcgcatcagggccggcgctcggcgcagcccccgtcagggcgcgggcgcgggagaaggcaaggcgggcgcgcgcgattcgcgctctgcgtgggcgcggtgtggccacacgcgtggccggcgactgcgcgaaccgggcaggcgcggcagcgcgcaacggctccaccaggcggcgctcggcgtgaggcgcgtggcgcagctcctagccggcctcggccaggggcgctcggcgcgggcctcctcctccagaggcgcgggaacgaggccccggcgagggcgctcggcgcggctcccaagggcgctcggcgcggcctcctcgggcgcgggaacgaggccccggcgagggcgctcggcgcagcctcctcctccagaggcgcgggaacgaggccccggcgagggcgctcggcgcggctcccaagggcgctcggcgcggcctcctcgggcgcgggaacgaggccccggcgagggcgctcggcgcggctcccatgggcgcccggcgctcgtctcgaggcgcccttcacgaggcgctcggcgctcgtcaggagcgggcgcaggaggagaaccagggcggcggctgggagctccttgctccctggcggcggccaggaacatccctggcggcggctatgtgactgggcggcctttctggccgctgcctggctcgcctggcaggccgcctggaccactttcagaggtctaatatag

SEQ ID NO: 41116 - DNA, 105 bp, Zea mays
  Peptide Sequence Number=SeqID_82895
atgggctggccagctaggctgggccggcgtgcaggcctttctggccgctgcctggctcgcctggcaggccgcctggaccactttcagagttcaaagttatcttag

SEQ ID NO: 41117 - DNA, 1338 bp, Zea mays
  Peptide Sequence Number=SeqID_82896
atggctgaaaagtaccaacttccgcgaagttgcgttcccccgacgacgacaagacggaaggaccgcgggcgctccccatccgagggctcgaaagccgtcgcgggctgggtcttcaccaacacgctccaaggtcctccccctacgacatgggggctgggttccacgcgtcatgcaagctggcctaggatagaagaggccaaaccgccgtgcgcggtgcgcgtaactgcccagcggttacaagcactcctccactttcgcctagaccagcgggtgaaaggacggaccgccatgcaggtggcatgcaaccacaccaagggggcacaccctttcgactccgacgcgtccagcgtgggggcccaggcccacacgtcatgtaaccggcgcgccggttactacgtgcgagaagctgcaccgccacttgcgccagtaccgcgccttctcgactacggaaccggtgccgcgactcgaggcgaccctgcgcatgacccaacagtgtcaaccgagcacatcgatcacgggtcagtcagccgcgggagaaggcgcgacggtcgatctggccaaaagtgggccggcagtgatggaggcggcaggcgggtggaagcagcggtcaagtcgtctgcaagctcacgcgaagcaggcaacggcttcacctccgccataatgaccgcgtcaaaaaaggaccgggaaaggggatactccgaaagggatccttctccacgaaggaagcgggccccgagcccccctactgatcagaggttcgaaggctggcccctcggaagggttcgacagccgcctcagagcactcgggccctgagccctcctactgatcagaggctggcccccgaagggttcgacagccgcctcagagcacgcagagcgagggatgactctgggtacgttcgatacatagccgaggctcgggctatgctcccgagtcacttcgccgctccactgaccgacctgacaggaaaacagcgtcgcctgctccgctccgactgctgcgccactcgacaaacctcgacctcggaagacggactccgcctcgcccgacccagggctcggactcagcctcgacctcagaagacggactccgcctcgcccgaccccagggctcggactcagcctcgacctcggaagacggactccgcctcgaccttggacgatggtctccgcctcgcccgaccctcgagcccagactcgacctcaacctcggaggagcctccgcctcgcccgacctcgggctcggaccgaccacgtcacaggggggccatcattaccctacccctagctagctcaggctacagggaacaagactggcgtcccatctggctcaccccg

SEQ ID NO: 41118 - DNA, 621 bp, Zea mays
  Peptide Sequence Number=SeqID_82897
atggggagcactcgcgtcgccttcgtcttgtcgtcgtcgggggaacgcaacttcgcggaagttggcagctcggctgcatcccctcgccggtggtcacccaagacggtgaccaccagtttgatggtggggagaagcaagccgggctgcgacctctgcctcgccctcagcttcaaggatcttcatcatcctggctggggcggaggccggactgagccggagctctacctcccgcgcgggttcgtgggtcaccttctccctcagcattcaggggagagggcgctcaccggcctagcgggagggtcggacttcgacaacgcggggctggtcggcggcgagcgtcgtctgcttcagcgcgttgggctcgctggctcagctggctctggctcggctcccggtgccccctcccgccgcgagagcggttgtcgcaccgcgcgcaccggaggaccgcccaagatgtcgcgcgctgctagggcggcgttcgtgttcttgggctgtcctgtctttgctccggtacggcgcctctacgcggaggtcggtgctcgcccgtccgggaggattcgagtggggatctgccggtgggcagatggcttccgtcgtcggcgcggaggtggtggcggctga

SEQ ID NO: 41119 - DNA, 2607 bp, Zea mays
  Peptide Sequence Number=SeqID_82898
atgaagtcagttgatcgtcctcccgctaatcccaaacgcataacaattgagtcaagccaagaattctttagtgttgagataccacggccggcctctattggagttcctccaaacacaaagcattctgatcagtgtcctgcacctgtcgagaaaccatctgttatttatgaagccaatgaacaaactggatctggcaatgacgacgatgacttcatgaacctacaaagaagcaaactcaatgttagatgcaaccctcaggatgtgattataactattaagatattgaatgagaggcaacgacaagccgttgctagaaaaggattttccaatattcttgacatgacacttgatgcactgggtagccgttctcatcttcgttggttgatggataagttggaccacaaggatatgactattcgccctggagttggcaaggaactaaaaattacgaaagaaactgtccaccttatactaggccttccgaatgctggcggtggtaagccactaggaatcgatgaagcagtggcgggcaataacttgagggctgaacttggattgtccaaggatgagtttgttgttgcatctcttcaggaccgattgagaaaaggaaatgatgatgacctctctatcagatgcttctttttgatattgttcaatagattgttgttccccacttccagctggggcatatccaaccatgaagtgttattgacggaagaaatggaccgtttccacgaaatagactggtgccacttaatttttaacgacctatgtgaagctgcacaaaagtggcatacaagaagcacttctaatgtgtccacgacgatttatggatgctcagttgtcatactattgtactatttggaccacttgcatgatgctgcagccccccccaataaacgtggcacaccccgcataaaattctttgataaaaacattatccaagctctgacaaaagctgataagaggaagccacgccaaagtggtgaaccttttggccattgtgagttccgaagcttttctgaaacttgctattctgctgtccctagtgtgcagtttcaatcagagcatagggacaggacaaacatttttgatgtccctcgtcccgatccttgtggtcatcatactattcatatccagctccctttgatcaaggatatgctttcaagtaagataaagcagctccaaccacgtgaccgaccaaaattcattgaaaagtttgttgagtatgattctgaagttggcaaagcgtgttccgtcataaaaagtactcttaccaagatggttgtgaagcagtatgaactagcggacacatttgctgagttaattgatgatgtccttcgcgcggagtctggcgacccagacaatgttgcggaagcgcctcaaacagataaacctccagatatatctcagcatatgtcgtcagaggaacagacccatgagggtacccagaatacccaggacatgactatgccttcacaacccaatacggagttgacaggtacccagtttgaagaaatacacgaaaagcaacaacaaatgcgtcgtgcatttgagggctgccctgacgatttggagacgaacataaccccaaatgccgaaaaccagggaggagacattggtccatctcatgacactcctactttcacgggtccccttttcgatcagacacctagtggtcatgttgcagatggtgaggaaacacatagcttgcacactacacatgaccactctgtgccacgtttaacagaattggactgtgctcggtcgcttcgtgagtttttgtgctcctcaaaagctgacccaaacaggaatatcatagaattcgatgaatgtattggaaattgtctcgatatgcaacaatcatttgcagatgggatgtgtctggataatgttttcatgcagtgtttcatcatgggttttcgccatgacaaaaacaatagttgctcgtccatcaacaaagacagacttgtactcgatgtcaatgttggtattctcctcaactttgaggagcatgaacggtacagtaagtctcctcagatttttgatcaaactgtccttgatgcttatctggacaagaccctgccccaactggacaattttggtgactacaaaacgattatggtccctattcttcatatgggacattggacattgtatgtcataaatatccagttacgatgtattcacatattagattcaaatccatatggtccggagttgggtggtacttcatggaagatgtttcattactccctaaaggacatagggaccaggaaactaccatgggctagggttataatgaacagattgaacaaatctttgcaacaagtccggcccaattcacgcatcccaaaatttggaaatttcccaattgacatgccacctatgtgtcccaccatgatagctggctctaatgactgtggcttttttgtcatgagatacatccagtactatgaccatacagatggttctatcaagcaatttataaatcgagaaaactctggtgacctacgatctctggctctacattacctcaccttccatagcaagaacaagtgcctcccgttgcctctagaaattcaaaaattcaagtttggacgctag

SEQ ID NO: 41120 - DNA, 186 bp, Zea mays
  Peptide Sequence Number=SeqID_82899
atgggagaccacgtctcaggtcgcgtgaggggatatgtctgcgggcaggttcactcaggtaccaggcttactgatttaccatatttctcggttatgcataaaaccggggcttgccttccaaagctggggcaggcagatcctctggtgcaggctctggtgctggatccggggctacctcctgagtag

SEQ ID NO: 41121 - DNA, 252 bp, Zea mays
  Peptide Sequence Number=SeqID_82900
atggccaaaccattcctcgccctcctccgctcaatccaagcccctagaaaaattataagttctgttgtttggcatctttcaaataacaagttagtacatacatattcttattcattgcattcgatagattgcaacctcgctgatggagagtatgtcctcatgccggagcaaggagttgctaaggaggtagccccggatccagcaccagagcctgccccagctttggaaggcaagccccggttttatgcataa

SEQ ID NO: 41122 - DNA, 1743 bp, Zea mays
  Peptide Sequence Number=SeqID_82901
atggctacatttgatgctgtaggagaaggcaaagaaaagccatttgttcattgctttgtggatggaacatggagtactatcactggaagctgtacagtagtcagggacgtgaaagatttgcttttccactcctatttttcacttatggatgaccttcgtcttcagaaacctcctgacggggagccatatgagataagattgcttgatattcctggtgcactaatagcggctgcatttgaatttctacttgatggaataatgttcacattaactgccttctataagtgccccgtgacgcttttcaaaggatggaaacgactgatccaggacatgattgggagagaagggccctttctggagactgctggtgtgccatttgctggtcttgctattcttctttggccatttgctatagtaggagccgttctggcatccgtactctccagtgtccctttaggtgcttatgctgcagttgtagcttatcaggaatcctcccttatcctgggaattgcctatgtgttctcgtcagtgtctatatttgatgaatacacaaataatgttcttgacatggcgcctggttcttgttttccaagaaaccagggggaggatttggttaacagaggagtgataacaatgaaagacattgaagaaatgaagtctagcaaagttggcagcagtgttcttaatgttggcctaccagcatatgttatccttaatgcactctggaagaaaagacttggctctgtacaaccaactccaactcggcttggcacaccggacagtgtccggtgcgccaggctggtccgcgtgaaaaggccgctctcgggactcgacggtggcgtacgactattgtcggggaccataattaggggtacccccaagactcctaatctcagctggggacacgatctcgccccgagcccagcctcgggcaaagacagccgatccaggaggattcacgtctcgcccgagggtcccctcaagcaacgggcacaccttcgactcgcccgaggcccagctcgagcaggcttcgcggagaagcaaccttggccagatcgcctcgccagccaaccggatcgcaggagcattcaatgcaaggatcgcctgacaccttatcctgacacgcgctcttcagtcgaccgcagtcacttcgcccctccactggctgacctgacaggaaaacagcgccgcctgcgctactccgactgctgtgccacccgtcagggcgccataggaagctccacctcgcccgaccctggggctcggactcaacctcgacaccggaggacggactccgcctcgcccgaccccagggctcggactcaacctcgactccagaagacgaagacggtctccgcctcgctcgaccccagggctcggactcaacctcaacttcgaaagacggtctacgccacgcccgaccccagggctcggactcaacctcgactccggaagacggtctccgcctcgcccgaccccagggctcggactcaacctcgactccggaagacggtctccgcctcgcccgaccctagggctcggactcaacctcgactccggaagacggtctccgcctcgcccgaccctagggctcggactcaacctcgactccggaagacggtctccgcctcgcccgaccccagggctcggactcagcctcgacctcggaggagtcaccgcctcgcccgaccttgggctcggaccgaccacgtcacaggggggccatcattaccctacccctaa

SEQ ID NO: 41123 - DNA, 225 bp, Zea mays
  Peptide Sequence Number=SeqID_82902
atggctacatttgatgctgtaggagaaggcaaagaaaagacatttgttcattgctttgtggatggaacatggagtactatcactggaagttgtactgtagtcagggacgtgaaagatttgcttttccactcctatttttcacttatggatgaccttcgtcttcagaaacctcctgacggggagctgttgggggccttcggcttccgaaggtcctcaaaaaagtga

SEQ ID NO: 41124 - DNA, 507 bp, Zea mays
  Peptide Sequence Number=SeqID_82903
atgggcaagggtaccaagcgcaagcgtgagcccactcctccgtcggatgatttcggtgactcggaatactcggaggaggagttctcctccgagtccgagggatctccggctcccgtctctcccccggcgtcgtctgatgattcagacgactcccaggggattgccgcggaggtctggacgtatatccgggccgtcgagcgctccgggctcgagggctcggatgagtctgagttctcctcggacgaggaggactcgaacggcggcgaggacgaagatgacgacgacgacgacggcaacggcgacgacggtggcgacggcgatggtgacggcagcaacggcggcggggcgacgacgacaagggcagtaccagaggcggcagcagtacgggcagcaccagaggcggcggcagcaaaggcggcaccaagggcggcggcggcggtagcagcagcaaggccagtggctaaacgccactggtctttagatattagtatagttagaataatgtag

SEQ ID NO: 41125 - DNA, 465 bp, Zea mays
  Peptide Sequence Number=SeqID_82904
atgggcaagggtaccaagcgcaagcgtgagcccactcctccgtcggatgatttcggtgactcggaatactcggaggaggagttctcctccgagtcctcgggatctccggctcccgtctctcccccggcgtcgtctgatgattcagacgactcccaggggattgccgcggaggtctggacgtatatccgggccgtcgagcgctccgggctcgagggctcggatgagtctgagttctcctcggacgaggaggactcggacggcggcgaggacgaagatgacgacgacgacgacggcaacggcgacgacggtggcgacggcgatggtgacggcagcaacggcggcgggggcgacggcgacaagggcagtaccagaggcggcagcagtacgggcagcaccagaggcggcggcagcaaaggcggcaccaagggcggcggcggcggtagcagcagcaaggccagtggctaa

SEQ ID NO: 41126 - DNA, 204 bp, Zea mays
  Peptide Sequence Number=SeqID_82905
atggcgttgttcgagtggtcatcggtcgacctaattggagaattagtggccctagcactagaatcgggcgaacgccggcgagaccgccgccgcggtcactgttttcgtcgtcgccgagaccacgagcaagccactgtggattctgaagttcaacaagtagagatagctgagcaggagctcattgaaggcaagttgtgcccttga

SEQ ID NO: 41127 - DNA, 273 bp, Zea mays
  Peptide Sequence Number=SeqID_82906
atggcgttgttcgagtggtcatcggtcgacctaattggagaattagtggccctagcactagaatcgggcgaacgccggcgagaccgccgccacggtcactgttttcgtcgtcgccgagaccacgagcaagccactgtggattctgaggttcaacaactagagatagctgagcaggagctcattgaagatcattatgttaattggaacatggagcgaccacccgggaaaacagtgctaccacaagggtataatgggacgcccttggctgattaa

SEQ ID NO: 41128 - DNA, 279 bp, Zea mays
  Peptide Sequence Number=SeqID_82907
atggaacctgtgtgcgagtattggactacaatgatcgtttcgagtgcccagaattgctcaccggactggcgcctcgccgccgggccgcctaaactcgaggacaaaccgtctgcgctcgcgattcccgacgagcaagccactgtggattctgaggttcaacaagtagaagtagctgagcaggagctcattgaagatcattatgttaatgggaacatggagcgaccacccgggaaaacagtgctaccagaagggtttaatgggacgcccttggctgattaa

SEQ ID NO: 41129 - DNA, 162 bp, Zea mays
  Peptide Sequence Number=SeqID_82908
atggctctgccgcgtcagggccatgcgccgccgtctcgggttaagacgaacaagccactgtggaatctgaggttcaatcattatgttaatgggaacatggagcgaccacccgggaaaacagtgctaccacaagggtataatgggacgcccttggctgattaa

SEQ ID NO: 41130 - DNA, 867 bp, Zea mays
  Peptide Sequence Number=SeqID_82909
atgctgctcactcgtcagtcaagctggcataacaacgtgcccgcaaactccggcaaagaaaggacggcgtacaaccggtctactgcaagtattgacatggagacgggttctctacagcttctcgcgcctctactgctgacgggagggaagggagcggatctggtgatccgtggtaacgtagttctcaacacgttatcagcacgctctacctcgacgttgctgtgggatcagatctgcatcaactcttcgtcaagctggcaggtcttttggcctagccaaactgtcctacgcggcaggcttcgtttccgttcgctgatgaagaaatgtggtatgaaatctctggtggacgatttacttttgttgacgcaggcgttgtctcactccgcacagcaggccaccagcccgtgcgccctcgtgcttgcgactgcggcctcggccaacggcttccatgtcgcgcctgagtttgtgcctgtgatggaggcacacctcgtcatggtcgcgcccgtatcggaggcttgccagcgtggctgtgacggagtccacgcgtccgtggaaggcggcgatctgggcgcatctgtggccaggcaaaagtgctttggtccgtccgaattattttattggactggatcatcgtctatctgggatctggcgatgcaggtggataaaaatgagactgttttccacggtctaatctgcatgtttgtgcaatgcgcgatgtgtggccatgcacgaagcaagccaacggatgggagatggcgtggaccatttcctcctctgtacttcttttccgtgcgcatgggccccaccatcttgcatgtccgcatgcacgcatggacgagtggacgtgatgccttatttccgacctga

SEQ ID NO: 41131 - DNA, 288 bp, Zea mays
  Peptide Sequence Number=SeqID_82910
atgcccaaccctatattcagtgtctcgtgtgtttcctctgatgtgcttatgggaagggagacgggtcttctacagcttctcgcgcctctactgctgacgggagggaagggagcggatctggtgatccgtggtaacgtagttctcaacagtgggaacagagcaggtgaagatggccctaaacaagctcatggatggaggagccgacggggaggatcggaggagaaaggcccaggagctgaatgccaaaggcaaagctgctttggagaatgggaggatcgtcgtatatga

SEQ ID NO: 41132 - DNA, 237 bp, Zea mays
  Peptide Sequence Number=SeqID_82911
atggcccggcgactggatgacatgaaagggaaatgtgcccttgggccatttctaagtattttggtgattgagtgtcaacacaagtgcttaaatgtaaatcaatgcccatggatgaacaaagtgcaaatcttcaacaaagggcgagaggctccaagttgtggagattcctcgcaaacgggattgagaaaagaaaagcaagaacaccgtggtattcaagttgatcattggatcacttga

SEQ ID NO: 41133 - DNA, 483 bp, Zea mays
  Peptide Sequence Number=SeqID_82912
atggagaaaagcttcgagcgcaagccagcgaaggagaagaagtcaaaacttgcgcagcaaaaaagaaagggaaaagacgacaatgtccctgtatcatttgtaaatcatgtgtgtaaaccccatggacatgtgaacagtgccctacttaggcggacctttttgaagggccttagcttcattttgcttagcatccaaaacacctttgtattattttgtgccaaaaagcccaagctaatactttggagaagtaataacatgagggcgaaggtgaaagggaaatgtgcccttgggccatttctaagtattttggtgattgagtgtcaacacaagtgcttaaatgtaaatcaatgcccatggatgaacaaagtgcaaatcttcaacaaagggcgagaggctccaagttgtggagattcctcgcaaacgggattgagaaaagaaaagcaagaacaccgtggtattcaagttgatcattggatcacttga

SEQ ID NO: 41134 - DNA, 1299 bp, Zea mays
  Peptide Sequence Number=SeqID_82913
atgacgaacgagatggcagcaactaaggcgaggagcatcattattgtgcggagaaacggcggtgagagtcctccagacactgcacagcgcaatggtgacggtgtccgtgagggagcggaggaggtggcaggcctgaacgctggccgcttcccacgtgaagtagtactccagctgccaccaccgcgaggccagccggagaacgatgacgatgacggcgaaaccttttcccctggtcaagattccaggaggcggttctttggggatgtgaggctggaggcggacaggatctttaggatcctgctgcaggacggcccggggttcagcacccgccacgcgctcgatgaaatgcgcccgaaggtgtctattgagctggtgagggaggtgctgttcaggattgttgtgtccgtggacagtgtgaaccgtgagaggtacccgaagctggcgtataagttcttcatatgggcggggcagcaggaggggtaccaacatagcacaagcatgtacaacctcgtcatgaaggttttcgccgagtgtggggaggtgaaggcgatgtggcggctgtttgaggagatggcagccaaggggctacctgtctcttcccggacgttccacctcttgatatgtgcatctgtgaaggttgggttgaggcggagactggtggagaggttcatcaggtcaagtactttcaattaccgcccatttagaaatgcatttaatgcaatattgtacacacttctgaccatagagcagtactcactgattgagtgggttcacgagaaaatgatccttgaggggtactcacctgatgtcttgacatacaatgtggtgttgcgtgcaaagtatatgcttgggaagttggatcaattccatcaattacttgatgagatgggaaaaaatgggcttacgccggacctccatacttacaacctgttgcttcatgtacttggtaagggagacaaacccctcgcagctctcaatttgctgaactatatgagtgatgtcggatgtaggccaaatgtgctccatttcacaaatttgatagatggtcttggccgtgctggcaaccctagaagcctgcaggggctttgcgcagtcggggagtttgataaagcattcactatgctgaaggacatggattcacatggatgcacaccaaacttctctgtgtacagtagtctagtaaggagactgcggaacgctgggaaggatactcaagctaataatgtcattaagtacatgacagataagggtcattatcttcatctgctatcaaggtttggagggtttagaagatgctga

SEQ ID NO: 41135 - DNA, 252 bp, Zea mays
  Peptide Sequence Number=SeqID_82914
atgcccggatcctcgctagctgcctcccctgctcgtgaggtcgacgccgacggatcgaaggacgccagagccgcccctcttcgagctccccctatggccatctcaggcgattgcaaggagaaggcggcgggcgatgaagactccgccgagaagccccagattcttttagctcggtaccttacatttctgctgcttgtgctcttctccgaggttattttcgcagactacaacaacgatggtggtcggatgtag

SEQ ID NO: 41136 - DNA, 252 bp, Zea mays
  Peptide Sequence Number=SeqID_82915
atgcccggatcctcgctagctgcctcccctgctcgtgaggtcgacgccgacggatcgaaggacgccagagccgcccctctccgagctccccctatggccacctcaggcgattgcaaggagaaggcggcgggcgatgaaaactccgccgagaagccccagattcttttagctcggtaccttacatttctgctgcttgtgctcttctccgaggttattttcgcagactacaacaacgatggtggtcggatgtag

SEQ ID NO: 41137 - DNA, 372 bp, Zea mays
  Peptide Sequence Number=SeqID_82916
atgcggtggctcctccctctcctctcgctgatgggcctgcagagcaccgtgggcgcgctgtggttcgcgaggcagaacatgtcgagccctcggcacgccgccagcacctaccccgacgcctcaagctccaccgttgggagctccagctcgccccccgtgcggcgtgctgcctcccctgctcgtgaggtcgacgccgacggatcgaaggacgccagagccgcccctctccgagctccccctatggccaccgcaggcgattgcaaggagaaggcggcgggcgatgaagactccaccgagaagttggcagtggtgttgcccgcacgcaattggaaggccccggggcatcgtctagcccacacccatccaatttag

SEQ ID NO: 41138 - DNA, 447 bp, Zea mays
  Peptide Sequence Number=SeqID_82917
atgcggtggctcctccctctcctctcgctgatgggcctgcagagcaccgtgggcgcgttgtggttcgcgaggcagaacatgtcgagccctcggcacgccgccagcacctaccccgacgcctcaagctccactgttgggagctccagctcgccccccctccaagaaagggaacagcgggcaggacaagttcgccatccgtgtcgtctcccggcgcgaccgcccatgcccggatcctcgctagctgcctcccctgctcgtgaggtcgacgccgacggatcgaaggacgccagagccgcccctctccgagctccccctatggccaccgcaggcgattgcaaggagaaggcggcgggcgatgaagactccgccgagaagttggcagtggtgttgcccgcacgcaattggaaggccccggggcatcgtctagcccacacccatccaatttag

SEQ ID NO: 41139 - DNA, 1572 bp, Zea mays
  Peptide Sequence Number=SeqID_82918
atgagcggctctctcgtcctcggtggcaccggaggcggcgagggcatgcaatacgtgcccttggtgaagagcgcagcgggtgacaagttgtcgtacgacatgtactactacctggcgttgaggggcatgacggtgggcgggaaggcggtgcagctcttggcgtgggagttcgcgaccaacgcagcagggtccggaggcgccatcatggactccggcaccacgttcacgtacctagacccgaccgtgttccagcctgtggcggacacagtggtgacggtggtgggcgggcggtacaaacggtccaaaaacacggaggtcgggctggggctgcacccctacttcgcgttgccgcagggcgccagtcaaccaactgataaaccattcaggactgaacacatgaggcgtcttgaatttgccttctggttcaaggagaagctttttggaaaaacaggccaagcgcggaccgtccgggcccttgcggcggaccgtccgcgacacaaggatgaccctcagacagaaccaatgcaaaaacacaagtttccactacagactgtccggaggaaaagtaaagaccgtccgagccctcgcgcggaccgtccggcctcaggcgcggaccgtccggtcggtagcgaggcttgctgttcagccatgttgacggcgcaagggaaagcgtcgaggtcggcgccgctgggcgcaggtcgttgggcccgacgtggccgccccgtggcggcgccgtaccgttcgggctggcaagcctacggtggcgtttccctcgagggcagcgaattccttggcggcatgcaccgcaccgaggagcgcgtcgttccgcgggcgccccacgcggcggcacgcgatgccgaggtggtgaggccgctctcaaagctcccgaacagcagcattgggctctacgattcctcgttcgagcgtgacgcgtgcggcgttgggtttgtcgctgagctatctggcgattacaaacgcgagactgttaatgatgctattgagatgcttgagagaatggctcaccgtggtgcctgcagctgcgagaagaatacaggagatggtgccggcatcatggtcgctctaccacatgacttcttcaaagaggtcgcaaaggatgctgggtttgagctacccccaccaggcgagtatgatgttggaatgttttttatgccaacagatgaaaagcgtcgtgagaaaggcaaagctgagtttaagaaggttgcagaatcactgggacataccattagctatttttgggcccggtctattagttacttttggggttcaatccagctcatgggtgaagttttgactgagccagtcattgagcaggttttcgttaccaagagctcaaggtcagaggctgagtttgaacaacagactgttgtttacaagggccagcttaaaccgtcccagcttaaggggtactactatgcagacctaggtcatgaaaacttcatgagttatatggctctgagtccagctgtagttctcctatggccgactgctatgcccgactcatcaggatgtgacctccgattaggtggtgggaaggaaatgtgtttggtttga

SEQ ID NO: 41140 - DNA, 924 bp, Zea mays
  Peptide Sequence Number=SeqID_82919
atgttgacggcgcaagggaaagcgtcgaggtcggcgccgctgggcgcaggtcgttgggcccgacgtggccgccccgtggcggcgccgtaccgttcgggctggcaagcctacggtggcgtttccctcgagggcagcgaattccttggcggcatgcaccgcaccgaggagcgcgtcgttccgcgggcgccccacgcggcggcacgcgatgccgaggtggtgaggccgctctcaaagctcccgaacagcagcattgggctctacgattcctcgttcgagcgtgacgcgtgcggcgttgggtttgtcgctgagctatctggcgattacaaacgcgagactgttaatgatgctattgagatgcttgagagaatggctcaccgtggtgcctgcagctgcgagaagaatacaggagatggtgccggcatcatggtcgctctaccacatgacttcttcaaagaggtcgcaaaggatgctgggtttgagctacccccaccaggcgagtatgatgttggaatgttttttatgccaacagatgaaaagcgtcgtgagaaaggcaaagctgagtttaagaaggttgcagaatcactgggacataccattagctatttttgggcccggtctattagttacttttggggttcaatccagctcatgggtgaagttttgactgagccagtcattgagcaggttttcgttaccaagagctcaaggtcagaggctgagtttgaacaacagactgttgtttacaagggccagcttaaaccgtcccagcttaaggggtactactatgcagacctaggtcatgaaaacttcatgagttatatggctctgagtccagctgtagttctcctatggccgactgctatgcccgactcatcaggatgtgacctccgattaggtggtgggaaggaaatgtgtttggtttga

SEQ ID NO: 41141 - DNA, 414 bp, Zea mays
  Peptide Sequence Number=SeqID_82920
atgtctccaggtccattgcttcacatctgggttctggtgctctctgttttcacatatattatgatccacatcctagtgttcatgagagttgttccaagatttgtgttcgagaaaaaatttgttccaaaacggctgaaagatgtggcgcggtctgtggagcgctggatcctatccaggtgtggtgttcacaggagccaaaagaacagctctcacgagaaagatctagaggaagctcgcaagttcactctggtgcttgtgactttcgctgcaactgtggcataccaagcaaggttgagtccaccgggtagtttttgggctgaaaatgatgagaacaaaactccagctacatctatgcttcgctctggaaaccttcctcgatataattccaacaatagaaggggtcctagcaaatag

SEQ ID NO: 41142 - DNA, 1857 bp, Zea mays
  Peptide Sequence Number=SeqID_82921
atgccgacactcatcatcttgcttctgagtaaaaacgtggcaaggcagaggctatggctccgctcaatgcaactcaccatggttctggacctgttcagcctgatgggggcctatgcagcctatgatgctggaacctgcagggcagtgaagtcctccatctacatctgggttctggtgctctctgttttcacatatattatgatccacatcctagtgttcatgagagttgttccaagatttgtgtccgagaaaaagatttgttccaaaacggctgaaagatgtggcgcggtctatggagcgctggatcctatccaggtgtggtgttcacaggagccaaaagaacagctctcacaagaaagatctagaggaagctcgcaagttcactctgggttgagtccaccaggtagtttttgggctgaaaatgatgagaacaaaactccagctacatctatgcttcgctctggaaaccttcctcgatataatacttttgttgtttgcaactcgacttccttcattgcgtctttggtcacaatcatactgcttctaagcccagaactgagtcggcatggcatcaaatccagagcggtgaccgtgtgtgttgttgtcaacatattgggccttgttggagcatatgctgcaggaagctgtaggagtgtggtgacatttgtctctgctgttttagtggctgttctagtatggatcttctttgcagttttagctgggatctttgttaacagatctgtagcagagtggtttgggaagaagatcaagccatatattatgaggtgcaccgatagatttggtcgggtcttttcgtcgaaccatggcagaaagagatcaagaaatccagagggagagaattctattgcaagtcaccagcaaactgaagagagcataaaagatattgaagagggtgaatgccctggggagcagcagagtccaggcaaacaacaacctacaaacattatggttgtgtccatctcagagcatgcatctgtaaatgagaagcaagcagaaaatagcagcagtgtcatgtgcaagctgggaagtcagtctacagacccaaattcagctgcaaacgaggctatgactgaaactgaaacagaaaacatacaagatgcaaatatggaggaacaacaatcttccttggtggatggtcttaaaactcccactactgtggctgatcaagaatccacagccgtggagtgcttgtccgacattgcacccaataataattgtaacctgtgggagcgtggtgatggaaatcacaaaccttttgtccgtgatcttgctggagacaaaaggaaagaacaatggttaagagaggatactacatgtatgctcccaatcacaaatcgatcctacacaccaaggatgaagaaacagatcgatctagggttaggaagaaccagatcacaagcatgtgaagtgatagagaaggaggaggagggagagagcgtcgcttgtgcgcacgtctgtgtggcgagtagtgcgcgctgggggcgacaccctggagagcggataaaggtctcaccggcgaggaggcaccttgggagggagaaggacagccgaggaagaggagtgtccccgtgggggaagggaacttgtcacctcgggaggaagaatgtggagctgcggtcgagcttggggaccttgcagcaatggccttgggacgccatctgcggtgatcgccagctgtggtcgagattgatggggacgggtgtcgtcgatggtggggtgaggccggtcggtggcaaggggactccccttccatggagagcgcggatcgagagctggtgcgtcgatccggggcatctgattcgccttccatggagagcacggcgcgaacgcagatga

SEQ ID NO: 41143 - DNA, 288 bp, Zea mays
  Peptide Sequence Number=SeqID_82922
atggccacccgatctgaggttatcgggccttgtgcagatggtgggcttcccctgagtttcgtgccatttccgaaaggaacaggggaaaccgtgggactgagtcgttccacaactacgacggcgatggacatgtgcgcttggctaagcgaatggttgggtatttttgattctacgattgattctagggagctgagacgccgtggacgacagtccacatcgtcgtcttcacagtcgtcccgttcacgatcatccgacccagagatagagcttgcagtgttgcgtcaatag

SEQ ID NO: 41144 - DNA, 1149 bp, Zea mays
  Peptide Sequence Number=SeqID_82923
atgaatctccacaagatcttcgagggcgtcgacgacgacgatacgcgccccgtgcacgtccctgctttccccatcgacgtcgagatattgagggcgcggtcgcccggaaacttcacgggtcccggcatgaaggagttcggccaggagatcatggctgagagcgcgagagccgacgtcctggtggtgaacagcttcgcggagatggagcccatgtttgttgacgcctatgaggcggccctcggcaagaaggtatggaccatcgggcctctcttcctggcccccaccatgccgctggcggcgacagcagaggacgccaacgccgtccggtgcgtgagttggctcgagtccatgaagccccgaaccgtggtgttcgtgagcttcggcagccgggtgcgctcatcgctgccgcagctcgtcgaaatcgagcacggcctcgaggcgaccaagcgcccgttcatctgggtggtcaagccgcgcaacctcgctgagttcgagcggtggctgtacgaggatggcttcgagtcctgcatcggggaggcgggcctgtgcgtcacggcgggcctgccgatggtgtcgtgcccgcacttcgccgagcagttcatgaacgagaagctcgtggtggatgtgctgcgggtcggcgtgcctgtcggcgtcaagggtgccgcgcagtggggcgtggaggcggagggtgtgctggcgacgaggcaggacgtggagagggcggtggctgcggtgatggactgcggggaggagggctccgcgcgccgggcaagggccgccgagctcggcaggaaggctcgggaagccgtgggaattgtgacagaggcggagctggaggcgacagcattggcatcggcagtgcaaagtctggaggcgacatcccatatattggcatcgggatgcccgcttgttgtgtcagttgctaaaaattatatacaagccattgttgagaaaataaggtacacatcatgtgttttgcaaaataagcttgttgtctctggtactccaattgttccctcaaaactgattgatgatactctgcctgttgaagcaacactgcaagctctatctcttgggcggatgatcgtgaacgggacgactgtgaagacgaggatgtggactgtcgtccacgacgtctcagctccctag

SEQ ID NO: 41145 - DNA, 285 bp, Zea mays
  Peptide Sequence Number=SeqID_82924
atggctgcccatagtggcgtcgcccatggggacagagccaccgtcagcgaagatgatgtgacgaaatttggtgctgcccttggagatgggcacgccggcgtccaggatgtggtgacaaaattggcaagcaatgctgcccatggagatggtgacgccggttgccaggatgacgtgacaaaggtggcatgcgacacaacccatggtgatggggacgtcgattgctatgacggcgtgacgaaggtggcatgcggcgcaacccatggagatggggacaccggttgctag

SEQ ID NO: 41146 - DNA, 1671 bp, Zea mays
  Peptide Sequence Number=SeqID_82925
atgctgctcatgttgcactgctgccttgatttgcagcagcccttgctcaaccttctggagtgtggcttgcatctttgcgagatcaacccttatgttggtccacaagtcccccatcgatggagctgggacgccggttgtcaggatggcgtgatgaaggtggcatgcggcgcagcccatggagatggggacatcggttgccagaacgacgtgacgaaggggctaaggcaggaggtaattgtggaacttgtggatcaatgccgcacttacaagcagagagtagtgcagctagttaattctaccacggacgaggaacttatgtcgcaggggctcacactgaatgatgatttgcagcgtgttctagcaaaacatgatgcaatagcagcaggcattgcagtccgagtggagaaaaaatcgaagtctttgcaagcacttgtagagaccaaggattcgacaaaccaggattccaaaaaggagcaaggactcatagatattgaggatcccacaagtcaagatgctgcaaaagatccaaatcaaagtacaagtgaccaatctccttttgagcaattagctcttccagcaccaccagtgtcaaatggcgcagcaacttcagcaccacaatctgatcttggcattgatcttctgagctgggatgatacccctgctacaacacaaaatccacttgctcttgttcctgtcacagatcctcttgctgactctacttcatcaaatcaaaatgcgctagcaattgttgacacattttcagaaaacagcaccacgaaccacaacgctcaaccagctgacccctttggtctcaatccgagttctgctattccaggatctcagctatacaacacgccaactcagcagcctttccagtcacaacagcctccgcagcaggcggcgctctatgcgaatgggggtgctgtggaccctggaacgtcttacgatcaggcatcccagtttaaaaatgttagttctgggtggaatggtcaagctgccaaccctgttgtgcccctgccagagcaagcactgaattacgatgatcaaagtggaaaccttccaccgcctccttgggaggctcagccagcgtcaaacaatgaattgccaaatggccaattgggaagcttgcaacctctcccaggttcagctggccagatcggtggcatgcagcagccactgcaaccacaagttaaccacatgggagttccacaaagccagccaatgtatagtaaccaaccaatgcaacccggtcaggttgccgccacaacacagatgcagcctggcttcggaaaccagcagttcggttcgctaccaccaacatccatgctgggcatgcaattcggtggcatgcagcctccgcagatgtatggcggatcgcagccagtcatgatgtacccgcacaaatggcagtgccccagtatggagcaatgcgcgcagcagcgacgtatggtggtcgattggcgggggatgtatggctaccccggtgcgaacgggctgtcacagagcatgtatggcctctcggtgcaggacaactcgtccatggggatgaggtcgtcttaccagactacgacggcgccaccctccacggggcaacctatgaagccgacgaagcccgaagacaagcttttcggtgacctcctgagcattgccaagacgaagaaagcttcatga

SEQ ID NO: 41147 - DNA, 1395 bp, Zea mays
  Peptide Sequence Number=SeqID_82926
atggctacctcctccaccaccgcgctccactcgcagttccggccaccgctgcgcgctccccgccatctccgtccgcttccacactcgtattcctcctcctcccgcactcgcggctgcgctcctgtccgggcctcagcggcgtccgcatccgcgccggcccagcgggagatcgccgcgggcgtcccgtggggctgcgagatcgagtccctggagagcgcggcatcgttggagcggtggctcatagactcgggcctaccggagcaacgcttggccatccaacgcgtggacatcggcgagcgcggcctcgtcgccctcaagaacatacgcaagggggagaagctgctcttcgtgcccccttccctcgtcatcaccgccgattcagagtggggtcgccctgaggtgggagatgtgatgaaaaggaactccgtgccggactggccgcttatcgctacttacctcataagtgaagccagtttagagggctcgtcgaggtggatcagctacatagcagcgttgccgaggcagccttactcgcttttatactggactcgtgcagagctagatgcatacttagtggcctcaccaatcaggaaacgtgcaattcagaggataactgatgtgattgggacatacaacgaccttcgagaccgtatattttccaggcatccagatttgttccctgaagaggtgtataacatagagacatttctatggtcctttgggattctgttctcacgcctggttcgcttgccatcaatggatggaagggttgcactagttccttgggcagatatgcttaatcatagccccgaggtggaaacattcttggatttcgataagtcatcgcgaggaatagttttcaccactgaccgctcatatcaaccaggtgagcaggtatttatatcttatgggaagaaatccagtggtgagctattgctttcatatggttttgttccaaaagagggaacaaatccaaatgattcagttgaactgttggtgtctcttgataagtctgataattgctataaagagaaattacaagcactgaagcgaaatggtttgtcagaatctgaaagtttccctttgcgggtcacaggatggccagttgagctgatggcttatgccttccttgtggtcagtccacctgacatgagtcaatgctttgaggagatggctgctgctgcatctaataaaacttcatccaaacctggattgaattatcctgacctggaagaacaggcccttcagtttatcttggactgctgtgaatctaatatagaaaaatatacaaagtgctttgaccttgccgccaaagcctcagatacttgtatgccaaatcagactgcagtccaggctctcggccgcaaatttcatctagatgctagaaacaagtaa

SEQ ID NO: 41148 - DNA, 467 bp, Zea mays
  Peptide Sequence Number=SeqID_82927
tgacactaaaaattagtggtgtggcaaatcgtgcatttgagcctctatttgagaggcaggcccaagctgaaaagatcagatctgttcagggaatgcttcaaagattccgaacactatttaacctaccaagtgcaattcgtgggaacattagaaaaggagaatatgatcttgctgtcagagagtaccaaaaagcaaagtcaattgtttttccttctcatctgctcactcggaagctttccatccctgctggagtactcagcccatacagcaagctcaagcggtcaacagatcaacttagacgaaatgcagatgcattggaaatattgaggaagaccagattccctcatgttcatggagcaggtgaaaagaagtcaccagagacaattctggatcatgagactatgagaggactttggcaacaaatgttcggtttgggtttctctgggtggttctatgatactttataa

SEQ ID NO: 41149 - DNA, 1170 bp, Zea mays
  Peptide Sequence Number=SeqID_82928
atgacattacaaaatctgaaggtgtcctgtgctgggaggggattaatgggctaccttggaaataagttgtactgctcatctctttcgagaagatcacactgtcgcatttctaatgtttggagctttcttcacaatttcgtcatgatcatatggaaaaatgttatgaagattactgagcagctcagcaaaacagccagtaattgctacatttctttccactcaatttgtgtagttgtattgacaaaagtggatctgataaccatttacagatctgaaagtttccctttgtgggtcacaggatggtcagttgagctgatggcttatgccttccttgtggtcagtccacctgacatgagtcaatgctttgaggagatggctgctgctgcatctaataaaacttcatcctggcgctggcgcatgagctcctcgggcccagctatagtgatgccgtgctggagctcaatgcctcagatgacagtaagttctccaatttcaagggagaagtctcaagatttggaccccaatatgcgagacgaagttatctattcatctccaaattttgatcccaaagttttcctttcgtgggtccacaaagacacgagcgctgctgacttagaggctggtgctctcaccttgaaaactgatcccaaagggagaacacagcagaaaaaactattagtcaaggagaacttcgattgttttgtctcgtgcaaaactacaatagatgtgacactaaaaattagtggtgtggcaaatcgtgcatttgagcctctatttgagaggcaggcccaagctgaaaagatcagatctgttcagggaatgcttcaaagattccgaacactatttaacctaccaagtgcaatccgtgggaacattagaaaaggagaatatgatcttgctgtcagagagtaccaaaaagcaaagtcaattgtttttccttctcatctgctcactcggaagctttccatccctgctggagtactcagcccatacaggcttctcattcttatctgcatggcatgtaactgctgcacagcgcgctacggctggcgtagcggcagcaactgctggtatgaccaggatccgtccaccctcattatcgacgatgaagcgacacccaattctaggcgcggacgaacgatggcgccctcgtgcgggatatcgggctga

SEQ ID NO: 41150 - DNA, 692 bp, Zea mays
  Peptide Sequence Number=SeqID_82929
taagttctccaatttcaagggagaagtctcaagatttggaccccaatatgcgagacgaagttatctattcatctccaaattttgatcccaaagttttcctttcgtgggtccacaaagacacgagcgctgctgacttagaggctggtgctctcaccttgaaaactgatcccaaagggagaacacagcagaaaaaactattagtcaaggagaacttcgattgttttgtctcgtgcaaaactacaatagatgtgacactaaaaattagtggtgtggcaaatcgtgcatttgagcctctatttgagaggcaggcccaagctgaaaagatcagatctgttcagggaatgcttcaaagattccgaacactatttaacctaccaagtgcaatccgtgggaacattagaaaaggagaatatgatcttgctgtcagagagtaccaaaaagcaaagtcaattgtttttccttctcatctgctcactcggaagctttccatccctgctggagtactcagcccatacaggcttctcattcttatctgcatggcatgtaactgctgcacagcgcgctacggctggcgtagcggcagcaactgctggtatgaccaggatccgtccaccctcattatcgacgatgaagcgacacccaattctaggcgcggacgaacgatggcgccctcgtgcgggatatcgggctga

SEQ ID NO: 41151 - DNA, 633 bp, Zea mays
  Peptide Sequence Number=SeqID_82930
atgaaggagttcagagccccagagtacggcatatgctctccctgtttagctgtcggcacaagagaactggccgtggccacaatgcgaccgacggcggcgctccaccaggaacgagcgacgacgctccgaggcaggcgggcaagcggtgacggcgttgtcgaagcggacggacgacggcagcacaccctaggcccgacgacaacggcggttgtcccgtccgtctctgcgatggccaccgccgccgccgctccagcatctgtggcgccgtcccttgcacccaaggccaacgtcagcaggaaggcggtggtgcccgtggacgcgtcggagctggagaagcacgtgctggcggtggacgacaaatccgtggatcgcgcagcgatcgctaggatcctgcgcggctcgaggtatagggtgaccgccgtggagtcggcgacgcgcgcgctggagttgctcgcgatgggtctgctccccgacgtcagcatgatcatcaccgactactggatgcctgggatgacctggtacgagctgctcaagcgcgtcaaggagtcggcggcgctcaggggcatctacgtcgtcatcatgtcgtctatgaccatcgtgatttatacattttcaaacaaaattttacgatag

SEQ ID NO: 41152 - DNA, 405 bp, Zea mays
  Peptide Sequence Number=SeqID_82931
atggccaccgccgccgccgctccagcatctgtggcgccgtcccttgcacccaaggccaacgtcagcaggaaggcggtggtgcccgtggacgcgtcggagctggagaagcacgtgctggcggtggacgacaaatccgtggatcgcgcagcgatcgctaggatcctgcgcggctcgaggtatagggtgaccgccgtggagtcggcgacgcgcgcgctggagttgctcgcgatgggtctgctccccgacgtcagcatgatcatcaccgactactggatgcctgggatgacctggtacgagctgctcaagcgcgtcaaggagtcggcggcgctcaggggcatctacgtcgtcatcatgtcgtctatgaccatcgtgatttatacattttcaaacaaaattttacgatag

SEQ ID NO: 41153 - DNA, 378 bp, Zea mays
  Peptide Sequence Number=SeqID_82932
atgccttcgccaacctcgctggctgctaccggaggcaagacgactggcagatttacccttcgtcccacgcgtcgccggacgaagacctgcgacgaggtcgtcgcaccctgcggcctcgtccaacatggaggcccacgtgtgatccggcccattgtaacaggccctgcgtggccgctgcgcattacgggcctaatttgtaaaggtctccctgtaattacagtctgtaaccctgctttatgggaatatttcggggataacctagcatcaaattttgctagcacgtttagtttcccaaaagatggggagctagggaagttgcagattgacataagcaagttcatggcgagaaaaccaggattacagatgataggttgctga

SEQ ID NO: 41154 - DNA, 612 bp, Zea mays
  Peptide Sequence Number=SeqID_82933
atgttggacgaggccgcaggttgcgacgacctcgtcgcaggtcttcgtccggcgacacgtgggacgaagggtaaatctgccagtcgtcttgcctccggtagcagccagcgaggatatgctcttgactgcggctgcgcggccgtcggcgatggaggcatggcaccgcgggcaggagcagcaagcccggggcatcgtgttgtaggtgagggacgggaacctggagcgggcgctgtcggtcatggagctcaagatgcggtccgccgcatccggtcgcgcacccaccgccacgtgaaggactcggagaagcgcgtgctcgcgcgtaaggcgctaatgcagcacgtccggtaccaggagctcggcaagaagctccgcgagatcctcatcaggaacatcagtgatcgccaagtgctcgacgaaatgtctcgtgaagttctatctaccacgcttagtggaattgagtgtgtttgcggattgagttgcgctgaggaagaagtttcagtgctgagcgcagtgtcaacccggtgcaggtatctggattggaaggagccttttggtagatttttcatggcatgtggtgatccaacgtatcaggttataatcgctagaatttga

SEQ ID NO: 41155 - DNA, 377 bp, Zea mays
  Peptide Sequence Number=SeqID_82934
atgaagctcgtcaggttccttatgaagctgaacaatgagacggtcaccatcgagctcaagaacggcacggttgtacacggcaccatcaccggtgttgacataagcatgaacactcatctgaagacagtgaagcttacactgaaagggaagaaccctgtaacacttgaccacctcagcgtgcgaggaaacaacatccgctactacatccttcccgacagcttaaacctggaaaccttgctggtagaggaaacccctagggaaagcctttggggcgtggtcgcggccgaggtcgtggacgtggtcggggccgggggccacgctgagctttatcgttcccctgctgtcggctcccttgcaagacaagtttcctctacaat

SEQ ID NO: 41156 - DNA, 267 bp, Zea mays
  Peptide Sequence Number=SeqID_82935
atgggacgacgaagacgtgggcacctggtgagcctacagccctctgctggtgaacagagcgaatcggcagccgtttcagctcgtatgtcacctggaggtggtcttttattctctatggggcttctaggatacatcttctccaaaagcaccataagtcttgtcttgggcattacaccagggctagccactctgctacttggcactcagtctgaagttctggaggagcggcagatccagcttcctgcttatcttggctcaggcaggtag

SEQ ID NO: 41157 - DNA, 426 bp, Zea mays
  Peptide Sequence Number=SeqID_82936
atggctggggagcaccgggaggataaggagggggaatgttttgtccgatttggacatggcggtggcctgactccttctggtataaccgttaagggaaatgtgtgtgtgagtgtttttggaaatgaaaaacaataccacgggagcaggaagctcagtggtggttgtggtcttttattctctatggggcttctaggatacatcttctccagaagcaccataagtcttgtcttgggcattgcaccagggctagccactctgctacttggcactctcaatctgaagttctggaggagtggcggatccagcttcctgcttatcttggctcaggcagcaatttctgctttcctggcatggaagtactctcatgcttacttcttggtaactcttctaacctgtaaagaatatatagtacaatcactgtcttag

SEQ ID NO: 41158 - DNA, 1092 bp, Zea mays
  Peptide Sequence Number=SeqID_82937
atggcggcggcggcgcagctgcacggatcggctgcggccacggtggcatatcgcgggactcgagcctactcagttccatcctcatgccggtggccgcagtctggttccccgaagctttcgatttctacaagtggagtcagtatgaagccatttggctttgctgctaaactttcaacaaaatgtgcaaatgagaatgctcgagttgaagaattagatttgaggtcagaccagatgaaggaattacaggtggaggagcaggttattccccagaagaggagtgctaaaatccatgacttctgccttgggatcccttttggtggtcttttattctctatggggcttctaggatacatcttctccagaagcaccataagtcttgtcttgggcattgcaccagggctagccactctgctacttggcactctcagtctgaagttctggaggagcggcagatccagcttcctgcttatcttggctcaggcagcaatttctgctttcctggcatggaaatactctcatgcttacttcttgacaaatagactccttccttggggcttctacgcgtcactgagtacaactgggccgacaaaggcccaactaagccgctcgaaccgcttcggcgcctcccacccctcggacagaccagccttcaaactagggtttactcctcccgctccgagaaagcaaacaagcgtcagctccgccggcggcctcgcgctctctcccccgccgcaccttctctacgccaggactgccaagatgaagctcgtcagattccttatgaagctaaacaatgagacggtcaccatcgagctcaagaacggcacggttgtccacggcaccatcaccgtcagatctgggttgaacccacaaggtcccgtgttcgcctccatgccgacaccactcccatcctcggcgctcgcccccaccccatcccctgcgctcctcttcgcggctgcccactgcctgggcgcctgcccccgttgcagcggcacaaaaaggacgatggagaacccgagcagcactggagaaaggaggtggaaggtggctgacattgtgggcgcaacgatgacagctgggtcctatggctaa

SEQ ID NO: 41159 - DNA, 648 bp, Zea mays
  Peptide Sequence Number=SeqID_82938
atggaacctgccgcggagctatgttcccagaagctgtccgcggccgttgatgcagcccgtgacacaatgaaagcttcagctaccgcctgtatggttgccggtgattattgcgccacattttccttaggtaacgatgtggtttctactcttgatgttcttgaatccgctgtggcggcggaaaaaagtgctatgagttcttacaaccaggcgagtgcagccgtcgattgtgctaaggagactgttgccaaatattgtgagagggctatgggtgtttcagcctctttgctggttaaccaaaaacttgcgcaagcactcagatatgccatgtctctaatgagtgatacagctaagaaactacaagatactgcctctttgtgctacacagatgaagatgttgtagacggtttcaagctgactcaagtggctggttcattggacgagttagctgaaacgctagaagttactgcaattgactgtcaggtctcaatgatggatccaacaactatattagaagctggctatggtagcgaagatagtgcggtgtgggaggacgtattccgtgaccgagaaataatgaatcagccattagaagcggaggcactagctgagcgctatgctaagtgggggcttaattacaatgagatctag

SEQ ID NO: 41160 - DNA, 231 bp, Zea mays
  Peptide Sequence Number=SeqID_82939
atggaacctgccgcggagctatgtgcccagaagctgtccgcgtccgttgatgcagcccgtgacacaatgaaagcttctgctaccgcttgtatggttgctggtgattattgcgccacattttccttaggtttattctattttttctctagatcacggactgatttcctggaattgtctttcccgagttcaattgggactttgttccttgttcgtgcaagcatcgagtcctag

SEQ ID NO: 41161 - DNA, 411 bp, Zea mays
  Peptide Sequence Number=SeqID_82940
atgatgaatgaaatgcaagctcaaatgaggcaagaacgccaggaaatgcgtcaggaacagttggaaatgcgtcaagagatgaggaattaccatattcctgctgggcttatgaagattaaaagaaaggagtttctatcccttaagcagggagatggcaatgggtacccgaaacccgaatacccgatgggttttacccgatatgaagatgggtacatgatgatttctctacccgcgggcgcggacggtccgcggcacagagccagatggtccgcgacctggcgcgaggcggcggtgctctctggtcaggcgcggacagtctgcggccaggggccagacggggcggcggaagatcgcaggcggcgcctggatctcgctcccgggagggaccccgtcggggaggagagattctag

SEQ ID NO: 41162 - DNA, 351 bp, Zea mays
  Peptide Sequence Number=SeqID_82941
atggattcaccgcctctagtggagaatggcagggaaagtagtctagggttaggtttgagagaccgaatcggtcccctcacgattagagatggcaatgggtacccgaaacccgaatacccgacgggttttacccgatatgaaggcgggtacgggatgatttctctaaccgcggtgattggtatattggaatttaagactttcctagcgggtacgggttacccgatgggtaaaattacccacgtgggtacgggtatgggtaagatttttgaaagtgcattcatcccttttgtgagttttggtgatttggataacaacacatttaaaggtctactcgggtttgctaagtgttga

SEQ ID NO: 41163 - DNA, 597 bp, Zea mays
  Peptide Sequence Number=SeqID_82942
atgggagagagggcagagctgctgcgttccagggatccaagcgccaggggggtgagctcgggcttgagctatggagcagggagggcgctgcttgggggctcggctgggggagttcggctgtgggatttttctgggcgccatggctgccagcggccgagagcagagagctcgccgggagaaacacagcaggggcgctgcgcagagaagggcgaaaggatttgtggccatggacagggaggttcgcaggggaatgggagctgctgctccacgccatggacatggagctcggcggccctgggaggagctcctgcgcgcagccgtgaggaagacaggaacagggagctcgcaccaagaggacagggagggcgctcggctgcttctcatccaagcaaggcgagcaacagccgggagcagggaggtcggcgaccaccatggctgggcgctggtagagagttaggagtaggggcctcacgccatgggagagagggcacaggggcttggacgccatggatccagggagggagctccctgcgtgctgccgtgtggaagaaagggacagggaaaaagaaaatggcggctaggggggtagatgaataa

SEQ ID NO: 41164 - DNA, 597 bp, Zea mays
  Peptide Sequence Number=SeqID_82943
atggctgggcgctgcggcgtcgagcagatccctgcgcgctcacgcccttggagtagggggctggacaaccatgggagagagggcagagctgctgcgttccagggatccaagcgtcagggggtgagctcgggcttgagctatggagcagggagggcgctgcttgggggctcggctgggggagttcggctgtgggatttttctgggcgccatggctgccagcggccgagagcagagagctcaccgggagaaacacagcaggggcgctgcgcagagaagggcgaaaggatttgtggccatggacagggaggttcgcaggggaatgggagctgctgctccacgccatggacatggagctcggcggccctgggaggagctcctgcgcgcagccgtgaggaagacaggaacagggagctcgcagggaggagcggtgaccggaaggggagctcggccggcgttcagcttggagccggaaggagcaggggaaaacggagagggcgccgacttgctgctcgccatggaggggagcacgactccctgctgctgcgcgtggaggagaaagccagggagagaagaaggcgtgggggagaagaaggctga

SEQ ID NO: 41165 - DNA, 666 bp, Zea mays
  Peptide Sequence Number=SeqID_82944
atggctgggcgctgcggcgtcgagcaaatccctgcgcgctcacgcccttggagtagggggctggacaaccatgggagagagggcagagctgctgcgttccagggatccaagcgccagggggtgagctcgggcttgagctatggagcagggagggcgctgcttgggggctcggctgggggagttcggctgtgggatttttctgggcgccatggctgccagcggccgagagcagagagctcgccgggagaaacacagcaggggcgctgcgcagagaagggcgaaaggatttgtggccatggacagggaggttcgcaggggaatgggagctgctgctccacgccatggacatggagctcggcggccctgggaggagctcctgcacgcagccgtgaggaagacaggaacagggagctcgcgccaagaggacagggagggcgctcggctgcttctcatccaagcaaggcgagcaacagccgggagcagggaggtcggcgaccaccatggctgggcgctggtagagagttaggagtaggggcctcacgccatgggagagagggcacaggggcttggacgccatggatccagggagggagctccctgcgtgctgccgtgtggaagaaaggggcagggaaaaagaaaatgacggctaggggggtagatgaataa

SEQ ID NO: 41166 - DNA, 597 bp, Zea mays
  Peptide Sequence Number=SeqID_82945
atggctgggcgctgcggcgtcgagcagatccctgcgcgctcacgcccttggagtagggggctggacaaccatgggagagagggcagagctgctgcgttccagggatccaagcgtcagggggtgagctcgggcttgagctatggagcagggagggcgctgcttgggggctcggctgggggagttcggctgtgggatttttctgggcgccatggctgccagcggccgagagcagagagctcgccgggagaaacacagcaggggcgctgcgcagagaagggagaaaggatttgtggccatggacagggaggttcgcaggggaatgggagctgctgctccacgccatggacatggagctcggcggccctgggaggagctcctgcgcgcagccgtgaggaagacaggaacagggagctcgcagggaggagcggtgaccggaaggggagctcggccggcgttcagcttggagccggaaggagcaggggaaaacggagagggcgccgacttgctgctcgccatggaggggagcacgactccctgctgctgcgcgtggaggagaaagccagggagagaagaaggcgtgggggagaagaaggctga

SEQ ID NO: 41167 - DNA, 693 bp, Zea mays
  Peptide Sequence Number=SeqID_82946
atgcagcccggctgcagtcccccaccagtggccatccagaaggatgaccaccagcctcgcggtggggagaagcaagccgggctgtggcttccccctcaccctcagcttcaaggatgttcatcatccttgctggggcggggggcgagccaagtcagggccctgccctccgcgtgggctggcgacccgcttcttcctctagcattcggaggagaagggtgtttaccagccttgcggaggacgcgaacctcagctacgcggggccagctagctgcaggccgtcagctgcagagtgtctggccctttgggctggacggctttggcaccgcctccgacgctgcctcctaccgctctggccggggcatggctgtctgtccaccgcacgggcgacggtcgcgccgtgcgcaggtccggcacatccaccccttctcctacccgtcggccacactagggggatcgtacaagacgtcgtacgccgcagtggtagcgacggcgttcttggatggtcttgtcctcactcccattggtcagacgagagcgaggacccctttcttgcgtgctgaggcagccgccgccgactggtacagaggtggtcactaccgctgggtggtggagtgtgcaggcacatggtacgggaccaggctgagcggctacaaggctccggactaccccaggagacaagcatcgcttctctag

SEQ ID NO: 41168 - DNA, 414 bp, Zea mays
  Peptide Sequence Number=SeqID_82947
atggcgggccctacgggtgtatcactaacgctctttaaagctaaagctgtgtacagatccaggcctcgacaaggctgcctcccgaaggccgtcgacaatcctttcatatacgctggtgcccaacctcgacacatcgagcctgtaccccaggcgaggggccagaagtaccttacaaaaacaggaaaaagcctgggggccggttctaaagaacagatgcccgttccatggggtgatccggagcctgtgtggccggttagcctggttccgtactcgaaatcctgcacactccatcacttcatgacgggtgccctagtatttggaactataagtcttgtgcgtccgatagcttggggtccggaactagagaagcgatgcttgtctcctggggtagtccggagccgggtagccgcttag

SEQ ID NO: 41169 - DNA, 549 bp, Zea mays
  Peptide Sequence Number=SeqID_82948
atggcttcctcgcgcactgcaagaggcagaaacgatccattgtactaccgcaacatcactgcaaacactctagcagtgctagaagccatggctgcacataatttcccgatcaacccatatggtaaggccaagaaaatggcggaggacatcattctggacttctcaaagttgaagaaatcagacatgatggccatcatgattctcagtaatagagttctcaaccaccaggttacatgtgcctccttcaaaaaggcttctgttattagagttcagttctggtacctggtatctgttactcgttgtgctgatgactttctgtattctgatttttgcatgcttaatgatattggtgttactctaatgactacagaaaatggcattggatttcctagggtgtttttgacgatagagttgcctaacgccaagggtgtgaagcagaacttaaagcctaaaggccatttcaacttgtcagctaagggctcagatgactcgccctacgagtttgatcttgagttgtttgatgttgtctatttaatacatgttgaatga

SEQ ID NO: 41170 - DNA, 189 bp, Zea mays
  Peptide Sequence Number=SeqID_82949
atgactacagaaaatggcattggatttcctagggtgtttttgacgatagagttgcctaacgccaagggtgtgaagcagaacttaaagcctaaaggccatttcaacttgtcagctaagggctcagatgactcgccctacgagtttgatcttgagttgtttgatgttgtctatttaatacatgttgaatga

SEQ ID NO: 41171 - DNA, 405 bp, Zea mays
  Peptide Sequence Number=SeqID_82950
atgcttcttgctatgatatgccacgggggcggaggctcttgcttcgtcgtatcctcttctctgggagccgactacgccgagatcctcgaccggagtgtcgcgtccaccaatagaatattactctaccgtggatattctttatttgttaatggggtgtttttgacgatagagatgcctgacgccaagggtgtgaagcataacttaaagcctaaaggccatttcaacttgtcagctaagggctcagaggactcgccctacgagtttgatcttgagttgtttgatgttgtctatttaatacatgttgaatgtagcactttaggttttgattgtattggccttcctatttgcaggagagcaaagcagatgttgtcccaaaaccatatgctaccagatcaagaaagctga

SEQ ID NO: 41172 - DNA, 249 bp, Zea mays
  Peptide Sequence Number=SeqID_82951
atgcctgacgccaagggtgtgaagcataacttaaagcctaaaggccatttcaacttgtcagctaagggctcagaggactcgccctacgagtttgatcttgagttgtttgatgttgtctatttaatacatgttgaatgtagcactttaggagagcaaagcagatgttgtcccaaaaccatatgctaccagatcaagaaagctgagaacggttggtggccaaggctcctgaaaaaggatatgtgttcttga

SEQ ID NO: 41173 - DNA, 378 bp, Zea mays
  Peptide Sequence Number=SeqID_82952
atgactgttagcagccagagaagttgggagattgtagagccaaggttacttggaatcggagaggacgaagatgcactgcagcattttgattcccttcgccattcgacgaggtggccggcggactgggggagacaacgacgacgggcagatgaggcaagtctccctacacaagattactggtactggactagagtttgtgctttattggcttatgctatctttttcaatgctttgtttactcttgctttggaattccttaaccaaaataatagcaaaaattatgaagtcaaagggcagactaaagctgaaatcaacaagggaatgatattaccatttcaaccactaacaatgatgtttcacaaaattaacttgtactaa

SEQ ID NO: 41174 - DNA, 633 bp, Zea mays
  Peptide Sequence Number=SeqID_82953
atgcccgtgtcccgcctccgatgcccgcccgcctctctcgccttcgcttccaccatcgccctcgctcgtcttcgtctctgcccaaacaacattgacacatctgccccacgcgcgatgcacacgccccgcctccgatgcccacctccacaaccgacgcccggacgacgaggacgcggcggcacaggacgacgagttggttggcgacttagcagccagcctctttgtgtatctctggccttcaacgatcttgcagtcctgggtcagattaagactagagcaccctgcagatcagagcgtcttgccaaatacaaccaggcaaaaaataatagcggaaattatgaagtcaaagggcaggctaaatgtgaaatcaacaagggaatgatattaccatttcaaccactaacaatgatgtttcacaaaattaactattttgttgatatgccaaaggaatttatcgaggaggttatggctttggtagagcttgatcagctgagatatgcattagtagggaagggggaatacttccgcaactatctgcccatgatatcactaaatgtttttctaagatacttgttctacacacaaggccctttttatgtgatactaatattgtatcatccaatgcagcattaa

SEQ ID NO: 41175 - DNA, 432 bp, Zea mays
  Peptide Sequence Number=SeqID_82954
atgtcttcgcgctccccttatgcatcacgtctttccaccttccgagcccccggatggggggcgcccgcgcccggccgcatcccctcgccggtggtcacccaagacggtgaccaccagctcctgggtggggagaagcaagccgggctgcgatctctgccccgccctcagcttcaaggatcttcatcatccttgctggggcggagagcgagcgttggtggacaggcggacgccgccgtcggtgctgacgtggtggcagctggagaaagcttccccaccgtcgaggccatcagcgccgcctacggaccgacccccggctctttggctttaatatctgaggtcgctggcgagtcgcccggagcttggcgccccgcaggccctccggtgtggaggttgttcatacccgcggggacggaaccggagttccgtttgtaa

SEQ ID NO: 41176 - DNA, 684 bp, Zea mays
  Peptide Sequence Number=SeqID_82955
atgacttcccacggatcctccgatgacggaaatgcactgacccacactgacggacttgcacgagagggatttccccgcatcttgtgggaggtacttcagggggccggatatttgacaccccctcagtacgcggtgcagcagttcgagaagcaccgagtgcctcgctgtcgggtgaggatgaccttggagcctcatcccctgcagccaggctggcgttccttggactccgagtctttcggatatcgggcggaggacacgatcgaggcgatcgctctgcatggattggctaccttctgcggattccatcccttggagctggctacccaccccattggcttgttccccgctgagaaggaggactgtcggtgttttgggtccgaccgcacacccggggttgcccctcaaggcccacgaaagaatgaccttacgatttattgggcccttgggcctttcgtgaggtcctttactcttttagtggacccgggggatatctatctcccacaagcccccgatctttgggttgatttggagttgatggacgttctctgtctagccttcaagtcatttctgtcgaccatcttttgcactctactggctatatttggcttccctctaactcttgttgatatctcatttttgtctcgaggtattcactgcatgccctgcacggatgtgaccgtttga

SEQ ID NO: 41177 - DNA, 417 bp, Zea mays
  Peptide Sequence Number=SeqID_82956
atggggagcgcccacgttgccttcgtcttgctgctgttggaggagcacgacctcgcgggggttggcgcccttcagccatcgctcggcttcaaggattttcatcaggcagcccggctgcagtctcccgccgagcggtcacccaggataatgaccgtaggcctcgtggcggggagaagcaagccgggctacggcctctgccccgccctcagcttcaaggatgttcatcatcctcgctgtggcggaggttatagaaccttcggcccgctctgcgatgagccgaagccggaggcagcggtgtcggcatggacagaggcagagtcggctcgaaaagaggcttcgtcgacccgggagcacgtggcttccctggccgaggaggtgcagtggcggcggctggagcttggccaggtcgtccactag

SEQ ID NO: 41178 - DNA, 549 bp, Zea mays
  Peptide Sequence Number=SeqID_82957
atggctgaagggcgccaacccctgcaaggtcgtgctcctccaacagcagcaagacaaaggcaacgcaggcgctccccatccgggggctcggaaggtcgaagtgaccgcagtcacttcgccctttcactgaccgacctgacaggaaaacagcgccgctcgccccgctccgactgctgtgccacccatcagggtgaggctgacaacagccaagttcagcctcaggcgcaacaggaagctccgcctcgcccgaccttaggcctcggcctcggaaggaggtctccgcctcgcccgaccctagggctcggcctcaacctcggcatcagaaggtggtctccgcctcgcccgaccccagggctcggcctcaacctcggcctcggaaggtggtctctgcctcgctcaaccccagggctcggcctcaacctcggtctcgggaggaatcgcgtcctcgcccgaccccgacctcggcctctggggaagtctccgcctcgcccgaccttgggctcggaccgaccatgccacgggggggatacatcattaccctacccctag

SEQ ID NO: 41179 - DNA, 378 bp, Zea mays
  Peptide Sequence Number=SeqID_82958
atgacctggaacagcagcagcaggacgacggcgctgtgcgagtgctcaacgatgttggaataccaaaacatcgttggaggacggctgcagctgaagggtaaagcgctagacgtgaaagatggtggagtaaagaaaaagaagaagtaccaacgtgaggagtcgtctcagactgaatctgataagaatggagacgaaaagaacccacattctgactatgaccatctcacacgagcagagcgccgctacatggaacagaagcagaagatccactacagtaaacgaagaaagttccgacggtcacgctatctccgacggcttcctacgaggccgtcggatattatcttatgtccgacggccaacaggggctctcggacataa

SEQ ID NO: 41180 - DNA, 453 bp, Zea mays
  Peptide Sequence Number=SeqID_82959
atggacaccgcgtggaacaggagctcggactcggacacgaacacggacaccgcgtggaacaggagctcggactcggacacggacactctgaaccatgtaatcccgtttgccttgatgttggaataccaaaacatcgttggaggacggctgcagctgaagggtaaagcgctggacgtgaaggatggtggagtaaagaaaaagaagaagaaataccaacgtgaggagtcgtctcagactgaatctgataagaatggagacgaaaagaacccacattctgactatgaccatctcacacgagcagagcgccgctacatggaacagaagcagaagatcgacatgaagaagatggccaaagtcgcaaacaagtcgtacaaggaccgcatgcaggacttcaaccaatacctggctaacctcagcgagcactatgacatccccaaagttggtcctggctaa

SEQ ID NO: 41181 - DNA, 489 bp, Zea mays
  Peptide Sequence Number=SeqID_82960
atgacctggaacagcagcagcaggacgacggcgctgtgcgagtgctcaacggtgagaagaccggtcgcagattttttggagagggaagaggaggggattccacatggccggaggcggagggagcagatgggtgaggggcgagatgtaggcgtacccgtggagccaaatccgactgcaggacggctgcagctgaaaggtaaagcgctggacgtgaaggatggtggagtaaagaaaaataaaaagaaataccaacgtgaggagtcgtctcagactaaatctgataagaatggagacgaaaagaacccacattctgactatgaccatctcacacgagcagagcgccgctacatggaacagaagcagaagatcgacatgaaaaagatggccaaagtcgcaaacaagtcgtacaaagaccgcatgcaggacttcaaccaatacctggctaacctcagcgagcactatgacatccccaaagttggtcctggctaa

SEQ ID NO: 41182 - DNA, 204 bp, Zea mays
  Peptide Sequence Number=SeqID_82961
atggccaaagtcgcaaacaagtcgtacaaggactgcatgcaggacttcaaccaatacctggctaacctcagcgagcactatgacatccccaaagttgaactgaaagggaaatgtgcccttgggccatttctaagtattttggtgattgagtgcaaacacaagggcctaaatgtgaaaatatgctcatggatgaacaaagtgtaa

SEQ ID NO: 41183 - DNA, 306 bp, Zea mays
  Peptide Sequence Number=SeqID_82962
atgactaaggttttagcggcggcggcggttccctcgggcgtgcgagcggcggtgatcctggggccaacagcggtgtcgcctcgaggcaggcgaccgacggtggcgctccaccatgatcgagcgacggtggcgctccacagggagctcgcccgcctcaccgccaggtccgtcgcgcgcctgcctgctggggctgggatcgacgggagcggaaccaccgaggaggccgagatggccgccgcgctcatggacgtcgcgaccgccagcgccgctgaaagggaattaggctttcacctagttcctaaataa

SEQ ID NO: 41184 - DNA, 525 bp, Zea mays
  Peptide Sequence Number=SeqID_82963
atgaagaagaaaagagaagagttggctgtgtacagccaagaggctgtttcggtctggggcaccggactgtccggtggtgcaccggacagtgtccggcgaccgacggtggcgctccaccatgatcgagcgacggtggcgctccacagggagctcgcccgcttcgccgccaggtccgtcgcgcgcctgcctgctggggctgggctcgacgggagtggaaccgccgaggaggccgagatggccgccgcgctcatggacgtcgcgaccgcctccgccgccgtattctcggccgtcgcgtccgtgtctgccgccgcgtcgtcgtgctcgaacaagaaggccccgacggccttcgtggctgctgccttcgccaagaagccggagacgccgacgacggccgatgtcgcgcaggagaagcacgaggagcttgagcgatgcatcgacgagtgcgagagcggcagcgaggtggtgttcaggagcattgttcggaatagggtttcgttgctcaacatccatagtccggcgatctag

SEQ ID NO: 41185 - DNA, 304 bp, Zea mays
  Peptide Sequence Number=SeqID_82964
tttcgccctattcacccccccctctaggcgactttcagccgccgcctccgccgccgtgttctcggccgtcgcatccgtgtctgccgccgcgtcgtcgtgctcgaacaagaaggccccgacggccttcgtggctgctgccttcgccaagaagctggagacgccgacgacggccgatgtcgcgcaggagaagcacgaggagcttgagcgatgcatcgacgagtgcgagagcggcagcgaggtggtgttcaggagcattgttcggaatagggtttcgttgctcaacatccatagtccggcgatctag

SEQ ID NO: 41186 - DNA, 114 bp, Zea mays
  Peptide Sequence Number=SeqID_82965
atgtctgcaaagaagggcttcgctctgataccagctgtgacggaacctcccaagaacgtttcacccatcttgcagacactacagaacatcagagatatagaaatgcggaagtga

SEQ ID NO: 41187 - DNA, 288 bp, Zea mays
  Peptide Sequence Number=SeqID_82966
atggctaagctaagctcctccacgcgggatcgagctttggcttccttagcccagatccccaataggatcgttgctaccactgctactttcttcatgtcttggggcaagttaatggcggtgtacgccaatggatctagtagatttgcgcgcggtctttctgagaagggcttcgctctgataccagctgtgacggaacctcccaagaacatttcacccgtcttgcagacattacagaacatcggaggtatagaaatgcggaagcgattacataaacttacatttaattag

SEQ ID NO: 41188 - DNA, 285 bp, Zea mays
  Peptide Sequence Number=SeqID_82967
atggcgagagtaacgtgtaccctccgtggcaagaggctggacggtggtgtatctgtgctctcggttcgcgtgaacctgatctggatccactttagtaagcatttctgcaaaacaaagtctttgattattgaaaagccttaccttgactcccttaaccagcatatccttgagagtcttttctttagtcgggtgaggaagcaacaaacttttgttgcttttgctccaaggtggttcccagtgaagaaaaacaagggtgaagctgcgggaggacatggtcctccataa

SEQ ID NO: 41189 - DNA, 297 bp, Zea mays
  Peptide Sequence Number=SeqID_82968
atgggcgtggagcaggcgagagtagcgtgtaccctccgtggcaagaggctggacggtggtgtatctgtgctctcggttcgcgtgaacctgatctggatccactttagtaagcatttctgcaaaacagagtctttgattattgaaaagccttaccttgactcccttaaccagcatatccttgagagtcttttctttagtcgggtggggaagcaacaaacttttgttgcttttgctccaaggtggttcccagtgaagaaaaacaagagtgaagctgcgggaggacatgatcctccataa

SEQ ID NO: 41190 - DNA, 231 bp, Zea mays
  Peptide Sequence Number=SeqID_82969
atggcctacgacttccttgcagcggctccctcccaaggacagtgccccctgttcccatctcccggcagcgcagcgcctcgcaaccaagttttccccgcagcccatcacatcgacgcgcccttgtcgtcgatgtcgcgctttgcccgttcgacgaaatgcgaagccttgtggatagcccatgtgactagcctcgattcgtccaggttgttcacttggtattttgtggattaa

SEQ ID NO: 41191 - DNA, 387 bp, Zea mays
  Peptide Sequence Number=SeqID_82970
atggccgacctctcctctgcgcagggcgcccctgttcccctgctccttctctctcgcacagcagcagctcgccccaccttccctcgctgcgcagctcctcggcgaaacgccgctgttcctgcaagccccggcttcctcgctgctaccgctacgcgcatgccaagtgctcggcataatgtcaagggagatgtgttgttgcagcacgttgtgacgctcgccgggtgttcactgtttttggcgcagccccgttcgcgacgtcgtcgacccccgccaccgtcaaagtcacgctccgcgcttggccgttcgacgaaatgccaagccttgtggacagcccatgtgactagcctcgattcgtccaggttgttcacttggtattttgtggattaa

SEQ ID NO: 41192 - DNA, 186 bp, Zea mays
  Peptide Sequence Number=SeqID_82971
atggagagagatagtgaagtcgtcgtggggcctcctgcaccggggccgaggatcagcgtcgagtccatgccggtgcagcgggtgatggggcataggatcgctcggggtatcgcgcgtcgtgtactggcgaacgccatggaggcgccgtcgctcggctcggatagaggtaggagaaggaaaggatag

SEQ ID NO: 41193 - DNA, 564 bp, Zea mays
  Peptide Sequence Number=SeqID_82972
atgcatggatcctggcgaaaggaatatggtattcttaccggtgatccaggtgtagacgacgccggtcgaagagaacaggaacgcacggccctcccacactacgtcgacaaggcatcaagagtaccctgccctctagggagttatctccagtctactcgacgacgcagcgatgcacaggccccagacaccgattggacagagctacgcataaaggatggcgaacgcgtgcaacgaagactcaccggcatggactcgacgctgatcctcggccctggtgcaggaggccccacggcggcttcactatctctctccatcacggtgatgcagagcactctaccacggtggggcccattcggcggaatcccccacaccgaatttttaggtgctacaacccctcagcagagcaagctcgccgccgattgcaatctcgctgacggagagtacgtgctcatccctgagcaaggagctgtccacgaggaagaccaggagcaagctcccgagactaccatcgaggatctcctcgcagccccagcaattgaaggcaagccccggttttatgcataa

SEQ ID NO: 41194 - DNA, 516 bp, Zea mays
  Peptide Sequence Number=SeqID_82973
atggaaggctccacttggcagtgtccaaatcatgtctacgcgtttggtccagccagagtcaggaagctcactggacatggtgccgtcagagccagagatcgttcacctgactccatggctcctgaggttagcgagctcgcagatgtcatcttcactgccatgctgttgctgctaaactatggcctcgcatatggagccgcattctggctcttcttaaacacctggtcagatataaaccatcgcagcagcagcgatggaggtggagggtacacgctctccacaccgccgccgcctgccagtgctggacagatggttcctcgacacctgccctgtggcaatccatctaccctttggcaagctgaaggacatcgtcgtccagtgacccgaacacgcgcggtccagaaatgtttcttccatttctctgcggagagcacaaagaggctcaagacgaaggcaaacaccgggaactgcaacggtcatcatctcctcattgaagtccctgctctctcaccttga

SEQ ID NO: 41195 - DNA, 1080 bp, Zea mays
  Peptide Sequence Number=SeqID_82974
atggcgcatcatggagagcataccacaatgcgcaaatctctactacttattaagcgacaaaagccgcgttcgcccgtgctggacgccgtcgagagcgccaccgggtgcctgccgctggttcacatcgacgacgtctgccgcactgagctgttcgcccgtcgaggaggggcgcggccgcggggaggtacgtctgctgtgggcctcaacacgaccatcgccgagctcgcgcgtttcctggcggacaagtacccgcagtacggcgtcaaaacgaacctgctctccggcgagcggcttgagaagccgagagtgtgcctgtcgtcggcgaagctgttaaggtttcccctctcaccaactctaggactaggaaaaagagggatgaaactgattcttggtgtttcgtataatgccttgaacaagtatcttcctccagaatgctttgacctcatcaaaacaccatttatttcatctaaggtgtcaaaggtaacaggtctcctcactttaaaaactggttttggaatgtttcaattgggaggagactcaggagagaatacttcgggaagatacaattatcaatgcacgaagagtggagttcccctaaaaaagccagctgtatcgaatgaggcgaagattataagctggctactcagcagtgtggagtggcaactggcaaccataatgacaaaaatggaaggctccactggcagtgtccaaatcatgtctaggcgtttggtccagccagagtcaggaagctcactggacatggtgccatcagagccagagattgttcacctgactccatgggatctcgctctattcacggtgggccacatccagaaggggatcctcttgcccaaggctgggacaggaggtgcacaactcgtcgatgaccttgcttcgtccttcgccagtgtgttgggccatttttatccactggctggctgtctcactgcctcagagatcacaaatggtgtagtaagtccaagccttgccatcactctatgttgtaacgacgaatgcaccgaattcattcatgtcatggcccctgaggtcactatcagtcgtgttgtccttccctgctga

SEQ ID NO: 41196 - DNA, 2703 bp, Zea mays
  Peptide Sequence Number=SeqID_82975
atgcaaaggaagtacaagctcacgtgccctgaacagtatgaccttttgatctcagctgagatcccgtccaacaagtaccctgaactgcgaaagatggttatcaagcatatgatgcatggcccgtgcgggtcgctaaaccctaactgcccatgcactaagggtcgtgcatcgtgcaagaatcaatacccccggcatttccatgaggcaaccatgcaagggaaggattcatatcctaattacagacgtcgtgacgatgggcgtaaggaaaaggttcgaggatgtgaattggacaatagatgggttgtcccttacaacccttacctccttcggctcttcaactgtcacatcaatgttgaggagtgtgggagcatcaaggctgttaagtacctgttcaagtacatatacaaaggccatgatcgtgtgtctgttgttatgagagatgcgggtaaagaaaatggtgatgtagatgagatacagcagtatagagatgcaaggtgggtgactcctccggaagccttacggaggatatatggatttgagcttagtcagaactctccatctgtgatgcagctgcaactccatcttccaaacatgcacatggtgacgtttcacgagcgacaaatggtcgagcgagtcgtcaaccgtccaggtgctgataggtcaatgattacagcatattttgaggcgaataagctgtacgaggaggctcggggcatcctgtatcgtgacttccctgagtggtacacttggcagcagggcaaagtgtggcaaaggaggaaacagaatatgggtggacaagtcggtagaatcgtctctgctctaccatctgagggggagcgcttctatcttcggctcctcctaaatcatgtgactggtgctacctcctatgtggatctaaggacagtagacactgacacactaccatcgtttcatgaggcagcacaaagaaggggattacttgaagcagacaacacaatagatgagtgtctcaatgaagctgctctttaccaaatgccatcagcgctacggaggttgtttgcaacgatactggttttctgcgagccgaatgatgtggccgaattgtggcagagacaccttgacacaatgtccgagtattatcatcgtattactcagagcaaaacccatttgcagcagatggtcttgattgacattagaaacatgttgcagtcaatgggtaaagacataaagacattccctctacctgctatcatcgatagatatgatgattcacaaggtattgatagagagatttacgaggaggaaattatcgaggcgacgacagaagatgttgctttgcaagaaaccctaaatgaggagcagaagtctgcctatgaaaagatcttatctgttgttgacaccagtaatggcggtgtgttctttgtggatgggcctagtggtactagaaagacttatctgtataaggcattgcttgcggtgctacgtagtcaggacaagattgcagttgcaacagctatatctagggttgcggcttccataatgcctggtgggagaactgcccattcacgcttcaagataccacttactatggatgatggtgctatatgtaccttcacgaaacaaagtgggacatcaaagttgctacagaaagcgtcgctcattatttgggacgaggcatcaatggctaagagacaatcaattgaagcgttggacaacagcatgcgtgatatcatgggacgccctgatctgccctttggtgggaagactattgtgtttgggggagatttcagacaagtactccctgttgtacgtaaagggtcaagggctcagatagttgctgcctctctacgaagttcttacctatgggaatcaatgtgccacctaaagcttgttcgcaacatgagagcaaagagcgacccatggtttgcagaatatttgttgcgtgtcggtggtggaactgaggaagtgaacaacgatggtgatgttcgtcttccagatgaggtatgtgtgccatataccggtgatgaccgcgaccttgacagattgatagatgacatttaccccagtctaaacgaaaacatgtctaatacaagctacatcacttcaagagcaatattgactactcggaacgactgggttgatatgataaatatgaggatgatcgatcgtttccaacgggagcagatgatgtaccatagctttgataccgcggtggacgatcctaataactattatccatcggaattcctaaacacgctgactcctaatggactacccccgcacgttctgaagctcaaaattgggtgcccaatcatgttgcttaggaatatagaccctgctaacggactttgcaacggtacacggctggtgcatgctggaatgcgggttttcttgcctcgtgtacccctgtgcccttctgatgacgagatgttccctttccattttaaaaggaagcagtttccggtaagactaagtttcgccatgactgttaacaagtctcagggacagacaattcctaatgttgctgtgtacttgcccgaaccagtattctctcatggccagctatatgttgctctctcaagggccacaactcgattgaatgtgaaggtacttgtaattccagtcactgatgataaaatgaataagggggtggaaaagaagtcaacaataaatggcgtaacatacacaaagaatattgtctataaggaggtccttacgccgtag

SEQ ID NO: 41197 - DNA, 528 bp, Zea mays
  Peptide Sequence Number=SeqID_82976
atggacgaagtggatgcatactgtgcgacacatagggcaagtaatgataatgatgaagatgtgggggtattcaatccaatacttcatggtaaatggcttttccagcagttcgcggtcgacacaaacattaagattgagagctcccgtttagatttcatacgtaataaccacaatcggttaaggacagacctataccagggcttggtggatagcatgttagatggagatgttagagcagagaaggttggaaagcgaactgtgttgtcagcgtcgtttattggcggtcctcgtgacatgagacgtcgatatatggatgctatggctctggagctaaagcataggttgactaaacaggatattctcgataaagtccgagcctacgtctacgtcgtggaatttcagaaacgaggtttgccacatgcccattttctactcatcatgcaaaggaagtacaagctcacgtgccctgaacagtatgaccttttgatctcagctgagatcccatccaacaagtaccctgaactgtga

SEQ ID NO: 41198 - DNA, 945 bp, Zea mays
  Peptide Sequence Number=SeqID_82977
atggcgcctttggcagggcctgactgcctgtcagtctcactcttgtcaagtggcactgcagtcggagtggcgcaggcggcgctgtccttctgtcagaccggtcagtggagcggcgaagtgacggcgctttatgctgatgggggttaccagctgagaattaggcgtcttgagggtaccctaattatggtccccgacagtagcccccgagcctcgaagggagtgttagcactcgcttggaggctttcgtcgcacttttttgcaaggggaccagcctttctcggttgcattttgttccggtgggtgcgcgcgagcgcacccgccgggtgtagcccccgaggcctcggaggagtggtttcactcccccgaggtcttaatgccttgcgtaatgcttcggctggtctggttgttccctcatgcgaactggtcgtagcccaggtgcacggtcggggcccaagttctcgggctggtatgttgacgctgtcaacggttcggccggagccgggtttgcgagagcagcccccgagcctccgcacagggcgagagggcgatcagggacagactcagcttttttacatacgcccctacgtcgcctttccgcaaggaggagggggggagagcgccatgttaccctcgatgggcaccgaacatggtgtctccggtgagctgcaagcgggtaatccgagtggacgtccgtgccccgttcgttgggggtcggctaggggcccagaggcacgcccaaaagtacctgtgggtgatctgccggacccggtcccctggcgacggggtccgagggctcgatgcctccctccgatgggattccgttacaagatcgctcccgctggtctcggaaatgtcctagggtacctcgggagcacagcccgagccttggttatgtatcgaacgtacccctggtcatccctcgctcggcgtctgaggcgactgtga

SEQ ID NO: 41199 - DNA, 558 bp, Zea mays
  Peptide Sequence Number=SeqID_82978
atgacgcctcctgttgacgtggctggcctgcgccctaggttgggtgatgtggaggctcctccgaaggcgaggtcgagtctgtctcccgtggccgaggccgagtccgagcccctgggtcgggcgaggcggaggtcgtcggctaaagccaagcccgagtccgagccctgggtcgggcggagcggagttcgccgtcttccgggacttagcccgagtccgagccctgggtcgggcgaagcggagcttcctatggcggcgctgtccttctgtcaggccggtcagtggagcggcgaagtgacggcgctttatgctgatgggggttaccagttgagaattaggagtcttgaggtgtcaacacaagtgcttaaatgtgaatctatgcccatggatgaacaaagtgcaaatctagagcaaagccagagggctgtttcggtctggagcaccggactgtccggtgatgcaccggacagtgtccggtggtgcaccggacagtgtccggtgcgccaggctgcctcggccgaagaggccgctctcgggaatttgctgacggcgtacggctaa

SEQ ID NO: 41200 - DNA, 327 bp, Zea mays
  Peptide Sequence Number=SeqID_82979
atgtcgaccgagacacgccacctagatcagatcgaactcctcagtgttaggcggctcctcctgaaccacctgatcatctcctgtggggggggtgtgagacagcaaggtttatgggaagatccagtacagggttcctggctgaccgccatcgcagcaaaatcaaccagggacctccccgcactgacctctcccctactgcccttgcccctttcgggtaaggtatggactgcgcgtcaaaaactgaggaactcagggtctattgcgcaagaactcctaagactcagctacacggccgatggactgcgggttatttttgtgatttcataa

SEQ ID NO: 41201 - DNA, 891 bp, Zea mays
  Peptide Sequence Number=SeqID_82980
atgtcgactgagaaacgccacctagatcagatcgaactcctcagtgttaggcggctcctcctgaacctcctgatcttctcctgtggggggggtgtgagacagcaaggtttatgggaagatccagtacagggttcctggctgaccgccatcgcagcaaaatcaaccagggacctccccgcactgacctctcccctactgcccttgcccctttcgggtaagaataacaacaagaattggaacatagagagctatggactgggcctcaatttctggaaatgccaggggccccggagtaaaactacagagacccagcgcatagtgactaatggacggcgggtttatttcagtgaaaccgaggggctcttaagtaaaatggacccgcgaaggggtatcggtgaatctgagccgttggatctccggccccaggatctggaatccacggtgtggattttatttacactagagtctcctgatccatccgatcagatacgaacggatcagatttcccgacctaagcgttacgcagatggcgcccagcagagctctgtcgacgcgggcggcacggccacggcggatgccccagccccggcggcgaattccgggagcactgaccaccaatccacggctgagatgacaccggatcaaaccccgtcgcacggtgaggcctacggacccgaattcgtgggcgcgacggcgaagtacacagaattggaccggcggcggcaaaggtctcacccgcgcggtgcgtggcggcgttctggtggtggcgagaggttggggataaagatgggagaggggaaaggagcgcgtgggcgacctacttgtatcccgtccgggaggccggggagtgggcgcgagccggtcaagtctccggcgatgtcgcggcggtag

SEQ ID NO: 41202 - DNA, 816 bp, Zea mays
  Peptide Sequence Number=SeqID_82981
atgaacaagaacacaagagacacaagatttatcctgaggttcggtcacaccaccaaggtgccctacttcctcgttgaggcgcccacaaagagccgggtctctttcaaccctaatcctccctttgccgaccacaaagatttgaaatgggagaggcaagagatgtgtgtgagagagtgggaggtgttcttcaagttagaaatggggttttggtcgtgctcttctgtggggagagaggggatatccatcgacgacgactcactggatcgacacggtggagcagggcgtgacgcagggagaagctcggcgagaaagctcgacgcgcgcggggatttgggcacgagctccgagcaggaagatagacggtcgacagaggaagccgccttgggcgagctggggccagggaaacgccgagccgagcctggagcagggaccgagctcgacgcagggagttccatggcgcacggcgagctcaatgctgggaccagggtcgcgctttggctaggtgtgggaggacgcgcacagggaaagaagaacagggacactgcgtgggtagggagcttcagggcgcgtcgagctgagggtgagctgcagcaaggaggaagaagctggggaagggccgcagcgctgggggctcggcgcgccgtggcgagcagagggatgcggcgctgcgcagaggagggagaggaaggagatgggcgcgcgcaccagggagggagaaacttggagggcggccgagctggtgcctgggagggagtggatccgggcgtgcaactcgcggctgttgggagaaagaagacagcgacttccaggagataa

SEQ ID NO: 41203 - DNA, 294 bp, Zea mays
  Peptide Sequence Number=SeqID_82982
atgaacaagaacacaagagacacaagatttatcccgaggttcggtcacaccaccaaggtgccctacttcctcgttgaggcgctcacaaagagtcgggtctctttcaaccctaatcctccctttgccgaccacaaagatttgaaatgggagaggcaacagatgtgtgagagagagtgggaggtgttcttcaagttagaaatggggttttggtcgtgctcttctgtggggaagagtgtgggaggtgtatataaaggtgcccccaaaagctggtggccgttggggaaatctgactga

SEQ ID NO: 41204 - DNA, 1725 bp, Zea mays
  Peptide Sequence Number=SeqID_82983
atggccctacgccgccagctcgccctcgccgtcctcgccctggcggcaaccactgccgcggccaactccggcttcgcggactccaacccgatccgtcccgtcaccgaccgcgcggcctccgcgctcgagtccaccgtcttcgccgcgctcggccgcacccgcgacgcgcttcgcttcgcacgcttcgccatcaggtatggcaagaattacaagagcgcggcggaggtccagaagcggttcaggatcttctccgagagcctccagctcgtccgctctaccaaccggaaaggcctctacggctctactaccgcctcggcatcaacccgcgtccctgattctcatatgttcgttatgtgtggctggtgtacaggcttcgcggacatgagctgggaggagttccgtgcgacccggctcggcgcagcgcagaactgctccgccacgctcgccggcaaccaccagatgcgcgccgccgccgctgccgcgatgccggagacgaaagactggagggaggatgggatcgtgagcccagtgaaaaaccagggccactgtggatcatgctggaccttcagcactactggtgcgcttgaggctgcatatacccaggcaactggcaaggccatctctctctctgagcaacagcttgttgactgcggttttgcattcaacaatttcggatgtaaggggggccttccatcccaggcctttgaatacatcaaatacaatggtggtcttgacaccgaggagtcctacccttaccaaggtgtcaacggaatctgccagttcaaggctgagaatgttggagtcaaggttttggactcggttaacatcaccctgggtgctgaggatgaactgaaggatgctgttggtctggttcgcccggttagtgttgccttcgaggtgatcagtggtttcagactgtacaagaccggagtctacactagtgaccactgcggaactacaccgatggatgtgaaccacgctgttctggctgttggctatggtgtcgagaacggtgtcccctactggctcatcaagaactcatggggcgctgactggggtgatgagggttacttcaagatggaaatgggcaaaaacatgtgcgccccggaagacggcgaactccgctccgcccgacccagggctcggactcgggctaaggccccggaagacggcgaactccgctccgcccgacccagggctcggactcgggctaaggccccggaagacggcgaactccgctccgcccgacccagggctcggactcgggctaaagccccggaagacggcgaactccgctccgcccgacccagggctcggacacgggctaaggccccagaagacggcgaactccgctccgcccgacccagggctcggactcgggctcagccccagaagacgacgaacttcgcttcgcccgaccccagggctcggactccgccctggcctctgccgaacaacctccgcctcgcccgacccaggagctcaggctcggcctcggccatggaagacagactcgacctcggcttcggaggagcctccacgtcgcccgacctaaggcacaggcccgccacgtccacaggaagcgccatcatcactctaccccgagccgactcgggccacagagaacaagaccggctccattgctcctccgacagccacgacatcacaccagcagggtgccaagatctctccggctgccacattggcatgtacttagggcgctag

SEQ ID NO: 41205 - DNA, 834 bp, Zea mays
  Peptide Sequence Number=SeqID_82984
atgaaggaaaaatgggaaaacgattgttgggccggttcctccactacggccccacttccccttttcccccctcggcccagccgtcctccgcgcgacgccggctataccactgatggtcgggcccacgcgggcagggtaacaccgcgcgcctgtttacccctaacgcgccgacgtgtgggccccggtcacagtctctcaatccatccacacatttgggtgtctagcgtgtgggcccagcttgtcgggtctatccccttccttgccctcgcgcatgcaccagggccagcttacctcgccacaacgaacgccgctacatctgccgccaggatcgggcggatcccgctaaccgttccaaccgcccggccggaatcccctcgcagcagggtattaataggaccgaaccccccccccccccgtcgtcagccattacgagccgggatactccacggcaccatcttccgcctcggtgctcgtctccgcctccacgccgaccggcttcgttccctcgccatccccaagctggcggcaaccactgccgcggccaactccggcatcacggaccccaactcgatccgtcccgtcaccgaccgcgcggcctccgcgctcaaatccaccagcgacgcgcttctcggccgccagcgctgtattccggccgccaccatgggaatcgagcgagttgcgcctcaatccacggatgaaagcctcggagcatcacttatccattgcgcaacttatcttggcggttggactcatgggggaccatcgggggtggctgggatccctcaccgtcgctcatgcttcgttgcaggaccacttcgtgccgtggaccggtga

SEQ ID NO: 41206 - DNA, 300 bp, Zea mays
  Peptide Sequence Number=SeqID_82985
atggcgaagctggccacgctactcctcctggtcctctcctgcggaagcagcaacccactcgaccgtctatcccggtggcaaggatggaggccaagtcacaccatcaaccaatcatccaaggaattttataaatctgttgtgacagtggacagaatacaacaatcatcttataaaattcataactctcaaactatcaggaattggatagattcagttactgaacttatgaaaagcataacttctaaacgatcaggtttatggctgtcagattttaacacaacaccatatgaaactatctaa

SEQ ID NO: 41207 - DNA, 390 bp, Zea mays
  Peptide Sequence Number=SeqID_82986
atggcgaagcttggccacgctacttctcctggtcctatcctgcggaagcagcaacccactcgaccgtatatcccggtggcagggatggaggccaagtcacaccatcaatcaatcatccaagtaagtacctgcaaaaattatgccacaagcaaggctgagtatactaatattcagctagacttacccgtgaccgcacttgtatccaccatatccggaatgggagaccacgtctcaggacaagtgaggagcaaagtccgcgcctggcttcactcagacaaatgcatccccatggatccgtgtccacagaccatcatcattatgttatcaaaatggatacaaccaattcctgacctcgtgcgagtgctagaaaaatcactcgacttgtactga

SEQ ID NO: 41208 - DNA, 228 bp, Zea mays
  Peptide Sequence Number=SeqID_82987
atgggggacaaggacggagatatttgtgttgtgtggcgtgttggtgggtattgggaggcagagcagaggagctgcgttgcccagaacaacccgagagtcatcgatgttggcgacgaccatgaggtcccctgcttgacgatggacaacgcggagcagccgctctgcaccgcgtccaagcggtggcggcgccagagcttgtcgtacatagcggcacatacgaccacgtag

SEQ ID NO: 41209 - DNA, 282 bp, Zea mays
  Peptide Sequence Number=SeqID_82988
atggccccatgtgccgctatgtacgacaagctctggcgccgccaccgcttggacgcggtacagagcggctgctccgcgctgtccatcgtcaagcagggggacctcatggtcgtcgccaacatcggtgactctcggcccagccaagagtcattagtactcggtatgtcgcgcgcgttcgatgactactatatcgaggactgtggcgtcatcttggcgccagaggtgacgcagaggaggaccgacaacaatgaccagtttgtcatcctcgccaccgttgggtag

SEQ ID NO: 41210 - DNA, 322 bp, Zea mays
  Peptide Sequence Number=SeqID_82989
atgaggctttcacaaaatacacttaatacgaagcaacccgctaaggtttctaaagacgatggtggtggccccctgggtgaggaggagttgtgcgacggcaggggaacaacagcaaggccagcgtcgctgtgcgagcagcagaagctcgacgccgatggtgtgcagcagcggcgcgacagcagagcatgcgtgcgcggggtcggttccgatgatttcggctccgcggggggcagttgggcgccggtcggtactcggccggggtcgggtcctagggcgcaggggcactcggctgctggcgacctgggcggtcggttgcgcaggg

SEQ ID NO: 41211 - DNA, 360 bp, Zea mays
  Peptide Sequence Number=SeqID_82990
atgaggctttcacaaaatacacttaatacgaagcaacccgctaaggtttctaaagacgatggtggaggccccctgggtgagcagcagaagtggaacaacacggttggcgctagggaatggataggggctcagctccatgactatgcaccagcgacgaggttcgagttggatctctcgtcgacaacaacgtacacagcaaggcataaacagcaggatgctcggcaagctccggcgagggattgcgcagcacggtggcaagcagcagtggcacgcggcaatggcgggcagcagcacagcgtcacgacgtgggtgcagcagggacaggacgcgagcagagactcggcgtcgtcgtttaaatag

SEQ ID NO: 41212 - DNA, 349 bp, Zea mays
  Peptide Sequence Number=SeqID_82991
atgaggctttcacaaaatacacttaatacgaagcaacctgctaaggtttctaaagacgatggtggtggccccctgggtgagcacgacgaggctgcgcaagggtgtcggcgaactccagcgaacgagattggcaaacaacaggatcagcagggcgtcgtggcggggaggctctggcggatgaagctccggcgacgtagagcggcggcatcgggcgaagcaccgggcgcgctaaacagaagccggctaccagtgctcgacgagcaggacaaggaagcgagcgtggaggagaaaagcgagaacgctggggaaaagaagatggtggttccatttataggcgaccagggagagc

SEQ ID NO: 41213 - DNA, 630 bp, Zea mays
  Peptide Sequence Number=SeqID_82992
atgaggctttcacaaaatacacttaatacgaagcaacccgctaaggtttctaaagacgatggtggtggccccctgggtgagggcgacgtcgagctagggaggtcgagctggttctacggtggactgccttcttggtcaagggttcgacggaggggcgccagggaactcacgaacgtcctcgccggcgacgtggaaagcgcagaggctccggcgacgggagcaaggagggcgatgcaagctcggaactgtgaggaacaatctcaggggatgcggcctgcaatttataggaaaagagagaaagcagaggtagaagaaacggttgacggcgtcctcaatagccattacgacggcgggggtttcagtgctatcaacgctcttaatgggcggctcggccatggcgcaggggcatcggggtcggctgctggcgcggtcgtcgcggcacagcagggcgggcgcgcggcgctggaggtcggccggctcggaggggtcagagaccagctgaactgccccttaggaccagttcaactggtcttgagcagagagtttaggagagaaaaccctagctcaactgcccggaggcaagttcagctgctgaagaagctcaactcagctgaagttcagctcagctga

SEQ ID NO: 41214 - DNA, 429 bp, Zea mays
  Peptide Sequence Number=SeqID_82993
atgtcaaacttcattgttgtccagggacaacatgtcctcaacgtggatctgtccctgtcctctgctcatgggaaaccacccgatgtcaccatcggtgagggtgccttcctcttggagcagcgtgacggtggacttgaccgtatggaggtcggcggtgagaaggcctgggttgccttgcgcccgacaagcaacgcatctagagatggcaatgggtacccgaaacccgaatacccgacgggttttacccgatatgaaggcgggtacgagatgatttctctacccgcgggtatgttaatgggtaaaaacctctacccgttgggtagacgggtacgggttatggggttggtactacccatacccgtctacccgtgggtagaatatacccgcatcaatagcactaataaacatctaataaagtcaacttactag

SEQ ID NO: 41215 - DNA, 414 bp, Zea mays
  Peptide Sequence Number=SeqID_82994
atgtcaaacttcattgttgtccagggacaacatgtcctcaacgtggatctgtccctgtcctctgctcatgggaaaccacccgatgtcaccatcggtgagggtgccttcctcttggagcagcgtgacggtggacttgaccgtatggaggtcggcggtgagaaggcctgggttgccttgcgcccgacaagcaacgcatctagagatggcaatgggtacccgaaacccgaatacccgacgggttttacccgatatgaaggcgggtacgagatgatttctctacccgcgggtatgttaatgggtaaaaacctctacccgttgggtagacggaccatgacggggctcctcgttcacgtgctcctgcctcgccttctccgcgtccagctgcacacgcagatcgtcgtgcaggcggtttag

SEQ ID NO: 41216 - DNA, 321 bp, Zea mays
  Peptide Sequence Number=SeqID_82995
atggccgacctttcctcctctgtgcagggcgcccctgttcctctgctccttctccctcgcgcagcagcagccgagtctttcttcctccctctgctgtccacggagaggcaccccgtgttttgcgtggagaaggcaagtcgttcaacgctcgtcggatgttcggagcgatgcacaaatcggaatcgccatcgtccttacaaacaccaattgggtttgtttatgtgtgatgggattcatgattatatagggagtatatttattgatgtgacgggtagtttagagaatgctagtttgcgtggagaatgtattgttaagacatga

SEQ ID NO: 41217 - DNA, 411 bp, Zea mays
  Peptide Sequence Number=SeqID_82996
atgcagcaccgctgttcctgcagccccggcccctcccccggcttcctcgctgccagcgctgcgcgcgtgccacgtgctcgacaaaatgtcctagtggggtgttgcgcagagagaaccccgtgttttgcgtggagaaggcaagtcgttcaacgctcgtcggatgctcggagcgatgcacaaatcggaaccgccatcgtccttacaaacaccgattgggtttgcttatgtggtcgcgccacattgattgaagtgtctcgagtggacgccaccatatggttgtatgcgagacaaggttatgcgcatgtatatgttgcgtctcggattgcggcaataatagtcaagttgacgtgtatgttatttagcggcgatgtcgttgctctagttaaccgaattgttagacgacgtggttaa

SEQ ID NO: 41218 - DNA, 201 bp, Zea mays
  Peptide Sequence Number=SeqID_82997
atggcagcaggatcaaatgattgtgggttttatgttatgggatacattctcttttatggctgcgttgaaggatctctgcggtcagacatagaagcaggcaacactagtgagatacggtctcttgcgctgcattacatcacattccatcgcaagaacaaagcattatcgcagcttgaagacacccaaagattcaaggtctaa

SEQ ID NO: 41219 - DNA, 258 bp, Zea mays
  Peptide Sequence Number=SeqID_82998
atggcgcggatctcgcctccaaacgcggatctcggccacgacacagacgcaaatcccaatgaaaaccacagcctgctagagattgatagtgatagtgttggatcacgattgcaggataaaagaagtaggcgcaatgaggagtcatgttcattcacaagctctaacagagaaagttggggcagatgttcatatttaggtgcagccagtgatgaatcattctcaggcgataataatgataagcaggtggattggctatga

SEQ ID NO: 41220 - DNA, 819 bp, Zea mays
  Peptide Sequence Number=SeqID_82999
atggccaatgaagatctctatggccaccacctccaaggattgacagatattgagaaattcttgggggataaaaatataattaaatttgatggtgatcataattctccaagacctcaatcatattatgattcagtttctatattcttctacaaatctttgcatcctcctctgctgcctgcagcacgatcaaagcttcatatgggagcatttaaagttggtaacataaccaatgagaatttcttctttgaaatcatcaatggtctacggccagcaaacactgcaggttgcagttcatcaaccgatgcacctaacatcccacatgatggcacatctgtaattgaattgttgtctgatagcatgaaccaactgtccattaagaatgagaatcacttggactttcttttagatgaaaaccacagcctgccagagattgatagtgatagtgttggatcacgattgcaggataaaagaagtaggcgcaatgaggagtcattttcattcacaagctctaacagagaaagttggggcagatgttcatctttaggagcagccagtgatgaatcattctcaggcgataataatgataagcagaatttgacagtcaaggctttggctacgcctgtaagacaaaaccagaggcaaagccagaggaaaccgattgagaaagctaagcagaagaagattcaagccctatggaagaagattaagcgcgaaaaggtggagatgggggacagcctatcttcgcgtttgaagatgtgcctagggcaatctccgcagcacaagaggaatagatcgtctggaaccattacaacttcatag

SEQ ID NO: 41221 - DNA, 366 bp, Zea mays
  Peptide Sequence Number=SeqID_83000
atggctgttgtctgcgcgaactgcagcggcctcgacgacggcgtagaagaccttatgcacgctgtcctgcaacgtcaggagcacgttgtacagcaccgcaacaaggtttggacaaggtcctgtttgtacaaccctgctaagtacaatacattgaagaccaaaaactacacttcatcagctatgataagcaaatcaagtgtatatacacggattggaaacacagtcttaccgaaggttatctactcacctacacagaatgacagggaaccagtattctggaactatgtcccaaagcttcacttgaaggccaccggaaacatatcaccgctagtttggaaaggagatgataatgtagcaggcaactaa

SEQ ID NO: 41222 - DNA, 1494 bp, Zea mays
  Peptide Sequence Number=SeqID_83001
atggctcgagcgctgctcctgctgcgagtagctgtagctcgctaccctcctctcccggcctcacccgcgctcctccagccgcagccgctgctgcgctgccacgcgccctcccagtacaaatcccagctccgcttcctctcctccctctcctcgtccgtgcccaacagctcagatgctcccagcgacggcgggggcgaccgcgacggggaagaagatggcgcgaagagtggcagccacgtcgattacttggggatgagcgacgaggagctcatggagcagtgcgatatgggcacgttcaaggcgtccggccccggcggccagcactgcaacaagcgcgagtccgccgtccggctgaaacaccttcccatcggcatcatcgcccaggctgtggaggatcgatcacaacataagaaccgagcgtctgctttatctcggcttcgaaccctgattgctcttaaagttaggaggccgataaacctggaagactacactccacctgttgagcttcttcagatattacccctgaagtccagcgttagaggaaatgatgttggcccccaaatcggtccaaataactcaaaattttctccaggaatgcaagcattattagacctgctgtttgctgttgaagattctgtatcagatgcagcaaagattttaggcctaagcaccggtgctttgtcaagattgattctgtcagatgattctctccgaacggccgcgaatgaactgcgagcttcgaagtgtttctttgattgcagggcaccggtgctgtactacgtgctcctgacgttgcaggacagcgtgcacaaggtcttctacgccgtcgtcgaggccgctgcagttcgcgcagacaacagccatcttggagggttggcgaggtatccggtctctgcaactcttccacagattggatccagattattccttacatggggtgtcttctggagttttcctgagatggccccattcacctctaccaacaggtatctaattccaatattgtatgtctcggttgaacttgtgaaggcgttgcaagcacatatcattaactgggatattcatatgtttgatgaggagatcggcaataccactcaggtgcacacatcaaacttgaatgagccaatgaggaccttggccgggttcatacaattttgtctgataaaaccgggtggcaagtttgaccatgcagatcgtttgttccaaagcattgagaacgcttacataaatagcttatcaaatacaagtgacgtcaaagagcttattccagaattcttttacatgcccgagtttcttgaaaattcaaattcatatcatcttggtgtcaagcaggatggggaacctataggcgatgttgctctccctccatgggcaaaggatgataactcaagtgacgagtttgacaaagattctattgagagtgatgatagatctcttgaagagctaagctgggagacactagaacttcttgtggtacctcatatattcaggtaa

SEQ ID NO: 41223 - DNA, 597 bp, Zea mays
  Peptide Sequence Number=SeqID_83002
atggctcccttagacccgtctctccacgcctcgcaagtcaacgacgtagaaccgctggctcctcttggtcatgcgtccgtcccaccacgatctccactcgcccgtctcccctctcctcagtcacccaactcggcacatgaaggtggaactggcggcgacggtgtgtgtggtgtcggagacggcacggcccgctccgtctaccaccacttcccacctcgtcgacgatcttatcttgtagcggcgatgcacatggcaagcgagaccatctcagagggtggcaagtttgaccatgcagatcgtttgttccaaagcattgagagcgcttacataaatagcttatcaaatacaagtgacgtcaaagagcttattccagaattcttttacatgcccgagtttcttgaaaattcaaattcatatcatcttggtgtcaagcaggatggggaacctataggcgatgttgctctccctccatgggcaaaggatgataactcaagtgatgagtttgacaaagattctattgagagtgatgatagatctcttgaagagctaagctgggagacactggaacttcttgtggtacctcatatattcaggtaa

SEQ ID NO: 41224 - DNA, 1305 bp, Zea mays
  Peptide Sequence Number=SeqID_83003
ggtggcaagtttgaccatgcagatcgtttgttccaaagcattgagagcgcttacataaatagcttatcaaatacaagtgacgtcaaagagcttattccagaattcttttacatgcctgagtttcttgaaaattcaaattcatatcatcttggtgtcgagcaggatggggaacctataggcgatgttgctctccctccatgggcaaaggatgataactcaagtgacgagtttgacaaagattctattgagagtgatgatagatctcttgaagagctaagctgggagacactggaacttcttgtggtggaagtcatagctcctgctgtaataggtacaaccaatgtgttaaaagcttgctatgaagcaaaagttaagcgagttgtggtggtgtcttcatgtggagctgtgtatgctaatcctatttatccgaaggcagatatcgagactgttgaaaatgtactcagtaatatggtggatattcgtgatgttgctgatgctcttcttctgacttacgaaaagccagaagcgtctggacgatacatctgcagttcacatgcaataaaaatttctgatatgataaacatactgaagaccatgtatccttcttacccttatcccaaaaggtcaaggctccgtccactcaagggacacgatctcgcctcgggcaaaggcagccgatccgggaggattcacgtctcgcccgagggtccactcaagcaacggacgcaccttcgactcgcccgaggcccagatcgggcaggcttcgcggagaagcaaccttggccggatcactacaccaaccgaccgtatcgcaggagcattcaatgcaaggatcgcctgacaccttatcctgacgcgcgctcctcagacgacaaggccgaaccgctaagactggcctcaggcgccataggaagctccgcctcgcccgaccccagggctcggactccacctcgacctcggaagacggactccgcctcgctcgaccacagggctcagactcaacctcgacctcggaagacggactccgcctcgcccgaccacagggctcggactcaacctcgacctcggaagacggtctccacttcgcccgaccacagggctcggactcagcctcgactccggaaggcggtctccgcctcgcccgaccctagggctcggactcagcctcgacctcggaagacggtctccgcctcgctcgacccccgggcccagactcaacttcgacctcggaggagcctccgcctcgcccgaccccgggctaggaccgaccacgtcacagggggggcatcattaccctacccctag

SEQ ID NO: 41225 - DNA, 702 bp, Zea mays
  Peptide Sequence Number=SeqID_83004
atggccggcgtgtatgttggcaacttggattcacggatggaggtcgctaactgttgttctcaatgcactgtttgggttgcacgtaaaccacctggctgtgcatttattgattttgacgacaggagggatgcggaggatgctattagcgatctagatggtaagaatggatggagagttgaactatctcgtaattccagtggtcgtggtggtcgtgatcggtatggtggatctgagtcgaagtgctatgaatgtggtgagactggacactttgcacgtgaatgtcgtctgcgcattgcctctggaggtctaggcagtggaagacggcgcagtcgcagcaggagcaggagccgcagcggcagccctagataccgcaggagcaggagccgcagccgcatatcagtagatgaagcacatgctttcatatatatgaacatcttcttaaccatgttctttttctttctttttagctgtcatgcaaaccaatgggccctgctcccgctgttcctcaggccggtggttcggttcgcggcgcgcgtggcggaaggtgggccggcggtcgcggtggcgacgatcctgcaccgcgccggcgcgctgtccaggaaccggggcctggagcgcctcgtccgagacgacgagctccacggccgcggacaggactgcatcgccagcttcgtcatcggcgtcatacgctgcctctgctag

SEQ ID NO: 41226 - DNA, 492 bp, Zea mays
  Peptide Sequence Number=SeqID_83005
atggcccgcgtgtatgttggcaacttggattcacggatggaggtcgctaactgttgttctcaatgcactgtttgggttgcacgtaaaccacctggctgtgcatttattgattttgacgacaggagggatgcggaggatgctattagcgatctagatggtaagaatggatggagagttgaactatctcgtaattccagtggtcgtggtggtcgtgatcggtatggtggatctgagtcgaagtgctatgaatgtggtgagactggacactttgcacgtgaatgtcgcctgcgcattgcctctggaggtctaggcagtggaagacggcgcagtcgcagcaggagcaggagccgcagcggcagccctagataccgcaggagcaggagccgcagccgcatatcagtagatgaagcacatgctttcatatatatgaacatcttcttaaccatgttctttttctttctttttagctgtcatgcaaaccaatgggtttga

SEQ ID NO: 41227 - DNA, 667 bp, Zea mays
  Peptide Sequence Number=SeqID_83006
atggccgagctctctgatgtttgctccatggccgccagcaacctccccatggccgagaacttgacgccgtccagcttcaatccaagttccctgcgccttcatccatggcgcgacgccctctgcctttctccctgggcacctggacgcgcgcaccactcctctggctcgcctcccttcaggcacggccagctgcagcccgcgctccacctcccatggtgcccagaaattccagcagaccatcctccttcccccaaacagcggcagctcgccccacctcccctcgctgcgcagcccctcggcgagacgccgctgttcctgcagcggatccccgacgccctcccctgctcctcctctcttccccacaaaacagcagccgcagcgagctcgctgtcgtccatggcgagcagcctccctcgatgcgcaggagctcttcttcctcccaaggacagcgcccctatttccctctcccggcagcgcagcgccccgcaaccaagttttccctgcagccccaccaaatcgacgcgccgtaggtgctcgacaaaatgtgcagcaagccgcgtgctgccggctcactgttccgtgaagcacagtggacagcacgccgtcgacactcgccggttgtacgctgtttttggcgcagccccgctcgcgacatcgtcgacccccg

SEQ ID NO: 41228 - DNA, 753 bp, Zea mays
  Peptide Sequence Number=SeqID_83007
atgtcgcgagcggggctgcgccaaaaacagcgtacaaccggcgagtgtcgacggcgtgctgtccactgtgcttcacggaacaggaaaacttggttgcggggcgctgcgctgccgggagagggaaataggggcgctgtccttgggaggaagaagagctcctgcgcatcgagggaggctgctcgccatggacgacagcgagctcgctgcggctgctgttttgtggggaagagaggaggagcaggggagggcgtcggggatccgctgcaggaacagcggcgtctcgccgaggggctgcgcagcgaggggaggtggggcgagctgccgctgtttgggggaaggaggatggtctgctggaatttctgggcaccatgggaggtggagcgcgggctgcagctggccgtgcctgaagggaggcgagccagaggagtggtgcgcgcgtccaggtgcccagggagaaaggcagagggcgtcgcgccatggatgaaggcgcagggaacttggattgaagctggacggcgtcaagttctcggccatggggaggttgctggcggccatggagcaaacatcagagagctcggccatggctgctctgctggcgccatagatccaaggatactgaacttgctctgccctgcgcactcaggagcatggggagggcgacgcttgcttgaggaagaaggggaggagggtgcagggagcttggagctggagcttcgccggtgccatgggaggtgctgctgccgtgtgccatga

SEQ ID NO: 41229 - DNA, 1146 bp, Zea mays
  Peptide Sequence Number=SeqID_83008
atggacgacagcgagctcgctgcggatgctgttttgtggggaagagaggaggagcaggggagggcgtcggggatccgctgcaggaacagcggcgtctcgccgaggggctgcgcagcgaggggaggtggggcgagctgccgctgtttgggggaaggaggatggtctgctggaatttctgggcaccatgggaggtggagcgcgggctgcagctggccgtgcctgaagagaggcgagccagaggagtgggaacttggattgaagctggacggcgtcaagttctcggccatggggaggttgctggcggccatggagcaaacatcagagaaggtcgcgaccagggagcatggggagggcgacgcttgcttgaggaagaaggggaggagggtgcagggagcttggagctggagcttcgccggtgccatgggagggaaaacttggttgcggggcgctgcgctgccgggagagggaaataggggcgctgtccttgggaggaagaagagctcctgcgcatcgagggaggctgctcgccatggacgacagcgagctcgctgcggctgctgttttgtggggaagagaggaggagcaggggagggcgtcggggatccgctgcaggaacagcggcgtctcgccgaggggctgcgcagcgaggggaggtggggcgagctgccgctgtttgggggaaggaggatggtctgctggaatttctgggcaccatgggaggtggagcgcgggctgcagctggccgtgcctgaagagaggcgagccagaggagtggtgcacgcgtccaggtgcccagggagaaaggcagagggcgtcgcgccatggatgaaggcgcagggaacttggattgaagctggacggcgtcaagttctcggccatggggaggttgctggcggccatggagcaaacatcagagaaggtcgcgaccagggtgagagcaggggcgtcggcgtgctcccagggagctcggccatggctgctctgctgggcgccatagatccaaggatactgaacttgctctgccctgcgcactcaggagcatggggagggcgacgcttgcttgaggaagaaggggaggagggtgcagggagcttggagctggagcttcgccggtgccatgggaggtgctgctgccgtgtgccatga

SEQ ID NO: 41230 - DNA, 639 bp, Zea mays
  Peptide Sequence Number=SeqID_83009
atgaaatcgaacaaggagcgtcgcggtctcaccggggtgaacgacgacgacaacggggctgcgcaaaaacagcaaaccaccggcgggcatcacagcgtgctgcaacaacacatctccctcgacattttgccgaacacttggcatgcgcgcggcggtggcagcgagacaaagcgagcgaaggtgtcggggctgttgttttgtggggaagagagggggcaggggcctaaaactgggcggcattggcctctcgccatgggtggagctcggatgggggcaatgctgccatgggagacgagtttgggtgtcctccatggctgttcagatctcgggcgcagcaggggtttatttcaggcgctaaaacatggaggagcagaggaaggaaagggggagattgcagggggcgccatggacgacggcgagctcgctgcggctgctgttttgtggggaagagaggaggagcaggggcctagagctgggcggcattgctcctgctactttccatgggagagaaaaaaaatagggcgcagggaacagcagctatggacagggaaagtggaggtcggccatgggaggtctcgctggggggaggcgccgagggaaaaggtggcgccctgggaggggaagagccgagctccctga

SEQ ID NO: 41231 - DNA, 471 bp, Zea mays
  Peptide Sequence Number=SeqID_83010
atgatgcgcgtgctgctcgtggagatcctcgtccatgaccccgccaagcgccctgttgttgttcgccacttattcgcatcatcgcctgtgcgtgccgctgtcgccgtttgtcgctgggactccccacgctcgtgctgcgccgtgacgccgcgtcattgccatcgcccgccggactccacctgctgcgccgctcgccgccgacgccgacacctgctgctacatgttattgtcgcccgttgtgcttctacgacctcgtcactagagaacctcaacacgccagagaaccatgctacgccccggtattccgatcagcaccttggtacagcctgcctcgccctcgttggagtccagcaacactggcgccgtgtctttgtcccctcgccaacagattctcttacgccagcgacaatgaagcccacaacatcatgttctattgttccacgactgaaggtagaaaatagcatattttaa

SEQ ID NO: 41232 - DNA, 646 bp, Zea mays
  Peptide Sequence Number=SeqID_83011
cctacccatctcgctggattcccgcacgctcgagcttccttcactgtgccgacgacgaagccatgatgccagtgccaagccgttgccaaaacccctgctccttgctgctgtgcacccgttgtcaccctgcgctctgggttcgctgcagcatgtctctgctcagcgccgttactccatgatgcgcgtgctgctcgtggagatcctcgtccatgaccccgccaagcgccctgttgttgttcgccacttattcgcatcatcgcctgtgcgtgccgctgtcgccgtttgtcgctgggactccccacgctcgtgctgcgccgtgacgccgcgtcattgccatcgcccgccggactccacctgctgcgccgctcgccgccgacgccgacacctgctgctacatgttattgtcgcccgttgtgcttctacgacctcgtcactagagaacctcaacacgccagagaaccatgctacgccccggtattccgatcagcaccttggtacagcctgcctcgccctcgttggagtccagcaacactggcgccgtgtctttgtcccctcgccaacagattctcttacgccagcgacaatgaagcccacaacatcatgttctattgttccacgactgaaggtagaaaatagcatattttaa

SEQ ID NO: 41233 - DNA, 198 bp, Zea mays
  Peptide Sequence Number=SeqID_83012
atgacggggagcatccgagaggagccggaagcggagcaccacttgcgcgtggagaaggcccgcgactctctacggagttactcgaccgagtttcgtgaaagttttagaagtcctaattcaccccctcttaggcggcacccgtttcctttagtagtcatgaacataatcgaagtgcggaatacgaaacgtagaagataa

SEQ ID NO: 41234 - DNA, 606 bp, Zea mays
  Peptide Sequence Number=SeqID_83013
atggggaagcctgtcccatcactcctcatgctcctcctcagccgaggcagggtcccactcgacagtccaacccggtggcagggtggtcggccaagttatcccagcaaccatctcctccagagaacctgtaaaaattttgccacaagcaaggctgagtatactaatactcagctagacttacccggttacaatggatcaagcagtctcattagctgcgagaagcagacgattcgaatcgagtttttatccttgcaagtggacgcacttgtacccaccataaccggaatgggagacctcgtctcaggtcgcgtgaggggtaaagtctgcgggcaggttcactcaggtactaggcttaccgatttaccatatttctcggttatgcataaaaccggggcttgccttccaaagcagtggcaggcaggtcctctggtgctggctctggtgctggatctggggctacctcctgagcagctccttgctccggcacgaggatgtactctccgtcagcaagattacagtctagcgaatgcaatgaacatgtatgtcatgattatgcatgatttaataacattatgcaaaaagagactaagtcaagaagtaacttag

SEQ ID NO: 41235 - DNA, 321 bp, Zea mays
  Peptide Sequence Number=SeqID_83014
atgggagacctcgtctcaggtcgcgtgaggagggcaatctgcgggcaggttcactcaggtactaggcttaccgatttaccatatttctcggttatgcataaaaccggggcttgccttccaaagcagtggcaggcaggtcctctggtgctggctctggtgctggatctggggctacctcctgagcagctccttgctccggcacgaggatgtactctccgtcagcaagattacagtctagcgaatgcaatgaacatgtatgtcatgattatgcatgatttaataacattatgcaaaaagagactaagtcaagaagtaacttaa

SEQ ID NO: 41236 - DNA, 315 bp, Zea mays
  Peptide Sequence Number=SeqID_83015
atggggaagcctgccccatcactcctcatgctcctcctcagccgaggcggggtcccactcgacagtccaacccggtggcaagatggacggccaagtcactccagtaaccatgtcctccaacagcatggatcaagcagtctcattagctgcgagaagcagacgattcgaatcgagtttttatccttgcaagtgaccgcacttgtacccaccataaccggaatgggagaccacgtctcaggtcgcgtgaggggatatgtctgcgggcaggttcactcaggtactaggcttaccgatttaccatatttctcggattaa

SEQ ID NO: 41237 - DNA, 525 bp, Zea mays
  Peptide Sequence Number=SeqID_83016
atggggaagcctgtcccatcactcctcatgctcctcctcagccgaggcagggtcccactcgacagtccaacccggtggcaagatggacggccaagtcactccagcaaccatttcctccagagaacctgtaaaatttatgccacaagcaaggctgagtatactaatactcagctagacttacccggttacaatggatcaagcagtctcattagctgcgagaagcagacgattcgaatcgagtttttttatccttgcaagatcagggctcaccgccttggcgtacaatgcctcactgaccccgactgccgtcgtgcagtgaccgcacttatacccaccctaaccggaatgggagacctcgtctcaggtcgcgtgaggggatatgtctgcgggcaggttcactcaggtactaggcttaccgatttaccatatttctcgggcttgcctccaatcctacaatcattaagtgcagtggcaggcaggtcctctggtgcagactctggtgctggatccggggctacctcctga

SEQ ID NO: 41238 - DNA, 615 bp, Zea mays
  Peptide Sequence Number=SeqID_83017
atgatgatctggtgccagttcaggctgcagatcctcaagcatctggtccatcctatcaacatcatcttcaccgtcatcaacttctacttctgctgctcgttcaacatcttcaccatggagataccagaccttatagcctggcacgaaaccatgcgaacacaggatgtatacctcaacgacaaggcggcaacggcgctcggggaagcggtcgggaccggcggcggcactcgtggaggcgatcgaaggcgacggcggacttggggctgcggtggtgcttggagagcctgtcggagcgatgggcggcggtggaggaggccgacgggggaggctattgcggcggcggcggggtccggcaggggcggcgtggtggtcggccggctgttaggggcggcgccgggccggtacgggagtggcggcggcggcggtggatggggcaggggcggcgccggacggggctggggctggggctgctggggccgcgcggggtcggggcgacggcggggcttggggaggcgcgacggcggggcttggggaggcgcggtggggcttggggaggcgcggcggcggggcttgggcacggcggcggcggagctaggcgatggcgcctgcggttga

SEQ ID NO: 41239 - DNA, 507 bp, Zea mays
  Peptide Sequence Number=SeqID_83018
atgatgctgttggtggggctggcgctgcaagagctgtcacagaatctcattctgctgggccatcagctcctgcactgtgggagctgggggaggtggcgggggagcttgctcattctgcccgcgacgctgcctagctgccatctgaaaacagagattgtcgccattggttacattaatcaggggaaggccgacgtggattacttaactcccgtcggccagggagaaaaccgacggggattaaccgtttatgagcgcgggttcgcccgcgcggacgcattctgtctgtctgtcttcaaccgcagccgccatcgcctagctccgccgccgccgcgcctccccaagccccaccgcgcctccccaagccccgccgtcgcgcctccccaagccccaccgtcgccccgaccccacgcggccccagcagccccagccccagccccgtccgccgccgcccctgccccatccaccgccgccgccgccactcccgtaccggcccggcgccgcccctaa

SEQ ID NO: 41240 - DNA, 231 bp, Zea mays
  Peptide Sequence Number=SeqID_83019
atggcccgcacccgcgcctataaatcccactcaggcgtcgaccacactcttccgcgcacgctcaaacctcaccggagctcaactcaccgtcgtttgcccgtgcacggcctgtccgcggccacccgagcccctgccgccatagaccggccagtccagcccttcccaaccccgtccaaccctcggagacgatctctacgtcaccccgtgaagctcaccgtgccattggattga

SEQ ID NO: 41241 - DNA, 291 bp, Zea mays
  Peptide Sequence Number=SeqID_83020
atggcccgcacccgcgcctataaatcccactcaggcgtcgaccacactcttccgcgcacgctcaaacctcaccggagctcaactcaccgtcgtttgcccgtgcacggcctgtccgcggccacccgagcccctgccgccatagaccggccagtccagcccttcccaaccccgtccaaccctcggagacgagttaagaaaaatagaaaaggtgatttaaataatgaaccagagggcaccccaatttttgttagaatatgttgggactatgcttcgtcgccgaaggtcttgtag

SEQ ID NO: 41242 - DNA, 474 bp, Zea mays
  Peptide Sequence Number=SeqID_83021
atggcccgcacccgcgcctataaagcccactcaggcgtcgaccacactcttccgcgcacgctcaaacctcactggagcttaactcaccgtcgtttgcccgtgcacggcgtgtccgcggccacccgagcccctgccgccatagaccggccagcccagcccttcccaaccccgtccaaccctcggagacgagttaagaaaaatagaaaaggtgatttaaataatgaaccagagggcacctctatttttgttagaatatttgttcaatctagttccctagaaaaatctattataccctggtttaactgtaaccttgctgacggagagtacgtcctcgtgccggagcaaggagctgctcagaaggtagccccagatccagcaccagagcctgcactagaggacctgcctgccactgctttggaaggcaagccccggtttatgcataacctgttatttatgctattttactatacttaa

SEQ ID NO: 41243 - DNA, 627 bp, Zea mays
  Peptide Sequence Number=SeqID_83022
atggcccgcacccgcgcctataaagcccactcaggcgtcgaccacactcttccgcgcacgctcaaacctcactggagcttaactcaccgtcgtttgcccgtgcacggcgtgtccgcggccacccgagcccctgccgccatagaccggccagcccagcccttcccaaccccgtccaaccctcggagacgagttaagaaaaatagaaaaggtgatttaaataatgaaccagagggcacctctatttttgttagaatatttgttcaatctagttccctagaaaaatctattataccctggtttaactgtaaccttgctgacggagagtacgtcctcgtgccggagcaaggagctgctcagaaggtagccccagatccagcaccagagcctgcactagaggacctgcctgccactgctttggaaggcaagccccgtggactttacccctcacgcgacttgagacatggtctcccattccggttatggtgggtacaagtgcggtcactgcacgacggcagtcggggttctctggaggacatggttgctggagtgacttggccgtccatcttgccaccgggttggactgtcgagtgggaccctacctcagctgaggaggagcatgaggagtga

SEQ ID NO: 41244 - DNA, 393 bp, Zea mays
  Peptide Sequence Number=SeqID_83023
atggcgtccctggagccgtccacgtggtggggtcggatgttgttcaccgcgcggctagagattgccacacgggcaccgtgccttcatactgtagtaaggggtacccctgattcagggtaccgacagtggcccccgggcctgcctcaggggagggaaccggcgcccaaggaggatgactcgtgggcccaggcccccgtgccagagactgggctgtcggtttcggcgggggcgaagaggcacactaccgcaggtggtggcacgctcttcacgcgtcagttcgccttctccgcacacagaacctggcgcgccaggtgcatgacatgtgggcctgggcccccatgccagaggttggatcgttggttgcggcgaagacgagggggcacaataccgtag

SEQ ID NO: 41245 - DNA, 288 bp, Zea mays
  Peptide Sequence Number=SeqID_83024
atggcgccccgcatactctgtgacgacggcggctctcaacccccttacggaagcaagaggactgggtattggaaacctgttgggtacccgaaaccgcatgggtatgagtttgggcaaaattttatacccgtcatgggtatgagttttttagcgggcgtattttttcttcgcgggtatggatttgggcaagtaatatccagcgggtttttacccattgacatctctatgcgtgtccaggacaaagacagtggtctatctttgagtaaccgaagaaactgtaacgcgtaa

SEQ ID NO: 41246 - DNA, 237 bp, Zea mays
  Peptide Sequence Number=SeqID_83025
atggcaatgggtacccgctacccgaaacccgtgggtatgggaaacccgttgggtacccgaaacccgcatgggtatgggtttgggcaaaattttatacccgtcatgggtatgggttttttagtgggcgtattttgtcttcgcgggtacgggtttgggcaagtaatacccagcgggtttttacccattgccatctctagtttgaccccgtttgagacatttgttagagacatttgttag

SEQ ID NO: 41247 - DNA, 258 bp, Zea mays
  Peptide Sequence Number=SeqID_83026
atggcaatgggtacccgctacccgaaacccgtgggtatgggaaacccgttgggtacccgaaacccgcatgggtatgagtttgggcaaaattttatacccgtcatgggtatgagttttttagcgggcgtattttttcttcgcgggtatgggtttgggcaagtaatacccagcgggtttttacccattgccatctctagtccaaccctgatccaacggcccgaatttctccataccccttcggcccaacctttttgttaa

SEQ ID NO: 41248 - DNA, 279 bp, Zea mays
  Peptide Sequence Number=SeqID_83027
atggctgggccaaggacgcgcatagagatggcaatgggtacccgctacccgaaacccgtgggtatgggaaacccgttgggtacccgaaacccgcatgggtatgagtttgggcaaaattttatacccgtcatgggtatgggttttttagcgggcgtattttttattcgcgggtacgggtttgggcaagtaatacccagcgggtttttacccattgccatctctagacgcgcacagatctgggtggacttcaaattgctatctgttatcctcgttgcataa

SEQ ID NO: 41249 - DNA, 518 bp, Zea mays
  Peptide Sequence Number=SeqID_83028
ctgaaaaaagggatcatttgcatgactcagcggcaccccagaacaaacgtggaacaccacgaatcaaatactttgataggaatattattcaagccctgacaagagctgacaagggcaagatacgcaaaggagaagaagcatttggacattgctcgcataagaccaggaccaacacttttgatgttcctcgtcctgacccatctggacaacactcaattcacatcgaactcccgctcatcagggatttgatatcaagcaagctgaatcagcttccatcccgccaccgcctgggtttcatagagaagctgtcacattttgatgcggaggttggtaaggcgtgttcagttattaaacagactcttcagcagattgtcgagaaacaatacaatctatctgatgtttttggcgagttaattgatgaggtcctccgtgccgaggcgggtgacaacgaagatgcttatgatgtgcagaaaaccacatcaaaatcagatgatattcttccccagacagctggttag

SEQ ID NO: 41250 - DNA, 2283 bp, Zea mays
  Peptide Sequence Number=SeqID_83029
atgaagaacgtagaccgacctccttccaatccaaaacggatcataatccagtctactcaggagtgcttcagcgttgacataccccgtgctccggcggggactgttagacccgaaacaaggcatgctgctaatgaggatgatgactttatgccattatccaagaagcgtaacttggacgacaaccctgggaaagttttgaagaagatacagcaacaagcaattgcacgtaggggattttctagtattcttgatatgagactggacgcacttggcagcagatcacacttagcttggctgatggaaaagctcgaccacaatgacatgacaattcgagctggccctggaaaggagctgaaaattacaaaggatacggtgcacctaattttggggttaccgaatgctgggggaggaactgcattgggcatcgatgaagctgttgctgccaacaatttaagagctgaacttgatctatcgaaagaagaatttggggttacagctcttcaagatcgtcgtttgaggaaaggttctgacgatgatttaagcatcagatgctttttcttgatattgttcaatagattgttgttccctactgtcagctggggaataacaaaccatgaggttcttttaaccgaggagatggatcgtttccaccagatggactggtgccagcttattttcaatgatttatgccaagctgccaagaagtggcataataggagcgttacgaacgtttctacaaccacctatggatgttccatcgttattcttctgtattatttggatcatttgcatgactcagcggcaccccagaacaaacgtggaacaccacgaatcaaatactttgataggaatattattcaagccctgacaagagctgacaagggcaagatacgcaaaggagaagaagcatttggacattgctcgcataagaccaggaccaacacttttgatgttcctcgtcctgacccatctggacaacactcaattcacatcgaactcccgctcatcagggatttgatatcaagcaagctgaatcagcttccatcccgccaccgcctgggtttcatagagaagttgtcacattttgatgcggaggttggtaaggcgtgttcagttattaaacagactcttcagcagattgttgagaaacaatacaatctatctgatgtttttggcgagttaattgatgaggtcctccgtgccgaggcgggtgacaacgaagatgcttatgatgtgcagaaaaccacatcaaaatcagatgatattcgtccccagacagctgaaggatgtacgtgtccggccaccctaactgtacccgatatgtctactccagtttctcagcaggatactcagtttacagacacacaggtttatgttgaaaccgatcaagctacaaacactccacaggttggccaggcttctcttgattcggagatgcaaactgtgttagctctacgcgaatatttgtgtggtctgcaatctgacaccggcaggaccataatagattatggtgaatattcagcgacatgttctgacatatataaatcttttgccgatgggaagtgtctcgacaatgtattcatgcagtgtttcacccaatgtgtaattgatgatgcaaaaaatcagcagacttccatgagttcgaacagtttgattcttgatgttaatattgggtcactactcaactttgaggaacacgaacgacacagtcgcaaccctcaaccttttgatgaatctgtactccacacacttctagacaattcattgcctgagatagatgaattggaccaatgcaaagcgatcatggtccccatggtaagcagggggcattggacattatatgttgtcaacaaggtcaagaagtgcattcatattttagattccaacccatatggaccaacacttggtggaactacatggaaggactatcattttgcacatttgggctcaggtggtagaaagttaccatgggctaaggttattatgagcagattaaacaaagcaatacaacatgtacgacccagtacatgctttcccaagtttggtaacttcacaattgacttgtgcccaaattgtcctaacatggcagctggatccaatgactgtgggttttatgtcatgggttacattctattttatcaatgcgacgaaggatttttgcggtcagacatagaagcaggcaacaccagtgagatacggtctcttgcgctgcattatatcacattccacccgaagaacaaagcattatcgctgctccaagacatccaaagattcaaggtctaa

SEQ ID NO: 41251 - DNA, 285 bp, Zea mays
  Peptide Sequence Number=SeqID_83030
atggctcttcaatcgggctccaatgttcggagattgaaggagcgcagctggattggagcggcagaaatcgactggcaaatcgcctcggacgcaggggaagtcacctcggccgtaggggttacggggtttccaggggaagtcgcctcggccgcaggggttacggggtttccttcctattcggcagttgtagaagctgtaatcccggactcgcgtgggtttctctctgttgattgcgcgaagacggttttggaaaccgagaaacgggggggacgtgggctgggctga

SEQ ID NO: 41252 - DNA, 672 bp, Zea mays
  Peptide Sequence Number=SeqID_83031
atgcttatttgggttgaaccagacctggtcaacagtttccagtcacggcgccgttacaccgtttcccacgtcagtcccagccacgtatcccttgtttcccggtttctaaaaccgtctttgcgcaatcagcccagggaaacccgcgtcgataggaaggaaaccccagtgaccgcgtcgtccttccttgcgtctgaggcgactcgccagcgatttccgccgctccaatccagcgccgctccaatccagctgagctccttcaatctccgagcattggagcccgattcaagagccaatgctttcctagaagttccagatgtttatgaaagatttattcagtgtttaatcatgagatctgttgatcgccctccaagtaatccaaaaagattaaccattgagtccagtcaggaggttttttccattgacatttccagacgtacaagatctagcagctcagctcatcaagatgataatccacataatcagaagcagaatgagccacaaccaacaccagttcatcgttttcgcagaaaggctttagcttgtcatgtaaaaagaaaacctcctgctccatccacactgtccgacgacgatttcatggatgctccatcgttgaagcgccaattcagatcaacctcaccttcccctacagaaaaaacagtgcaaagaagataa

SEQ ID NO: 41253 - DNA, 1158 bp, Zea mays
  Peptide Sequence Number=SeqID_83032
atgtcccgcaactgtcctgtctttgtgaagtgtgaccgaggctccgcgagcaaagataaaataacatcaaatgcagagccagcagaggcaaagttacagcaggagtcaaggctgaaggacgagagcaaggaaacgacggacaatagcaaggagacgagcacggcaacagaagagtggctacaactgtggtgcacaaccaacggcagaagacctgcgatccttgtggtgcacaatctgtgcggcctctttacgctgcagttgctggcgtgcagcccgctgcagtggcgcgcggtgcacgtgcagcgcctcagcacgctctccacgctgtggggcgactatgtgcaggagatgctcgagaacatatttgattgtctctactgcgtgttcagagtcctggagaataaggagagtttgatgtatgaggaagacaaaggaaatgattcagatgttggtgatatacatgttttagtgagggaaggagcaactgatggcaacgtgcagttggtgatactgggagatggtgttccagtctggattccaccttggccatcctttagtggtgatattcagcaactcgagttgatggtgcttagtgagtcagaattctctcccactctcctcattgatcgcttgagtcctcagttttcgggagtacagacagtgggacaacctctaatggtgaaagtagcaaatggtcaagtatttcagtatacttgttctatacctgaagccacttggagcatgtcagactcgttctctataggagcagttgtcggacttctcttgatttcagaagaacaccaagtgaagagctctgtggatcagttgcaagctattgaagaattttgtgatcgcctggctgaggaagcgcagacagaggtggtgcccgagctttctaaatatctattgatggcgatctctgctgctgcctggactgattatgatgcagtgactacccttttccccaagggccaacttccgcaacatgaactcttgacgatggccaatggacgaacacttccatgtcgatatcagttagcggtagcagtctggagtcggtctggataccagttttctgccaagtttaatcctcttactctgacatcgtttgcagtggatgagcttggtttggaagtgttttggaaaaaggaactgtag

SEQ ID NO: 41254 - DNA, 1071 bp, Zea mays
  Peptide Sequence Number=SeqID_83033
gcaaagttacagcaggagtcaaggctgaaggacgagagcaaggaaacgacggacaatagcaaggagacgagcacggcaacagaagagtggctacaactgtggtgcacaaccaacggcagaagacctgcgatccttgtggtgcacaatctgtgcggcctctttacgctgcagttgctggcgtgcagcccgctgcagtggcgcgcggtgcacgtgcagcgcctcagcacgctctccacgctgtggggcgactatgtgcaggagatgctcgagaacatatttgattgtctctactgcgtgttcagagtcctggagaataaggagagtttgatgtatgaggaagacaaaggaaatgattcagatgttggtgatatacatgttttagtgagggaaggagcaactgatggcaacgtgcagttggtgatactgggagatggtgttccagtctggattccaccttggccatcctttagtggtgatattcagcaactcgagttgatggtgcttagtgagtcagaattctctcccactctcctcattgatcgcttgagtcctcagttttcgggagtacagacagtgggacaacctctaatggtgaaagtagcaaatggtcaagtatttcagtatacttgttctatacctgaagccacttggagcatgtcagactcgttctctataggagcagttgtcggacttctcttgatttcagaagaacaccaagtgaagagctctgtggatcagttgcaagctattgaagaattttgtgatcgcctggctgaggaagcgcagacagaggtggtgcccgagctttctaaatatctattgatggcgatctctgctgctgcctggactgattatgatgcagtgactacccttttccccaagggccaacttccgcaacatgaactcttgacgatggccaatggacgaacacttccatgtcgatatcagttagcggtagcagtctggagtcggtctggataccagttttctgccaagtttaatcctcttactctgacatcgtttgcagtggatgagcttggtttggaagtgttttggaaaaaggaactgtag

SEQ ID NO: 41255 - DNA, 867 bp, Zea mays
  Peptide Sequence Number=SeqID_83034
atgttccaccgctacaaggagaagacagagaaggaactccaagcagcggtgcggcttcagacggcagcgcgagggttcctggcacgccgccaggtacagtcccttcgtggggagaagcaccttgctgtggcctccagggccaccccatggccgtcatcacatgagcaggccgtggtgcgcctgcaagccgcagtgcgcggcttccttgttaggcgggcggtgcggaagctgcacttgctgatcagctcatcgctgcaccaactcgcagcctgcgtgcccaaccaccaggtctcatctatactttttgaaccccctgcagaagtagagatctgggtatgcagcccccctgcacggccaaagagggtcgtctccttcattcgggcacctgccttggtgttggacagacccaacataagaacgggctggttcctcctccacctttcatccaacgtcaaggccgcaattcagctctttccttgggatccaggaggacaggaggacatagctgcagttcaaatttatattttagttccacaattattttatattttcgtcttaaataataaagctcgaggacaagctggtcctcaagggagggggagatgtcatgggcatcatagggagcggtcactcatgtggggtcgcacttatgtgcgccaaaagcgagaggccgcagggggcgctggcagcagcgcgcgcaaggaaggcacgggcgctggcagcagcgcacgcaaggaaggcatggcaaaggaaagcgcgcacaaggaaggcatggcaaaggaaggcatggcaaaggaaagcgcgcacaaggaaggcatggcaaaggaaagcgcgtgcaaggaaggcatggcaaaggaaggtgactga

SEQ ID NO: 41256 - DNA, 840 bp, Zea mays
  Peptide Sequence Number=SeqID_83035
atggggtggccctggaggccacaacaaggtgcttctccccacgaagggactgtacctggcggcgtgccaggaaccctcgcgctaccgtctgaagccgcaccgctgcttggagttccttctctgtcttctccttgtagcggtggaacatcacaacgaactgatcccactgctctacgaaacggccaaaactctcttcgagccgaggggcaggcagagaaggaatttagagttgaagttgaagccatcggccatgttcggcataagaatctggtccgccttctgggatactgcgtggaagggatacataggatgcttgtctatgaatatgtcaataatggcaacctagaacaatggcttcatggcatgaatcaacacggtgtccttagttgggaaaatcgtatgaaaattctccttggcactgcaaaagcgtatgtagcacctgaatatgcaaacagtgggatgctaaatgaaaagagtgatatttacagtttcggagtggtgctgttagaatgtgcgaccgctagggatccagtcgattactctaagcctgcagatgaggtgaatctcatagagtggcttaaaatgatggtcaccagtaagagggcagaggaggtagtggatccaaacctcaatgttaagccaccaaaacgtgccctcaagcggacaatcctggttggtttcaagtgtgtcgatcctgacgctgacaagaggccaaagatgagtcacgttgtccagatgcttgaagcagttcagaatgcatatcatgaagatcaaagcaagctcagccaggtgggatcacagcagtcgctagaggagacctcaaacagcgctgatgcctga

SEQ ID NO: 41257 - DNA, 243 bp, Zea mays
  Peptide Sequence Number=SeqID_83036
atggggtccaggcacagtgcttgctctgccgaggctgagtgccgaggttctttcgttttgcttttgttagtcaccctcctgcggggagagagatacttgatcagagatggttggttcacaggtggtgacaaggatgatggtttgactatggtaatgattaccgaccaacaattcgttgccgcagatattaccaaccaacaatccattgcattcatacaaatagataattataaggacacttaa

SEQ ID NO: 41258 - DNA, 249 bp, Zea mays
  Peptide Sequence Number=SeqID_83037
atggggtccaggcacagtgcttgctctgccgaggctgagtgccgaggttctttcgttttgtttttgttagtcaccctcctgcggggagagagatacttgatcagagatggttggtttacaggtggtgacaaggatgatggtttttttattatgattataggaatggttgcctttggtgcaatctatgctcagatgccccttgaccataatcttcttgtcttttgggattctttcctcttccatcattaa

SEQ ID NO: 41259 - DNA, 729 bp, Zea mays
  Peptide Sequence Number=SeqID_83038
atggatcccagttgcatctatctgatcaattctaggttggcttttggctatgcctatcctgcctatgaatgctacaagactgttgaactgaacaaaccagagattgcgcagctcatattttggtgtcagtattggaaaggcgtttcaataagttatgcggtcgcaatattgacttccgtgaacaatctgccaaatttaggtttgtttcctgtgtctaggattttagttgccctattgacagttttggagagattcggagatttcataatatcatggttaccgttttactcgaaagcaaagtcggtgttctttgtatacttgtggtaccctaagacaaaggagactaaacccgttcaatcttcacccaagatcaagtgtcaaacactagcgagatctggttcagtggcatccacaaagcctctggtagctgcatccgcaccaaaacctggtggtagcccaaagaaaggcgaggtcaaacctactgccgacctagttcaaactccaaccacatgtgctgattcaccgaaacccgagcctagcgccccatcactccctggagccgaaggggtggacaagatggccatcaatgaggccagtggtgatgccctagagggcgcagaagagcttgaccctgcgctcgaagaggagacgccgatggaggagacgatctgtgtgacgcgcgccaagctaaggaggcgcacagccaccgaagttcctgctgggaattag

SEQ ID NO: 41260 - DNA, 483 bp, Zea mays
  Peptide Sequence Number=SeqID_83039
atggaggccaccacgctgacggcgctgctcaaggaggcggtcgccgccttctcgacccgccgcgcagttgccgtaccgagcaggctagagctcacgcacgtcgtcctcgacgctctcatcgacgcggtggccgcacgactcgccgccgacgccgtatttctcctgggccacgtcgtcgcgctctccttccccaacaccatcgaggagtcgggacctgacgcgcgtgcatggaaggggatcgaggaatccgcgttgtcgtccctctcgttcggcccattatcaagcagcggcggcatcacggtcgtgacgtcgaaggcggacgcggtgacgatgcggatggtgtcccacaggggtgtcgtgcaggtggtgctcgtgtcggccatcgcctgggtcatgctcgggcttgtcgctctcgccttccacctccggccatgcatctcccctgtcgccttcctctcaggacagccccgctgctgcccatag

SEQ ID NO: 41261 - DNA, 333 bp, Zea mays
  Peptide Sequence Number=SeqID_83040
atggcgacgatggaggccaccacgctgacggcgctgctcaaggaggcggtcgccgccttctcgacccgccgcgcagttgccgtaccgagcaggctagagctcacgcacgtcgtcctcgacgctctcatcgacgcggtggccgcacgactcgccgccgacgccgtatttctcctgggccacgtcgtcgcgctctccttccccaacaccatcgaggtggtgctcgtgtcggccatcgcctgggtcatgctcgggcttgtcgctctcgccttccacctccggccatgcatctcccctgtcgccttcctctcaggacagccccgctgctgcccatag

SEQ ID NO: 41262 - DNA, 681 bp, Zea mays
  Peptide Sequence Number=SeqID_83041
atggcgagagtagcgtgtaccctccgtggaaagaggctggacggtggtgtatctgtgctcttggttggcgtgaacctgatctgttttcccccttatggagatatgcctccacgcacgaggaaaaccgcgcgtaagtccactggaccgattggcgtatctcagcaccagctggctccaaggcatgaggagagcagcaacggtagtaatgaccccattagagacctagaagcccaggtggagcagcttcgaacggagttacgtcatagaaacggggtgtgggtagaagatggtcagcgtataaatgagttaagagctgacgtccgacatctgcaagacgagcttgctgaacgggatttggcaatctattgggctgtcaactcacgttccattgcttgggaccgggaatccaaagctcgagcccgtgtggaggagcttagcatggtcgttgacaacttgcaggtgtactacaatacattacatgaggaagttcatgaattgtattcgcgactgcaccctgacgtatctgccgaccctactggaatgggagccggaccttctggaacagcaggtgaagcacttggtggggaattggaccttttcaagcccccttcttctatgaacctggctgacgaacgatcccctacaactgacagtgaagcaactaaagatgataaatactaa

SEQ ID NO: 41263 - DNA, 579 bp, Zea mays
  Peptide Sequence Number=SeqID_83042
atgcctccacgcacgaggaaaaccgcgcgtaagtccactggaccgattggcgtatctcagcaccagctggctccaaggcatgaggagagcagcaacggtagtaatgaccccattagagacctagaagcccaggtggagcagcttcgaacggagttacgtcatagaaacggggtgtgggtagaagatggtcagcgtataaatgagttaagagctgacgtccgacatctgcaagacgagcttgctgaacgggatttggcaatctattgggctgtcaactcacgttccattgcttgggaccgggaatccaaagctcgagcccgtgtggaggagcttagcatggtcgttgacaacttgcaggtgtactacaatacattacatgaggaagttcatgaattgtattcgcgactgcaccctgacgtatctgccgaccctactggaatgggagccggaccttctggaacagcaggtgaagcacttggtggggaattggaccttttcaagcccccttcttctatgaacctggctgacgaacgatcccctacaactgacagtgaagcaactaaagatgataaatactaa

SEQ ID NO: 41264 - DNA, 582 bp, Zea mays
  Peptide Sequence Number=SeqID_83043
atgtcgatcgcaaagagggccatacctgaggctacatcaatcgaagaggccaaccaaatcgtccgcggcaactggctgaatgtaattgaggagcatcatctgaagtacttggggagctctcaggtaaatgacatcctggacattggctgctctgttggagtaagcaccagatacctcgtcgagaagttcccatcagctcaagctgttgggctcgacctatcaccgtactttcttgctgtggaggcacaaaaggaagaaaaactgtcacggccaaagcctattcgctgggttcatgccaatggtgaagcgaccgggctgtcttcagattcatttgaccttgtctcccttgcttatgtgcatgttgtatttgaagagcaatttggcagtgggagattgttggcctacatttctgctcgtcctgggcagtgtggccgagctgatggctacatccttgagggtaaagagctcgagttctacatgaagaagctccagaggaccggggacgccgaggaccggggagacgacgaggtttcggggctgcgtgtggcggccgaggcgtgggcgacatttcggaggcagtga

SEQ ID NO: 41265 - DNA, 209 bp, Zea mays
  Peptide Sequence Number=SeqID_83044
gtgatgatgaggatgatggttatgattatgcttatggtaatgggctgcgtgtggcggccgaggcgtgggcgacatttcggaggcagcgaggcttgcgcgagggggcgagagggagggaggcagaaccacggcgtaaggagaggatccaggtgtacaatgggggtgtagcagagtgctacgtgtctagcgggggagagctagcgccctaa

SEQ ID NO: 41266 - DNA, 231 bp, Zea mays
  Peptide Sequence Number=SeqID_83045
atggctctcacggagataatggtatcgaagaatgaagtggaagttgcagacgaagataaacaagcacaaccagaatacctctcgtacaatataagaattgcagtcacttcacaccgtcgaatgagtttgtatggccctgtgatcatatctatgagttcactaaagacgggcacaaaaaattcacttgatctcatgcaaaatctccttgaagcaacatgtcccatcaactga

SEQ ID NO: 41267 - DNA, 1119 bp, Zea mays
  Peptide Sequence Number=SeqID_83046
atggatcgcagcaagatcgggatctggcgcgtggttgcaggcggccaggcgggggaggaaaggcagtcgggtgctcttctcctgttacagcatggatcgtttcgtgcgcggtcgggtctggcgatattaaaaagaccaataattggaccaggcaacagaaccatagatatgatcacagggccatacaaactcattcgacggtgtgaagtgactgcaattcttatattgtacgggctaccaaggctgctaactggctcgattctagctcatgagatggtgcatgcttacctccgacttacaggttctggtagcatggcaacaacctcagatgcgtcgtcgtcatcttctacatcttcctcaatgaaaaagggtgcaaagacggaattcgaaaaaagacttggcgagttcttcaagcaccaaatcgaaacagattcttctgtggcttatggagatgggtttcgagcactacacgttgcattagatatccttgggagtactaaatggagggtgaatagaagagttcatgatgttgttgagactatctggagtcaaggtggagacattgcagggctggtggacgaggcaaatgttgctcgtaaaatgagagaggaggatggattttattaccctcacaatttagatttccgtgggcgtgcatgccctatgcatcctcatttgtgtcacctaggttcatatctttgtcggggtgttctagagtatgctgaagggcggccactaggaaagtatgggttgtgctggttgaagatacacttggctaacaaatatggtggtggcattgaaaagctttctcacgagggcaagctagcttttgtggagaaccaactgtttgatatatttgattcagcagcaaatcctgttgatgggaactgctggtggacgaatgccgaggatccctttcagtgtttagctgcatgcatggacctttctgatgccttaagaagtccatcaccttaccatgctgtctctcacctgcctattcatcaggatggttcatgcaatgggttacaacattatgccgctcttggaagggactatttttgcactatagactgcattgtttatagagtgaagtttgaaataggagatgaggatgagtaa

SEQ ID NO: 41268 - DNA, 222 bp, Zea mays
  Peptide Sequence Number=SeqID_83047
atgacaagggtggcccacctgtcggcaccaccaccaggcggctggacgggccgcatggttacaaactgggtgttacaatatgccatacaaaccatccatttcacattacttaaaaaggcggcggatgtcgcttctcaattcattgatcctctcgccatccgcgacccatatgttattcctacgatggagttctgtttgaaggtgattcacctgagcctctag

SEQ ID NO: 41269 - DNA, 906 bp, Zea mays
  Peptide Sequence Number=SeqID_83048
atgccgctgcgcacgaggaagactacgcgtaagcatactggcccaatcggtgtgccacgtcaccaacttgccccaagacatgaagatagcaggagcagtagtaatgatctgatcggggaactggaagcacaagttaatcagcttcgaacagaactccgacgtaggaataacatatgggtcgcggatggcgaaggaatcaatgaattgagaagcgacatctgtcgcctgcaagatcagctcgctgatcgagatctagcgctcgactgggcggttctttctcgttcgctgtcttgggctaaggaagcaaaagctcgagcccgagtagaagagcttagctcggctattgataacttgcaggcttattgtaatactctacatgaagaagtccatgtattgtattctcaactgcacccccatgtacctgcggatcctgtcgggacagaagtcggaccttcttatgtagcgggagaagcttttggtggcgaactggacctttttaggcctcctccctctatgaagttggtcgatgagtggtctcctatgcccgacagcgaggctaccaagagtgacaggaagcaggaatacattacctttctaagtaatgatgcagccggtacctctagtgggaggaaggcaaccccgaacccaccaccagtacctccaatgcttgccgaggccatcgatgccttggtaaatgccacagcagataacacacgcttcctgcgggagatggcaggccaacaactccaacaacaaggcgggcgggcctatcagcaaggtccccgtgagacatcttacttggatttctctgagacgcggcctctagtatttgtcaaagcagaagatcccttagaagcggatgaatggatccgcgtcattgaacaaaaatttgggctgctccagtga

SEQ ID NO: 41270 - DNA, 1497 bp, Zea mays
  Peptide Sequence Number=SeqID_83049
atgccgccgccgtccgcaaacggcgccaccgccgccgccgccgccgcgagggacgacatgtccccggcggaggccaggctggcgatgatggagctggcgaacatggtgtcggtgccgatggcgctggcggccgtgatccggctgggcgtgccggccgcggtgtgggcgggcggcgccaacgcgcccatgtcagcggccgacctcctcccgccgggccacccggacccgtccgtcctggagcggctgctccgcctgctggcgtcccgcggcgttttctccgagtccaccgagtccacgcccaccacgcggcggcggctattcgcgctcaccgcggtgggccgcaccctggtgccggggcccgcctcgggcgcgtcctacgccgactacgtgctgcagcaccaccaggacgcgctggtggcggcgtggccccgcctgcacgaggccgtgcttgaccccgcggggcccgagccgttcgcgcgcgccaacgccggggtcaccgcctacgcctactacggcaaggaccaggacgccaaccgggtcatgctccgcgccatggcgggggtatccgagcccttcatgggtgccctcctcgacggctacggcgccgccggcgggtttcgcggcgtcgccacgctcgtagacgtcgggggaagctccggcgcctgcctcgagatgatcatgcgcagggtccccacaatcaccgagggcatcaacttcgacctccccgacgtcgtcgccgcagcgccgcccatcgccggagtgaggcatgttggcggagatatgttcaagtccatcccctccggtgatgccattttcatgaagtgggttctgacgacgtggaccgacgacgagtgcacggccatcctgaggaactgccacgccgctctgccggacggcggcaagctcgtggcctgcgagccggtggtgccggaggagacggacagcagcaccaggacgagggcgctgctggagaacgacatcttcgtcatgaccacctaccggacgcaggggagggagcgctccgaggaggagttccgccacctcggcgtcgacgccgcaggcttcaccgccttccgagccatctatctcgaccccttctatgctgtcctcgagtataccaagatgggcatacctcatcgttcttctgagctgcaggcttgtatggacatgcaggtgggactctttcaggtctccgatgcacatgtaaatctacgaggctatgcccagttagaaagcacgccgccgtcggaattgctgcttcacaaagcagggactttacctctactcacttctatgatatacgagggttgtgatcaatataagcattcgctccccctgacgatgacatctgtcaaagtcgttatccctcataactcaagcatattcttcaagcacaatgatattgcgcgcattgctaggaacttcatcatcaagatgaacctcttcgtgaggcaaatcaccagcagggcgagttcatcggaggagagttatttatag

SEQ ID NO: 41271 - DNA, 169 bp, Zea mays
  Peptide Sequence Number=SeqID_83050
cacaatgatattgcgcgcattgctaggaacttcatcatcaagatgaacctcttcgtgaggcaaatcaccagcagggcgagttcatcggaggagagttattacagaccacgcgtccccgagaatagatcaaatgccaataagtcaaatgtggatatgatattaatcccgg

SEQ ID NO: 41272 - DNA, 348 bp, Zea mays
  Peptide Sequence Number=SeqID_83051
atgaacctcttcgtgaggcaaatcaccagcagggcgagttcatcggaggagagttattacagaccacgcgtccccgagaatagatcaaatgccaataagtcaaatgtggatatgatattaatcccgggtatatccacatctacatcaggtagaagcattcaaaccaatatgaatattgaggcattacactatatgggcattcctccccctaatgctgagatgttccaaaagcatacagataaaatccccaaccacaatcatccagttgtggccaatgggctcatgaataccattcgtcatttggagccattagttgacttcagatcaaaaatgaccatcagggtctaa

SEQ ID NO: 41273 - DNA, 566 bp, Zea mays
  Peptide Sequence Number=SeqID_83052
atgaacctcttcgtgaggcaaatcaccagcagggcgagttcatcggaggagagttattacagaccacgcgtccccgagaatagatcaaatgtcaataagtcaaatgtggatattatattaatcccggtgggctatgcaagaccagtttctgcccggctgctgcgcgagcacgcggagaagcggtctaccgaggttgcaagaccagttcaccgttctttgcatgcacgagatcacacatactcgtgcaaggaccaagggctgcatctactcaaagcggtccaagcggcgcagcccctcatggcatgcgtgagcgcccagcggtcaaaggaagtgacccattcttttctcctggaaaaaccagatctagccacgtctccacacgctaggacgcgggccaactcaccgcccaccccgcccacgagtggcccgacgcaggcgcttcgagcacagcgcgggcgtgacctccagcggtgcggggagtccgagtcgatctctactggagatggtggagcgatggcgagatctccaacgggacaagcaggagagtggggagccagggagacaga

SEQ ID NO: 41274 - DNA, 312 bp, Zea mays
  Peptide Sequence Number=SeqID_83053
atggcaacattaacaaatgaatcatctgaaatcttgagaagacggcaatatgcattattactgagttatttgcagtattgtagcagcattctggactctgatgtccctccatctgttctttggttcttgctactggaggagcaagatggtgatgatgaggacatcactcttcaaaaggttctcaaggagcacaatgaattagcacatgccaacatttccatcataaggaaggaagctcaagctatcgttgatttggttgaagttacagatactgctcttcttgctctcattgaaaactttacaccactgtaa

SEQ ID NO: 41275 - DNA, 432 bp, Zea mays
  Peptide Sequence Number=SeqID_83054
atggagatcattgctatagctggttatataactgatgcgaagatgcatattgctcgagactatctagaaaagaatacaagacaggcttgtggcattaaggctgatcagttagataacttgaggtggaggccaagaaagaggagtagaagatctggctcaagaaagcagtcagatacaagcagtggaagcagcagcggggacatggacttgtccagccctggccctagtgggttttgtcaacttaatttagtgcccgacgaggagacatgcaagagcagtggagagcagccttttatgggcgtgcctgtgcagtctcgtagcagtgtcatgacgttcataaagttatcctctactgatcttcaattaaaatgtcaggttgaagttaaagagactgctcttcttgctctcattgaaaactttacaccactgtaa

SEQ ID NO: 41276 - DNA, 210 bp, Zea mays
  Peptide Sequence Number=SeqID_83055
atggagatcattgctatagctgggtatataactgatgagaagatgcatattgctcgggactatctagagaagaatacaagacaggcttgtggcattaagactgatcagatagctctgcagcttgttcgccaaagagtatcgaatgagccagaccatgagtctgtcagtgccactgtaactgaggaatctggtagtggtgaattttattga

SEQ ID NO: 41277 - DNA, 630 bp, Zea mays
  Peptide Sequence Number=SeqID_83056
atgtactaccacaccaggccagaggatagatttgatgcacatgcagccatcggcgatgatgaagcacgtgccttgatgatagtaacagctcttagatcctgtcagggaaccatttctgagcttgtacgtcattctaaggagttgatcaaccttgcagccgtggagttggaaaaaacaaagtctctacgagaacagatgatggagatcattgctatagctggttatataactgatgcgaagatgcatattgctcgagactatctagaaaagaatacaagacaggcttgtggcattaaggctgatcagttagataacttgaggtggaggccaagaaagaggagtagaagatctggctcaagaaagcagtcagatacaagcagtggaagcagcagcggggacatggacttgtccagccctggccctagtgggttttgtcaacttaatttagtgcccgacgaggagacatgcaagagcagtggagagcagccttttatgggcgtgcctgtgcagtctcgtagcagtgtcatgacgtacataaagttatcctctactgatcttcaattaaaatgtcaggttgaagttaaagagactgctcttcttgctctcattgaaaactttacaccactgtaa

SEQ ID NO: 41278 - DNA, 912 bp, Zea mays
  Peptide Sequence Number=SeqID_83057
atggaccgaaggtccatgacacctggtatcatctccaggttatcctcaccaccaccagccgcccatccctcaccaccaccagccgccgcgccatctgccgccgcaacgccctctcacccgccctctccaactccagatgcattcacgcggctcgaagagaagtgggatcaattcgttgtgatgttccaccgctacaaggagaagacagagaaggaactccaagcagcggtgcggcttcaggcggcagcgcgagggttcttggcacgtcgccaggtacagtcccttcgtggggagaagcaccttgctgtggcctccagggccaccccatggccgtcatcacatgagcaggctttggtgcgcctgcaagccgcagtgcgcggcttccttgttaggcgggcggtgcggaagctgcacttgctgatcagctcatcgctgcaccaactcgcagtctgcgcgcccaaccaccaggtctcgtctatactttttgaaccccctgcagaagtcgagatctgggtatgcagcccccctgcacggccaaagagggtcgtctccttcattcgggcaactgccttggtgctggacagacccaacataagaacgggctggttcctccttcacctttcatccaacgtgaagtccgcagttcagctctttccctgggatccaggaggacaggaggacatagctgcagttcaaatttatattttagttccacaattattttgtattttcgtcttaaataataaagatttgaataacagtgttggatcaaatatgatgcacccaaaatcaagtgaggaagaggaagagatgggagaacgaaacgcagcagtcccattcaagaatttaatccaagatcaatcacttctacaagtgcatacaatggcaagacttgaggcgtttaaatgttga

SEQ ID NO: 41279 - DNA, 996 bp, Zea mays
  Peptide Sequence Number=SeqID_83058
atgaaggagacgaccctctttggccgtgcaggggggctgcatacccagatctcgacttctgcagggggttcaaaaagtatagacgagacctggtggttgggcgcgcaggctgcgatttggtgcagcgatgagctgatcagcaagtgcagcttccgcaccgcccgcctaacaaggaagccgcgcactgcggcttgcaggcgcaccacagcctgctcatgtgatgacggccatggggtggccctggaggccacaacaagagttgttgagggcgggtgggagggcgttgcggcggcagatggcgcggcggctggtggtggtgagggatgggcggctggtggtggtgaggataacctggagctgataccaggtgtcatggaccttcgttccatggggatagctgtcttctccggcgaggaagagaagggaatttgcacccttattatagcaagtgccgggttttatttgaatgccacaaatgaaaagtggaaaaactggcgcatgtatgactacattgtgaaggaacttccaaaagttttaagtgataactttgaacaactcaacacgtcacaggcatcaatttttgggcactcaatgggagggcatggcgcgctgacaatttacttgaaaaacactgataaatacaagtcggtgtcagcatttgctccaattgccaatccgataaactgcccttggggtcagaaagcattctcaaattacctgggctcaactaaatcagattgggaggaatatgacgcaacctgcctgattaaaaagaacagcaaagttcccactactatcctaattgaccagggggaggccgacaagttcctggctgagcagcagttgctacctcacaagttcgaggaggcgtgcaaggccgcaggggctgctctgaccttgcgcatgcagcctggatatgaccactcgtactatttcatcgctacgttcgtggacgatcacattgcgcaccatgctcagtttctcaagagcgcctga

SEQ ID NO: 41280 - DNA, 2087 bp, Zea mays
  Peptide Sequence Number=SeqID_83059
atggggacatgtgcggcccccgggggaaggatgtcttcgcccgagctccgggagtcttcggcgcgaatgctggaggttaccgggggtcgatggccaaagaatcttccgatcccctgggcggagggcgaagacatgtctacgtctcgtatagctcgtggcttgaggattttcccttacggacagaatattgctgctgttgtgtcggcagtgatgaacaaggaccatcaagacgctgcgcaaaagcgccgggcggttatcaggatcgccgaacctaggcgtgaggcgaagaaagcgcgggggagcgtgaaggctgctgcccccagcagtagcaagccgacgacggctgcgaaaccggccgcgcccggatccagcaaggcatcggcgagcgcgaagactgccgttgctggtggaaccaagcctcccccttgcgaagctgcgaaaggatgggagctgcccttcgccggggaaactgtcggcgaggggcaattggttgttgtcccacctgcggtggcaaccacggcgtcaacggcggtggttggggtgaagggtgcctcacgggacccgtgggccactttctgcgcgagcggcgagattccgtcagccgctgccgccaaggacgtggcaggctccatgtcctggctgtcgcaacagctgagggaggtgtcacagcagctaagtcaagcggccgagttcgccgaccgcgtggcgtcgggtgccctgactgcagatgtggctgccgaagtcgagagacttcaggcgcagcacgcggatgccgtccgagagaagtcggctgcggagagcaaaaaccgcaggctggcggagaaagtggccgccttggaggccgacaagacggacctccggcgccagctggctgcgcaggcggaggctaaagtggcgcgggcggagggaagtctcgccagcaaacgcgccgaggagtgggaggcaaggttcaacgccctgcgcggccgcatggacaaggccgaggcctctacgcgctcggaggttgagcggacgctcgcacagctcgtggactcataccgcgagctgggtgcacggactgctgacttcgaagtgccagtccgggaggcggaccttcacttcctcgaatggttgcaggaggagttgctggtgctcccgaccattgtggagggtttcatgtccttcgcctccctcgtcacctgcgagggggccatgaatgcgttgtcccgcgagggctacaggcactacgaggtcttcgaccaatcagacgagaactttgaatgtgagatcttcaaggccgaagaccctgttgtgaagcagtcagcgggggcactttttgataggatgtggggggcgcatggtcgggaggcgatggagcgtgccgaggacgtcgatgaccttggagatctggccggcgcgccacccgaggccgcagaggtcaatccggtgctgccctcggatgccggtgaaggcccctcggctgtgcccgtgcctactgtggccggcaaagaccctgtgtcggcccctgcgccgacggtcgaggatgccctgaaggtggtggctgagccggcagtcgaagaccccacggccgccgccgggccttcgcagggttttgggcctgcgcacgcaaccgctactgacaatgctaattttgtggcggcttcgaccttggttgctgaagatgattctgatgattccgtgtctaagttttttgagtctgatgattctgggagctcggttgtgtggacggaagagttctcggatgaggacttggattattttgcggcattggatgtggctgcggcggaggcttctccgcgtgtgatgggtgctgaagctcttcctggtgcgagtgctgggcgtaggcggcgaagggcggtggcgaaacggagagtgagtgaggtgtcgcgaagtgataggcgtcattgtggtgaggtggagggtggtcgtcttcgtgtggacggggctggcaaacgagaattgttgtcctcgccggctggggcgagtttaggtgagggggagctgcgaaatctttttgagggtgaggagctgaggatgatgctgttcaactacaaggagatgggtatcatcccgaaggttgaaccaat

SEQ ID NO: 41281 - DNA, 1614 bp, Zea mays
  Peptide Sequence Number=SeqID_83060
tgtcggcgagggcaattggttgttgtcccactgcggtggcaaccacggcgtcacggcggtggttggggtgaagggtgcctcacgggacccgtgggccactttctgcgcgagcggcgagattccgtcagccgctgccgccaaggacgtggcaggctccatgtcctggctgtcgcaacagctgagggaggtgtcacagcagctaagtcaagcggccgagttcgccgaccgcgtggcgtcgggtgccctgactgcagatgtggctgccgaagtcgagagacttcaggcgcagcacgcggatgccgtccgagagaagtcggctgcggagagcaaaaaccgcaggctggcggagaaagtggccgccttggaggccgacaagacggacctccggcgccagctggctgcgcaggcggaggctaaagtggcgcgggcggagggaagtctcgccagcaaacgcgccgaggagtgggaggcaaggttcaacgccctgcgcggccgcatggacaaggccgaggcctctacgcgctcggaggttgagcggacgctcgcacagctcgtggactcataccgcgagctgggtgcacggactgctgacttcgaagtgcccgtccgggaggcggaccttcacttcctcgaatggttgcaggaggagttgctggtgctcccgaccattgtggagggtttcatgtccttcgcctccctcgtcacctgcgagggggccatgaatgcgttgtcccgcgagggctacaggcactacgaggtcttcgaccaatcagacgagaactttgaatgtgagatcttcaaggccgaagaccctgttgtgaagcagtcagcgggggcactttttgataggatgtggggggcgcatggtcgggaggcgatggagcgtgccgaggacgtcgatgaccttggagatctggccggcgcgccacccgaggccgcagaggtcaatccggtgctgccctcggatgccggtgaaggcccctcggctgtgcccgtgcctactgtggccggcaaagaccctgtgtcggcccctgcgccgacggtcgaggatgccctgaaggtggtggctgagccggcagtcgaagaccccacggccgccgccgggccttcgcagggttttgggcctgcgcacgcaaccgctactgacaatgctaattttgtggcggcttcgaccttggttgctgaagatgattctgatgattccgtgtctaagttttttgagtctgatgattctgggagctcggttgtgtggacggaagagttctcggatgaggacttggattattttgcggcattggatgtggctgcggcggaggcttctccgcgtgtgatgggtgctgaagctcttcctggtgcgagtgctgggcgtaggcggcgaagggcggtggcgaaacggagagtgagtgaggtgtcgcgaagtgataggcgtcattgtggtgaggtggagggtggtcgtcttcgtgtggacggggctggcaaacgagaattgttgtcctcgccggctggggcgagtttaggtgagggggagctgcgaaatctttttgagggtgaggagctgaggatgatgctgttcaactacaaggagatgggtatcatcccgaaggttgaaccaat

SEQ ID NO: 41282 - DNA, 504 bp, Zea mays
  Peptide Sequence Number=SeqID_83061
atgcaggggcgtatgaaaaaagccgagtctgcccttgaccgtcctctcgccctgtgcagaggctcgggggctgctctcgcaaacccagctccggccaaaccgttgacagcgtcagcataccagcccgagaactcgggacctgaccatgcacccgggcaacgactagttcgcatgagggaacaaccagaccgggtgaggctgacagcagccaagtccagcctcgggcgccataggaatctccgcctcgcccgaccccagggctcgggctcaacctcgactcggaagacgatctccgcctcgcccgaccccagggctcagactcgacctcgacctccggacgatggtctccgcctcgcccgaccccagggctcggactcgacctcgacctccagacgacggtcttcgcctcgcccgaccccagggctcggactcaacctcgactccggacgacggtctccgcctcgcccgacccccgggctcgggctcaacctcgacctcggatga

SEQ ID NO: 41283 - DNA, 1140 bp, Zea mays
  Peptide Sequence Number=SeqID_83062
atgcaggcggcatgcgactacaccaagggggcgcaccctttcgacttcgacgcatccagtgtggaggcccaggcccacacgtcatgtaaccggcgcgccggttactacgtgcaaaaaactgcagtgccacctgcgccagcaccgcgccttctcgactatggaaccagtgccgcgactcgaggcaaccctgcacatggcccagcagtgccaaccaggcatgccagacacgagtcagtcagccgcgggagaaggcgcgacgggatcgggaaaggggatactccgaaagggatccttctccgcgaaggaagcgggccccgagcccctctactgatcagaggttcgaaggctggcccctcggaagggttcgagagccgcctcagagcactcgggctccgcgcccactactggtcagaggttcgaaggttggcccctcggaagggttcgacagccgcctcaggccactcgggctccgcgcccactactgatcaggggttcataggctggcccctcgacgggttcgacagtcgccccagagcacgcagagtgagggatgactctggggtgaggctgacagcagccaagtccagcctcgggcgccataggaatctccgcctcgccccgaccccagggctcgggctcaacctcgactcggaagacgatctccgcctcgcccgaccccagggctcagactcgacctcgacctccggacgatggtctccgcctcgcccgaccccagggctcggactcgacctcgacctccagacgacggtcttcgcctcgcccgaccccagggctcggactcaacctcgactccggacgacggtctccgcctcgcccgacccccgggctcgggctcaacctcgacctcggatgagccaccacctcactcgggccgaccacgccacaagggggggcatcattaccctacccctagctagcccaagctataaggaacaagaccggcgtcccatctggctcgccccggtaaaacaagtaatgatggcaccccgcgtgctccatgacaatggcggttctcagccccttacggaagcaaggagacgtcagcaaggatccgacagccccgacagctgtgcttctacagggctcaagtgctcctccgaaggccccgacaccacatga

SEQ ID NO: 41284 - DNA, 891 bp, Zea mays
  Peptide Sequence Number=SeqID_83063
atgtcttcgcactctcctcatgcatcgcgcccttccaccttccgagcccccggatggggagcgcccgcgttgctttcgtcttgtcgtcgttggaggaacgcaacttcgcggaagttggtacctttcagccatcgctcggcttcaaggattttcatcaggcggcccggctgcatcccctcgccgatggtcacccaagacggtgaccaccagtttgatggtggggagaagcaagccgggctgcgacctctgccccgccctcagcttcaaggatcttcatcatccttgctggggaggagggcgaggcgagccggagctctacctcccgcacgggtcggcgggccacctcttcttccagcttctgggggtggaaaccatcctccagctctacggaggaggcgccctccagccatgccggggaaggcgaactgttgctgcccagccagggtgcaacattacgtcctctgtcctcgtttttgtagagaggacgggagtgaggacctgccggtgcgctttggggcggccggcgctcgctggtgcggtgttggtggacaggtggacgccgccgttggtgctgaggtggtggcagatggagaaagcttctccgtcgacgagaccgtcagcgctacccgtggaccgacctccgactctttggctttaatgtctggttctcgtcccttgagtggggatgcgaacgagagccttccggcggcagcgtccatcccgggactatcgctgctaccgcagagatcgctagcgagtcgcccggagattgccgtcctgcaggctctccgatgtggaggttgttcatacccgcgggagtggaaccggagttccgtttgtaatggcaccttgagtgccggtgtcttgttcattgcggctgtcgaggtctga

SEQ ID NO: 41285 - DNA, 906 bp, Zea mays
  Peptide Sequence Number=SeqID_83064
atgtgggcgctccccattcgggggcttggaaggtggaagggcgcgatgcatgaggagagtgcgaagggcaggcgacacctttggcaggcgaggcgggcgatgcttcacctccgccataatgaccgcgtcaaaaaagggaccgggaaaggggatactccgaaagggatccttctctgcgaaggaagagggcctcgagccctgatcaggggttcgaaggctggcccctcggaagggttcgatagacgcctcagagcactcgggctccgcgcccactactggtcaaaggttcgaaggctggcccctcgaatgggttcgacagccgcctcaggccactcgggctccatgcccactactgatcaggggttcgaaggctggccccccaaagggtttgacagccgcctcagaacacgcagagcgagggatgactctgggtacgtccgatacatggccgaggctcgggctacgctcccgagaggctcgggggctgctctcgcaaacccggctccgaccaaaccgttgaaagcgtcaacataccagcccgagaactcggaacctgactatgcacccgggctacgaccagaaaacagcgccgcctgcgctgctccgactattatgccacccgccaaggtgaggctgacagccgccaagtccggcctcaggcgccataggaagctccgcctcgcccgaccccagggctcggactcaacctcgacctcgaacgacgatcttcgcctcgcccgaccccagggctcagactcaacctcgacctcggacgacggtctccgcctcgctcgacccccgggctcggactcaacctcgacctcggatggtctccgcctcgcccgaccccagggctcggactcaacctcgacctcggacgatggtctctgcctcgcccgaccctag

SEQ ID NO: 41286 - DNA, 801 bp, Zea mays
  Peptide Sequence Number=SeqID_83065
atgactctgggtacatccgatacatggccgaggctcgggcttcgctcccgaggtaccctaggacatttccgagacccgcaggagcgattctgtaacggaatcccatcaaagggaggcatcgagccctcggaccctatcaaatgggaccgggtccggcaaatcacctccagggctcgtactctacctcgactctggaagacggtctccgcctcgcccgaccccagggctcagactctacctcgactccggaagacggtctctgcctcgcccgaccccagggctcggactcagcctcgactccggaagacggtctccgcctcgtccgaccccagggctcggactctacctcaactccgaacgacggtctccgcctcgcccgaccccagggctcagactctacctcgactccggactacggtctccgcctcgcccgaccccagggctcggactctacctcgacctcggacgacggtctccgcctcgcccgaccccagggctcgggctcaacctcgacctcggaggagtcacctcctcgcccgacctcgggctcggaccgaccacgtcacaggggagcccatcattaccctacccttggctagctcaggctacggggaacaagaccggcgtcccatctggctcgccccggtaaaacaagtaatgatggcaccccgcgtgctccatgacgacgacagttctcagccccttacggaagcaaggagacgtcagcaaggaccagacagctccgacagctgtgctcctgcagggctcaggcgctcctccaacggccacgacatcacatga

SEQ ID NO: 41287 - DNA, 777 bp, Zea mays
  Peptide Sequence Number=SeqID_83066
atggggcagctgcagcccgcgtgctacggatggggcggagggcggtgtggggaacgcgggcagaggttggcgagggccggtggtgagcgcgtgtcgaggcgagggcgcgagaatggcggatcaacgcgatctcggggatcggcgggcgcggcggacgagattgatgaaggagcacgggggagaggtcgatcgacagtggagtgtggatttcgggaatcgcgtggatcacacagactgcctttcatggagatcgtgggcgagtcggggagcaaggaatactcactgatccccgtccaaaccttcagatctcctgccccccaacgaacagaacgggatcaaaagaaacagaaacacgggtatttgtacctggcggggccaatggctggcggagtcgggggcacgagggaagaggccggtggggtagagaaacgcgcacaagcagtcgagtgctacgccgaccactaccgccgcggcgatgcaggacccccgagacagcgggcgtggacaggtgggggggagggcgagggcgagggcggagccatcgatgccgcggcgagattagcgggggtggggggacgaagacggtgtcgcgtgcgtgacgtggtgattagcgggggaggagggtggagccgcgtggtgagggtggtggtggacgtcctccttggcctcttaagaaatagtaaagatagcagttgtttttcacaaccacagtctaaccaaacaaacactaagattatcttcagtggactgtgtaaaatagaagacgcagaactgtag

SEQ ID NO: 41288 - DNA, 423 bp, Zea mays
  Peptide Sequence Number=SeqID_83067
atggggcagctgcagcccgcgtgctacggatggggcggagggcggtgtggggaacgcgggcagaggttggcgagggccggtggtgagcgcgtgtcgaggcgagggcgcgagaatggcggatcaacgcgatctcggggatcggcgggcgcggcggacgagattgatgaaggagcacgggggagaggtcgatcgacagtggagtgtggatttcgggaatcgcgtggatcacacagactgcctttcatggagatcgtgggcgagtcggggagcaaggaatactcactgatccccgtccaaaccttcagatctcctgccccccaacgaacagaacgggatcaaaagaagcagaaacacgggtattgtacctggcggggccaatggctggcggagtcgggggcacgagggaagaggccggtggggtag

SEQ ID NO: 41289 - DNA, 159 bp, Zea mays
  Peptide Sequence Number=SeqID_83068
atggcgagagtagtgtgtaccctctatggcaagaggctggacggtggtgtatctgtgctctcggtgaggacgcagcaaatttttgttgcttttgttccaaggtggtgcctaaggaagaaaaccaggactgaagcctcgggaggatgtgtcctcctttaa

SEQ ID NO: 41290 - DNA, 726 bp, Zea mays
  Peptide Sequence Number=SeqID_83069
atggcgagagtagtgtgtaccctccatggcaagaggctggacggtggtgtatctgtgctctcggtgaggaagcagcaaatttttgttgcttttgttccaaggtggtgcctaaagaggaaaatcaagactgaagcctcgggaggaaataagccgccgtgcacaaggaaaaccgcgcgcaaatccaccagaccaattggtgtgcctcgccatcaactagctccaaggcatgaggatagtagcagcggcaacaatgatcccatcggagatctggaagctcaggtggagcagcttcgaacagaattgtgtcatagaaacagtgtgtgggtcgaggatggtcagcgcataaatgagttaagaactgacttccggcatttgcaagacgagcttgtcgaacgagatttggcactcgattgggccgtcaactcgcgttccattgcttgggaccgagaggctaaagctcgagcccgtgtggaggagcttagcacagccgttgataacttgcaggtgtactgcaatacattgcatgaggaagttcatgacttgtattcgcgactgcaccctgacgtacctgcagatcctgtcggaatgggagctggaccttctggaatagcaggtaaagcatttggtggggaactggatcttttcaagccccctccttcaatgaacctagctgatgaatggactcctacacccgacaacaaagctgctaaggataataagtactag

SEQ ID NO: 41291 - DNA, 393 bp, Zea mays
  Peptide Sequence Number=SeqID_83070
atggggacctcctgctcagcaaatcccgcacacgagcagagagagtcgtggcgcgctgctgagggagaggcaccggcgctgggggatagcaggggcgctgcgccactgagctcggccatggcggctgctgggggtggggccgctggctgctgttggccggagagcaggaggaggacgggactgctgctcgccaggaggaacgatggctggtcggggaagctcagctgcgagatgttctgggcaccatggctgctggtcttgctccctgctgattgccgtggagaggaagaagagctccctgccctggcgtgcgtgaagaagtctggcggctgggaaaatggcagaggaggaaaaaggttgtggcggctaggaaaatttgaggggtgggagtga

SEQ ID NO: 41292 - DNA, 516 bp, Zea mays
  Peptide Sequence Number=SeqID_83071
atgacgaaaccgagagcctactatggtgcacacatggttgagctgctcggcacgcgctgtcatctcttccgtggagtcttcttccccagcgcgcagacccctccatggccgtcaacggcgctcgagctcttctcccccatggccgcgagctctcccctccagctgctcgacgcccactgctccttctccctcgcgcagcagcagccgacgccccttttcttcctccctagtctccacggcaatcagcagggagcaagaccagcagccatggcgcccagaaaatctcacagccgagctccccaaaccggctgtcttttctcccagcgcctccctccactcgccccccctcgacgcacacaccagcgaggtgctcgacatcggccttcttcctccttgtgttccttgtcacagggcaggagcaggagctcttctctccccccatccgagcccccaagcagcgccctccctgctccatggctcaagcccgagctcaccccatggcgctcggatccctaa

SEQ ID NO: 41293 - DNA, 1083 bp, Zea mays
  Peptide Sequence Number=SeqID_83072
atgcagaggggctcgtcgtcgcagttggactacgtcctggtgccgctggggctggctgtgatggtgggctaccacgtgtggctgctcctccgcatccgcagccggccggagactaccgtgatcggcatcaacgccgtgaaccgccgcatctgggtgcgccacatcatggaggacccgtccggcaagcacgcagtgctggcggtgcagacgctgcgcaacaccatcatggcgtccaccgtgctggcctccgtggccatcacgctcagctcgctcgtcgccgcgctcatggccagcggcgccgccgcccacgggggcctcctcctctccgcccccggcggcggcagcgaggccgcgctggccgccaagttcctcgcggtgctcgtgtgcttcctggtggcgttcctcctcaacgtgcagtccatccggtactacagccacacggggctgctcgtcaacgtgccgctcgccgcgcaccgccgccccgcgcgcgccgtcggctacgtcaccgcagcgctcaaccggggcttctacttctggtcgctcggcgtccgcgcatactacttctcctgccccgtcttcctctggctcttcgggcccgtccccatgtgcgcctcctgcgtcgccatggtcgccgcgctctacttcctcgacgtcaacaaggagtgggaggacaaggacgacgacggcagcgaggatgaagcggacggcgatggaagaagcacggccaccactggtcctggaacccgagatggagtcgcagccaagtcggacttgatctccttcctgttgtgggcgcccttgctgctcctcctcaacaccttggactttcccaagtccttgctggtcctctccaagtccattcattgtatttatagaagtgatgtcctcatcacttttcgtcactctgcttggctcggcggtgcctgggcctttgtcgctctgggcgtctgcttgctcccgatgatcggcattgtggatccaagctcgttggtggagaattggagcttcctcgcctgggcacttcttggaaagtctggggtgcttgtcccttgtgttgagctcagcaacaatgactctggatag

SEQ ID NO: 41294 - DNA, 747 bp, Zea mays
  Peptide Sequence Number=SeqID_83073
atgcagaggggctcgtcgtcgcagttggactacgtcctggtgccgctggggctggctgtgatggtgggctaccacgtgtggctgctcctccgcatccgcagccggccggagactaccgtgatcggcatcaacgccgtgaaccgccgcatctgggtgcgccacatcatggaggacccgtccggcaagcacgcagtgctggcggtgcagacgctgcgcaacaccatcatggcgtccaccgtgctggcctccgtggccatcacgctcagctcgctcgtcgccgcgctcatggccagcggcgccgccgcccacgggggcctcctcctctccgcccccggcggcggcagcgaggccgcgctggccgccaagttcctcgcggtgctcgtgtgcttcctggtggcgttcctcctcaacgtgcagtccatccggtactacagccacacggggctgctcgtcaacgtgccgctcgccgcgcaccgccgccccgcgcgcgccgtcggctacgtcaccgcagcgctcaaccggggcttctacttctggtcgctcggcgtccgcgcatactacttctcctgccccgtcttcctctggctcttcgggcccgtccccatgtgcgcctcctgcgtcgccatggtcgccgcgctctacttcctcgacgtcaacaaggagtgggaggacaaggacgacgacggcagcgaggatgaagcggacggcgatggaagaagcacggccaccgtgtgcggcggcgtctga

SEQ ID NO: 41295 - DNA, 486 bp, Zea mays
  Peptide Sequence Number=SeqID_83074
atgctccagatggtcgacctctgcttcaacggcttcgacggcaccatccccagcgagcttgccaacctcacccaccttgttgcgctcgacctcttcaacaacttgttgttcgttcgcattccagacctcggcctccccgcgctccggttcctcaacctctccaacaaatgcctcgacgggactgtgctggtgtccctccttcggttcaccgacaccgccttcgtcggcaacaacctcacaagcccaactttggcgccaccgtccctctaccttctggcctcgccacgccttacgctgcgaggaggcgggctaggttcagtgaggcgggccaggctcagtgaggcggtcatcctcgccattaccgtgggtgggtgcgtcattgggttcgccgtcgccgcgttgctgctcctcgccttctgcaacagcaccagggagggttgtactaccgacgcaagcagcacgcgggctgcaggaaggttcctctag

SEQ ID NO: 41296 - DNA, 560 bp, Zea mays
  Peptide Sequence Number=SeqID_83075
atgctccagatggtcgacctctgcttcaacggcttcgacggcaccatccccagcgagcttgccaacctcacccaccttgttgcgctcgacctcttcaacaacttgttgttcgttcgcattccagacctcggcctccccgcgctccggttcctcaacctctccaacaaatgcctcgacgggactgtgctggtgtccctccttcggttcaccgacaccgccttcgtcggcaacaacctcacaagcccaactttggcgccaccgtccctctaccttctggcctcgccacgccttacgctgcgaggaggcgggctaggttcagtgaggcgggccaggctcagtgaggcggtcatcctcgccattaccgtgggtgggtgcgtcattgggttcgccgtcgccgcgttgctgctcctcgccttctgcaacagcaccagggagggttgtactaccgacgcaagcagcacgcgggctgcaggaagcctctcactcatcgtcgtccactctgacttgtggcttatcgccatcgcgttcttcgacggtgtccgcctcaacgccaacgaccg

SEQ ID NO: 41297 - DNA, 303 bp, Zea mays
  Peptide Sequence Number=SeqID_83076
atggggaaatggttaataaatctagaccaggcgctgagcagacagagtcgcccgtctgtgttgattaaggaccgtaccgttgactggcctgttgtggttgagactttgcaactagccacataccctggtatgggacaggatccttgggatgatgagttcgggttgatgaactcgatagccttgttaagttacccggtacacgtgcacagccatctgaggccgttaatggcaaggattggtgcatgtgggcctgataacttgggagggctgtcacagcgtggtatcggagcgatcccccattag

SEQ ID NO: 41298 - DNA, 297 bp, Zea mays
  Peptide Sequence Number=SeqID_83077
atggggaaatggttaataaatctagaccaggcgctgagcagacagagtcgcccgtctgtgttgattaaggaccgtaccgttgactggcctgttgtggttgagactttgcaactagccacataccctggtatgggacaggatccttgggatgatgagttcgggttgatgaactcgatagccttgttaagttacccggtacacgtgcacagccatctgaggccgttaatggcaaggattggtgcatgtgggcctgataacttgggagggctgtcacagaagctcactcggtctaagtga

SEQ ID NO: 41299 - DNA, 216 bp, Zea mays
  Peptide Sequence Number=SeqID_83078
atgggagacccagtctcaggtcgcatgagggataaagtccgcgcccggcttcactcagaaattacaactttggtggtgtatgatcttcttgagttaaacaaagttaactttacttatgtaagacccttgggtggtatacttagtaaattgggtcaaactttatctaagggcagaagggatgctttgaactacaactattatttaacagtgctataa

SEQ ID NO: 41300 - DNA, 537 bp, Zea mays
  Peptide Sequence Number=SeqID_83079
atgaggaaatgggcaaggcctagcccactactcctcatgctcctctcctgccggagcaacatcccactcgaccgtccaacccggtggcagggtggtaggccaagtcacaccatcaaccaaatcctgcatggtacctgcaaaaatggtgccacaagcaaggctgagtatactaatactcagctagacttaaccggtggtactccgaccccacacaagacaaccgtccccatcgattccccgttcgcgtccaggcctcaccgccttggcatacaatgctccactgaccccggttgccgctgtgcagtgaccgcacttgtacccaccatagctagcatgggagacccagtctcaggccgcatgagggataaagtccgcgcccggcttcactcagattgtaatcttgccgacggagagtacgtgctcatccccgagcaaggacctgtccaagaggaggaccaggagcaggcttcagaggctgctattgaggatctccccgcagccccagcaattgaaggcaagccccggttttatgcataa

SEQ ID NO: 41301 - DNA, 222 bp, Zea mays
  Peptide Sequence Number=SeqID_83080
atgacggcagtcggggtcagcggagcattgtatgccaaggcggtgaggcctggacgcgaacggggaatcgatggggacggttgtcatgtgtggggtcggagtaccctgacatgccgtaccatgcaggatgtagttgatggtgtgacttggcctaccaccctgccaccgggttggacggtcgagtgggatgttgctccggcaggagaggagcatgaggagtag

SEQ ID NO: 41302 - DNA, 186 bp, Zea mays
  Peptide Sequence Number=SeqID_83081
atggcggtgaggcctggacgcgaacggggaatcgatggggacggttgtcatgtgtggggtcggagtaccctgacatgccgtaccattcaggaaatggttgatagtgtgacttggcctaccaccctgccaccgggttggacggtcgagtgggatgttgctccgacaggagaggagcatgaggagtag

SEQ ID NO: 41303 - DNA, 3147 bp, Zea mays
  Peptide Sequence Number=SeqID_83082
atgcctctccccgcactctcacatcgcttcctggtttcttctagggcttggcttcttgccaccgggtgcccgatctacggggcgtctgcttcagcacctaccgacctatttattacccggttttctgcttcgcaggagatcatctcggccaggggattggcttgtcgggaggatgtccgcctgctcgccacggtgtattttaagaacagtatcaaccgctactggcggcatcgtcgcgattcgtatggaattagcaacgaggagaaggaccaccttcggaaaaatcttttgctaaacatgcgtgaggaaaatagccagattgcactgcagctagctgtattaatctccaagattgcacgattggattacccaaaagagtggccagagcttctgtctgtattggcacaacagctgcagtccgctgacgttcttgcttcacatcgcgtgtttatggtcctgtttcgaacattaaaggagctgtcaactaaacggcttgctgtggatcagaagaactatgcagagatcactggccatttgtttgagtatacctggaacctttggaagagtgatgtgcagactatattgcagaatctttctatgctctcacagcggaatgacatagattccgtttttgagcaatccaatgaccttgctttgatttgcgaccggtggttgctctgcctaatgattgtccggctactaattttttcaggttatgctagtgattcaagaactgcacaggaggtctggcaggtcagggaagtttgtccaacagttttgactgccattaaatcccttcttccatattacgacaccttcaaagacaagcatgctaaactatgtgactttgcaaaaagggcatgcactaagttgatgaaagtcctcgttactctacaaggcagacatccatattcttttgttcacgaaactgtgctttcagctacagtagacttctgtttgaatatgattacaaatcctgaacagactggcacaacttttgaggagttccttatacaaagcatggttttggttaaatcagtactggagtgcaaagaatacagaccaagtcccatgggacgtgtgatcaatgaaaatgagcctttaagtctggagcaaaggaagaaaaacttcgcagcagtggctagtgacatgctgaaggtcattttgtctggtgatcgagttgtgctgctttgcaacattttagtaaggaggatttttctggccttcaagtaccttagaagtttgcaattattttgtaggtacttcattttcacagcaaaggatttggaagagtggtcagagaatcctgagtccttccaccatgagcagaatttggttcagtggaccgagaaaaaacggccatgtgctgaagccctcttcattgttatcttcgagaagtaccgagagcttctagctccagttgttgtttctgttcttcgtgaagctatggctatttctccaccacaagaaacagaggttactgcaggaatgcttttaaaggatgcttcctatacagctgccgggcatgtttattatgaactttcgaactatctcagttttaatgaatggttccatggatctctatctattgaaatttcaaatcatcaccccaatatgcgtatcattcgtagaaaaatcgcattgctacttgggcattggatttctgagatcaagggcgacactcggaaattggtataccgcgctttggttgggttgctgcaggataatgatatagctgttaggctagcagcatgctcttctctctgttatcttttccaagaatcttgcttttctgaattagatttgtttgagtgtcttcctacatgttggacaatgagtttcaagttgatagaagatgtacaagaatttgattcaaaggtgcaagtgttgaacttcatttcagttcttcttgaacatgcgggggacaaggttattccatttgcatgtcagctatcacaattttttcagatgatatggaatgaatctgcgggtgaaagcttgctacagatacaattactaacagcacttagaacttttgtttcttcgcttggattccagtcacctctttcttaccacatgcttattcctatactgcaaagtggtatcaatattgacagccctgatgctcttaatcttcttgaggacagtgttttgttgtgggaagcaaccctttcaaatgccccttccattgtacctcaacttctggatttattcccttaccttgtgggcatcatgaatagaagctttgaccatctggaggtcacaatgaaaataattgaggattacattatttttggcggttcagaatttttgaaaagccatggtgcaagcctagctaacatcattgatactattgttggaaatgtcaatgataaaggacttctcactgcacttcctattgttgatcttcttattcaggtcataagagcatctccaatagttctcgaaaaattaatcggaaaatctatatttcctctggaagctccaccattgatatccagtgctcttcagaaacttaccttcatttcgttgagtcaagatgatggccaaaacccgtctaggacaactgtccgagcatcctctggggcgattcttgctaggcttctggtgatgaatacaaacttttcggcacaactattatcagagcctgctcttttggcaagcatccaacaagcagggatttctgtgaacaataatctgcttttttctttggttgatatgtggatcgacaaggtagatgacgcaaatgctatacagcagaaggaatacgcaatggcactttctgtaatcctgacattacaggtacctcaggtcattgacaaacttgatgacatactgagtgtctgcactactgtcattataggaagccgtgaagtaaagactgatgacgatactagcggcgatatcacaagctcttcatggataggcaacgatggttcaggttattccaacacttcaagcaaagagctgagaaagcgccaggtaaaggattcagatcctatcaaacaaacatcgctagagatggtgttaagagagaacttaaaagcatgtgctgttttccatggggatgcagcattcaacgctgccatcggcaggatccatccatcttcgtttgctcagctgcaacaggccctgaatactgcataa

SEQ ID NO: 41304 - DNA, 2339 bp, Zea mays
  Peptide Sequence Number=SeqID_83083
acgacaccttcaaagacaagcatgctaaactatgtgactttgcaaaaagggcatgcactaagttgatgaaagtcctcgttactctacaaggcagacatccatattcttttgttcacgaaactgtgctttcagctacagtagacttctgtttgaatatgattacaaatcctgaacagactggcacaacttttgaggagttccttatacaaagcatggttttggttaaatcagtactggagtgcaaagaatacagaccaagtcccatgggacgtgtgatcaatgaaaatgagcctttaagtctggagcaaaggaagaaaaacttcgcagcagtggctagtgacatgctgaaggtcattttgtctggtgatcgagttgtgctgctttgcaacattttagtaaggaggatttttctggccttcaagtaccttagaagtttgcaattattttgtaggtacttcattttcacagcaaaggatttggaagagtggtcagagaatcctgagtccttccaccatgagcagaatttggttcagtggaccgagaaaaaacggccatgtgctgaagccctcttcattgttatcttcgagaagtaccgagagcttctagctccagttgttgtttctgttcttcgtgaagctatggctatttctccaccacaagaaacagaggttactgcaggaatgcttttaaaggatgcttcctatacagctgccgggcatgtttattatgaactttcgaactatctcagttttaatgaatggttccatggatctctatctattgaaatttcaaatcatcaccccaatatgcgtatcattcgtagaaaaatcgcattgctacttgggcattggatttctgagatcaagggcgacactcggaaattggtataccgcgctttggttgggttgctgcaggataatgatatagctgttaggctagcagcatgctcttctctctgttatcttttccaagaatcttgcttttctgaattagatttgtttgagtgtcttcctacatgttggacaatgagtttcaagttgatagaagatgtacaagaatttgattcaaaggtgcaagtgttgaacttcatttcagttcttcttgaacatgcgggggacaaggttattccatttgcatgtcagctatcacaattttttcagatgatatggaatgaatctgcgggtgaaagcttgctacagatacaattactaacagcacttagaacttttgtttcttcgcttggattccagtcacctctttcttaccacatgcttattcctatactgcaaagtggtatcaatattgacagccctgatgctcttaatcttcttgaggacagtgttttgttgtgggaagcaaccctttcaaatgccccttccattgtacctcaacttctggatttattcccttaccttgtgggcatcatgaatagaagctttgaccatctggaggtcacaatgaaaataattgaggattacattatttttggcggttcagaatttttgaaaagccatggtgcaagcctagctaacatcattgatactattgttggaaatgtcaatgataaaggacttctcactgcacttcctattgttgatcttcttattcaggtcataagagcatctccaatagttctcgaaaaattaatcggaaaatctatatttcctctggaagctccaccattgatatccagtgctcttcagaaacttaccttcatttcgttgagtcaagatgatggccaaaacccgtctaggacaactgtccgagcatcctctggggcgattcttgctaggcttctggtgatgaatacaaacttttcggcacaactattatcagagcctgctcttttggcaagcatccaacaagcagggatttctgtgaacaataatctgcttttttctttggttgatatgtggatcgacaaggtagatgacgcaaatgctatacagcagaaggaatacgcaatggcactttctgtaatcctgacattacaggtacctcaggtcattgacaaacttgatgacatactgagtgtctgcactactgtcattataggaagccgtgaagtaaagactgatgacgatactagcggcgatatcacaagctcttcatggataggcaacgatggttcaggttattccaacacttcaagcaaagagctgagaaagcgccaggtaaaggattcagatcctatcaaacaaacatcgctagagatggtgttaagagagaacttaaaagcatgtgctgttttccatggggatgcagcattcaacgctgccatcggcaggatccatccatcttcgtttgctcagctgcaacaggccctgaatactgcataa

SEQ ID NO: 41305 - DNA, 357 bp, Zea mays
  Peptide Sequence Number=SeqID_83084
atggaggccaagtcacaccatcaaccaaatcaaggaggtacctgcaaaaattatgccacaagcaaggctgagtatactaatactcagctagacttacccgtgaccgcacttgtacccaccatatctagaatgggagacccagtctcaggtcgcatgagggataaagtccgcgcccggcttcactcagatctgggcgccgttggcgcaccggacatgtccggtgctcaccggacagtccggtgccccattccgaccgttggctcggccacgtgtcgcgcgccgatcgcgcggccgaccgttggcccggccgaccgttggctcaccggacagtccggtgcacaccggacagtccggtga

SEQ ID NO: 41306 - DNA, 591 bp, Zea mays
  Peptide Sequence Number=SeqID_83085
atggaggccaagtcacaccatcaaccaaatcaaggaggtacctgcaaaaattatgccacaagcaaggctgagtatactaatactcagctagacttacccgtgaccgcacttgtacccaccatatctagaatgggagacccagtctcaggtcgcatgagggataaagtccgcgcccggcttcactcagaacaccatgacataaccattaaatctctaattagttttaagcacactcacatccgccctgggcccacttgtcattggctcaaggaggtcttcttcctcctcggtttctcacgtgaacagcaggaggatgcggctggttgtgtccctggccggtgcgctgctggaatgaggcgccatgggagggaaggaagggctgctgctcttgggtgccgagttgaggaaggagaaagtacagggaggctcgaccatggggaagagaagcacctgatcgagctgggggcgctggctgctagtgtagaggtggccatggacgcttggggaagaagaagagatgataggggcgccatgggagatgcagggggcgaggtggtagagggcaggggctgctgcgcggcttgcctttaa

SEQ ID NO: 41307 - DNA, 375 bp, Zea mays
  Peptide Sequence Number=SeqID_83086
atgacgaaaacacacactcacatccgccctgggcccacttgtcattggctcaaggaggtcttcttcctcctcggtttctcacgtgaacagcaggaggatgcggctggttgtgtccctggccggtgcgttgctggaatgaggcgccaggggagggaaggaagggctgctgctcttgggtgccgagttgaggaaggagaaagtacagggaggctcgaccatggggaagagaagcacctgctcgagctgggggcgctggctgctagtgtagaggtggccatggacgcttggggaagaagaagagatgataggggcgccatgggagatgcagggggcgaggtggtagagggcaggggctgctgcgcggcttgcctttaa

SEQ ID NO: 41308 - DNA, 360 bp, Zea mays
  Peptide Sequence Number=SeqID_83087
atgggaggctccctgctgccttgcgctatggagggcgccgctggggcttccctggccgggaggctcgaccatggggaagagaagcacctgctcgagctgggggcgctggctgctagtgtagaggtggccatggacgcttgggggaagaagaagagatggtgggggcgccatgggagatgcagggggcgcctgctcttgatgactctttgctgctggcgaggtacgccagggaggcggccatgggaggagctcgactggcgcccacctgacgcgcagggagttggggttggaggggaagacgctgggggggcggccttcgaagctccggctggagatttggggcgccatggatgggagtaa

SEQ ID NO: 41309 - DNA, 378 bp, Zea mays
  Peptide Sequence Number=SeqID_83088
atggaagaacctaaacctaacaagggacatcttgcatgggctgatgcttttgtcataacagcagactcgataagtatgttaagtgaagcatgcagcacaggcttgataccgaagaacgttgcgtcactgttcatgaataaggattccctcaaggttgaagctgatactaggcttggggagctcataaaggagaggctgaggcaggagtgcctgcggaaggggacggaactggcgcatggggtggctgacgccctcttcgttgtatcacccaccgaggacctcgacggccctatcgtacacctcccaccgcccgctgttcgactcccgcgcgagaagcatcttggtgctgggacctcactgccaggattccaggattag

SEQ ID NO: 41310 - DNA, 1410 bp, Zea mays
  Peptide Sequence Number=SeqID_83089
atgcagttcggcggcctgagcgtggagagcggcgatgtggtcggcgtcgagtccagaggcggcctcgggtgtgagcggaggatgaccgaggatgaggcgctgcgcggtggccatctaggcggtcagagtagcgcccatggcatgctcgtgctccagggcgagggacgcggcgcgctggcgctcctgcgaggcagccacgacggcctagatggtggatggaggggcgtcggggaggggctcgaggccggtgatgtagggggccctccaacatcgagctcgctgcgggggtcgtggagagcgaagccggctagggaggggccgacactcagaccggccagggagggcttggcgctcaggccggccacagcgaaggaggcggcgacccgtgagggggccaggcctgtggtggagcgcgtgggtagggccacggcggtggcggtggtcgcgctagggccagtcggcgcggcggtagtggtcgcgccagggtcgttgccaacactttgctctcgcaatcttgactttttatccctagggcatacacctaaaaacggcaaaagggaaggtccgacgttagtcgttgcttgtggctgggacaccatatcatattcaagcttgataaggaaagtagcttcagataatgtgttcgtcatccagatccaacacccacgatctcgccttgataggtttgatttagtggtgactcctcgccatgattactatgctttaaccgctagtggacaacaagaagttccacacctgttccgcagatggattactccacaggaaccacccaggagtaatgtggtacttactgttggtgcactacaccaggctgattctgctgcgctacggcttgctgctatagcctggcatgatgaactcgcccctttgcctaagccgttgctaattgtcagcattgggggccccaccaggaattgtaaatatggtgtagatcttgccaggcagctcataacttctctgtataatgtgctagatagctgtgggagtgtcagaatctcattctctccgagaacaccatggaaggttgctgatactatatttaaagaatttgctggacatcccaaggtctatatttggaatggtgaagaacctaaccctcacatgggacatcttgcatgggctgatgcttttgtcataacagcagactcgataagtatgttaagtgaggcaggtagcacagggaaacctgtttatgttattgggaccgaacactgtaaatggaagttttcggcttttcacaagactctacgggagcgaggggttgttcgcccgttcactggattggaagatatttcaaatagctggagctaccctcccctaaatgacgccattgaagtagctactcgtgttcgtgaagtgattgcagaacgagggtggacagtgggatga

SEQ ID NO: 41311 - DNA, 2718 bp, Zea mays
  Peptide Sequence Number=SeqID_83090
atgtcgctcgatacgaagctcatcctcaacgccattagcgagctcttcgacaagttcgacgcgcgatggtccatgagggatgccgcgcgggagacatccaggcgcgtccctgttcctacccagtgcacggttgtcggagccgatgtggtcgccgacaactggggcaacctcttcgacagtgccgtcgattccgacgagcagcgctacgaggaacccatcaacgccgacaattggggcggattcttcgatggagcagacgcgtctgccaacgccgagttcgtcggccactgggacaacccttcctccaaccccgacgcgactgcctatgtcacaccagaggttgcggtggaatcggtgcacccggccgcacgcggacgcttcttcaacgacgattcgggtgccccgcttgactcggacgacgacagctccgtccacggcggccacggatccgtgatgtcccatctcctggagcgcgaggccgacaccgccttccttccccactcggatcagcgggatggagttgaggcgtggttcatcctgcgccggtgcactcccgcctccttcaacgtcgcctccaccgaccccaacaacgaggtctcgagcgccgttaccgcggacgcgctcgctaaggccgcgcccgcgctcttcgcttcgagggcgcccagaccatcgctcaagtacctggagctgcttctcccggcagaaatcgacttcgaccacattgacctaccgactgctgccgccgcagggcacatcgtcgcccaggtcaccggcaacaacgcggtgtccgtggtggaggaccaactcaggtgcaccctcttgctcacgcgtaacttcctgtcaagccaccaccaggccgtcagcaaggagtgggacatggtcgccgtcgtgcacccagtgtgcaacctgggggaaaaggtggacgccatctgcactggccagatcgagcacctgctactgcagcacctcaagccttcacctacctcgattggtgccaaggcggtgttcgatgaaatgcagcaaagcaccaattccgcgacaacgacacccgcatcctcagctctgacaacaacaacgactacaaccatggctgcaccggccacctggctggacgcgcagcctgctgtgtcgacatgctcatcagcatcttctgctcaagaagatacaccaataccactcctcttccttcgcggtggactgggtatgatggataatgtcttacctgctaattctactttcctgtctaccaacatatcactcagcagcatggagtgtctgagagagtttatgcttcaccttaagctcggcaccgccagattcactatttgtgacgaaagtgtagtgaacctgtggtcgtcgccggtggagcgagttgttcagcaacaaacatggctacaacttgagttgacaaatagtggtcttgacctatggcctatctcatggcaatcgcaacaagtctattttggtactcaccatggattcgctgcatggcccaggagccatggcacaattcttgtcttcgattttagcaataccttgtcctggaacaactcaatgtcgattgctgcttcatgctcaaccaacaccctttttgccaaggatgatggagattctatgaaccgagcatcacaattactaactccttggacaccacctatgacattatgtttggttggcgatgaccttcttgtgatgctagttattccaagagtctgccgttctctgcacatgattaataaattttctaagcaatactttgttggcctatctttgctaattacaagggaaaaatttatgtctgggagaataatgttggctcttcttccacttctgaagctatttacatcaggaggagcaaggattgtcaatgcttcctcacttgcgtcggagctgaagagaatgccaaatgagaagttgcgaaacgatttgagcaacattgacatctgggacgaggaccggatacaagcagtactcaacacattcttggaagacctgaggagcggtcggctggaagaggctgggtggcccgtgatgctaccagcctacagcctgtcgaaaatggtcatcaatctgtacaccaggatcatagcaaggaggtatccggagatgcgcatcaactgtgtgcgacctggatttgtcacgacggacatcagctggaatctgggggtcctgacgcctaaacaaggtgcgagagggccagtcatgctagctctcctcccagatgatggaccaacgggttggtacagagatgaaatgggcgataagatgggcagcctattatttttcaaaatggtcaagtattcatcactagtcgagggattttgtggtgtgcagttttcatttcctaatattcaattgtgcaagtcttggtcacaggagttagccaccaacacagaaagccatttactaccagaaatgctagaagcggccaatggttatatttgtcatgagcttcatcttatgcttacctctattggagtgacacatatgatcgattgtgttaaatatttgataggggttatcgacttgctaactccatgggatcctggcatagtggtcttcaacctcaagttcctgatgctttggcttgagggcaagccaaatcttaagaaggggggaataagatactccatccttcctgtgatcttccctacctcttctcctgtatcttcctccactcctgctgtgtatcttcctccactcctgctgttcggttag

SEQ ID NO: 41312 - DNA, 441 bp, Zea mays
  Peptide Sequence Number=SeqID_83091
atgggagattttcaacgagggaaatccacggccttcttggcactgaaggccagaaggcattttggagagaccaacatgaacatgcggagcagtcggtcacacactattttcagaatggtaattgagagcagtggtaaggaccagacagacggtggagatgctatccgcgtatctgttttgaatttggtggatcttgctgggtcagaaagaatcatcaagacgggggcagaaggggtacgtttgaatgaggggaagtatattaacaagagcttaatgattcttgggaatgtcatcaataagttgagcgagaacggaaaacaaagtacaagtgggatctctcagaagggcaggattgatgcagtggtgagagatgtctcacgaagtcaccaggtcgcagattcaaaacaacctctctttatttgcgagaaaggcttgccttaa

SEQ ID NO: 41313 - DNA, 873 bp, Zea mays
  Peptide Sequence Number=SeqID_83092
atgaacagctccgatgccgacccggtcatcattcctcgcgcggtccgcgacgtctttgacaccgtgcgccaggctgacgaccgcgagttcctcatccgggtgtcctacatggagatctacaatgaggaaatcaacgacctcttgacacttgaaggccagaagctgaagattcatgagagcttagatgtaattgagagcagtggtaaggaccagacagacggtggagatgttatccgcatatctgttttgaatttggtggatcttgctgggtcagaaagaatcatcaagacaggggcaacaagggatgcaaagattcttcgaatgaactttataattgatctgttaagttacgaggacaattcatgccgctgtgacatccctgcaaacatacaacaaagacttatcaatatcgctaaaaggattatattaatgtacggttgtcaacatatttgcctattattaaaaattgcacatgttgtttcagcgattttgaattttagtgagaattgtacaccagaaattttgacgccttacctggatggaatcgtgaataaattacttgttcttcttcagaatggcaaacaaatggtgcacatgggagcattgacagctctagcgtcagtagcagattcatcacagggcgaccatgcggttgctgtggccgagacgtggggcagcaggctgctgcgctcttgggagagcaacccatctaccacgccgtacagcgtaccattggctacagggccgccatgcccccagtggcgctgccctgcaaggaggttgggtatttgggggagtatcggcgaagcatcatggcttccgaggaagcagggctgcgaccagcgcgctggacgttgctggggggccgcttga

SEQ ID NO: 41314 - DNA, 858 bp, Zea mays
  Peptide Sequence Number=SeqID_83093
atgccaaattgcagtggcgatggcctcagggcggatgccgctgcaacaatgccctcacccatgtctccgctcaaggggcgaggacaagctatcaaagccaaagagctggaggcccggagcgcggatggtggcggtgatcccgtcggcgacgaggacttcttcatccgccaccaccccagcgccgacgacggaagccatctgcccaccggcagatccccactcggatcctcccggacgagcggagcaccgacctccgcgcagaggcgccgtaccggggcaaaggcaggacagccccagaacacgaacgccgccctagcagcgcgcgacgtcttgggcggtcctccggtaccaacttccgcgaagttgtgttcctccaacgacaaggcggaagaaccacaagtgttccccatccgggggctcggaaggtggaaagacgcgatgcataaggggagcgcgaagacatggttgcctttcaagggggtcaccctccttttaaaggcaactctccccacttgcgtcctcagccatagcgggttgagtcttctccaagacgctccaaggtccaccccctatgacacgggggctgggtcccacgcgtcatgcaagctggcccagggcagaaaaaagccaaaccgccgcgcgcggtgcgcacaactgcccagtggttacgagcattcctccacttctgcccaggccagcgggcgaaagggcggaccaccatgcaggcggcatgcaaccacaccaagggggcgcaccctttctgtaggattacggggaggctacactagcgcaaaacaaaattttcaaccccataataccaagaactactgcggttataggtcatgggattaccactag

SEQ ID NO: 41315 - DNA, 546 bp, Zea mays
  Peptide Sequence Number=SeqID_83094
atggtggagaaaggccacgggtcgcgcggcggaacgacggttaccctgtcggccatcaccaagcaaaagaggtggcggcggagcggacaagggaccgggaaaggggatactccgaaagggatccttctccgtgaaggaagcgggccccgagccctcctactgatcagaggttcgaaggctggcccctcggaagggttcgacagccgcctcagagcactcgggctccgcgcccactactggtcagaggttcgaaggctggcccctcggaagggttcgacagccgcctcaggccactcgggctccgcgcgcactactgatcaggggttcgtaggctggcccccgaagggttcgacagccgcctcagagcacgcagagcgagggatgactctgggctcaggggctgctctcgcaaacccggctccggccaaaccgttgacagcgtcaacataccagcccgagaactcagaacctggctatgcacccgggctacagccagttcgcataagggaacaaccagaccggccgaggcatcacgaaaggcattaa

SEQ ID NO: 41316 - DNA, 285 bp, Zea mays
  Peptide Sequence Number=SeqID_83095
atgacgacgcacgcgggggctgagaagacagacgggcgcggcgtttcaggggggaggaaggaggcgcaacggcgagcacagggagcgatcactcatgtggggggccgcacctatgtgcgccaaaagcgagaggccgcagggggcgctggcagcagcgcgcgcaaggaaggcacgggcgctggcagcagcacgcgcaaggaaggcatggcaaaggaaagcgcgcacaaggaaggcatggcaaaggaaagcgcgcgcaaggaaggcatgacaaaggaaagtgactga

SEQ ID NO: 41317 - DNA, 723 bp, Zea mays
  Peptide Sequence Number=SeqID_83096
atgtggggccgcacctatgcgcgccaaaagcgagaggccgcagggggcgctggcagcagcgcgcgcaaggaaggcacgggcgctggcagcagcacgcgcaaggaaggcatggcaaaggaaagcacgcgcaaggaaggcatggcaaaggaaagcgcgcgcaaggaaggcatggcaaaggaaaaaccaagcctgcggcagaggggtataacctcgccggagaagacagctatccccatggaccgaaggtccatgacacctggtatcagctccaggttatcctcaccaccacaagccgcccatccctcaccaccaccagtcgccgtgccatcagccgccgcaacgccctcccacccgccctctccaactccagatgcattcactcggctcgaagagagttttggtcgtttcgcagagcagtgggatcagttcgttgtgatgttccaccgctacaaggagaagacagagaaggaactccaagcagcggtgcagcttcagacggcagcgcgagggttcttggcacgccgccaggtacagtcccttcgtggggagaagcaccttgctgtggcctccagggccaccccatggccgtcatcacatgagcaggtcgtggcgcgcctgcaagccgcagtgcgcggcttccttgttaggcgggcggtgcggaagctgcacttgctgatcagctcatcgctgcaccaactcgcagcctgcgcgcccaaccactag

SEQ ID NO: 41318 - DNA, 180 bp, Zea mays
  Peptide Sequence Number=SeqID_83097
atgccgatggatacatttgttaaaaaggttactgagctgaaccgcaagatgaacgaggtagacgaggagtccaagcaggtctcgtatcccgtcatcagggatgacaacggcaacgacaagctcgattgcccgacgcttggcaagcagttcgcagctgaggagatttccgcacaggtttaa

SEQ ID NO: 41319 - DNA, 399 bp, Zea mays
  Peptide Sequence Number=SeqID_83098
atgccgatggatacatttgttaaaaaggttactgagctgaaccgcaagatgaacgaggtagacgaggagtccaagcaggtctcgtatcccgtcatcagggatgacaacggcaacgacaagctcgatttcccggcgcttggcaagcagttcgcagctgaggagatttccgcacagctgaacctgtatcttgtcctgcttccacttgatggtcaaagtgtgcctaaactggaaaagccctaccacagttgcctgccaacactatctattcgacatctctgccaggcccatgctattctattggacccttgtgctctggttctggaatatctacagagagacattatttgcttccttcacattttagagtatgtttggtacccaatggtgtcgatgaagtga

SEQ ID NO: 41320 - DNA, 438 bp, Zea mays
  Peptide Sequence Number=SeqID_83099
atggaagccaataccttttctacatgtcaactgaaggttgatattagtctcaatttcctttttatgatggaagatttgaaatatttgaaaatctctgtaagcaaggagtgtcaggaattcttgggacttgtcaacaaggagctaaataaagaagttcaggagcttttaaggcttacgttaagtaagtcccaagtcaagctgactgaatataccattttaaaaggaccattatggacactgaaagcacgaatccatttaatggcccgtgctattctattggacccttgtgctctggttctggaatatctacagagagacattatttgcttccttcacattttagagtttagttttgccaattcatattccatatcatgggactttatgttcggtatgtgcactctcatttctgctcatatggccctgcagatgaagtga

SEQ ID NO: 41321 - DNA, 738 bp, Zea mays
  Peptide Sequence Number=SeqID_83100
atggatccaaacatgcaggctcgatcagtgcaggtggagtgggttggagctagagagtccctgatttttagtgcattttgtcgtagtgcaccggtttctaatttgatgctgaaccgcaagatgaacaaggtagacgaggagtccaagcaggtctcgtatcctgtcatcagggatgacaatggcaacgacaagctcgatttcccggcgcttggcaagcagttcgcagctgaggagatttccgcacagctgaacctgtatcttgtcctgcttccacttgatggtcaaagtgtgcctaaactggaaaagccctaccacagttgcctgccaacactatctattcgacatctctgtcaggccccatgctattctattggacccttgtgctctggttctggaatatctacagagagacattatttgcttccttcacattttagagtatgttcggtacccaatggtgtcgatgaagtgattccctcgcagttgtgtccttcacaaagaaaggatagctgtgacacaactataacagaggaatcatcgcccattagcacactaaaattggcacatacagagaacgcgcctgcggagtgggattatctgaacatagaggccaacacacttgagtcactcgagctccgcgcaaagctcctggagcaggagaggctcgatgagctcaccagcgctcttcggccatttggtgagggagccgtgtcatctagagagatggacagacggtga

SEQ ID NO: 41322 - DNA, 1137 bp, Zea mays
  Peptide Sequence Number=SeqID_83101
atgcctcacagtccacacgccatctgcgcgggctccccagctttccggcgcctccaatgccgcctgcgccatcaccgccgtcgcaccattgacgccgtcccctcctcccgtggctccggtaccaccaacacccactcctccagcaccacccttgccatcgtcgccttctcccatgacgccagtgccaccagtgccgtctccgccgtctccagtgatgccatctccatcaataccggtgccaccattgccttcgccgccaaggccgtctccacctttgccagtgactccatcccccccaggtgtcccggcaccaatcataccaccacccctgcgaagggcggcggagccactacccgcgacgccatctccactccggccagaccctccagcggtgcccagcagacggccgccctcaccgactcatgttccgcgatctccggatgcccctcctgctcctcctggcgtaattccgtctcaccgactcctgttcaagctgtgaagattacaaatgccaagggagaggtgaaatatccaatcaaggaaataatgatctgcttgtcatttcctctgttcgagtactattacttttttgcgagatcagaggaaaaatcaaagaaaagctttctattggatttcccactccttcactatgttgcaaagatcacctctgtggatcgctacatcaagtatcatgtccaggagtttgagagagccttcagggagaggttccctgcctgcacattggctgccaagaggcacattgactccaccactaccttcttggacgtccagggtgcggggtttaagaatttctccaagactgcaagagaacttgtgcaccggatgcagaagattgatagcgactattatcccgagacactccaccaaatgtttgttgtgaacgctggcagtggatttaagtggatctggaacagcgtgaagggcttccttgacccaaaaacttcatccaagattcatgtgcttggttcgaactaccagagcatgcttcttgaagtaatagattcgagtgagctgccagaattccttggcggttcatgcacatgtagtgacaagggtgtgaccgctcacgttgagcgtggatctgttgagcgtggatctggttcaggggcagactga

SEQ ID NO: 41323 - DNA, 465 bp, Zea mays
  Peptide Sequence Number=SeqID_83102
atgagggctcatcttcgccactgcccctactcccaccttctgacactccaccaaatgtttgttgtgaacgctggcagtggatttaagcggatctggaacagcgtgaagggcttccttgacccaaaaacttcatccaagattcatgtgcttggttcgaactaccagagcaggcttcttgaagtaatagattcgagtgagctgccagaattccttgggggttcatgcacatggttgcttgactatggttgcttgactccagttcatgaggaagtaaagggcacagatcgtgtgacatacttaagctatgatgatcaaagccacctggatatggctcctgaatcttaccgtggagtgcgacgagctactggaatggagcaccacaaaccaatggctgatttcagccaatattctgctaatagaaggcatgagattgctaccgacaggatcctccttggggccggctaa

SEQ ID NO: 41324 - DNA, 414 bp, Zea mays
  Peptide Sequence Number=SeqID_83103
atggcgttctcactcgccctaggccaagttcaggcagcagaagcagtcacgactcgccgaggccaactctgggctggagaagcagtcatgacttgcatgaggccaacctcgggcaggagatgcagtcgcgactcgcctgaggctggcatcggggggggggagcacataaatacttcatgggtcgcgtatgggcctcccgatggtttgcctagcgaggtatgccctcaagccgcaaccaagctggataagctcgacatagggagggatcttcgaactaggacccacggtatgaagaagcacagaaagaatacgaaggatggaacagagccgaagctgtgcgcaagggagcttcagcatgatggcagaaaagaggaaaccgacttaaagagaaaaagactatctagacccagatag

SEQ ID NO: 41325 - DNA, 213 bp, Zea mays
  Peptide Sequence Number=SeqID_83104
atggcgtgggcttcttccagttctccatgtaccctcgagagatccagggtagcgttgtccagggatcttcgaactagaacccacggtatgaagaagcacagaaagaatacgaaggatggaacagagccgaagctgtgcgcaagggagcttcggcatgatggcagaaaagaggaaaccgacttaaagaggaaaagactatcaagacccagatag

SEQ ID NO: 41326 - DNA, 420 bp, Zea mays
  Peptide Sequence Number=SeqID_83105
atgtgcagccgccccccacttctcctccccttggccgccgccccccctgcctatcacctcctctctcaatttttgcagccaccaaaccctagccgcccccctcaatcccctcctcccaaggtgccaatccttgccgctcggatcgtcgtctcgtggtgcgattctccaaccgttttggtggagggaagaagggaggaaggaaagggggagaacccaagaaaaaaacagattgcagggtttatttttgtggaccgtttagaggtggtggacttccggatcgttcttagagattttgcccaaacttcggtgaaggcaagtaaaactgtgatgtttcatcgcgatcttatggtccgaccgtaccggtacattgagcatcatatgttgcccgagaaggggtatggtgcagcttcatatccttag

SEQ ID NO: 41327 - DNA, 189 bp, Zea mays
  Peptide Sequence Number=SeqID_83106
atggcggccatgccgcaagctccacacccggtggtggactcccagatcattcttagggatttgcccaaacttccggtgaaggcaagtaaaactgtgatgtttcatcgcgatcttatggtccgaccgtaccggtacattgagcatcatatgttgcccgagaaggggtatggtgcagcttcatatccttag

SEQ ID NO: 41328 - DNA, 633 bp, Zea mays
  Peptide Sequence Number=SeqID_83107
atgggtgcggcgggagcaggtagatcaagcgaggtcgaagtcgaggtcgagggcggcgccgaggcagggaggacgggcgaggaagagccgagcgggagcgagggcgggcgcccatgcgtgagcagtgggggatccagagaagctggcatggatggcgtcggatggttgaggagtattgcggtgcgtgcagcggaggatgcgggattttccaaaggaatgtcatatcagaagtgggcagctgcaaagcatggtcgaagaggaggtcttttcagtcactggctgcagacgaggcaacgatgtagaagcatcacgagggccacgccggagatggagagcttggccaccggtgatgtggcggcgctgtcgccgagggccatcagattcgaggagatggtggactcatctactgccggagatgtaggcgaagagcaatggctcgatgaagagggtgatgcgacgttgagggcggaggcagacgagtgtgaggcccaccacagttgtgaccccccgacggtgacggcagtgttccagcggcgtgggggcgacgaggaggcctgcgaccacgcactcgacgtagccccacacccacatcgggcgcagatccacgatctcgggtgggggtatgggacctga

SEQ ID NO: 41329 - DNA, 306 bp, Zea mays
  Peptide Sequence Number=SeqID_83108
atggagagcttggccaccggtgatgtggcggcgctgtcgccgagggccatcagattcgaggagatggtggactcatctactgccggagatgtaggcgaagagcaatggctcgatgaagagggtgatgcgacgttgagggcggaggcagacgagtgtgaggcccaccacagttgtgaccccccgacggtgacggcagtgttccagcggcgtgggggcgacgaggaggcctgcgaccacgcactcgacgtagccccacacccacatcgggcgcagatccacgatctcgggtgggggtatgggacctga

SEQ ID NO: 41330 - DNA, 453 bp, Zea mays
  Peptide Sequence Number=SeqID_83109
atggaaggttgccgcgccagcaacgcccgcggatggaaggttgccgctcccgcaagctcggcccgcatcgcccccgcacttctcgccaccaacgaccgcggatggaaggttgcggcaccaaatcgccgctcccgcaaatcagcatcagccgcgaaggttctggcagaaagaagacccacgacatcttcaacacagataaataacctgaataaatcccatgcttggatagacgccgagaatgctggtttgttttttacttgtagtaatcctgataacgtaccgaaagaagtcccaagtgatcttgaagaactataccttcaacggcaaaatccaaggggagctcttaagttattttttcctgtatttgaggcactgttcctgtatcgtcttagtggagctcttaagttatcctatgtgttttattttgcaaaattactcattcttaacaaatag

SEQ ID NO: 41331 - DNA, 630 bp, Zea mays
  Peptide Sequence Number=SeqID_83110
atgaagttcatcaacatatggcgactcctcctgtcctccagcacttgtctgctagggaacttcctcttagtcccaaagatgcatctgttcactgccttttcctccttgacctccaactcagtaatcttcttggcatctgccttcttgtcaaccactgcaacttctatggcaggaactattaccatgccattctcgagcttaaatccagcaggcagtgatggccacctggtggtgggcatccggccacagcacatcgaccgggctagcaatgttggaggctacaaggttttgatggaaccggtcgtattgaaccgtgaaagagccgcagcggaccgcctaaaacggatgcctatattgttcgacgactaccgtgatgaagatttttatgggctaccgcggaaatacagtattgtcgctcgggtagaagttaaattcctgattgaaccacgttttcgtgatagacaacatttcattttatctgacatcaatgtcaccatagaatgttctgggctcttcagtactcctgtacgaacagagggttctaagatagtatgttatttgcttcaaagttttgctgctgatcagacatatggagtttcttctttggacgggatagagtgtattttgtag

SEQ ID NO: 41332 - DNA, 1056 bp, Zea mays
  Peptide Sequence Number=SeqID_83111
atggaaggttgccgcgccagcaacgcccgcggatggaaggttgccgctcccgcaagctcggcccgcatcgcccccgcacttctcgccaccaacgaccgcggatggaaggttgcggcaccaaatcgccgctcccgcaaatcagcatcagccgcgaaggttctggcagaaagaagacccacgacatcttcaacacagagaaataacctgaataaatcccatgcttggatagacgccgagaatgctggtttggttaaagttttgcacctggtctatttggtgtacagaaagaaatccaagttttttacttgtagtaatcctgataacgtaccgaaagaagtcccaagtgatcttgaagaactataccttcaacggcaaaatccaagctatctgtatgggatctcaaggctatatatccttgctctccctccttttgtattggggtataaagtttatatgcattcttccggctacaaggttttgatggaaccggtcgtattgaaccgtgaaagagccgcagctgaccgcctaaaacggatgcctatattgttcgacgactaccgtgatgaagatttttatgggcttccgcggaaatacagtattgtcgctcgggtcgaagttaaattcccgattgaaccacgttttcgtgatagacaacatttcgttttgtctgacatcaatggagccaagatcgaggccataacatatatgtatgagacagtcaaacatttcgacaatttgctccatgaaaagcatgtttacaagatgcataatgtgaagttcagtcttcatccgggtgaatttaattttcgtcatctaaatggtcccatggaattgtgtcttgaccaacaaactatcgtggagccatacactgttccaattcagatggcgccattcccaaaacaaatactattgaaccttgctgatattgccgagttgccaaacaggactttagtcggggatatttacatatcattaaagtttgagagtgcctcgagtcttcggatcataccgcaatacacttcaatccgttccatcacaacacccatcattgtcgac

SEQ ID NO: 41333 - DNA, 834 bp, Zea mays
  Peptide Sequence Number=SeqID_83112
atggaaccggtcgtattgaaccgtgaaagagtcgcagctgaccgcctaaaacggatgcctatattgttcgacgactaccgtgatgaagatttttatgggcttccgcggaaatacagtattgtcgctcgggtcgaagttaaattcccgattgaaccacgttttcgtgatagacaacatttcgttttgtctgacatcaatggagccaagatcgaggccataacatatatgtatgagacagtcaaacatttcgacaatttgctccatgaaaagcatgtttacaagatgcataatgtgaagttcagtcttcatccgggtgaatttaattttcgtcatctaaatggtcccatggaattgtgtcttgaccaacaaactatcgtggagccatacactgttccaattcagatggcgccattcccaaaacaaatactattgaaccttgttgatattgccgagttgccaaacaggactttagtcgacattatggctgttgtagtccacttggatacaatacatcgcacaatgtggggccctttcagaaagattgttataatggatgctaggggatatttacatatcattaaagtttggggtgacctactgaacaaaaatgcactccgctgggcgttggctaaggaggattatggcataataattgggactatgtttagacggttcagaagacaagagtgcctcgaatcttcggatcataccgcaatacacttcaatccgttccatcacaacacccatcattttggaccaatccaaaaagctttggtggcgcggaacaaccgtcagtttgctgttacatttcttgaagaacaaaggcgtagatag

SEQ ID NO: 41334 - DNA, 465 bp, Zea mays
  Peptide Sequence Number=SeqID_83113
atgtggttaccagcaaatggaagctcgctattggggtcaatgggtgggatgattgcagcagcgtggcactatgccactggccttgccgccactgccgcccttgccgccatcgatgcagccaccaccgtcgctctcaccgccaccgctggtaccatcgccaccgtcgccactgccaccacggtcaccctcaccgtcaccacggccaccactgtcaccctcgccaccgtcgctgccgtcgtcgcccttcctaccactgtcactgctgttgtcgccgccgtcacccttgccactgtcgtcgccctcgtcgtcaccatcgctgccgctccactccttggaagagtcaaaggagtccgcctcatccgaggagacccccgacttgtggcagaacctcccaagttattgggtccacatgcacctgtcccttgtcttaacgacctcagacggctatgcatgtgcaccaaataa

SEQ ID NO: 41335 - DNA, 549 bp, Zea mays
  Peptide Sequence Number=SeqID_83114
atgggtagaggcaggaggggtcatggatggcctcgctgcggctacaacaagcgcaagcgtgccccaagtccctcctcggaggactttggggactcggagtactcggaggaggtatccttcgagttggaccgctcgcccactctggcttctcccccggcgtcatccgaggactcggatgattccatggggctttccaccgtggcccgagcgtactggcgctccatcgagcgcgccgagcttggtgggtcggacgagtcaggggtctcctcggatgaggcagactcctccgactcttccaaggagtggagcggcagcgacggtgacgacgagggcgacggcagtggcgacgacagcggtgatggcgatggtggcgacgaaggcgacgatagtggcaagggcggcagtgaaggcgacggtggcagttgcaatgacggcgatggtggtgacggcatcagcaagggtgacggtggcgatggcgacagcaagggcgacagtggcgacgacggcagtggcgatggcaaggccaatggcacagcgccactggtttaa

SEQ ID NO: 41336 - DNA, 210 bp, Zea mays
  Peptide Sequence Number=SeqID_83115
atgcagtttctgcctatgcccaccccgttggtagaatcactagccttcgcagctggatcgtcagcttcagcactgccagcactagcagtccaagcccctgctcctggaggcaacgacccggacgactctggtgacgacgatgatgacaaagaagaagaagtagaagaagaagaagaggagaacatcaacgatgaagccaacgatgaatag

SEQ ID NO: 41337 - DNA, 303 bp, Zea mays
  Peptide Sequence Number=SeqID_83116
atgggcgcgtgggctggcgtcgtggccgagaaatctggtgacgtgcgcgagtgcgcacgcactggtccacgagtcattctggaggacagctcggaggagtttctgcctacgcccaccccgttggcagaatcactagccttcgtagctggatcgtcagcttcagcaccgccagcactagcagtccaagcccctgctcctgaaggcgacgacccggacgactctggtgacgacgatgatgacaaagaagaagaagtagaagaagaagaagaggagaacatcaacgatgaagccaacgatgaatag

SEQ ID NO: 41338 - DNA, 282 bp, Zea mays
  Peptide Sequence Number=SeqID_83117
atgcaagatgcagcacgacgggcactttctcagtattgctcgttgttcagcggggtagctgatggccttgacctgaagtactaccctcgtcgttcgatcggcagtgctggaggtgtgattgtctcgccagtcgatgagggcaatcccaggctaagtagcatggtcaacttggccgccgtgctccacacagagttggaccacgcccttgacgagttgggcaagatgtctgagaacaggcgcagaggtgtgaggcgtgcacagccagagcagcaggcatcctaa

SEQ ID NO: 41339 - DNA, 726 bp, Zea mays
  Peptide Sequence Number=SeqID_83118
atgactaccagccttgtggtggagagaagcgagccgagctgcggcctccccctgccctcagcttcaaggatgttcatcatccgcgctggggaggagggcgagccgaatgggagctccgccttccgcgtgggctggcggtccgcttcttcctccagcattcgggggagaagggcgttcgccggcctcgcggaggaggcaaactctggtcgcaccgagaggtcgtacaagacgttgtacgctgtgcgggtggaggcggcgttcttggatggtcttgtcctcactctcgtagtgaggacgagagcgaagacctcttcgtgcgtgctggtgcagccgctgtccatcggtgcagaggtggtcgctaccactggtggggatgatgtggtcgcttccgctggtgaggctgcccattgcagaggtggttgcctccgctggcgagaccgtcagtgccacctgccgtcagaccccgactctttggctttaatggcctcactgttaccccccgtaggaggacgggggcgaggacctattcgcagtagcgctcacccggaggtgatcgctgctactggcgagccgctcggagcagaggtcgttgtcgctgctggtgcagaggtggtcgccatcgttggtggggatgttcggcgtcagcttccaacgcgactcttgccggtgcagcgtagttcattcctgcagaaatggagctggggtcccgcttgtaagggaatgtaa

SEQ ID NO: 41340 - DNA, 1200 bp, Zea mays
  Peptide Sequence Number=SeqID_83119
atgcggtggatccatgcggcacagcacctcctcgcttgccctctggcgatccttctcgtcgctggccaggagcggatctcgtctctattgcttggtcgaacggggaacgagcaggccttaagagttatcgggtgcacgctcgctagacgcgtgaagtggctcgttggcgatggggatgtgcgtgtgctgaagggggcatgcacaaagggactgggccccgacatgtgggcccaggggctgcacgacttctcgtcaggtttggcccggtggcttatgccatgggccacaagcagcgggtctccacctgagcgggaagtggagggcaaggcccgcacacataatcctgtgacagtcccgagaagacgtggcattagcgcaagcggcggtgcggtttctttgcacacggtgagatccttggtgcacgccgggggagacttcacccgtggcgcttcaggggcgcgagcggggagatctgcctttaaaaaggggtcgatctcccgggcagtagtcatgcctcgctcctcttgcgacaaccgcgccctttcgccttccgggcctccagatggggtgcgccggtgttctctggagggatccgcgtcaaggccatctcttcactcgtggtggtgtcgccgatcttgtcttcttcctgctgctgttggaggggtgcaaccccatgggagttggcatccttccaccaccatttggcttcaaggattttcatcatgcagcccggctgcagtcccccgccggtggtcatccagaaggatgactaccagccttgtggtggggagaagcaaaccgggctgcggcctccctcctgcccttagcttcaaggatgttcatcatctgtgctggggaggagggtgcgccgagttgggacccgcctccacgtgggtagcggcccgcttcttccctcagtgttcgggggagaagggcgttcgccgtctgtggcgctgtcagctgcagcgtgtctggctccccggcctgggtagctctggtgccgcctccggcgccgcctcctaccgctggggcggagcgtggctgcccatccaccgcacgggcgacggtcgcaccgtgcgcgggttggccacatccacggcttctcctgcggtaccagtcgtactgggaggtcgtacaagacgtcatacaccgtgcgggtgggggcggcgttcttggatggtcttgtcctcactcccgtag

SEQ ID NO: 41341 - DNA, 657 bp, Zea mays
  Peptide Sequence Number=SeqID_83120
atgcaaccttggcgtgcgtgccagtacgctttccgaactccaccgaacgatcctgtttggtccatcgtcaccttcctcttccttcttcggttcttcgccagccccggcgaggcgtccaagcggattagcggagagcgtcggggcggcgacatgtgggtgttctacctgatatcgctgcctctgacgctgggcatggtcgtcgtcacgctccgctacttcgccggccctgccgtgccgcgctacgttgtcgccaccgtaggatacgcatggttctgctccctctccatcatcatcctcgtccccgccgacatctggcaggtcagatcccttgccgcgtccctctcccaccttttcatccaccgtcccctgttccggccatcgtcggccccaggctccgccggcttggctgtcggtgttgttagatccaccgggtgtggctcgtgtcgtgttctagttgcgttgcaatcttgggacattaactgccagtgcgaaggggggcattggattcttttggagctggtcctattggagcacatttatcctaacatgtcacttttggttcatgagatatctgttcttaaggcgtcgcctaggcgtccgggcggtggtctaacgcctaggcgccttgcccgcctacctcgcctaggcgccgcctag

SEQ ID NO: 41342 - DNA, 315 bp, Zea mays
  Peptide Sequence Number=SeqID_83121
atgacggtatgcaggcagcactggagcttgctccgagatgtggagattgtgatggttaatgggttggctccgtggggaaactcacatttcattccgcgaggacccatgagagaacctctgagtgcactcggtcgagctgatattgtggtcattcataatgctgacatgaactctgttcttaaggcgtcgcctaggcgtccgggcggtggtctaacgcctaggcaccttgcccgcctacctcgcctaggcgtcgcctatgcgccgcctaggcgtccaggcggtgctccaacgccttggaccgccttaccgctttaa

SEQ ID NO: 41343 - DNA, 423 bp, Zea mays
  Peptide Sequence Number=SeqID_83122
atggctggtgaaggctctgcgcggttgacagcgtgggggaaactcgcgagcaaccaccagggagcgactcgacgagcatcagagggcagcgctggcatgaagagggacgagggagggactggcgcaggaagggagaaccgaagacaagggagggcgagctcagctggcgctgctggcggccatgggagagggagcgcgcacagggagggattcagggggagccgccatggggagaggaggagatgggggcgagctgcaggtggaggagagcgcggctgtgagggagagcgctgggagacggagcttgggcgagctccatgcctgggagctgagggcgagtgcaagcagacagggagtgcacccgccatggctgagggagggggtggccatgggagtagtgacggcggctgcggcgtggaatag

SEQ ID NO: 41344 - DNA, 252 bp, Zea mays
  Peptide Sequence Number=SeqID_83123
atggggagaggaggagatgggggcgagctgcaggtggaggagagcgcggctgtgagggagagcgctgggagacggagcttgggcgagctccatgcctgggagctgagggaacagagaggagatttccaatgttccatggttactgctgctgcccgcaagggtgagggcactcacaccggaaggacaccagaggagaagcagcagaggtcgtcgagcaccaacgacgaagggagcgactgtggacggacctag

SEQ ID NO: 41345 - DNA, 1011 bp, Zea mays
  Peptide Sequence Number=SeqID_83124
atgggatacacaacttgtgggtacagggtacaacctctgcagagtgtaaaactgccttacacttcacatgaactcccacctttggtgagttcatgccacgttattccccacaacttgttgagcgatgaacatgtgtggttggaagcgcggcggggtttgcgggagcccgcccctgagcggcgggctgttcgcggggtaccccgtggtgggcccgaggacgtgctgctaacggtgtgcccctgggacccgcgtgtgcggggcggcaccctcttccaccagaccaccttcagcctccccgtgcgccgcgccgtgctgttcgtcgccgaggtgcaccggctgcgggacctggagcctagggcgctgtgtggcatggagctctacgacggcatcctcatgcgctacgtgaaggcgtccacagtctacctaggcaagcccgcgccgcgcggggagccgtcgggagacatggtggacttcgacatcacatactaccgcagctgtgaccccgggcaggcgcgcctgttcgaggacgtgctggaggaggtcgtgcagatgggcatcttcaagtacggcggcctgccgcactggggcaagaaccgcaacctcgccttcgtcggtgccgcgcgcaagtaccccggcctaccgcgcttcctgcgcatcaaggacgcctacgaccccgatggcctcttctccagcggtggcggcgagcgctgcggccagctgcgcgcactggtcctgctcgtggagcacgacgtcggtgaacggggccagcgccgcgggcggtgcgcgcacggaggagtccgggtcccggacgcggcgcagcgcggtggccaggagcctgggcacgagcggcgcgacggcgtcccgctggtgctttccggcgacgagcgccagcagccgaagcgagtgccgccgcagcggcgtcctgtcggttgcgaaggtggttggaagcgcggcggggtttgcgggagggcgtgcgggcggatgcgggggcggtttacactgctaacttaa

SEQ ID NO: 41346 - DNA, 1026 bp, Zea mays
  Peptide Sequence Number=SeqID_83125
atggcgcgccagcagccggagcgagtgccgccgcagcggcgtcctgtcggttgcggaggtggttggaagcgcgtcggggtttgcgggagcccgcccctgagcggcgggctgttcgcggcggcgacgagcgccagcagccggagcgagtgccgccgcagcggcgtcctgtcggttgtggagcccgcccctgagcggcgggctgttcgcggggtaccccgtggtgggcccgaggacgtgctgctaacggtgtgcccctgggacccgcgtgtgcggggcggcaccctcttccaccagaccaccttcagcctccccgtgcgccgcgccgtgctgttcgtcgccgaggtgcaccggctgcgggacctggagcctagggcgctgtgtggcatggagctctacgacggcatcctcatgcgctacgtgaaggcgtccacagtctacctaggcaagcccgcgccgcgcggggagccgtcgggagacatggtggacttcgacatcacatactaccgcagctgtgaccccgggcaggcgcgcctgttcgaggacgtgctggaggaggtcgtgcagatgggcatcttcaagtacggcggcctgccgcactggggcaagaaccgcaacctcgccttcgtcggtgccgcgcgcaagtaccccggcctaccgcgcttcctgcgcatcaaggacgcctacgaccccgatggcctcttctccagcggtggcggcgagcgctgcggccagctgcgcgcactggtcctgctcgtggagcacgacgtcggtgaacggggccagcgccgcgggcggtgcgcgcacggaggagtccgggtcccggacgcggcgcagcgcggtggccaggagcctgggcacgagcggcgcgacggcgtcccgctggtgctttccggcgacgagcgccagcagccgaagcgagtgccgccgcagcggcgtcctgtcggttgcgaaggtggttggaagcgcggcggggtttgcgggagggcgtgcgggcggatgcgggggcggtttacactgctaacttaa

SEQ ID NO: 41347 - DNA, 315 bp, Zea mays
  Peptide Sequence Number=SeqID_83126
atggggcaagtcccccgggctgacctttctgtcggggcggccatcgtgccggaggagattgctgacgcgatcgtggccccgagcccgcctgacctgttgctggcgccggcgtcgactcccgccggggccgtcgctgattcgcccgcggagccgcccgtcgcttccgacgtcgggatggttgaggagtcaccgcttgtggtcgtccccgacctccccgttcttggccacgaggagagggcgaccgccgttgccgaggaacttgcggatatgagcaccgccaagtcgttgttcatccaccgtgagagcggcatctag

SEQ ID NO: 41348 - DNA, 273 bp, Zea mays
  Peptide Sequence Number=SeqID_83127
atggcggcggtcccccagcgcgcgctagggtttggatgcttgagaccgattgatgcaattcttgaggatcttctggacctgtgggttaggactcacacacgctttcgttgcgccactctgatcttgttggttgatgttgatcgcatggtcttcattggggtattggaggttgccaaatggacaggtgcaagaggaaagaatagcgagaaaaggcgttggatgcacatagcagaacacggaatgacagtcgggctttgcagggagggggaatga

SEQ ID NO: 41349 - DNA, 367 bp, Zea mays
  Peptide Sequence Number=SeqID_83128
agaggagttggagattgccaaatggacaggtgcaagaggaaagggtagcgagaaaagggagtacctactctctaaggttatcgaaggacgaggagaagaacaagatgtgcaggatgggggcatgagcacaataaaggatggggttaaagcaaggaatgtaaccgacgagggagagaatgcaaccgaggtcaggataggtaaaacaccattctcaaatcaagatggaaaagatgatattccaaaaggtaggcataagataacatcatacaaagatttagagattacaaagggatggaaaagaggaggctttaaagggtatgttcaaagtaagcatgagggcaagggcatagatatcacgagggtttaa

SEQ ID NO: 41350 - DNA, 678 bp, Zea mays
  Peptide Sequence Number=SeqID_83129
actgagtgggtgctcgacatggtatactgcctgcttgggtgggatgcgctggcgttcggcggaaggacttgcgtcgacgccatccaccccaaggtgtgcggccttgtgggagcggcgctcttccaccggtgcttggcttcaaggatgttcatcagcctcacagtggtggagagcgagctgagctgcggcttcgcctcccacatgggctggtggcccgcctcttcctccagcattcggaggaaaaggatgatcaccagccttgtgaaggaggagggcaggggcgagggcctctttgccatggcgcgcacgctgaggtggtcgccaccgctggggaggctgcccggcgcacaggtggtcaccgccgctgaggtggtcgcctccgctggcgagccgcccggagctagcttccaacgcgaccctgctggcccatggtatgggaccaggctgagcagttacacggctccggaccaccccaggagacaagatttcgggtacaggaccaggctaagcggccacacaggctccggaccaccccatggaatgggttctcgttctttagaaccagccctaggctatcgggccctcctgctttcgcagagaggtcctaaactgcaagcctggctgttcaattcggatgtcctcatgtctgatgaaatgggaactgttcgggtgggttag

SEQ ID NO: 41351 - DNA, 1062 bp, Zea mays
  Peptide Sequence Number=SeqID_83130
atggcccccgggctcgccttaggggagggtacgagcctacaggtggggccaaagcttgattcgcgattggcgcgccgcttccgtgcacttgctgacataattactgtcagtccaccttcagtcacgtcaaccatcatgcttgttcccgcggctaactggcacaaaccggcgcccaaggaggatgactcgtgggcccaggcccccatgccagagactgggctgtcggtttcggtgggggcgaagaggcgcactaccgcaggcagtcgagcgggggtgtttgcctttaaagaggggttcatccctcgagtagcagccatgccttgcttctcccccactcgcggcgtcctctcacctccgagctctctgcacccctttgccttcaagactgagtgggtgctcgacatggtatactgcctgcttgggtgggatgcgctggcgttcggcggaaggacttgcgtcgacgccatccaccccaaggtgtgcggccttgtgggagcggcgctcttccaccggtgcttggcttcaaggatgttcatcagcctcacagtggtggagagcgagctgagctgcggcttcgcctcccacatgggctggtggcccgcctcttcctccagcattcggaggaaaaggatgatcaccagccttgtgaaggaggagggcaggggcgagggcctctttgccatggcgcgcacgctgaggtggtcgccaccgctggggaggctgcccggcgcacaggtggtcaccgccgctgaggtggtcgcctccgctggcgagccgcccggagctagcttccaacgcgaccctgctggcccatggtatgggaccaggctgagcagttacacggctccggaccaccccaggagacaagatttcgggtacaggaccaggctaagcggccacacaggctccggaccaccccatggaatgggttctcgttctttagaaccagccctaggctatcgggccctcctgctttcgcagagaggtcctaaactgcaagcctggctgttcaattcggatgtcctcatgtctgatgaaatgggaactgttcgggtgggttag

SEQ ID NO: 41352 - DNA, 225 bp, Zea mays
  Peptide Sequence Number=SeqID_83131
atggggtctggccgcaccccttgcgccattgccacaaacttcgcggggctggtgctgctcggactcttggctggcggacaccgtcgtgggctaggaacagccacaactcagttgcctcgcgtgaagaagatggtggaggaccgttggatccgcgatgaaggattgaggcacttggatcttgatcggatggatctgagcgcagcataccccttcggccatgcctaa

SEQ ID NO: 41353 - DNA, 321 bp, Zea mays
  Peptide Sequence Number=SeqID_83132
atgtggatcctcaacgagcgcgagatggttggccttggttcgttgatcgacgggggaagactttgccctggagtcaacgatcggctgggggctctggcacagctgctgctcggactcctggccgacggacaccgtcgcgggctaggaacagccacaactcagttgcctcgccactacaggaatcctgaagattcccgttggccagaatatgacgagctaccaagaggtaggccacactacacctgtgctcacatgatttcgtgccaggctataaggtctggtatctccacggtgaagatgttgaacgagcagcagaagtag

SEQ ID NO: 41354 - DNA, 501 bp, Zea mays
  Peptide Sequence Number=SeqID_83133
atggactgggacgattcaggagcattggagaatttcgaggccgcaaaggagaggttcggggcaaaatatcatggggaacctttcgaggatcctttgctagatcctgatatgtacatcgatgaggtcgaccacctatgtgaagtcgacccagagttggtagctgacctggataaggtacctgacgtggataaggtagttgagctacaattggtagccaacctgggttgtggtgagccggttgctgatctgcgccgcgcccatcgcgtcgccccaccgcagcggcgcccccggcccgccgcgccgccccaagcccccgcagcgccggccgtcgccccgcagcgccggccgtcgcccaccacgccgttcgacgcgcttgcagcgccgcccgctcgtgcccccgacgtgccgccgccaagcccgacgccttgccagccgacgccaccgacgcgccgtcgaccacgccgcgctctgccccgtcccgtcaacctcgccttcattaag

SEQ ID NO: 41355 - DNA, 255 bp, Zea mays
  Peptide Sequence Number=SeqID_83134
atgctgtcgagaagggagaaggcaacaaacttcaaaccagactatgatattgatatccatatgaaggtcctagctatgagtgtgcaagaatccggtattcttacaggctacaaaatgaaggtagtatttgtatatgatgctaatctccttattgtcgcacatgttcacgctggagaagatggcatgcgcgaacgaggcgaacgtggcgtggcagtcgatgtgcagtggcaaacccaaaaatcttcaaaagcctag

SEQ ID NO: 41356 - DNA, 603 bp, Zea mays
  Peptide Sequence Number=SeqID_83135
atggccacgggccacgctgctcctgggatccgccgccgccttgccgcgtcccggtttcgcggctacagcgccgttcgcgtcccaatggagacgtcgccagatcaccctgattacacgattaatggagaggagaaacttttctttggacaagtgaaattgctattccagttcatcccactattaaagttgtctatagtgcacacccaacagctgatgtatttatcaactttgcatccttccgaagaaatgctgtcgagaagggagaaggcaacaaacttcaaaccagactatgatattgatatccatatgaaggtcctagctatgagtgtgcaagaatccagtattcttacaggctacaaaatgaaggttcgcactattaaagtggaaaagaggatcaatgagattgtgaaccgcttgaataagacaaaggtggaacggaaacctgatttaaaggcttttccaaaagcacctcctgaagaagctttcgggaaaagcttgggaagctgctccttgaaagcttctctgcttttcgtacaacaaagtgctgcttttatcagcttgaagaagctgctgccctgtttgggggagcctctagctttttga

SEQ ID NO: 41357 - DNA, 753 bp, Zea mays
  Peptide Sequence Number=SeqID_83136
atggccacggccacgctgctcctgggatccgccgccgccttgccgcgtcccggtttcgcggctacagcgccgttcgcgtcccaatggagacgtcgccagattcagcaagacaattcaaactttgcaagttttggaagactaatacctaactttttggtaactcgaatgaaacatgcacatacagatcaccctgattacacgattaatggagaggagaaacttttctttggacaagtgaaattgctattccagttcatcccactattaaagttgtctatagtgcacacccaacagctgatgtatttatcaactttgcatccttccgaagaaatgctgtcgagaagggagaaggcaacaaacttcaaaccagactatgatattgatatccatatgaaggtcctagctatgagtgtgcaagaatccagtattcttacaggctacaaaatgaaggttcgcactattaaagtggaaaagaggatcaatgagattgtgaaccgcttgaataagacaaaggtggaacggaaacctgatttaaaggctgaaagagaggctattagtgctgctgaaaaggcagaaagaaaggcacagcttagggacaagaaacgtagggaagagatggagaggcttgacaaagagaagcaggctgatatcaggagctacaagggtctaatggtccaagagaagatgacttccaacaagcaaatcgcttctggcagcaagaccctgcaggaacttgaagaagacttcatgtga

SEQ ID NO: 41358 - DNA, 519 bp, Zea mays
  Peptide Sequence Number=SeqID_83137
atggagacgtcgccagatcaccctgattacacgattaatggagaggagaaacttttctttggacaagtgaaattgctattccagttcatcccacaaatgctgtcgagaagggagaaggcaacaaacttcaaaccagactatgatattgatatccatatgaaggtcctagctatgagtgtgcaagaatccagtattcttacaggctacaaaatgaaggttcgcactattaaagtggaaaagaggatcaatgagattgtgaaccgcttgaataagacaaaggtggaacggaaacctgatttaaaggctgaaagagaggctattagtgctgctgaaaaggcagaaagaaaggcacaacttagagacaagaaacgtagggaagagatggagaggcttgacaaagagaagcaggctgatatcaggagctacaagggtctaatggtccaagagaagatgacttccaacaagcaaatcgcttctggcagcaagaccctgcaggaacttgaagaagacttcatgtga

SEQ ID NO: 41359 - DNA, 387 bp, Zea mays
  Peptide Sequence Number=SeqID_83138
atgcgccaaggggtcccttttatagccccaaggcagctaggagccgtcgggaacaaatctggaaggccatctttgccttctgtctcgtggcgcaccggacagtccgtcgccggagaaaaacccgagagcggcctcttcggccgaggcagcctggcgcaccggacactgtccgctgaaagagaggctattagtgctgctgaaaaggcagaaagaaaggcacagcttagggacaagaaacgtagggaagagatggagaggcttgacaaagagaagcaggctgatatcaggagctacaagggtctaatggtccaagagaagatgacttccaacaagcaaatcgcttctggcagcaagaccctgcaggaacttgaagaagacttcatgtga

SEQ ID NO: 41360 - DNA, 402 bp, Zea mays
  Peptide Sequence Number=SeqID_83139
atggccgcggccacgctgctcctgggatccgccgccgccttgccgcgtcccggtttcgcggctacaacgccgttcgcgtcccaatggagacgtcgccaggttcgcactattaaagtggaaaagaggatcaatgagattgtgaaccgcttgaataagacaaaggtggaacggaaacctgatttaaaggctgaaagagaggctattagtgctgctgaaaaggcagaaagaaaggcacagcttagagacaagaaacgtagggaagagatggagaggcttgacaaagagaagcaggctgatatcaggagctacaagggtctaatggtccaagagaagatgacttccaacaaacaaatcgcttctggcagcaagaccctgcaggaacttgaagaagacttcatgtga

SEQ ID NO: 41361 - DNA, 633 bp, Zea mays
  Peptide Sequence Number=SeqID_83140
atggccgcggccacgctgctcctgggatccgccgccgccttgccgcgtcccggtttcgcggctacaacgccgttcgcgtcccaatggagacgtcgccaggttcgcactattaaagtggaaaagaggatcaatgagattgtgaaccgcttgaataagacaaaggtggaacggaaacctgatttaaaggctgaaagagaggctattagtgctgctgaaaaggcagaaagaaaggcacagcttagagacaagaaacgtagggaagagatggagaggcttgacaaagagaagcaggctgatatcaggagctacaagggtctaatggtccaagagaagatgacttccaacaaacaaatcgcttctggcagcaagaccctgcaggaacttgaagaagacttcatatacaacagttcattggccatgagttttgccaatccagcaagcgctaattcgcatcagctgggccgtggtagtttctcctcctcagctgcgattctggggcaggttgctgaagatgcagtcaggttaagggaagagaggaacgaaagtaccacagccgccttccttgaacaagatcttgaagtgaaatatgggctgattgaacttctcaccatgcacaaacaactgcagaggtaa

SEQ ID NO: 41362 - DNA, 441 bp, Zea mays
  Peptide Sequence Number=SeqID_83141
atggaggagacaaccaagcaacctttgagcattcttgatcatccacactcagtctttgcgcatccgtttgttattctaagtgattcaagctccgttcttgtgagaactttgtttgtgcatggtgagaagttcaatcagcccatatttcactgcaacaacatctctggattcgttgaaccagaaggcggctgtggtactttcgttcctctcttccttaacctgactgtatctgtgcggcgctacaatgagtttgaagcccagtctgctgctaacatggcaccgcgtgtggatcctctgcaagccgcgcagactcctatcgatgatatgatgcgtcatgcgtatgttgacccaaatgaccctaccaagatttaccttcagcaacctgccccagaatcgcagctgaggaggagaaactaccacggcccagctgatgcgaattag

SEQ ID NO: 41363 - DNA, 198 bp, Zea mays
  Peptide Sequence Number=SeqID_83142
atgcggcttcatatccttagaggtatgaaggcagaagtcatccttgcatttgcagacatttgcactcatgaggtactgatacatgttgggaatgaggggagtagcagcatgtccactttcactctcacaataacgctgcccaggcgcagccatgatttaattagaaacttattgtcaaaggagatattatgcaagtga

SEQ ID NO: 41364 - DNA, 573 bp, Zea mays
  Peptide Sequence Number=SeqID_83143
atgaggtacttgatacatgttgggaatgaggggagtagcagcacgtccactttcactctcacaatagcgctgccgagatggcagaagtgttgtttagtagcatccggggtgtttgtggaccctcggggtgttacactcaccctggatgcccagtatgatttcttggctcggcaccaccgtcagatgattacccgagcagaagatgcagagaagcgcaaccgtcagctccatgtggatctcaccacagctccagctcgtacaactacattggaaagtcgtgaagtcattgcggttgaagccctaaagcaagccaaggatgagcatgtccataagctaatggaggactacttggtaacccacaaccaacatagagccctacgaatccaagagccccctccatccaacccagttcaacccatgagagctgaagatccccagattcttgaagggcacccggtctctaccagaggggaaaagaagacttgggaactaccggaaggagccatagtcttggaaggaattccagtcttccctcaggctatggataagcaagagcaccctgaatcctcctaa

SEQ ID NO: 41365 - DNA, 231 bp, Zea mays
  Peptide Sequence Number=SeqID_83144
atggcgcagtggcttacccggtctacgctcgccggcggtcgaagggagtccggcgaccgtggactggcctctccggcgaagcagacttcgattcctcgctcggggagcttcaccgagaacgcgtcgaacacgtggaagtgttcatctgcccgtgttcaaacgcctgctgagatcgcaaacaacttaggtggttttggtgccatcttcaaggtgaacacggtggatctttag

SEQ ID NO: 41366 - DNA, 231 bp, Zea mays
  Peptide Sequence Number=SeqID_83145
atggcgcagtggcttacccggtctacgctcgccggcggtcggagggagtccggcgaccgtggactggcctctccggcgaagcaaacttcgattccttgctcggggagcttcaccgagaacgcgtcgaacacgtggaagtgttcatctgcccgtgttcaaacgcctgctgagatcgcaaacaacttaagtggttttggtgccatcttcaaggtgaacacggtggatctttag

SEQ ID NO: 41367 - DNA, 336 bp, Zea mays
  Peptide Sequence Number=SeqID_83146
atggagacccgcttttgggaactgaagatcgcttttgggaactatcccagttcatctaggttactcttagaacttgcccccctgctgtgcagggactatggttttatgcttaggctatggcatttatcttatagtacaggaaatagacacctaagcagctcctatgttccattaaagaaagaaggcagttcaattttgaatgataagaaaaataccaagaatacattgatgcagcaccatgttgctcttccaccaggttctatgaggaaaataagttacattgcaccagctggtcagtacaaccttcaggacacagtgctagaattggaattttag

SEQ ID NO: 41368 - DNA, 417 bp, Zea mays
  Peptide Sequence Number=SeqID_83147
atggcaggggcggcggctacagggaaaatggcggctagggttaggatgttgggcctaatgggccttaggatattaacggtatacatcaacaattcattctattttaattgcttgcaaaacttttttggcccttcaaatgagttccaggcatcaagaggtcaagattccaggatgcctaaaatagaatacaacctggttgctgttcctacaaaacagtctaggcttatctgcatttgtcttcctttgcatcaaaattacagattttttttagaacacattgatgcagcaccatgttgctcttccaccaggttctatgaggaaaataagttacattgcaccaactggtcagtacaaccttcaggacacagtgctagaattggaatttcagggcataaaaagaattttaccgtgctttag

SEQ ID NO: 41369 - DNA, 174 bp, Zea mays
  Peptide Sequence Number=SeqID_83148
atgaaatactgcgagacttgcatgaacacattgatgcagcaccatgttgctcttccaccaggttctatgaggaaaataagttacattgcaccaactggtcagtacaaccttcaggacacagtgctagaattggaatttcagggcataaaaagaattttaccatgctttaggtga

SEQ ID NO: 41370 - DNA, 423 bp, Zea mays
  Peptide Sequence Number=SeqID_83149
atgaatagtacaaattgcttttccaggctccatgaagatgagttccaggcatcaagaggtcaagattccaggaggcctaaaatagatccatgtattgtaccacaaaattcacacccaccggtggaagaggtctcttatggtgcttcagctccacatgctcttcagttccctcgagtaaaagaggttatggtcaatggcgttcatgtgaaagatgaaatactgcgagacttgcatgaggaaacaagttatggattttttttagaatacaacctgaacacattgatgcagcaccatgttgctcttccaccaggttctatgaggaaaataagttacattgcaccaactggtcagtacaaccttcaggacacagtgctagaattggaatttcagggcataaaaagaattttaccatgctttaggtga

SEQ ID NO: 41371 - DNA, 603 bp, Zea mays
  Peptide Sequence Number=SeqID_83150
atgaaggctcccactccaagttcctcaagtgaagaagaggaagaagaagaaagtgatgatgatgaagataatcaaccatcaacatcctcctctgaggacgaaaaaacaatccaatgcgtcggaaaggtagaggatcttctctttaacattgacagaaaaaagcaaagaaagagaggatgcttcacatgcgaagagaagggccactttagggacagctgtccaaatatggccgaactcaaaaaggggaggagcaaaggcaaggatgttgtcatagaaacatgttcggacgagattgcaatggagaatgagcaattaaagctatgtcacaaagaaggccacaagtctttccaatgcaaggcgaagaccggggataagcagaagcaaaagccaacaagaaaaatctctaacatctacatcaataaggtggacaaaaaggctgctacaacatttttaatcaagaagaaaaagaatggaaaggtgatagcaatcaaggccaacaagcaagccaacaaagggaaaggggccaaacgcatatgggtgccaaatgagattatttcaaccatgaaaagcaccaagaaggcttggatcacaagagggaagtga

SEQ ID NO: 41372 - DNA, 381 bp, Zea mays
  Peptide Sequence Number=SeqID_83151
atggagaagcctgtcccatcactcctcatgctcctcctcagccgaggcagggtcccactcaacagtccaacccggtgcagatcagggctcaccgccttggcgtacaatgcctcactgaccccgactggccgtcgtgcagtgaccgcacttgtacccaccataaccggaatgggagaccacgtctcaggtcgcgtgaggggatatgtccgctggcaggttcaatcagagcagtggcaggcaggtcctctggtgcaggctctggtgctgggtctggggcagcctcctgggcagctccttgctccggcacaaggatgtactctccgtcagcaagattacagtctatcgaaatgcaatgaacatatttcagtggacaatttataa

SEQ ID NO: 41373 - DNA, 381 bp, Zea mays
  Peptide Sequence Number=SeqID_83152
atggagaagcctgtcccatcactcctcatgctcctcctcagccgaggcagggtcccactcaacagtccaacccggtgcagatcagggctcaccgccttggcgtacaatgcctcactgaccccgactggccgtcgtgcagtgaccgcacttgtacccaccataaccggaatgggagaccacgtctcaggtcgcgtgaggggatatgtccgctggcaggttcaatcagagcagtggcaggcaggtcctctggtgcaggctctggtgctgggtctggggcagcctcctgggcagctccttgctccggcacgaggatgtactctccgtcagcaagattacagtctatcgaaatgcaatgaacatatttcagtggacaatttataa

SEQ ID NO: 41374 - DNA, 228 bp, Zea mays
  Peptide Sequence Number=SeqID_83153
atgatgtctgagaacaggcgcagatgtgtgaggcatgcacagtcagagcagcaggcaccccaagaggaagcagcccagcagcagcagttgccaccaccacccctgatgaccattgagcagatgttcttgatgcagacccaggcagttcaggcaattggtcagacattagcagcgatgcagcgagttcagcagcagccaccaccacctcagcctccagtgcaagtctag

SEQ ID NO: 41375 - DNA, 267 bp, Zea mays
  Peptide Sequence Number=SeqID_83154
gtggcaatgagattgttggttttggtattgactctgataatgatgtctgagaacaggcgcagatgtgtgaggcatgcacagtcagagcagcaggcaccccaagaggaagcagcccagcagcagcagttgccaccaccacccctgatgaccattgagcagatgttcttgatgcagacccaggcagttcaggcaattggtcagacattagcagcgatgcagcgagttcagcagcagccaccaccacctcagcctccagtgcaagtctag

SEQ ID NO: 41376 - DNA, 1395 bp, Zea mays
  Peptide Sequence Number=SeqID_83155
atggcaccgggaagatctcttcgccctgtaataattccctcgcccccgcgctgcatcttcgatgacggaccaaaatccgggacgatgttttggtggtcagtctcgtcagtcactgatcaagcggcattccacgtggcgagggtcacggagtacggcgcggtcggggacgggaggacgctcaacacggcggcgttcgccagggctgtggcggacctggcgcggcgcgcgcccgacggcggcgctgcgctggtggtgccgccggggaagtggctcacggggcccttcaacctcaccagctgcttcacgctctacctcgacgagggcgccgagatcctcgcgtcccaggacatgaagcattggcccctcatagctcccctgccgtcctacgggagaggaagggacgagcctggcccaaggtacagcaatttcatcggaggatccaatctcactgacgtcatcatcacgggcaaaaatggaacgatcaacgggcaggggcaggtctggtgggacaagttccacgccaaggagctcaagttcacccgcggccacctcctcgagctcctctactctgacaacatcatcatctccaatgtcaccttcgtcgacgcgccgtactggaacctccaccctacctattgcaccaatgtgaccatcagtggcgtcaccattctcgcgccggtgaattcgcctaataccgatggaattgacccggattcttcctcgcgtgtcaagatcgaggactgctacatcgtctccggcgacgactgcgtggccgtgaagagcgggtgggacgagtacggcatcaggttcaacatgccgagccagcacatcgtcatccggaggctgacctgcgtctcccccacgagcgccatgatcgcgctgggcagcgagatgtccggcggcatccgcgacgtgcgcgccgaggacagcgtggccatcaacacggagtcggccgtcagggtcaagtccggcgccgggaggggcggcttcgtcagggacatcttcgtgcgcggcctcagcctccacaccatgaagtgggtgttctggatgaccggcaactacgggcagcaccccgacaacacgtccgaccccaacgccatgcccgaggtcaccggcatcaactacagcgacgtgttcgccgagaacgtgaccatggccggcaggatggagggcatccctaaggacccctacaccgggatctgcatatccaacgtgaccgcccgcctcgcgccggacgccaaggagctgcagtggaactgcaccaacgtcaagggggtcacctcccacgtctcgcccaagccgtgcccggagctcgccgcggagggcaagccgtgcgccttcccggaggaagagctcgtcatcggcccacccgagctgccgaagtgtagctattga

SEQ ID NO: 41377 - DNA, 963 bp, Zea mays
  Peptide Sequence Number=SeqID_83156
atgtcttcttcctccctcatgcgccgcatctttccaccttccaagcccccggatgggggatgcccgccgtcttttcgcctcatcgttggtggaacgcaactccgtgggagttggtacctttcagccatcgtccggcttcaaggattttcatcagccagcccggctgcacccccccgccggcggtcacccaagatggccaagatggaggatgaggcgagtcggggggctgccttcgtgggggtcggttgccctcttcttccccgggcgtctgggggagaacggcatcctccagctccacggagacttcctccagccatgccgggagaggcgggccgtcgtcactcggccagggcgcagcaccacgtcctccgtccggacgacggcagccctgggtctccgtctcccggcctgaatggctggctctcgtcctcggtgggtgagagtccttctgccgtagcacccgccctgaagccactgctgaagctgcttcgtcactcggggcgagggtgggggacggaaccggagttccgtttgagacggcgcttcgaatgccggtatttctgttcattacggctttcggggcctgaacatgagttcctcggctcggtcggccttgctgtccgaggctcctctagctcagttaaagggacccctcggccgctcttcgatgagccgaggccagggacgaggcctcaagtcgggctggcgccctcgggagatggtcttggccgaggccccgggggtaaccggccgagccgcctgctcgggccggattcccggaggagtccctggcagcgattgcccgagcgtggtgatgacgtcgtccttcggagcggagaacctcggaccgcgtcgccgtccgaggctaagtcaggcctcgccggaggtgtcgtcgatgccgagggtgttgctgcctccttccagcgtcaagacccgagcctgcagggtcaaagtgtcttgtag

SEQ ID NO: 41378 - DNA, 441 bp, Zea mays
  Peptide Sequence Number=SeqID_83157
atggaggatgaggcgagtcggggggctgcctccgtgggggtcggttgccctcttcttcccctggcgtctgggagagaacgacatcctccagcttcacggagacttcctccagccatgccgggagaggcgggccgccgtcactcagccagggcgcagcaccatgtcccccgcccggacgacggttgcgccgcgcatcacgagggcagcgcccacgctctgggcggtctcggcaagggcgaagacctgccggcgtgcttcgaggcgtcggcggctggagatggcttctctactgatgagattgccaactccgccagtagccctgggtctccgtctcccggcctgaatggctggctctcgtcctcggtgggtgagagtccttctgccgtagcacccgccccgaagccgctgctgaagctgcttcgtcgctcggggcgagggtag

SEQ ID NO: 41379 - DNA, 426 bp, Zea mays
  Peptide Sequence Number=SeqID_83158
atgcttgagaagtgtgctctgtccatcaaaaagtatgctgactccaagagggctaaaattattcaagatgaagccctacaatatgctgaagatgatgaagctgcagatgatttggaggaactcccaagcccagatctccttactcaagccgacatattggaaaaatattttggaattgagtatgatagcgaccagtcaagggttagacagagaaggcatggctgtgatgttataatgctgaaggaccccaagaagagattaagccctgtagtctaccacttcccgttatttgtgggcttcaccgatggctggaaacatttggtgatagcaaacgaccttcgggctgaagacgtctgcgagcttgttaaggggccagacgatggtgagccggtgtactatgtccggatgtgtggtcacaaaatttaa

SEQ ID NO: 41380 - DNA, 354 bp, Zea mays
  Peptide Sequence Number=SeqID_83159
atggagaatggcatcggcggaatgcctgaaatcgggtcgggaagcaagctcgcagatagaagtgcactttccaatgcagttagacagagaaggcatggctgtgatgttataatgctgaaggaccccaagaagagattaagtcctgtagtctaccacctcccgtcatttgtgggcttcaccgatggctggaaacatttggtgatagcaaatgaccttcgggctgaagacgtctgcgagcttgttaaggagccagacgatgttgagccggtgtactatgtccggatgtgtggtcacaaaattaaaagccgccccggcttcatctgtgcgcttctcttctcttatgtcggctactaa

SEQ ID NO: 41381 - DNA, 131 bp, Zea mays
  Peptide Sequence Number=SeqID_83160
cgtcccggcgcgcggccggacattcggccctaaggacccatcgagcgaccgagcttgccctcggaccgcgaccccaggcgtcctcagcaaccgaccatgcccaatatctctggacatggacgcctgcgagg

SEQ ID NO: 41382 - DNA, 735 bp, Zea mays
  Peptide Sequence Number=SeqID_83161
atgggggtgccgcgaaaaagaacccacggcgccccgggcgccaaggaacaccagtactacctcctgccccgcggagcgaatcccgcgaaccatcgagtttttgaacgcaagttgcgcccgaagccttctagcggcgggcacgtctgcctgggcgtcacgccaaaagacactcccaacacccccccgcggggcgagggacgtggcgtctggccccccgcgccgcagggcgaggtgggccgaagcaggggctgccggcgaaccgcgccgggcgcagcacgtggtgggcgacatcaagttgttctcggtgcagcgtcacggcgcgcggccggacattcggccctaaggacccatcgagcgaccgagcttgccctcggaccgcgaccccagggaagcggatgggggctggcgacgcgcaccggccgtatgcggaacggctcctgctggtccgccgatcggctcggggcgtggaccgttgtcgcccacgccggcggccaaagcccgggggccctaggcgcccccggcagccgtcgtcggcgcggacggtatccgcgcgcctctggcgcgcccctcggggcgctgcgccgcaacggcctgcgagctccccatccgacccgtcttgaaacacggaccaaggagtctgacatgcgtgcgagtcgacgggttcagaaacctgagatgcgcaaggaagctgacgagcgggaggccctcacgggccgcaccgctggccgaccctga

SEQ ID NO: 41383 - DNA, 741 bp, Zea mays
  Peptide Sequence Number=SeqID_83162
atgagccttgccaacctccagtcctgctctcctcgccgacatgcgaggatctcggtcggccgagctctgcgtccccggccctctcgtgccgagctacgcgtttccacacccgccatcccgcccttcgcgtttccccacccactctacctcccgcctatcacgtcgcccgccatccgcttccgtcgcatgggaatcgaggatctcgacagatccactcgacatcctgcccgcgtttccccgcaaaacaaatactccattttcgtcacacatttattcatcatcaacgtgatccacgcctccactctcgaccactcatctttcctcatctccccatcgcacgccgtgccgccgccgtcacgttcgcacaaacacctccgtcctcgtcgatcccgtccaaccccagcgtccctccacgccggcgggcttgttgggtcctgctcctcctcctcggttgtgcctgctggggtggcggtggcgggaactagagggcccgagccacctggtacggccagcacaacggcgctggccccgacgacaacagagacagtgatcatcactgacatgaactactacccggtgtccaagtaccactttgacctcagtggcacaacgttcggcaggctagccaagctcggcctcaacgacaagctccgccactctggcatcatcgacatcaagttcaccaggattcatcgtcgacattgggggttcgagtctagtttggttgcgcggaggcatgtt

SEQ ID NO: 41384 - DNA, 795 bp, Zea mays
  Peptide Sequence Number=SeqID_83163
atgagccttgccaacctccagtcctgctctcctcgccgacatgcgaggatctcggtcggccgagctctgcgtccccggccctctcgtgccgagctacgcgtttccacacccgccatcccgcccttcgcgtttccccacccactctacctcccgcctatcacgtcgcccgccatccgcttccgtcgcatgggaatcgaggatctcgacagatccactcgacatcctgcccgcgtttccccgcaaaacaaatactccattttcgtcacacatttattcatcatcaacgtgatccacgcctccactctcgaccactcatctttcctcatctccccatcgcacgccgtgccgccgccgtcacgttcgcacaaacacctccgtcctcgtcgatcccgtccaaccccagcgtccctccacgccggcgggcttgttgggtcctgctcctcctcctcggttgtgcctgctggggtggcggtggcgggaactagagggcccgagccacctggtacggccagcacaacggcgctggccccgacgacaacagagacagtgatcatcactgacatgaactactacccggtgtccaagtaccactttgacctcagtggcacaacgttcggcaggctagccaagctcggcctcaacgacaagctccgccactctggcatcatcgacatcaagttcaccaggattcatcgtcgacattgggggttcgagtctagtttggttgcgcggaggcatgttgtatggcgacctctagacctgtgttgtcaatgtggtgctccatctcgacaatag

SEQ ID NO: 41385 - DNA, 750 bp, Zea mays
  Peptide Sequence Number=SeqID_83164
atgactacctgtatggcgagtccctatacttactcatacataagctgcgccgccgtgtcgtcggtgcgtgcaccgcgcagtagtgtgcgtacagcggaagctgcgactgcgagcgaggtagggtgtggggtgggtgactggggtacgtatggccattgtcgttcgtgcttcagcggtcagaaggtgtctgaggttctcgattttctttctgaaagttcatctggacttggttattacaaacaccagtacatgatcgcttatagaaatgaatcgctagaaacgtcttggcggcgtccaggctggggtagtatggcggctccaggaacatttgggcgttcgaatgggagccggagaagaagaagggagcaccagaggcagccgcgcacaggaccgagcagcaccggagcacaggaccgggagcacaggagccgcgcacaggagcgagagagactgagagcgagagcgagagccggagccgccgcacggagaggacgcaggagcgagagcaccggagcacaggagccgcgcacaggagcgagagagactgagagcgagagcccggatctggagccaccgcacggagaggacgcaggagcgagactgcgagagagcgttagggttaccacgatgtcttcgttcgcggtgcgggagggaagtgggcgtgcggctgcggagtgcgctatttgggccgctgggaggcagcctagtatttgtggagccgttgggagttatgtgaacgggccggtttaa

SEQ ID NO: 41386 - DNA, 177 bp, Zea mays
  Peptide Sequence Number=SeqID_83165
atgagcaaagacaccgtgctggtggcggcggtgatatgcacggcgaaggcgtcgggcaaccgggcgctgttcgtgccggcagaggggatggatctgctcgcccaaatgttcctggagccgccatactaccccagcctggacgccgccaagacgtttctagcggattactgggtatag

SEQ ID NO: 41387 - DNA, 759 bp, Zea mays
  Peptide Sequence Number=SeqID_83166
atgacgctgtcgtggccgtcgacccgccacgggaagaaaccagtggtcgtggctgaggaaggcccttcgcaggaggctaccccagccactaagaagagaaaaatagggtcagatgcggggcagctggctgttgtcccgactacggtggtggccacttcgccaacggcggcgagtggggcgaagggtgcttcgcaggacccttggtccaacttctacgcgagcggcgagatttcgtcggtcgccgccgctaaagatgtgatgggctctgtgtcccagcagctgaggcatgcgtcgcagcagctgaagcattcgagcgtcttcgggcgcagcacacggatggagaggttggctgctgcggaggccgagaagggggatctccagcggcagttggtggaggagaggagggacaagaacaaggccattgccgacgcccaggctgctcaagccgaggctaaacttgcgtgggcggaggccagtctcgcctgccaacgcgccgaggagctggaggcgcggctcggcggcctacgcaaccgcgtggacaaagccgaggcctcgacgcgcgtggagattgagcggacgcatgcgcagctcgtggatgcatactgggagctgggtgcacggaccaccgccttcgaagcaaccggccaagaggtgggcctccgcttccttgagtggctgcaggcggagctggctatgctaccgacaatcgtgacgggcctcatgtcctttgcctccctcgtcacctgcgaggggccgtga

SEQ ID NO: 41388 - DNA, 489 bp, Zea mays
  Peptide Sequence Number=SeqID_83167
atggccaacgtcaagcaaaccgcacgtcgccgccaacggatatgcagcagttggggtattttgggaacgatgttgtgcgtgtcccaggggtggaagaggtccgagcccgagggcgagttagtcgtgtttgaggcgttcttcaccgccagccttcgccttcctgcacatcgttttgtggcggaggtcctgcaaagatttgaggtccaggtggcggaggatgatgaggacgaaggggccctccggtgcgctgcccgcatgagcaatgggcgtgatttggttgaagagttcattggttatggagtgtggcccctggcgcatggctgggtgctgggcgaagtatgccctcgccagatgcctactttgggccagcagctgatgacgctgcagcggctgctgaccgccgtgggaaaaaaccagtggtcgtggctgaggaaggcccttcgcgggatgctgccccagccactaagaagagaaaaaataggtctttaa

SEQ ID NO: 41389 - DNA, 237 bp, Zea mays
  Peptide Sequence Number=SeqID_83168
atggtggatatattcaaggcatacctaggagtgctgctggtgaaaggatcaaaggagtgctgctggcaaaagaatcaaaggagaatatggaccaaactgaaggcttatttcagactggtcttcggaaaggttctaaatcttttgatgaagcccaagcagcaggattcaccaaagagagttgaactttgggtgatatatgggagactgtaccaagcagtgatcctgttttgctactaa

SEQ ID NO: 41390 - DNA, 501 bp, Zea mays
  Peptide Sequence Number=SeqID_83169
atggatgatgggatggtgctgcagcacccgagggaaacacatctgaattccacctcgcatggcatttggcggcttgaagttcgcattgatcttcggtccaacaatcattttgccccaaaagagtcgacatataatttctactcgttgagactggtgttcggaaaggttctaaatcttttgatgaagcccaagcagcaggattcaccaaagagagttgaactttgggtgatatatgggagactgtaccaagcagtgatcttgttcataagttggatggccatcacccagctagctcaccatgaaatgcttttcgtcccaattggcttcacctttggttcaggcatgttcgacatggatggtatcagaggaggcagcccctatggcgcgggggtatttgctggcgatggcagcagacaacccagtgagactgaacttgcccttgcagaacaccagggcaagtacatggcctccataatgaaaaagctagctctccatgcttga

SEQ ID NO: 41391 - DNA, 306 bp, Zea mays
  Peptide Sequence Number=SeqID_83170
atgttcgcattgatcttcggtccaacaatcattttgcccccaaaagagtcgacatataatttctactcgttgagttggatgaccatcacccagctagctcaccatggaatgcttttcgtcccaattggcttcacctttggttcaggcatggtcgacatggatggtatcagaggaggcagcccctatggcgcgggggtatttgctggcgatggcagcagacaacccagtgagactgaacttgcccttgcagaacaccatggcaagtacatggcctccatagtgaaaaagctagctcttcatgcttga

SEQ ID NO: 41392 - DNA, 381 bp, Zea mays
  Peptide Sequence Number=SeqID_83171
atggatggtatcagaggagtatcagaggaggcaacccctatagcgcgagggtatttgctggcgatggcagcagacaacctagtgagactgaacttgcccttgcagagcaccagggcaagtgaaaaacaagaagatggaaaatacaagcacactgtggatctcctgaaaacaacatttgagctgagagcgaattctgtacagcgggagctagagctccaaaaattatgggacgataatcaggttctgaaaagggtttctgaaaggaacactggggtagctcaacatgttggcccctcccctgggctgggccacccggccggaagtgtcgctagcgcagacaacaaagcatactttctctggaatcagcctgataatatatga

SEQ ID NO: 41393 - DNA, 330 bp, Zea mays
  Peptide Sequence Number=SeqID_83172
atgagcaagaacacaagagacacaagatttatcccgaggttcggtcacaccactaaggtgccctacttcctcgttgaggcgcccacaaagagccgggtctctttaaaccctaatccttcttttgtcgaccacaaagacaaaaaccggttgagtgtcccgttgaatgtccggctgaaccagttttttcaaaaaggtgaacagtgcaaaaatcggttgaacctgtttttccaaaaagcaattttggccaagatagacttaaaaaggttgtactacatactttcactaaggattaacaacggtaaaatggaagttttagatcaaggattttga

SEQ ID NO: 41394 - DNA, 228 bp, Zea mays
  Peptide Sequence Number=SeqID_83173
atgagcaagaacacaagagacacaagatttatcccgaggttcggtcacaccactaaggtgccctacttcctcgttgaggcgcccacaaagagccgggtctctttcaaccctaatccttattttgtcgaccacaaagacaaaaaccggttgagtgtccggttgagtgtccggctgaaccagttttttcaaaaaggtgaacagtgcaaaaaccggttgaacctgttttaa

SEQ ID NO: 41395 - DNA, 405 bp, Zea mays
  Peptide Sequence Number=SeqID_83174
atgcccgcttttctctcaccccgcgcagctcgcccgttcttgcctcacccccacgcaaaactgtcgtcgcgccgatcgtcgagctccgccgtgcgcccgatgtcccgctggccgttcgggattcgccgaggtggcgatgagaatgatggttttggtattgactctgatgatggtaagtggtattctttccgtttggaaaggttatgtaactgttgtgtacgtgaattgctgatcctggcacgtacatggttcacatttggtttgccttctaaaaccgggtgtgacatttaccatattagaatcgagaacgagctagccgatatcttcaccaagcctttggatgagaaaacattttgcaggttgcgtagtgagctaaatgtcttagattcgcgtaacttagattga

SEQ ID NO: 41396 - DNA, 285 bp, Zea mays
  Peptide Sequence Number=SeqID_83175
atggcgatgcaatatcgtggcgatgagaatggtggttttggtattgactctggtgatggtaagtgttattctttccgtttggaaagggttgttagcattgcaaccactgctcaggagaagttgaagccgtggaaggagacttccaggagttccaagattacgacgagttctaggcgtgggttagcggcaacccccagtcggctgcctgtgaaggccgcgtgtatctacgtttctttttcgaactttgattattgtaaagactatgtggatgtctcagacatatga

SEQ ID NO: 41397 - DNA, 712 bp, Zea mays
  Peptide Sequence Number=SeqID_83176
gacaggcggcgtctttggcagaagaagcgggcgacgcttcgccttcgccataatgaccgcgtcaaaaaagggaccagaaaagggggataccccgaaaaggatccttccccgtgaaggaaccaggccccgagcctccctactgatcagaggttcgaaggctggcccctcggaagggttcgacagccgcctcagatcacgtgggccctacacccactactggtcagaggttcgaaggccggcccctcggaagggttcaacgaccgcctcaggctactcgggctccgcgcccactactgatcaggggttcgaaggctggcccccgaagggcgggaacgatcttgtaacggaatcccatcagagggaggcatcgagccctcggaccccgtcgccaggggaccgggtccggcagatcacccgcagctcaccggagacaccatgttcggtgcccatcgagggcaacatggcgctttcccccctcctccttgcggaaaggcgacgtaggggcgtatgtaaaaaagccgagtctgtccctgatcaccctctcgccctgtgcagaggctcgggggctgctctcgcaaacccggctccggccgaaccgttgacagcgtcaacataccagcccgagaacttgggacccgaccgtacacccgggctacggtcagctcgcatgagggaacgaccagaccagccgaagcgttacgcgaggcattaa

SEQ ID NO: 41398 - DNA, 535 bp, Zea mays
  Peptide Sequence Number=SeqID_83177
atgaacaagacaccggcactcaaggtgccattacaaacggaactccggttccgtccccgcgggtacgaacacccccccacattggagggcccgcggggcgataaggctccaggtcgcccaccgtcgcccgctccagcagcagcgacaacgacctccgctccgggtggccgaactgcagcagcgatggcctcagggcggacgccgctgcaacaatgccctcgcccacatctacgctcgaggggcgaggacaagtacaaagagccggaggtccggagcgcggatggtggcggtgatcccgccagggacccaacagtgccagccaggcgcatcggtcacgggccagtcagcctcgggagaaggcgcgatggtcgatgcggccaaaaatgggccggcagtaatggcggtggcaggcgggcggaagcagcggtcacgtcgtcagccaagctcacgtccccacatgggacggtgagagaaccctctcccacggagaagcgggcgacgcttcgccttcgccataacgaccgcgtcaaaaatg

SEQ ID NO: 41399 - DNA, 288 bp, Zea mays
  Peptide Sequence Number=SeqID_83178
atggctttttcagatgatggaaagatgaagccaaacctttttcggacaaggggtaacaggtgtattgccatgaccaacaatggtgtagagaagaaaaacaagaggagcagcaacaggcgatgcgctaagaagtatccaaccttttttaacacaaattgcatgagctcttactttcaattagagtataaagcagaaggcttaatgaatttcgtagcacctgtacacaacttttctgaaacttatgttaaggttgactatgaacttggatacaacgtccatctccactaa

SEQ ID NO: 41400 - DNA, 552 bp, Zea mays
  Peptide Sequence Number=SeqID_83179
atggaggagtctggattcgccatcaccagcatcaatggaaggatcaacagggctgtttgggggccactaatcaggaccatcgtcactgctagggaggatgctaccattcgcatatgggactcagaggaggcccaggaggatgaggagcgagaacgggtgtgccagaagcaaggccaccagcgcgaaggcgaccatggtggcgtagttgacgcagaattggattttgggaaaaagcttccatcattcttcttcattcaaaagaggatggctttttcagatgatggaaagatgaagccaaacctttttcggacaaggggtaacaggtgtattgccatgaccaacaatggtgtagagaagaaaaacaagaggagcagcaacaggcgatgcgctaagaagtatccaaccttttttaacacaaattgcatgagctcttactttcaattagagtataaagcagaaggcttaatgaatttcgtagcacctgtacacaacttttctgaaacttatgttaaggttgactatgaacttggatacaacgtccatctccactaa

SEQ ID NO: 41401 - DNA, 483 bp, Zea mays
  Peptide Sequence Number=SeqID_83180
atggataaaaagcaaataggtctcaagggaaaagcaaaatcaccgaaacaatcatataactcttttaagcatgcaccagctcctgaagtaactagcttggtatctgttttgcagtcgttgatgagtgcagcaattccaaacgtcattggttggattgcgatctcctttgcaaaaggaacaaaaatggtctacaagcatttggccacactatactttgtttttgtctttgatagctttgagaatgagcttgccatgctcgacctcgtacaagtgtttgttgaaacattggacagatgcttcaagaatgtatgcgagcttgacatcatatttaacttcaacaaggcagcaaaaaaggtgggacatagaagctgcatcaccatttttgacagcagttgggttatctgtttcaaattacgcctttttatgcacatgccatatgcagtactgtgcaaatctgaaagtttgagtataacaaatgcctga

SEQ ID NO: 41402 - DNA, 852 bp, Zea mays
  Peptide Sequence Number=SeqID_83181
atgccctgcaaaccccgcaaaccaagccgcgagttcccgtgccccaaggagggtcttgcgatggtgaacggcacggccgtgggctccggcctcgcctccactgtgctcttcgaggctaacatccttgccatcctcgccgaggtcctgtccgctgtgttctgcgaggtcatgaacggcaagccggagtacatcgaccacctgacccacaagctcaagcaccacccgggacatatcgaggctgctgccatcatggagcacatcttggagggcaactccttcatgaagcttgccaagaagctcggcgagctcgaccccttgatgaagcccaagcaggaccaaagcaagaccaacttacagcaaataggtctcaagggaaaagcaaaatcaccgaaacaaccatataactcttttaagcatgcaccagctcctgaagcaattccaaacgtcattggttggattgcgatctcctttgcaaaaggaacaaaaatggtctacaagcatttggccacactatactttgtttttgtctttgatagctctgagaatgagcttgccatgctcgacctcgtacaagagatggaggagtctggattcgccatcaccagcatcaatggaaggatcaacatggctgtttgggggccactaaacaggaccatcgtcactgctagggtggatgctaccattcgcatatgggactcagagttggattttgggaaaaagcttccatcattcttcttcattcaaaagaggatggctttttcagatgatggaaagatgaagagttggtcatggcctcatgggctcatggcagagcgcccctcgtttgtggagttcctcgaggcatatttataa

SEQ ID NO: 41403 - DNA, 168 bp, Zea mays
  Peptide Sequence Number=SeqID_83182
atggcgtcccgcgggtgctccccggcgacgagcgccagcagccggagcgagtgccgccgcaacggcgtcctgtcggttgcggaggtggttggaagcacggcggggcgtgacctgaacctcatacgtgcacgccagagcaagatcaacactcccgaatcaagatcgtaa

SEQ ID NO: 41404 - DNA, 882 bp, Zea mays
  Peptide Sequence Number=SeqID_83183
atggcgcgccagcagccggagcgagtgtcgccgcagcggcgtcctgtcagttgcggaggtggttggaagcgtgacggggtttgcgggagcccgcccctgagcggcgggctgttcgcggcggcgacgagcgccagcagccagagcgagtgccaccgcagcggcgtcctgtcggttgtggaggtgcaccgactgcgggacctggagcccagggcgctgtgtggcgtggagctctacgatggcattctcatgcgctacgtgaaggcgtccacagcctacctaggcaagcccgcgccgcgcggggagccgtcgggagacatggtggacttcgacatcacatactaccgtagctgtgaccccgggcaggcgcgcctgttcgaggacgtgctggaggaggtcgagcagatgggcatcttcaagtatggcggcctgccgcactggcgcaagaactgcaacctcgcattcgtcggtgccgcgcgcaagtaccccggcctgtcgcgcgcaagtaccccggcctgccgcgcttcctgcgtgtcaaggacgcctacgaccccgatggcctcttctccagcggtggcgacgagcgctgcggccagctgcacgcactggtcctgctcgtggagcacgacgtcggtgagcggggccagcgtcgcgggcggtgcgcgcacggaggagtccgggtcccggacgcggcgcagcgcagcggccaggagcctgggcacgagcggcgcgacggcgtcccgcgggtgctccccggcgacgagcgccagcagccggagcgagtgccgccgcagcggcgtcctgtcggttgcggaggtggttggaagcgcggcggggtttgcgggagggcgtgcgggcggatgcaggggcggtttacaccgctaa

SEQ ID NO: 41405 - DNA, 201 bp, Zea mays
  Peptide Sequence Number=SeqID_83184
atgacatttgttgcagtagatgagtgtggcgcgcgcaagggggatgttgtcaagggcgtcgggcccgtgggtaggaggaccgcggctccgaaggtcgtagccgccgtccatgttgccgaccgggttatgcccccaggaacggcggtcttcgtcaacgggttatgccccctgttgccgattagagagagagggggtatataa

SEQ ID NO: 41406 - DNA, 2136 bp, Zea mays
  Peptide Sequence Number=SeqID_83185
atggccatggatcccgttctgaaggtggccctgggctcggcggcgttcgccgtgttctgggtgctggcggtgttcccggcggtgccgttcctgcccatcgggcgcacggcgggctccctgctgggcgccatgctgatggtgctgctgggcgtgatgagcgccgacgacgcctacgccgccgtggacctgcccatcctgggcctgctgttcggcaccatggtggtgagcgtgtacctggagcgcgccgacatgttccggcacctggggcgcctgctgtcgtggcggagccagggcgggcgggacctgctggtgcgcacctgcgccgtgtccgcgctcgcctccgcgctcttcaccaacgacacctgctgcgtcgtgctcaccgagttcatcctcaagatcgcgcgccagaacaacctgcccccgcgccccttcctgctggcgctggcgtccagcgccaacatcggctccgccgccacgcccatcggcaaccctcagaacctggtcatcgccgtgcagagcggcatctccttcggcggcttcgtcttcggcatcctcccggccacgctcgtcggctccgtagtcaacgccgccatcctgctcgccctctactggaaccagctggacggcggatgcaagcccgccgccggagcccaggaggtggtcgccgtgcccaccgaggtcgtcgaggaggaggacgtcacgtcgcaccgcttctcgcccgccaccatgtcgcacctcctcctccgacgcgcccagtcccagcaggtgccggccggctacgacgacgcggcgaatcaagaccccgtcaagccgcccaacggcgtccaccacagaaggaaagcagcggtgaacggcgattgcgacggcgacggcgaccgctactactcctccttctcctccacgtcgtcgtcgacggaggaggccagcgccaaacaaccagaagatgacgaagaagaagtagaagaggagtggcagagcagggtgtggaagatgtgcgtgtacgtcatcaccctgggcatgctggtggcgctgctgctgggcctgaacatgtcgtggagcgccatcaccgccgccctggcgctcatcgtgctggacttcaaggacgcccgcccctgcctggagaaggtgtcgtacccgctgctgctcttcttctgcggcatgttcatcaccgtggacggcttcaacaagacgggcatccccagcgcgttctgggacttcatggagccgtacgcgcggatcgacacgcccacggggacggccgtgctcgcgctcgtcatcctcctgctctccaacgtcgcgtccaacgtgccgacggtcctgctgctgggcgcgcgcgtggcggcgtcggcggcggccatctcccccgcggcggagaccaacgcctggctcatcctggcatggacgagcacggtggccggcaacctctcgctgctgggctccgccgccaacctgatcgtgtgcgagcaagcgcgccgctcccagcagtacggctacacgctctccttcttcagccacctccagttcggcttcccggcgacgctcgtcgtcaccgggcatcggcctgctgctcatcagaacctactgatgcgtaccggaagggatgtctggagggggaagaagaatgtggattctttctcagcgccgtgtatcgcgtcacagcacgtcctggttcaggcccatgaaactggccatgcacggaccagcgtgcgcgtgcgtgtgtgcgctgcattctctccctccccacttctctctcgtggcgacagcgacgagccgacgactgtgcggccgtcgctgccactctactcgccagttgcccggatcttcttcgtccccttggaaatcgacggccacaaccaggtaccctttggtcttctctacctgctgtgcggaactgagcactcaaagccgaacctactatttgtattcggatctgatctgattgcaactgtatatgcatggcaaacaggaagtttcgcaaggatgccctggtgcacgattgatgagtctgaccctggtgttttcaccgagctgattcagcaaatgcaagtggaaggtgtacaggggcggcggaagatcgccgccggcggcctggatctcgctcccgggagggaccccgtcggggaggagagatcctag

SEQ ID NO: 41407 - DNA, 486 bp, Zea mays
  Peptide Sequence Number=SeqID_83186
atgaagatgctacccttcgctccaggtcttcgtcacctcaccacccttcgctctaggtcttcgtcacctcgcttcactaatggaggcaagatgaccggcgcggccccccccttcgacctccacactgcaagacgaaggaccaacgacgaagtctctccatcccacgtcctcacccgacctggaggcccactgaaggcagcactgctagctgagaaaaagggcaaggcccccacagacaacacccaccaagaagctggcgaagccgaagcactcagtaagagacagtgcaacgatcaacacactcccgaaggcaccctccgcacctgcagctccggagggcaaccacaagcaccacccccaggcttcgctccactagagggcgaggacgcaacagaggacggcgaagtcattgacgtctcagcagaagaacagctacagctacgggccttgcacctcaagaaccgcaacctccaaaagcagaaataa

SEQ ID NO: 41408 - DNA, 213 bp, Zea mays
  Peptide Sequence Number=SeqID_83187
atggcgattgctctgttcattcggcctctcaagggcactgtacgaggtgtggaggtcgaagggagggccgcgccggtcatcttgcttccattggtgaagcgaggtgacgaagacctggagcgaagggtagcatcctcgtcttcgccccaacattctcgttactggagcgaagggtggcgtcttcgccttcgccccaacatgattattttgtga

SEQ ID NO: 41409 - DNA, 702 bp, Zea mays
  Peptide Sequence Number=SeqID_83188
atgttcggattgcaggtggcaatgagactgatggttcttggttttgactctagtaatgctagtccactacagccaaacaggatacttgctgagtatgttgatgtgtactcacccttgctctacacaccaaccccccttccccaggttgtcaacattgcaaccactgctcaggagaagatgaagtcgtggaaggagacttccaggagttccaagactacgacgagttctaggcgtggatggctcgtcttagacacaccgcctggaagtctatcatccccttcttaccctctcgtctcgcggagcgtccgcttcgccgtcccgtggccggagatagagtctgtgaggagctgcttccccgtgcttcctctagaggcgccccctgcaccaccactgggcgccccagcccctggagtagctgctggaggagacccagacgatggaggtggcgacgacagctcgagccacgacaccgacttttctgctgaccaggagccggaaggatgggttgctcgacccatcactcgcaacgctgctcgtgggtgtcacttccacgatgcgctcgacaccctgctacgtcgggcacttgaccggcgtacttggtctatcgagtatcgatgtgtggtctaccagcatagtcgcggggtctacccggaccactgggaggcgacctgcttggtgcgccgtccggagaacagtctctag

SEQ ID NO: 41410 - DNA, 738 bp, Zea mays
  Peptide Sequence Number=SeqID_83189
atggcggcgcggagcccgtgcccggccccggctcgccggcgcgcgaccgtggtggcaatgagactgatggttcttggttttgactctagtaatgctagtccactacagccaaacaggatacttgctgagtatgttgatgtgtactcacccttgctctacacaccaaccccccttccccaggttgtcaacattgcaaccactgctcaggagaagatgaagtcgtggaaggagacttccaggagttccaagactacgacgagttctaggcgtggatggctcgtcttagacacaccgcctggaagtctatcatccccttcttaccctctcgtctcgcggagcgtccgcttcgccgtcccgtggccggagatagagtctgtgaggagctgcttccccgtgcttcctctagaggcgccccctgcaccaccactgggcgccccagcccctggagtagctgctggaggagacccagacgatggaggtggcgacgacagctcgagccacgacaccgacttttctgctgaccaggagccggaaggatgggttgctcgacccatcactcgcaacgctgctcgtgggtgtcacttccacgatgcgctcgacaccctgctacgtcgggcacttgaccggcgtacttggtctatcgagtatcgatgtgtggtctaccagcatagtcgcggggtctacccggaccactgggaggcgacctgcttggtgcgccgtccggagaacagtctctag

SEQ ID NO: 41411 - DNA, 219 bp, Zea mays
  Peptide Sequence Number=SeqID_83190
atgtgggacccggattctggaactgttcccctcgcgccgagcttgcctctgaccgcaacagatcgcggcgagctcgccgccggaaatctctcgcgctcaccgacatatggggaccccgggttagtcttttggcgcctgtctctttcagcgcgtgccaccgtcgcctgggccgagtcgttagggcctcctccccaacagaatcgcgggcgttccctgtag

SEQ ID NO: 41412 - DNA, 309 bp, Zea mays
  Peptide Sequence Number=SeqID_83191
atggcgacgcggagaagatctacagggaacgcccgcgattctgttggggaggaggccctaacgactcggcccatgcgacggtggcacgcgctgaaagtgacagacgccaaaagactgactcggggtccccatatgtcggtatggcttgactcttattattctttcaacgagtttgatctccttcttttcgagtcttcatctagattagggacaagagatgtaattgtggacattactccccaacccatcacactcaatcaaagatccaaatcagacaagtatcataagaacaaacactcaagcacatag

SEQ ID NO: 41413 - DNA, 342 bp, Zea mays
  Peptide Sequence Number=SeqID_83192
atgactttgagcctggttcacttaacacaacaaaccagctcatatgccaatggctatctttcacaatgggaccaattcactgcacaggttgagcccattgcttctactgtgccttacatggttgggagtggtagccacaaaagagattggcctggatcaggatctttctatggaaatcttgactcaggtggtgaatgtggggtaccagctcaaaatatgttctacatgccagcagaaaactgtgagcaccgtgtcctgggttactcgtcggccaccttctacgccgacgaaggaacgaccgaggagcccatgggccgcgagtgccttcagccactctggtag

SEQ ID NO: 41414 - DNA, 495 bp, Zea mays
  Peptide Sequence Number=SeqID_83193
atgactttgagcctggttcacttaacacaacaaaccagctcatatgccaatggctatctttcacaatgggaccaattcactgcacaggttgagcccattgcttctactgtgccttacatggttgggagtggtagccacaaaagagattggcctggatcaggatctttctatggaaatcttgactcaggtggtgaatgtggggtaccagctcagaatatgttctatatgccagcagaaaactgtgagcagttctggtactcaacggactacgggatgttccgtttctgcgtagccaataccaagttggactggaggccagcaacggagcagtacaggttcatcaagcacttcctgtcatctgttgatcggcagaaacagccatggctcatcttcctcgcgcaccgtgtcctgggttactcgtcggccaccttctacgccgacgaaggaacaaccgaggagcccatgggccgcgagtgccttcagccactctggtag

SEQ ID NO: 41415 - DNA, 510 bp, Zea mays
  Peptide Sequence Number=SeqID_83194
atggcggtttggcgtttcgaccgctggtttcggcgaagatgggggaatgcttataaccgcggggcggttacatgcttcgcgtgcggcgggatgatcaccagccttgtggtggggagaagcaagtcgggctgcggcctctgccccgccctcagcttcaaggatggaagaagggcatcctccagccctgcggaggaggcgtcctccagccatgcgggggaaggcaaactgctgctgcctggtcagggtgcagctgcccatcctccacccgggcgacggtcatgccgtgcgcaggtggctgctgtcgccggggctgaagtggtggccgccactggtgaggcttcccaccgcagcggtggttgcttccgtcgacaagaccgtagtgccacctgcgctccggacctccggctctttggctttaatggttggttctcgtcccctgtgagggatgtgaacgaggccctttctgtcacacccgggtttcagggcaccaagacccgggcgcgaacataa

SEQ ID NO: 41416 - DNA, 234 bp, Zea mays
  Peptide Sequence Number=SeqID_83195
atgcgggggaaggcaaactgctgctgcctggtcagggtgcagctgcccatcctccacccgggcgacggtcatgccgtgcgcaggtggctgctgtcgccggggctgaagtggtggccgccactggtgaggcttcccaccgcagcggtggttgcttccgtcgacaagaccgtagtgccacctgcgctccggacctccggctctttggctttaatggttggttctcgtcccctgtga

SEQ ID NO: 41417 - DNA, 366 bp, Zea mays
  Peptide Sequence Number=SeqID_83196
atgtttgccgagtgcttgacgctcggcaaagcagtctttgccgagtgcggcgctcaacaaagtctgctttgccgagtgcccgataaaaagcactcggcaaagcctccggcactcggcaaaggcccggattcagatggttggtgcaagaagacacataaggtatatcctagtacgggcaatagaaggccctacatccagtgggggaatgagacttgtattatcttgcacctaagtgctcgtagtaggggatacaagcaagtcgagagagggagagatgtgtctgagccctgtagcagtatggccggcgagatggcccttgtccttgttgttgtctttggttatgagaaggacgcccgatacctgtag

SEQ ID NO: 41418 - DNA, 663 bp, Zea mays
  Peptide Sequence Number=SeqID_83197
atggcgaggggctggcgcggcggtgacggcgaggggctggcgcggcggcgggcggacggcgcggcggccagtcgacggcggcgcacggatggcagtgagagagtgagagagaaggaaggagaaaggttctccgcgggggactttgccgagtgcggcgctcggcaaagtttgctttgccgagtgcccgataaaaagcactcggcaaagcctccggcactcggcaaagagccgaattccggtagtgtcgaggacgacaccaccgcctcgcccctccctccccccggcggtagtaggcaaaaggaagccactgcatccctcactttcctctcttccttctcctcaaccttcctccacccctgtctcgcatgcctcgtcgccggcacgagccctgatcaccagcttcgctgtccgatctggtcgatcacctccatgcctgatccagtcccccatgtcgaatctttgtcatggcagctcacacgatgcacgacaactctcttgaagcggcgggctcatggtaccacggctcgcgtgtgcgacagcacaattggtcggcggggccggtggctgtggatcttgggaagagtctcccccatcatcccacattctcctccccctcctttctctcttggtgtcaccagcctcgtcgccagcatgactccataa

SEQ ID NO: 41419 - DNA, 243 bp, Zea mays
  Peptide Sequence Number=SeqID_83198
atggcgaggggctggcgcggcggtgacggcgaggggctggcgcggcggcgggcggacggcgcggcggcgaatcgacggcggcgcgcagatggcagtgagagagtgagagagaaggaaggagaaaggtcactcgaaacttggaaaactgtgaatgcaaaaataatatccattctacttagcacaagttacgaccgatttcaggatcggaccggaaacttcgagcaccatgctaactcaacatag

SEQ ID NO: 41420 - DNA, 522 bp, Zea mays
  Peptide Sequence Number=SeqID_83199
atcgcgggcactcggcaaagaacagatatcaccccccgcggggaacctttctccttccttctctctcactctctcactgccatccgcgcgccgccgtcgactcgccgccgcgccgtccgcccgccgccgcgccagcccctcgtcgtcaccgccgcgccagcccctcgccatagcagcgcccaccgtgctcgccgtcactgtcgtacttgccgcccgcgccccaccgtgctcgccgtcaccgccgtgctcgtcaccgccgcacccaccgtgctcgccgtcactgccgccgcgccgtgctcgccgtcaccgccgccgtgctcgccttgcccgcgcccgctgtgctcgtcttgcccgctccctgccgcgctcgccgtgcccgcgcccgccgtgctcgccgtgcccctcgtcgtgcccctcgccaccgccgcccggccacgcgtaccatcatcgcccccacgcgaggacgtgtatccggagaacagcggggaggtgctgccgaaattctatctcggatcggagtag

SEQ ID NO: 41421 - DNA, 1068 bp, Zea mays
  Peptide Sequence Number=SeqID_83200
atggcatgcaggactaggctcaatacactccatgtcaccgaaaaagactgtcaggcgttggtagccctagttaatgggacacactgcaacatccacacaacacaacacagggaatggaatggaagtgagacgagcgtgaggcgtggagtaaaaacagaggtggtcaagaaaggggccttcaatcgtgaggcattcaattgctggggagagaagatcatgatcgcccgccgcagtaaatcgaagcggctacagtggccccctttctcccgcagcggcgagcgctaccctctcccctacctcgccgcactcttctctctcacgccagatgcaggggatgactgtagccgccccctcgcctccttcgcgcggacggagccgcccgtgccagacaccggaaacttctcgctccacctcgctacgcctcgacccgtccgcggaagggcgattttgcgcggcgacgcggcggcggatctcccgtcggtcggtggagttggccccggccccgctcggttgcgcagaagacgaagtcgacttcgtgaccacgcagtgccgttggcgaccgaagacgaagagggatcaaatccgcttctgccgaggttcctcgcgaccgattggttggcttccgtctccgaccatcgactgctccatcagatccacacggagacgcttcgattcggcgtgttgcgggcgagatcttcccttcttgagatccgcacttgtagtttgagctgtgaacttgttacgttgttcatcctccgatttagccccccgcatttgatcatggcatcctcgacagaagataagatgaaggctttgatgaaagtccttgtagactgtgccgaggatgccacaaaatccctggggggtttagttgatcatgcattagaccacatgcatgatgaagagatcctagctaggacattgtttgccatgaaagaaaaactagagttgcttcagcaggatgccttagaggcaaaagtccaagcctttccagaaatagctaagtacgagtgggatgacatcagtgttgaacctccctctccgtcaccccctccaaacagttactga

SEQ ID NO: 41422 - DNA, 618 bp, Zea mays
  Peptide Sequence Number=SeqID_83201
atgaaggctttgatgaaagtccttgtagactgtgccgaggatgccacaaaatccctggggggcttagtagatcatgcattagaccacatgcatgatgaagagatcctagctaggacattgtttgccatgaaagaaaaactagagttgcttcagcaggatgccttagaggcaaaagtccaagcatttctagaaatagctaagtacgagtgggatgacatcagtgttgaacctccctctccgtcaccccctccaacagttactgatccttctattgatgaagaggagttctactgccccgacgtcagtgatgagtggtacttcagtgattcggatagagcccttagcagcaaatgggacaagattagagcagatgttagtaagttctctggctactacgcaagagttctaagagagaaacaaagtggcttaactgatgacgacaaggattactacaagatactggaagtagattactatgcgtctgaggagacgatcaggtccagctatatccgccttgcactgaaatggcaccctgacaagaagcaggggcagggcgaagagaattcaacctccaaatttcaggaaattaacgaggcataccaaggtgagcttgattaa

SEQ ID NO: 41423 - DNA, 339 bp, Zea mays
  Peptide Sequence Number=SeqID_83202
atgagggtgatatgggacgcccttggccaagtaattagggaagtcttatgttgggtgctggtttttggtcattgggaaacggaggcatctgttatggctcctatattctcgctcagggatctgggtacgggcatcgtcccacggcttttcctgagggcagagttaagagcggccttgggatcctctttgattagagatacagatgatctgagattcaatggttctatttatggttttggttcgatgatgataatgatgttcctcgatgaggaaatggttcatgggttggttactgctagaacttggcttccattaaaaaataaatatctgaccaactaa

SEQ ID NO: 41424 - DNA, 162 bp, Zea mays
  Peptide Sequence Number=SeqID_83203
atgagggtgatatgggacgcccttggccaagtaattagggaagtcttatgttgggtgctggtttttggtcattgggaaacggaggcatctgttatggctcgtatattctcgctcagggatctgggtacgggcatcgtcccacggcttttcgtgagggcagag

SEQ ID NO: 41425 - DNA, 273 bp, Zea mays
  Peptide Sequence Number=SeqID_83204
atgagggtggtatgggacgcccttggccaagtaattagggaagtcttatgttgggtgctggtttttggtcattgggaaacggaggcatgtgttatggctcctatattctcgctcagggatctgggtacgggcatcgcccacggctttttcctgatggcagagaaagggaatcacggctcatgggtaaagtgtgcaacctctgcagagtgttatgaaactgatatatcagccgtgctcacggttatgagcggccttgggatcctctttgattag

SEQ ID NO: 41426 - DNA, 267 bp, Zea mays
  Peptide Sequence Number=SeqID_83205
atgagggtgatatgggacgcccttggccaagtaattagggaagtcttatgttgggtgctggtttttggtcattgggaaacggaggcatctgttatggctcctatattctcgctcagggatctgggtacgggcatcgtcccacggcttttcctgagggcagagtcttgtgtgcgttgctcattcccccttgctctgtgtttctttgtgaacttcaattgtaagggcgagaggctccaagttgtggagattcctcgcaaacgggattga

SEQ ID NO: 41427 - DNA, 219 bp, Zea mays
  Peptide Sequence Number=SeqID_83206
atggaaggaaagccatcgcgagaaaggaagtcagaactgaaacgagtgtctcctccactagcgggggtgggtgaattcatctacggaagggaatcaaagaaattacaactttcgacggtgtatgatcttctggagttagacaaggttaacttcacttatgtaagacccttgggtggtatacttggtaaattgggtcaaactttagctaaggtgctataa

SEQ ID NO: 41428 - DNA, 237 bp, Zea mays
  Peptide Sequence Number=SeqID_83207
atgggagacacagtctcaggtcgcatgagggataaagtctgtgcccggcttcactcagacaaggttaacttcacttatgtaagacctttgggtggtatacttggtaaattgggtcaaacttcatctaagtggcttggtactggtgtatgtttccttgtctcaaaatttgaggaccagaaagtgaatagttttctctggacaaaattattaaattctagggcagaaggggtgctttga

SEQ ID NO: 41429 - DNA, 258 bp, Zea mays
  Peptide Sequence Number=SeqID_83208
atgagaattaaggccaagcgagccgaggggacgcgctggcgagcaggaaactgcgcgaacacaacatggaacgatgccccgcctggccgagctgaaggaagcacggaccagggacagaggagcagggacgaccagccaaagcatcatcggcaagctcaagtcgacgcgctaggaacgaaaggagcaaagaggtgctgggcagttcggcgcagcgagctgagcagggagatgaacgccgcgaaggaacttcgcgagtag

SEQ ID NO: 41430 - DNA, 750 bp, Zea mays
  Peptide Sequence Number=SeqID_83209
atgcagcgactgcgagctagagcagaggccaaatgctggcgagcagggagcagggacgaccagccaaagcatcatcggcaagctcaagtcgacgcgctaggaacgaaaggagcaaagaggtgttgggcagttcggcgcagcgagctgagcagggagatgaacgccgcgaaggaacttcgcgagcagagcgcggcgcagaggagtactggagggactcggagcttggggagggagacgtccatggagctgcacacgcgtccatggaagaggggaatccgagttggagcgaccgcgtgcgcgcaacagagaacaaagaagccaggaaccgagctcagggagctggccatggagcagcggcacacggtgaggagattcaaggggcgcgcaggcacccagacgcgcgacgcggagggagatgggcgcgccagcaggggagctcggaccaggggcgcgcgcgagatccgggattccagggtgctgggcgtgcgctcgagcagggaggagcaccgtacagggggcatcgcggctgggataaagcttagcagagaggagcgccgtgagggggctgccatgggagatgtgcgccgagctggaggaggaagggaggggaagcagaggcgtggctggagaagcccagcaggacaccatgggagctcgtcagggagcgagaggagcagcgaagagagagagagcacgacaggatatttgaagaatcccaggggcggcgctgaaaaaaaatcagcagggtag

SEQ ID NO: 41431 - DNA, 792 bp, Zea mays
  Peptide Sequence Number=SeqID_83210
atgtcatgtaaccggcgcgccggttacgacgtgcgagaagttacactgtcactcgcgccaatgctgcgcctcctcgactgcggaaccagtaccgcgactcgaggtagccctgcgcatgacccaacagtgccagttaaaggtgacggccacgggccagtcagccacgaggtaggcacgacggttggcatggtcaaaagtgggccggcagtaactgcagcggcagacgagcgaagaagggtttcaacagccgccccagagcactcggacttcaagcccattactgatcaggggtttgaaggctgggcccctggaagggttcgacagccgccccagagcgctcgggctctgtgcccactactgatcaggggttcgcaggctggcccctcggaagggttcgacagtcgccctagagcacgcagagtgagggatgactctgggtacgttcgatacatagccgaggctcgggctacgctcccgaggtaccctaggacatttctgagaccggcgggaacgatttgtaatggaatcccaccggagggaggcatcgagccctcggaccctgtcgaaggggtctgggtccagcaaatcacccgccggtacttttggagcgcgcctctgggccaccagccgacccctaacgaacggggcacgggcgtccactcggatcacccgttagcagctcactggaaacaccatgttcggcgccctccgagggcaacatggcgctttcccccctcctccttgcggaaaggcgacgcaggggcatataataaaagtcgagaaagtccttga

SEQ ID NO: 41432 - DNA, 792 bp, Zea mays
  Peptide Sequence Number=SeqID_83211
atgtcatgtaaccggcgcgccggttacgacgtgcgagaagttacactgtcactcgcgccaatgctgcgcctcctcgactgcggaaccagtaccgcgactcgaggtagccctgcgcatgacccaacagtgccagttaaaggtgacggccacgggccagtcagccacgaggtaggcacgacggttggcatggtcaaaagtgggccggcagtaactgcagcggcagacgagcgaagaagggtttcaacagccgccccagagcactcggacttcaagcccattactgatcaggggtttgaaggctggccccttggaagggttcgacagccgccccagagcgctcgggctctgtgcccactactgatcaggggttcgcaggctggcccctcggaagggttcgacagtcgccctagagcacgcagagtgagggatgactctgggtacgttcgatacatagccgaggctcgggctacgctcccgaggtaccctaggacatttctgagaccggcgggaacgatttgtaatggaatcccaccggagggaggcatcgagccctcggaccctgtcgaaggggtctgggtccagcaaatcacccgccggtacttttggagcgcgcctctgggccaccagccgacccctaacgaacggggcacgggcgtccactcggatcacccgttagcagctcactggaaacaccatgttcggcgccctccgagggcaacatggcgctttcccccctcctccttgcggaaaggcgacgcaggggcatataataaaagtcgagaaagtccttga

SEQ ID NO: 41433 - DNA, 492 bp, Zea mays
  Peptide Sequence Number=SeqID_83212
atgaagggaaatgatgatgttgtcgctcacagcacgaaggcgaacaacaacgacatgggtagtgctggatgtggccgaatccgttcagagcttcacttcgacgaccaccagatcgatatcgggactcgacgaacacgaaccatcgacatgctttggtccaagcctctcgccgagcaccagccgatgttagagcgcacggcaagggaacttcgcagttcgacgagaccgtggtcgagcgaactctatggcgcggactgctttgcggccaagacagttgtcgcgaagtgcacgacgtctccatgccacaacaccaccacggccatgaacaaaggcgcgcacagggagctagagaccgagcgcagcgaaatggacaggaccgagctcggcaggagcgtgcgtgcgcaggggagcagggacgcgcagaggctaatcccgacgagcacagcaggggtgcgaccatgggccaaataccagagagctgacaacgcgtag

SEQ ID NO: 41434 - DNA, 543 bp, Zea mays
  Peptide Sequence Number=SeqID_83213
atggccagcgcatggcgtcctgctcaccgcgccttggaccctcctagctcggatctccctctcccatggcgtccagctctgctcgcccccggtgccgcgtgccgcttcacctgctcggcctccatggcgcccagccgagtggctcccccgcgcgcctctctttgctcgctcgcgctccgcggagctcgatccctgctgcacagctcattcggcgccttcccgtcttctctagcgcgtctccctccctgcctcggctccttgctggtccgctcgcccaagtcacccatggctgcgcacgatgttcttgtcgacgttgtgctcgtcaggattagcctctgcgcgtccctgctcccctgcgcgcgcacgctcctgccgagctcggccctgtccatttcgccgcgctcggtctctagctccctgagcacgccgttgcgagctcgtcagccaccgttgccttgtcacagaacccccaacgccgtcatccatggtcgcgacctcgccaaatgcattcgtcgcttggccctgtgtcgtttggctcgttga

SEQ ID NO: 41435 - DNA, 774 bp, Zea mays
  Peptide Sequence Number=SeqID_83214
atggcggacctagaggtgggcttaatttggccagaggaggtcgggaggaggctgcccgcggggaggtggcggagcttcgcggcggggttgccgccggtgagctctgggcgagccgtcgaggtgggggaggggtgtattgtgttcgcggcaggtgaggaaactgctaggctaactcaattgcttgctgggctaaccgagagggagagagaagagggggatggactcaccggagaggggaaagacgacggcgcttcgcggcttgggctcgggcgaggggaggagggtggtggtcgaggctggtgcgaggaagaaggggctcggggcgagctttttataggcgcgcgggggcgaggggagcggtggagctccctgactccggcgagcttcccggtgccgccattaatggcgcacagcgccgccgaggggacgctacggcggggcagtactggcgaggacgctggtcaaggggaggaggacggagcggtgccaaacttccctgtgcggcgaggagacggcgatgaagagacggcggtgaaggacggcggtgaagggacggcgggcgtcgtatgcggggaggatgacgaagcggctgaccggtgggaccggtctgccagtgagagaggtccgcgcgcgcgagagaggggcggggcgctgacgggcggggtcgggctgtcagcgggcaggagtggcgcgcggtttgggccgcctgggccggaaagagaggggagggaggcgggcgcgcgcgagctgggctggaagtcggcccagccgtga

SEQ ID NO: 41436 - DNA, 249 bp, Zea mays
  Peptide Sequence Number=SeqID_83215
atggcagagcgtttgacccgtatcgccatcgtcagcgaggacaagtgcaagcccaagaagtgccgccaggagtgcaagaagagctgccccatcgccaagactgaattccatgaggaatccgacgatattaggggagaccagcaggaattttgggaggaagacggcaacgtgttgcacaagaccacaaacaaagggaagagctgggtgcactacaaggctgtcgccgccaacctctaccccgtcaagtaa

SEQ ID NO: 41437 - DNA, 504 bp, Zea mays
  Peptide Sequence Number=SeqID_83216
atggatgactgcaccggatccactcctcactcggaaggagaatctcggctctcggtcctcgcccacgctacggaagcagatcgtctccgctacgccaaatcgaggaatccgcgtccgctatggaaggcgatcggcatcagcgtccgcgtccgctatgccaaatcgaggaatccgcgccccaaatcgaggaatccgccttccgctatggaagggagatcgcccggtcggcatcatcgtccgtgtccgctgcgccccaggttctcggtccttcgcccacgcgttgcccacgaagagatggcagagcctagggtttggtctgcctcccacagccaccgctatgctttggctgcatcactcgctcctcttcggagcctcccttttgctggcggcgtaggaagagatggcagagcatttgacaagtgcaagcccaagaagtgccgccaggagtgcaagaagagctgccccgtcgccaagcccggtaaaatccctacccccgctccataa

SEQ ID NO: 41438 - DNA, 426 bp, Zea mays
  Peptide Sequence Number=SeqID_83217
atgcatcgtgcccttccgccttttgagcccccggatggggtgctccagcaccgccttgctcttgctgtcgttggaggagcgcagcctcatggagatcggcacctttcagccatcgctcggcttcaaggatttttgtcgtgcagcccggctgcattccctcaacaatgggcagtttggtggggagaagcaagccgggctgcggcctccgccccgcccttagcttcaaggatcttcatcatccgggctgaggcggaggagcgcaccgagtgggggttgcctccacgtgggccgccgcccaaggtggaggtcgttgtctctgctgctgtagaggtcgtcggcaagccgcttggagtttgtcatcccgcgggccccctggtgtggaggttgttcatacccgcgggagcggaaccagagtcccgtttgtaa

SEQ ID NO: 41439 - DNA, 1108 bp, Zea mays
  Peptide Sequence Number=SeqID_83218
ccagctgtcccccgaggacaccagcccagctcatggcctcggcagcctgactccagggttggtcccgccagtggacgacctagccaggtcccagccgccgctgctatgcctcctcggcctgggaaagcagccgagggttccttcactgagcaagagaagccttgagcggcaaggccgaccgagccaagggactcctacgcctctgggatacggatacctcactcgtcaccttccgcacagggcaactcacacttggttaagcgatccagctagccgacaggcgagtcctggtgctcgaaatggggaagaaacactgctttacgcccaaatacacagatgttcaggccccgacagccgtaatgaacatacgccagcactcaaggtgccattacaaacgggactccggttccgttcccgcgggtatgaacaacctccgtaccaggaggcccgcgggacgacgaactccaagcggcacaccgccgcccactcctgcagcagcaacaacgacctccgtcctgggcggcaagacagctgcagcaacggcttcggggcaaacgctgcggtggaaaagctctcgcccacaaaggatgagaaccagccattcaagccagggagacagaggtccaggggtgcgggcggagtcggcgatctcgtcggcggagaaaccttctccggctgctgccaccacagcaccgacggcgacgtccacctgtccgccaacactgcatcagcaagcgccggctgccccaaagcgcaccggcaggtcctcacccccgctctcgccgaggccgccccagaacatgagcaccgccctcgcggtgtacgacgttctgggcaaccctctggcgtggctgtcggtgcgaggaagacctggacatggccggcccgtacgcgacgcgaccgccgcccgggcgaagggcggaacgctgcaccctatctaggaagcagcagttcgccttcccccgcatggctgaaggaagcctccgtagggccggaggatgcctttctcccccaaacgctgggggaagaaaagggttaccgacccacgtggaggcaacccccactcggtgcgctcctccgcctcagcccggatgacgaaaatccttga

SEQ ID NO: 41440 - DNA, 849 bp, Zea mays
  Peptide Sequence Number=SeqID_83219
atggcgcagtcgaccgttggcagcctgagagccgttgacgcaccggacatgtccggtgcacactggacagtccggtgcccccttctagccgttggctcggccacgtgtcccgcgcagatttcgcggccgaccgttggcccggccgacagttggctcaccggacagtccggtgcacaccggatagtccgagggtcgtcaagaagggcgcgcgcagccgctaggatcgggtcgagcggcgaggctgggagcagaggccgacagcgcccgacggcaggggaagaggaggacgcgacagggagcgctcgcggcaaggagaagggcgggtggggaccagcggccgatggaggagagctggaggaggaggtcgcgaaagtcggcgacggggcggaggatgcagaggggccgggcgcggcgggatcccagcgaggagaggtcgagcgcagcgggatccggcatagggcggccacggtgcgttggtgtcgcggcacctacgggcggtcgggcttgggtgcaggggctcggttgtggctggggcttggcacacaggagctgcgcgtgggtggccgagcaggtgtcgcgcctaggcacgggtcgcggctcctggcgtcgtgcgtcgggcagcacgacaggggcgccggggctctcggatggccagggtcggcgctcggagcaggtggcggctctgttgttcctggcgctgcgcgggtcgaggcaatcggtcgggcagggcgtcgggtcctgcgacttagggaagggaggagggaggaggagccaggggcgggggtggctgttgccagggagcagattgggggcgccgacggcacaggggagggaagcaccggcggctag

SEQ ID NO: 41441 - DNA, 609 bp, Zea mays
  Peptide Sequence Number=SeqID_83220
atggcgcagtcgaccgttggcagcctgagagccgttgacgcaccggacatgtccggtgcacactggacagtccggtgcccccttctagccgttggctcggccacgtgtcccgcgcagatttcgcggccgaccgttggcccggccgacagttggctcaccggacagtccggtgcacaccggatagtccgagggtcgtcaagaagggcgcgcgcagccgctaggatcgggtcgagcggcgaggctgggagcagaggccgacagcgcccgacggcaggggaagaggaggacgcgacagggagcgctcgcggcaaggagaagggcgggtggggaccagcggccgatggaggagagctggaggaggaggtcgcgaaagtcggcgacggggcggaggatgcagaggggccgggcgcggcgggatcccagcgaggagaggtcgagcgcagcgggatccggcatagggcggccacggtcgggggggcgggaccggcagagagggcgcgtggtggccggctgcgcagggccgcgatggaggcggccggtggcgcaggggcgcggctcaagcggcccgtggcggctgagtggggagggagccggcggcgcggcggctga

SEQ ID NO: 41442 - DNA, 321 bp, Zea mays
  Peptide Sequence Number=SeqID_83221
atgagcaagaacacaagagacacaagatttatcccgaggttcggtcacaccaccaaggtgccctacttcctcgttgaggcgcccacaaagagccgggtctctttcaaccctaatcctccctttgccaaccacagaggaagaactcggttcactgacctactcagccggagagtcgaccggactcaaaaccggttgagccgggctcaaatccggttgaaccggttttcccaaaatctgcacacgactttttctgacaggactgactggcagactggcagtgacagagcggaacagtgcagaaaccggttgaaccggttttag

SEQ ID NO: 41443 - DNA, 321 bp, Zea mays
  Peptide Sequence Number=SeqID_83222
atgagcaagaacacaagagacacaatatttatcccgaggttcggtcacaccaccaaggtgccctacttcctcgttgaggcgcccacaaagagccgggtctctttcaaccctagtcctccctttgccgaccacaaaggaagaactcggttcactgacctactcagccggagagtcaaccggactcaaaaccggttgagccgggctcaaatccggttgaaccggttttcccaaaatctgcacacgactttttctgacaggactgactggcagactggcagtgacagagcggaacagtgcagaaaccggttgaaccggttttag

SEQ ID NO: 41444 - DNA, 399 bp, Zea mays
  Peptide Sequence Number=SeqID_83223
atggaagctcgccgaactgtgtccatatctttcctgcgtcggtcgtggtcttcaagccccgacgcgcgtgtccctgctcccagatccaaggccggtcgtcgtgtatgctcgcctcggctgtgtggccatgctcctgtcccagtcaccgccggtgaagcaagaaatctcaagaatcgggtgaagacgaagctagcagcgcgatattccctaaacgctcgacaaattgcctggatcggaaaatcgctaccaatctcgcggattcgtgtcagctgtggaaacggtacgttaattaatcgcgtgttgcggaagacgagccaagtcgaccccaagcgcgggctattccgcaggatgatgctgatggacaaacctgaagatggtcgtaaagtggacgccggctaa

SEQ ID NO: 41445 - DNA, 360 bp, Zea mays
  Peptide Sequence Number=SeqID_83224
atggccggcgctccctgcttggttccgtctgtcgcgccgtcgccttactgctcgcccgtctgcgcgccccttcgtccatggtcgccgtccaccgttgatcccctcgcgcaggccgcgagctcttaccccagacttcaatcgaaggtcgtcgtcgctcgtgcatccccaagaaaacccaagaatcgggtgaagacgaagttagcagcgcgatattccctaagcgctcgacaaattgactggatcggaaaatcactaaacggtgcgataattaatcacgtgatgcggaagatgactcaagtcgaccccaagcgcgggctaatccgcaggatgaagctgatggaccaacctgaagatggttaa

SEQ ID NO: 41446 - DNA, 237 bp, Zea mays
  Peptide Sequence Number=SeqID_83225
atgaagaaaatagacgaggaggtccagcaacaaacagatcaggtgctcaaggtggcggataagtggttcctctcgcacttcagggtagattgccaccggaaggccgtccaagagagagagataaacaccgagtacatgttagccgtgctgcaacagctccccacgataggtgatgccaggaccacgctccgctataattcaccggactgtccggtgtgccagcggagcaacggctag

SEQ ID NO: 41447 - DNA, 369 bp, Zea mays
  Peptide Sequence Number=SeqID_83226
atggccgattctaaagatttcaatggtgcttctccaaacagcaacacaaggctaactaatttatcgaccgctgagcatgaaagattaaaagatgacatgaagaaaatagacgaggaggtccagcaacaaacagatcaggtgctcaaggtggcggataagtggttcctctcgcacttcagggtagattgccaccggaaggccgtccaagagagagagataaacaccgagtacatgttagccgtgctgcaacagctccccacgataggtgatgccaggcgccgaaagaattgcgccaaacacatcggcaataaatgggttttgaaaggaaatagggtcaagccttttcctataaatgattttggtgattga

SEQ ID NO: 41448 - DNA, 243 bp, Zea mays
  Peptide Sequence Number=SeqID_83227
atggcaatcgcgaggcaggtggccaactccggtgaggctatctggaccggccgtgaggcaagtgggtactgcggccagccaatggtctcatccgcggtgaagatcttttcaccccgaggcgttatccggacaccagtgggcacgaatcgcatcgccggcgcgaatccaggcgcgggggtcgccggcggcaagctctacaagtttgctatattgaccaagagcaaagtcctcaagaattcttag

SEQ ID NO: 41449 - DNA, 201 bp, Zea mays
  Peptide Sequence Number=SeqID_83228
atggaaatgcttaaattgagacttgggttaggaacaggtgatgttctacccagattgaaacatacccttgagagtcttttccttagtcgggtgaggaagcgacaaatttttgttgcttttgctccaaggtggtaccaaatgaggaaaaacaagactgaagtgcgggaggactcggtcctccacttaggatcttttgcttaa

SEQ ID NO: 41450 - DNA, 270 bp, Zea mays
  Peptide Sequence Number=SeqID_83229
atggaaatatttaaattgagacttgggttaggaacaggtgatgttctacccagattgaaacatacccttgagagtcttttccttagtcgggtgaggaagcgacaaatttttgttgcttttgctccaaggtggtaccaaatgaggaaaaacaagactgaagtgcgggaggacttggtcctccacataggatcttttgcttataacttatcgggaggagtctgtgcctcccttggtttgtataatattactattcagcactcgcctttttag

SEQ ID NO: 41451 - DNA, 684 bp, Zea mays
  Peptide Sequence Number=SeqID_83230
atgcatacccttgagagtcttttccttagtcgggtgaggaagcgacaaatttttgttgcttttgctccaaggtggtaccaaatgaggaaaaacaagactgaagtgcgggaggactcggtcctccacttaagatcttttgcttacaacttatcgggaggagtctgtgcctcccttggtttgtataatattactactctgcactcacttttagctctgcatggtcggtccgagcccgaggtcgggcgaggcggtggctcctccgaggtcgaggctgagttcgagccctggggtcgggcgaggcggagaccgtcgtccgaggtcgaggttgcgtccgagccctggggtcgggtgaggcggagaccgtcttccgaagtcgaggttgagtccgagccctggggtcgggcgaggcggagaccgtcttccggtgtcgaggttgagtccgagccctggggtcgggcgaggcggagaccgtcttccgaaatcgaggtggagtccgagccctggggttgggcgaggcggagaccgtcttccggtgtcgaggttgagtccgagccctggggccgggtgaggcggagtttcctatggcgcccgaggctggacttagctgctatcggcctcactctggcgagtggcacaacagtcggagcagcgcaggtggcgctgttttcctgtcaggtctgctag

SEQ ID NO: 41452 - DNA, 684 bp, Zea mays
  Peptide Sequence Number=SeqID_83231
atgcatacccttgagagtcttttccttagtcgggtgaggaagcgacaaatttttgttgcttttgctccaaggtggtaccaaatgaggaaaaacaagactgaagtgcgggaggactcggtcctccacttaagatcttttgcttataacttatcgggaggagtctgtgcctcccttggtttgtataatattactactctgcactcacttttagctctgcatggtcggtccgagcccgaggtcgggcgaggcggtggctcctccgaggtcgaggctgagttcgagccctggggtcgggcgaggcggagaccgtcgtccgaggtcgaggttgcgtccgagccctggggtcgggtgaggcggagaccgtcttccgaagtcgaggttgagtccgagccctggggtcgggcgaggcggagaccgtcttccggtgtcgaggttgagtccgagccctggggtcgggcgaggcggagaccgtcttccgaaatcgaggtggagtccgagccctggggttgggcgaggcggagaccgtcttccggtgtcgaggttgagtccgagccctggggccgggtgaggcggagtttcctatggcgcccgaggctggacttagctgctatcggcctcactctggcgagtggcacaacagtcggagcagcgcaggtggcgctgttttcctgtcaggtctgctag

SEQ ID NO: 41453 - DNA, 258 bp, Zea mays
  Peptide Sequence Number=SeqID_83232
atggggaatagggagagatggacgtgcgattcgtcacgaagatctcgattttggctacgcaacgaacggggttccgcggagggttttatgctcggggacgaggagtccgagccgggttgtttcaaccgtctagctattccggcgggcacgacattgactgcgacaacaggggaagagggcggatctgaccgcgaggccccacctaaatctacagaggccctggctggtaaatgttttagttatgcagcacacaaataa

SEQ ID NO: 41454 - DNA, 1062 bp, Zea mays
  Peptide Sequence Number=SeqID_83233
atgcgcctcatcctgcggtacctgttcttgacctgtggggggtgtgagacagcaagagtgagctcacatacgatcatcgctcaacaagttgtggggaataatgtgcatgaactcgccaaaggtgggagctcacgtgaagtaggttgcacatctttacccacaagtcatgttacccatctgccaagggatcgcgacttcccatacacctcttccgaggaggcgaggcaggggttcttgcctgaccgccatcgcagcaaaatcaaccaaggacctccctacactgaccactcccctactgcccttgcccctttcgggtaccaggatgatcttcaggtgacccgtgttctcactgctaaacgtagcaatatagacaaacatgccgcacagtcaacatccgatggccaggatcccattgtccccaacgcacagaccgtgcccggcggtggcgtcaagcctcctcacccgatggaacgccggcgagggaacggagcacaaagcctcagccacggcgtcgggtctgagagcagagagggggcgcgcgcgctagagatggcgcccagagcggcgagctgcagaagaagcgcgccagccagatctcgccggtggatgcacaggtgcggcggtggatcacagcacggcaggcaggcagagtccggaagcagggacgcgacgggggagcttggccattggagagagctcgccatggggaacagggagagatggacgtgcgattcgtcacgagggagacgaagatctcgattttggctacacaacgaacggggtttcgcggagggttttatgctcggggatgaggagtctgggccgggttgtttcaaccgggcggcgctagaatcccggagcttcggcggaggccgttgcgggagtagcggcgagcaggcaaggaaagatctcaactcgggaaagggagagagacttttcgccggactgttcaccgtgacacttgccgcgcagtggacagtggtgtcctcgtcggagttcgccgtcgattgtagccaccccacgtgcttagaagatctaccatgtcgcattagatatccatag

SEQ ID NO: 41455 - DNA, 288 bp, Zea mays
  Peptide Sequence Number=SeqID_83234
atggtattgctacaacttaactttatgcagtcactcccgcttatgatattaatgtttcaaatgggaagtcttatgttgggtgttggtcgtggtcgaccggaacgagggcatctggcaagctcttatagttccggctcaggcagattggatacgagcatagttcccaaatctttaccctgtggtctggactataagttggttacgcatttgcgtaatgaggactctagggagaagcctcgtagtgagaccctggccattcacctcggaagtgaatacgggtctagctaa

SEQ ID NO: 41456 - DNA, 228 bp, Zea mays
  Peptide Sequence Number=SeqID_83235
atgggaagtcttatgttgggtgctggtcgtggtcgaccggaacgggggcatctggcaagctcttatagttccggctcaggcagattggatacgggcatagttcccaaagctttaccctgtagtctggactataagttggttacgcatttgcgtaatgaggactctagggagaagcctcgtagtgagaccctggccattcacctcggaagtgaatacgggtctagctaa

SEQ ID NO: 41457 - DNA, 150 bp, Zea mays
  Peptide Sequence Number=SeqID_83236
atggtcgacaggaacggggacatctggcaagctcttatagttccggctcagtttgaccatttccagcatttgcgtaatgaggactcttgggagaagcctcgtagtgagaccctggccattcacctcggaagtgaatacgggtctagctaa

SEQ ID NO: 41458 - DNA, 228 bp, Zea mays
  Peptide Sequence Number=SeqID_83237
atgggaagtcttatgttgggtgctggtcgtggtcgacaggaacgggggcatctggcaagctcttatagttccggctcaggcagattggatacgggcatagttcccaaagctttaccctgtagtctggactataagttggttacgcatttgcgtaatgaggactctagggagaagcctcgtagtgagaccctgaccattcacctcggaagtgaatacgggtctagctaa

SEQ ID NO: 41459 - DNA, 228 bp, Zea mays
  Peptide Sequence Number=SeqID_83238
atgggaagtcttatgttgggtgctggtcgtggtcgacaggaacgggggcatctggcaagctcttatagttccggctcaggcagattggatacgggcatagttcccaaagctttaccctgtagtctggactataagttggttacgcatttgcgtaatgaggactctagggagaagcctcgtagtgagaccctggccattcacctcggaagtgaatacgggtctagctaa

SEQ ID NO: 41460 - DNA, 192 bp, Zea mays
  Peptide Sequence Number=SeqID_83239
atggaacgggggcatctggcaagctcttatagttccggctcaggcagattggatacgggcatagttcccaaagctttaccctgtagtctggactataagttggttacgcatttgcgtaatgaggactctagggagaagcctcgtagtgagaccctggccattcacctcggaagtgaatacgggtctagctaa

SEQ ID NO: 41461 - DNA, 180 bp, Zea mays
  Peptide Sequence Number=SeqID_83240
atggaacgggggcacctggcaagctcttatagtttcggctcaggcagattggatacgggcatagttcccaaagctttaccctgtagtctagactataagttggttacgcatttgcgtaatgaggactctagggagaagcctcgtagtgagaccctggccattcacctcggaagtgaataa

SEQ ID NO: 41462 - DNA, 456 bp, Zea mays
  Peptide Sequence Number=SeqID_83241
atgagccgtggttgtagtgccagtggtggtcaaagttctctgggttatctctttggaagcggtgagccccccaaaccagtagtggcaccagctgcaagtgctccacctgttgagaaaccatctgctgcaaagactgatgcgaccaagcaggttgctgctggggttaccagccaaaccaataactaccacagggctgatggtcagaacactggcaacttccttacgctgagtacaacttctttacgaccaagtgaagatttggaaactaagaagacatcaattgctgtcatcatagtagttagtgttcttgcttcagtccttgtcgtcacttccttgttcgagggctttaagtactggcagaagaagaagagggagcgagaccaggcgcggttcctcaagctctttgaagagggagatgaccttgaagatgagctgggccttagtaatgaattctaa

SEQ ID NO: 41463 - DNA, 228 bp, Zea mays
  Peptide Sequence Number=SeqID_83242
atgggcacatttaacagaccaagtgaagatttggaaactaagaagacatcaattgctgtcatcatagtagttagtgttcttgcttcagtccttgtcgtcactgccttgttcgggggctttaggtactggcagaagaagaagagggagcgagaccaggcgcggttcctcaagctctttgaagagggagatgaccttgaagatgagctgggccttagtaatgaattctaa

SEQ ID NO: 41464 - DNA, 513 bp, Zea mays
  Peptide Sequence Number=SeqID_83243
atgtcgaccggcgagttgggattcactgcgattgggttgaagacaaaggatggtgttgttatcaccactgctgaatggtgcaaagatatagcactaaaaagattttgggaatctattattcttatttcgaagaaatataaggatgtatactgtgttaaacgtattggacggtcacatgacatttatacgtggcgacattcaattcgacttgatgctccaatcgacttaaaaggtcttaatactggtcattttgctctgcacattattgagtggtgggacagtggtttaaaagcgcaacttagtatgatggacaactttttgggcatataccatggaagcatcgttgaacaagatcgttatggaaatgctgagttcgttgacatgcaacgtgtggctgagattgttgctacggctaaggagaagattggttggcatgatgttgacgacattgacgttgatggggtgctaaacgtaggtcctccacccaacgtgcaaagacttaccttcctttag

SEQ ID NO: 41465 - DNA, 282 bp, Zea mays
  Peptide Sequence Number=SeqID_83244
atggccgccgccttcactcgctatctctcctcgcccttccctctaccgcatccaccggatctaggagcagggcgtcgcgtggaagcccgtgccaacgccgacggcctcgtagaagccgccagcgcgctccctccgacgcgccctccgccatgcccgcaccaaatctgcgagaccgtgttgtacgagacgctccggctgtacggcgcggtgccgttgatcgcgaggcgggcgacggcgggcgcggacctctacgacgtgaaggttcccaagggcgacgaggag

SEQ ID NO: 41466 - DNA, 786 bp, Zea mays
  Peptide Sequence Number=SeqID_83245
atggccgccgccttcactcgctatctctcctcgcccttccctctaccgcatccaccggatctaggagcagggcgtcgcgtggaagcccgtgccaacgccgacggcctcgtagaagccgccagcgcgctccctccgacggtaacggtccctacggcagcgccctccaccatgcctgcaccggatctaggagcagggcgtcgcgtggaagctcgtgcccatgccggcggcctcgcacaagccgcaagtgcactccctccgacggtaaagggccctatggcagcgccctccgccatgcccgcaccaaatctgcgagaccgtgttgtacgagacgctccggctgtacggcgcggtgccgttgatcgcgaggcgggcgacggcgggcgcggacctctacgacgtgaaggttcccaagggcgacgaggaggtgtggggcacggacgcggcgcgttcaacctgctccagttccgggacggcatggccagggccgcgacgcacccgaacgcgctgctgtccttctccctgggcccgcgatcgtgcatcgggcaggacttcacgatgctggaggccaaggccacgctggcgctcatcctgcggcgcttcgcgttccgggtggcgccagatttcgttatcatcatatttcgaaagggctccccgtcgcgttgtgcttcgtcggctccacgttcgtcgtgctcactggcctcgtcttcaaggaaggatgccatcagagacaaatctgttttcatgttcaacgcgctccttgaagaggaaaacaaggcttggatctag

SEQ ID NO: 41467 - DNA, 375 bp, Zea mays
  Peptide Sequence Number=SeqID_83246
atgaagggcactgggcgccgagtgccgatgggaaaaaggtccgggcacggtagagcagagggtggaagcagggacgcgacgggggagcttggccattggagggagccgagatgccttgatttccacaccaaaagaaatcggggtagcggcacccgcggtgcagagtcgctgcgatcgcgccctgttctgttctgttcacgcggaggggatggagctgccaaggtggccccaccagcagcggaacaacggcgcgagggagcaggtcaccaagccgcgatgggcgcctggccaaatagcagggaggccgacaagtgggacctgcgcgtaagtgttaccgcactggtgggctgcgggggaaagaaatggactgcgtag

SEQ ID NO: 41468 - DNA, 960 bp, Zea mays
  Peptide Sequence Number=SeqID_83247
atggaagaggaagatattgtgtcaaagctgttggacttcattgctgaacctcactctgcagctgaatcttggggctcttatgaccagggatcaaattctaaaaaacgcaagagaggaggtgaaagtgcaagtaagacgcctgatggcacacctagtaggtcgaggaagaaatttgtcgatgacgatacttctagtaaaaggcagaataaagcgctccagtatgatattgatgaggatgaatccatgaagtctgacagtgaggaaaacatagatgaagattcagatgaagctgctaacaaacaggaaggctatggatctaggaaagaaaaggcagggaagaagttatcggaggtaaaagaatcttcaggaaacccaaatatagcaaacaagcatttttggattggattgcaatcaaaagctctatttttactcatttaccttcaaaattgggcgcaacaaggcagttggtgtgaattgataacccatcagttggaaaaagaccaacaagcatctaatgaacgcacgaatgggaatgacaatctacataatatattggacccacctaggaaaatgaaaaggaaggaggagctcaccatggaagagggattaaattctaaaaacgcaagagaggaggtgaaagtgcaaaaatttgtcgatgacgatacttctagtaaaaggcagaataaagcgctccagtatgatattgatgaggatgaatccatgaagtctgacagtgaggaaaacatagatgaagattcagatgaagctgctaacaaacaggaaggctatggatgtgggaaagaaaaggcagggatgaagttatcggaggtaaaagaatcctcaggtaaaaagaagtcaaacacagggagtggccacaaatcaggtcctccaaacaaaattataaaaaatctggaaaaaagtatcaaccaagattcacgaggaaaaagaaagccccaatga

SEQ ID NO: 41469 - DNA, 255 bp, Zea mays
  Peptide Sequence Number=SeqID_83248
aaatttgttgatgacgatacttctagtaaaaggcagaataaagcgctccagtatgatattgatgaggatgaatccatgaagtctgacagtgaggaaaacatagatgaagattcagatgaagctgctaacaaacaggaaggctatggatgtgggaaagaaaaggcagggatgaagttatcggaggtcgtgccctctctgtcatcggcgctgacgagctcgggggaggagaacgacggcaagactaagcccacatga

SEQ ID NO: 41470 - DNA, 342 bp, Zea mays
  Peptide Sequence Number=SeqID_83249
atgaagtctgacagtgaggaaaacatagaagaagattcagatgaagaagatactgtgtcaaagctgttggacttcattgctgaacctcactctgcagctgaatcttggggctctgatgaccagaataaagcgctccagtatgatattgatgaggatgaatctatgaagtctgacagtgaggaaaacatagatgaagattcagatgaagctgctaacaaacaggaaggctatggatctgggaaagaaaaggcagggaagaagttatcggaggtcgtgccctctctgtcatcggcgctgacgagctcgggggtggagaacggcggcaagactaagcccacatga

SEQ ID NO: 41471 - DNA, 465 bp, Zea mays
  Peptide Sequence Number=SeqID_83250
atgggagagcaccggaccctcggatatacagtccagacccccaaggttggactggctttagagaaactatttgaggatggcgtggtcaagcgtgaagatatgtttgtcacctctaagctatggccagatggggcaaaaaatacaatgccatatgaaaaggaaggaggagctcacctcggaagaggtcgtgacctctctgtcctcggcgctgacgagctcgggggaggagaacggcggcaagacgaagcccacttgagagagaggataacaaatctggagaaggcaggattggatccgcacatggaggcccagatctacatagccactgaccggatgttggcgctgcgaagtgcgacggcggatgtgtgtggacggttgaacagatggggaaggaaaagagcgagagagacagggagggagctgtggagattgggtcaacgaccggatgagagtgcggggaagtaa

SEQ ID NO: 41472 - DNA, 267 bp, Zea mays
  Peptide Sequence Number=SeqID_83251
atgtttccgaggttttgtggcagtgcgaggcattttgggagggacatcatcatgcccaacttgaagtcgtccgtgaccacaacagcgagcgcggtggagcacagggatgaagtattgaaggcgctgccaccagctgtaagccgacatgtagtctgtagatcagctgtcggtagccttgaggaggcaactaaagctaaagaagccggtgtagatgggatcattgttcagggacgtgaggcagggggtcatgtaattggtcaggaatga

SEQ ID NO: 41473 - DNA, 564 bp, Zea mays
  Peptide Sequence Number=SeqID_83252
atgtttccgaggttttgtggcagtgcgaggcattttgggagggacatcatcatgcccaacttgaagtcgtccgtgaccacaacagcgagcgcggtggagcacagggatgaagtattgaaggcgctgccaccagctgtaagccgacatgtagtctgtagatcagctgtcggtagccttgaggaggcaactaaagctaaagaagccggtgtagatgggatcattgttcagggacgtgaggcagggggtcatgtaattggtcaggcaaaagccaagccatgctaccctgtgcttatctactgtggtgttgtccttgctcaaatccatgctagatgggatccatgtgggcattatggatggccaaaatccactcctcacaagcggacccttccatacttggcactcttcctttatcaccccactaccatccccttccatatgcgacgaggacgatctgggaagcccaccatctactcccccttccacaagtcgagagcttcctatttattaatccaaagggtgaacataggcaaggccgccaccccagtttcatcctcctctcgttga

SEQ ID NO: 41474 - DNA, 1437 bp, Zea mays
  Peptide Sequence Number=SeqID_83253
atgcaactgcaccaaggggcgcatcctttcgacttcgacgcgtccagcatggggcccaggcccacgcgtcatgtaaccggcgcgccggttactacatgcgagaaactgcaccgccacttgcgccagtaccgcgccttctcgactgcggaaccggtgccgcgactcgaggcaaccctgcgcatggcccaacagtgccaaccgagcacatcggtcacgggtcgatccgccgcgggagaagacacgacggtcgatatggccaaaagtgggccgacagtaatggcggcggcaggcgggcggaagcagcagtcaagttgtctgcaggctcacgtcccctcctgggatagcgagagagccctctcccacggcgtgaagacgacgtgcccgtgtttcgttcctcgaacggctcgcgcacgcacaacggccggcccgccaaccactcgtcccatcgcattaactctgcggcagaacaggcgacacctttggcaggcgaagcaggcgacgcttcacctccgccataatgaccgtgtcaaaaaagggaccgggaaaggggatactctgaaagggatccttctccgcgaaggaaacgggccccgagccctcctactgatcagaggttcgaaggctggcccctcgaaagggttcgacagccgcctcaggccgctcgggctccgtgcccactactggtcagaggaaaacagcgccgcctgcgctgctccgactgctgtgccacccgtcagggtgaggctgacagccgccaagaccggcctcaggcgccataggaagctccgcctcgcccaaccccagggctcggacccaacctcaacctcggacgacggactccgcctcgcccgaccccagggctcggactcagcctcgactccagaagacggtctccgcctcgcccgaccccagggcttggactcagcctcgactccggaagacggtctccgcctcgcccgaccccagggctcggactcagcctcgactccggaagacgatctccgcctcgcccgacctccggggctcggactcaacctcgaccccagacgacggtcttcgcctcgcccgacccccgggctcggactcaacctcgacctcggacaacggtctccgcctcgcccgacccccgggcccggactcagcctcgacctcggaggagcctccgcctcgcccgacctcgggctcgaaccgaccacgtcacaggggggggccatcattatcctacccctagctagctcaggctacggggaacaggaccggcgtcccatctggctcgccccggtaaaacatgtaatgatggcaccccgcgtgctccatgacgacgacggttctcagccccttacggaagcaaggagacgtcagcaaggatccgacagccccgacagctgtacttccacggggctcaagcgctcctcctacggccacgacatcacatga

SEQ ID NO: 41475 - DNA, 636 bp, Zea mays
  Peptide Sequence Number=SeqID_83254
atggcggaggtgaaacgtcgcccgcttcgcctgccaaagggttgcctcgagtcgcggcaccggttctgcagtcgagaaggcgcggtgacgagtgaggtatccgtatcccggaggcgtaggagtccctcgactcggtcggccttgccactcaaggcttctcttgctcagctaagtaaccctcggctgttctgcgatgagtcagagccggaggcagcggtgtcagtgtggacagaggcggggtcggctcgagaagaggcttcattggcccaggagtatgtggcctccttggccgaggaggtgcagcagcggcggctggagcctggccaggtcgtccgctggcaggaccaaccctggagtcaggctgtcgaggccatgagccgtgctgatgtcctcgggggacagctggccgaggctacggagcggccggtcgaggtgtttgcccgggccgggacccttatggagaccttggctatgatggcccgagcttggtgctggcttcctccttcgaggtggagatccttccgcccgtgtcaccgtccgaggccgggccagatcccgccgaaggtggaaacaacgccgagggtgctgttgttccctctgttgatgtatgaacctgcaggaacagtttgtcagtag

SEQ ID NO: 41476 - DNA, 339 bp, Zea mays
  Peptide Sequence Number=SeqID_83255
atggcgcgacggtggcccggggcggcggtggcggacctccgcggctgcacggggaacggcggcggagctccaacggcggccgggaaacgagctcgggacggcggggatttgtggcggcggtgctctggcgtgcgcgcagcgagggagaggtggaagaggggtctgctggagcgcaaatgggggagggggagagggcgagtggggctcggggctcaagtggccaggggcggggcggttgcgagctccacgcgcgacgtgggcgcggagaaggcggccgcgcgcagctcgggcggcagttacgcgaggacgacggggctgacaggccgggcccgcgagtag

SEQ ID NO: 41477 - DNA, 273 bp, Zea mays
  Peptide Sequence Number=SeqID_83256
atggcgcgacggtggcccggggcggcggcggcagacctccgcggctgcacggggaacgacggggtccctgggccgacgagtgaatgtcgccgcgtgccccagcccagatgggtcgacgtgaggccgagcgcgaaggggggaagtgaggaggccggagaccagcgtgagagaggtggaaatcccgtggccttcggttcgtcccgcgcccaggtcgggcgtaaggagaggatccaggtgtacaatgggaggtgtagcagagtgctacgtgtctag

SEQ ID NO: 41478 - DNA, 936 bp, Zea mays
  Peptide Sequence Number=SeqID_83257
atgtacggcattgcagttgccgctcttggtatgctgagcacaatcgcaactggtcttgctattgatgcttatggtcccatcagtgacaatgctggtgctgagatggctggaatgagccacagaatccgtgagagaactgatgctcttgatgctgctggcaacacaactgctgctattggaaagctgctcttgtgtccctggcgctttttggtgcctttgtccagcagagctggagtgaaggtcgtcgacgtcctctcccccaaggttttcattggtttgattgttggagccatgcttccgtactggttctctgccatgaccatgaagagtgttggaagcgctgccctgaagatggtggaggaggtccgcaggcagttcaacaccattcctgggttgatggagggaacagccaagcccgactacgcaacctgtgtgaagatctccactgatgcttccatcaaggagatgattcctccgggcgctctggtcatgctgactcccctcatcgttggaaccctctttggcgtcgagactctctccggcgttcttgctggtgccctggtttctggagtgcagatcgccatctctgcttccaacaccggcggtgcatgggacaatgccaagaagtacatcgaggctggtgccagcgagcacgcgaggaccctcggtcccaagggatccgactgccacaaggccgctgtgatcggtgacaccattggtgaccccctgaaggacacctccggcccgtccctcaacatcctcatcaagctcatggccgtggagtccctcgtgtttgcccccttctttgccacccagggtggcctgctcttcaagattgctgctgctgttcgcattcaatctttgggcctcccggagccgccggaggcgcgttttactgttagccttactactcttactccctgtagctccacgtag

SEQ ID NO: 41479 - DNA, 681 bp, Zea mays
  Peptide Sequence Number=SeqID_83258
atgacaaaagctatgtatcttgaagagagtccaaacatcttacaatttggaatggagagaatagtagataatctgcaaaaaaagaacaactgtactcctctggttttcattggtttgattgttggagccatgcttccgtactggttctctgccatgaccatgaagagtgttggaagcgctgccctgaagatggtggaggaggtccgcaggcagttcaacaccattcctgggttgatggagggaacagccaagcccgactacgcaacctgtgtgaagatctccactgatgcttccatcaaggagatgattcctccgggcgctctggtcatgctgactcccctcatcgttggaaccctctttggcgtcgagactctctccggcgttcttgctggtgccctggtttctggagtgcagatcgccatctctgcttccaacaccggcggtgcatgggacaatgccaagaagtacatcgaggctggtgccagcgagcacgcgaggaccctcggtcccaagggatccgactgccacaaggccgctgtgatcggtgacaccattggtgaccccctgaaggacacctccggcccgtccctcaacatcctcatcaagctcatggccgtggagtccctcgtgtttgcccccttctttgccacccagggtggcctgctcttcaagtacctgtaa

SEQ ID NO: 41480 - DNA, 1653 bp, Zea mays
  Peptide Sequence Number=SeqID_83259
atggcggcgctctctgcgcccctccgcgccatcgccgccggatcccgcgtcgccgcgtcggacacagcgaggtggatctcgcccacgatgcacgcctccaccgcgccgccgatggaaggcatcctgcacagcgcgcttaccaagatgaagggcttccaggcgctggcgaagaggaagcgcacagcaggtgccgccgtggtcgaggtcgtggccaagtggaaggtgggcgacctcgtgcttaccaagatgaagggcttccaggcgtggccggctatggtgaagtatctgcggtttttagtggtggttgataactatttgctgtcttcagcagcactggttccactgtacttttactctttcttgaacactgactacaaaacaagagaatatgagatcttgaggcttactagcatgggtgtgatcggtgtttttgtgaaggttgtgaagaatgaggggtgggagcgcctgtatggcaggcttatgccctctctcgtcggcaccgctgcctcccagaacagggccgaggcaagggcccttgagcgatccaggagagggcttagcgatgggtctgtcggggtgttccagtctctcactgtcgctgccctgtctggctgtgtcaatgcactgctcacaaacccaatttgggttgttgttacaggaatgcaagtcgatctcgccgtgcacctcgcctacggccaccaggttactgaagaaaacctggcagcactatttataaattatggacaggttgtggactgtcacatgtgtggagacccaaactcagtccttcagtttgccttcatagagttcactgatgaggagggtgcaagggttgctctgaatctgtcaggaactgtgctcagatattatcctgtcagggttctgccatcaaaaactgccattgcaccagtcaatccaacattcgtacccaggtctgatgatgaacgggaaatgtgtgcgaggactatttactgcacaaacattgacaagaaggtcactcaggcagatctgaaattgttctttgagtctatatgtggagagaaaatgacaattcaaccagcacagtatcattggctcactgcaatgactgctacagttgcgtccatgaccatgaatgagaatgaacctgtggctggttggttggctggttggctggcatggcatgcaggggagttcgcggcgttcctgacgggggcgaacctgatcatggagcacgtcttctccaatgccgccgtggtgcgcagcttcacggcgtacctcggcaaggcggtgggcgtggacgcgcccagcaagtggaggatccccgtgccgggcctgccccaggggttcaaccaggtggaccttgttggtattataatgtatctgccaacatctgatgctcgccaaaggaaggaaatcacagaggagttcttcagttacaggagcctggcgcgaagtctctgggatgattattccacctatgaacactgggccaagatcgaggttccaaaagacaaggccgaacttgccgaactccaggcccggctgaggaagcgtttccctgtggatgcatataacaaggcacgtatggagctggaccccaacaaggtgctctcaaacgccaagttggagaagatgttcccagtgttggagcctgctcaccagacaaagtaa

SEQ ID NO: 41481 - DNA, 261 bp, Zea mays
  Peptide Sequence Number=SeqID_83260
atggcggcgctctctgcgcccctccgcgccatcgccgccggatcccgcgtcgccgcgtcggacacaacgaggtggatctcgcccacgatgcacgcctccaccacgccgccgatggaaggcatcctgcacagcgcgcttaccaagatgaagggcttccaagcgctggcgaagaggaagcgcacagcaggtgccgccgtggtcgcggtcgtggccaagtggaaggtgggcgacctcgtgcttaccaagatgaagggcttctag

SEQ ID NO: 41482 - DNA, 1275 bp, Zea mays
  Peptide Sequence Number=SeqID_83261
atggccggttcggccgcccgcgccctgctcggccgctcggacgctcgggtgccccgcgccctgctgcgcgcccttgccccgagcccatgcgcgccccgtgctcgcggttatgagcggccaagggagctccagagattagtgatacttgatcagagattagtgatacttgatcagagatattttggtacaggtggcaatgagattgatggttctggttatgattatggtgctggtaagtggtattctttccgtttggaaaggatggctcgacttagacacactgcacgaaagtcagtcatccccttcttaccctcccgccttgctgagcgtccgcttcgccgtcctgtggccggacagtccagccacttggagagactacaccaccgcctgcgtgaggagcaggaacgtcgacgacaggagcagcagagctcttccctctcgctccaccaggagatagagtctgtgaggagctgctcccctgtgcttcctctggagccgccccctgcaccaccactgggcgccccagcctctggagtagctgctggaggagacccagacgacggaggaggcgacgacagctcgagccacgacaccgacttctctgctaaccctgagccggaaggatgggttgctcgacccatcactcgcgacgctgctcgcgggtgtcacttccatgatgcgctcgacaccctgctacgtcgggcatttgaccggcatacttggtccgtcgagtatcgctgtctggtctaccagcatagtcgcggggtctacccggaccgctgggaggcgacttgcttggtgcgctgcccggagaacagtctccagggtgcagaggcctgttcagagcactattctatctctgaacgggactcagctgaggcagccatgcaagatgctgcacggcgtgcgctttcgcactactgctcggttttcggtggggcagctgacggtcttgacctgaagtattacccccgccgttcatctggcagcacaggaggcgtgattgtctcacctgtcggtgagggcaatcctaggttgagcagcacagtcaacctagccgccgtgctaaacacggagctggaccatgcattagacgagctgagtagggctcgtgctgagatcgccctgctgcgggctgagcgcgcggaacgtcgttatctggacggtggttcccccgctcccgttgggactcagcacccgtaccgctcacctcagcgtggacaccagtcttatggcaatcccgcctgcaagaccaagataactctagaaccatag

SEQ ID NO: 41483 - DNA, 232 bp, Zea mays
  Peptide Sequence Number=SeqID_83262
atcgtgattcgtttccgagcttcaaggaatcgacggtcaagcttcgacgaccaagtgaacaagctcctcgagttctacgagattgaataccctgagcatctgtttggtgaaggcaaccgtgctcgcggttatgagcggccaagggagctccagagattagtgatacttgatcagagatattttggtacaggtggcaatgagattgatggttctggttatgattatggtgctg

SEQ ID NO: 41484 - DNA, 327 bp, Zea mays
  Peptide Sequence Number=SeqID_83263
atggcgggtggaaaagagctcgccggagctaaggaggggtgtctggccggcgaaggatttgagctagggatcaaggtgaacacgcttggtctttggctcaagcacttgagagaaaccctaggtgacactggggtgtcacagccttcctcccttaaaggaatctcgtcccgagattcgagtaagagtcctcccggtgtgaagcgaaggattcgaaaggcaggaggaggggttgggcatgattacgtaccaatttccttaggtaggcaatcagggaagttggatcgcaagaattcctcagtctcccaagtagcctcttcctctgagtga

SEQ ID NO: 41485 - DNA, 150 bp, Zea mays
  Peptide Sequence Number=SeqID_83264
atggcgggtggaaaagagctcgccggagctaaggaggggcatctggccggtgaaggattttgcctactggtttcaaagatttggagccctgaaatctggtatgtcttcctgcccgagcccgaggcaaatcctgggttttgtcgtgtctag

SEQ ID NO: 41486 - DNA, 114 bp, Zea mays
  Peptide Sequence Number=SeqID_83265
atggcgggtggaaaagagctcgctggagctaaggaggggcgtctggccggcgaaggatttgagctagggatcaaggtgaacacgcttggtctttggctcaagcctaagccatga

SEQ ID NO: 41487 - DNA, 444 bp, Zea mays
  Peptide Sequence Number=SeqID_83266
atgacacacttcctcagtagcttcttcgatcttcttctgaaggtcggccagccgagccatcttctcctttttcctttgcacctgctggcgggggagctcgtcggcggcgaggagtccagcctatccagggcacaattgaccaatcaaacgggtcaaagagcttcaccagggatcaaggaaggcgggcggccaaagtccggcgtggacgatcttggctttccggtgaagttctgccgggtccgagggctgggaaagcttcacaagctaatggcgaagctaaccgagcggctggcgaggcttggaagcaactggggtgggctggccacggtggccgaggctctagtggcaatggcgggtggaaaagagctcgtcggagttaaggaggggcgtctggccggcgaaggatttgagctagggatcaaggtgaacacacctagtctttag

SEQ ID NO: 41488 - DNA, 351 bp, Zea mays
  Peptide Sequence Number=SeqID_83267
atggctacgacgacggcggtggagcggcttggcgctcccaacaggtatataccctttgtagacgcattcactctgaagaaatatgtagctaaaggtgttgatgtcatggttgtcagagagcttaatggaggtgttgacgatgaacgggctcgccaaggacgtgccgacggtgaacgggatgcacaaggagcccacgaccgcacatcccagattgctcatgttgcctactgcgcatctgaaaatctcaatcattgcaaaataaaaattggcttacctgatccaactgataataaatgtaaatcagtcagtattgaaaacaaaattagtttgaaggttcacatgagcatctga

SEQ ID NO: 41489 - DNA, 1266 bp, Zea mays
  Peptide Sequence Number=SeqID_83268
atggatctggtgacggacgcccaccgcgtcgcatggctccaacacggcctcctcgtgctcctccaaatccaccctgtccgcctccacctcgacggggacgccgccgtccatcgtcctaccacggaggacatctgctactacctcggttgccacctcaccagcagcaaggccacgcggaacctggtacgcgcgcccgaggcgtcctccgcatgcatgctcttcttccgtgaccgtgctgcaggggcgggggaggggtccaacgccaccgacctgccgtggacgccgccgatgtggtccagtgccaagtccagacctcgcgcgggcaaagaggggcatgcggcggcccgggcactgggcgaggtctggtgccggggctccggccaacagcgtgaagccaggagaaatcttaggcgggtgagcagcccaacaacagctctccaccttcctcaccctttcctcctgatatttcctcctttctctatcccttcccctggcttcacagctctccatggtgaagagggcgtccaccgcgatggctacgacgacgacgatggagcggcttggcgctcccaacagtttgtagacgcattcactctgaagaaagaggtagctaaaggtgttgatgtcatggttgtcagagagcttaatggagggagactggaggttactgagatcttcaacttttcccaagatgatttgttaactgaagacatgatgatacttgacacacatggtgaagttttcatttggattggtcagtatgtggaatcaaaagagaaacagaaggcatttgacattggccaggcctatcaccggtgggatgcaagtgctgggagggaggacgtggagacgctagcgcaatgccagcggatgattgcgtgcggggagtggccaccgctggccgtggcctatgaccacgtggaagggtccaccatggaggccggtgggatattaggagccagtctaatcttgtgggtacttgttcctcatatgatggcagttaccgagtcatcaagatttcatgagtcattaaagaaggatgatgtgcacataagaaggctcatcataaatcaggtgttgccactatctgcgtccttctgcagattctgtgctgcaaaatggagggttactgagatcttcaacttttcccaagatgatttgttaactgaagacatgatgatacttgacacacatggtgaagttttcatttggattggtcagtatgtggaatcaaaagagaaacagaaggcatttgacattggctag

SEQ ID NO: 41490 - DNA, 492 bp, Zea mays
  Peptide Sequence Number=SeqID_83269
atggcgagagtagcgtgtaccctccatgccaagaggctggacggtggtgtatctatgctcttggttggcgtgaacctgatctgggtgtgggtagaagatggtcagcgtatgaatgagctaagagctgacgtcagacatctgcaagacgagcttgctgaacgggatttggcaatcgattgggctgtcaattcacgttcgattgcttgggaccaggaagccaaagctcgttctcgtgtggcagagcttagtgcggccattgacaacttgcaggtgtattgtaatactttacttgaggaagtccatgtactgtattcgcgactgcacccagacgtgcctgctgaccctattggaatgggagctggaccctcaggaacaacacgtgaaggacttggtggggaattggacctttttaagccccctccttctatgaacctggttgatgaacggtcccctacaacggacagtgaggcaaccaaagacgataaatactag

SEQ ID NO: 41491 - DNA, 339 bp, Zea mays
  Peptide Sequence Number=SeqID_83270
atggcgcccatgtacccggcaccaccggaacaggtcgccgccatcgagtattcgcgtctccggccagaacacgaggaagaatttgtagtagaggaaaaagttgtctctcagactgagaatcctccagtagagaacaacttttatttcgacatctgcggaccttttaactggccacatgcctcatcatgggtaagctttgcctcggtcggaccaataccaaaaaggctaccaagcaatgggagtggagatatggcgagagtagcgtgtaccctccatgccaagaggctggacggtggagtatttgtgctctcggctggcatgaacccattctggtcttga

SEQ ID NO: 41492 - DNA, 441 bp, Zea mays
  Peptide Sequence Number=SeqID_83271
atggggaagcctgtcccatcactcctcatgctcctcctcagccgaggcagggttcccactcaacagtccaacccggtgtacaatggatcaagcagtctcattagctgcgagaagcagacgattcgaatcgagtttttatccttgcaagtgaccgcacttgtacccaccataaccggaatgggagacctcgtctcaggtcacgtgaggggcaaagtctactgccaggttcaatcaggtactaggcttaccgatttaccatatttctcggttatgcataaaaccggggcttgccttccaaagcagtggcaggcaggtcctctggtgcaggctctggtgctggatcgggggcaacctcctgggcagctccttgctccggcacgaggatgtactctccgtccgcaagattacagtctatcgaaatgcaatgaacatggtttctaa

SEQ ID NO: 41493 - DNA, 1125 bp, Zea mays
  Peptide Sequence Number=SeqID_83272
atggggaagcctgtcccatcactcctcatgctcctcctcagccgaggcagggtcccactcaacagtccaacccggtgtacaatggatcaagcagtctcattagctgcgagaagcagacgattcgaatcgagtttttatccttgcaagattagggctcaccgccttggcgtacaatgccccactgaccccgactggacgtcgtgcagtgaccgcacttgtacccaccataaccggaatgggagacctcgtctcaggtcgcgtgaggggatatgtctgcgggcaggttcactcaggttatgcataaaaccggggcttgccttccaaagcagtggctggcaggtcctctggtgcaggctcgggtgctggatctggggctaccttctgagcagctccttgctccggcacgaggatgtactctccgtcagcaagattgcagtctatcgaaatgcaatgaacataagttatgcattttccaagttgctgtccaatttaaaaacagatttaattaaggttttctggaaaaacagtttacaccgagtccttccccttactgaaacagtaaccgcgagaaagaaaagggcggcgcggcttaccggcggcgagggaggtccggcgaagggtggggtcggctcggggagactctggcggtcacgtcgaggtacggctcgacatcggagatggccggaatcgcccggtccacgcgggcaggcgggtgtcctcgtcggcggcgagtataccggccaaaccacggcgaactggttcaatccgagggcacggttagcatcacggggtcacgcagcgactgtgtgcgcaaggaatcgaagggtggtggagtggtttacccggtccacatactccggcggggtcgagaggtccggcgagcgtggactggcttctctggcgaaggaaactccgattccttgctcggggagcctcacggaggtgtgcacaagcttctccgagggcaggacggggttggggatggctctgctggccggtctatggtggcagaggggttgggcggccgcggactcgctgcgcacgggcaaacagcgacgagctaactccggtgaggtgtggagggtgcgcggaagggtgcagtcgaagcctgggaaggctttataa

SEQ ID NO: 41494 - DNA, 548 bp, Zea mays
  Peptide Sequence Number=SeqID_83273
ccaatctgcaccgtccatctatatgcgtcaaatcatcaccatccatctcgttgcctccgcttcaagcctcctccatccatcgatcgcaactgctcctctctcctctccccaccacgcacacgggcgcgggcgtggagaccgaccaccacggcaccacctcctcctccggttgcctccggcctcgccatccctctgtcctcgacttccctccgtcctcccggtctccagcctcccggaccggaagctccacgtggcgcgacagctcgtctctgtcgtctatggcggcggcagaggtgtactcgccgatcgcggcggcggcggcgcagcagcagcgggagaaggcgacgtcgcagatctggcgggcggtggtggggtggtggggtggatcgacgaaacgccgctcccgccgggacgtccgcgcctacaacaccgtgctacacgcgctctcccgcgcgggccagtacgagcgcgcgctcgagctcttcgccgagctccggcgccagggatacgagataaagcgagattcaatgtttcgtaaagcgagataa

SEQ ID NO: 41495 - DNA, 549 bp, Zea mays
  Peptide Sequence Number=SeqID_83274
atgggtccacaagtcattgatagagagggaaaaaaagaatctatactacctattaaggctgtaagggcctcctccatccatcgatcgcaactgctcctctctcctctccccaccacgcacacgggcgcgggcgtggagaccgaccaccacggcaccacctcctcctccggttgcctccggcctcgccatccctctgtcctcgacttccctccgtcctcccggtctccagcctcccggaccggaagctccacgtggcgcgacagctcgtctctgtcgtctatggcggcggcagaggtgtactcgccgatcgcggcggcggcggcgcagcagcagcgggagaaggcgacgtcgcagatctggcgggcggtggtggggtggtggggtggatcgacgaaacgccgctcccgccgggacgtccgcgcctacaacaccgtgctacacgcgctctcccgcgcgggccagtacgagcgcgcgctcgagctcttcgccgagctccggcgccagggatacgagataaagcgagattcaatgtttcgtaaagcgagataa

SEQ ID NO: 41496 - DNA, 180 bp, Zea mays
  Peptide Sequence Number=SeqID_83275
atggccgtcgtcttctgcgagctcgttgcgcagggcgaggccctccagaattttcaacacggggctggattttggagtgcaatgacttcaaacgtaaccttccagtcaaggaatgtgctaagcaagaaatttatggtatatccttacatgccttctatttttgagatgaaaccaaattag

SEQ ID NO: 41497 - DNA, 175 bp, Zea mays
  Peptide Sequence Number=SeqID_83276
tgttgctgccgcggtggagcccaagctgcggtgcctcctcaaggcagacatggtcgtcgtcttctgcgagctcgttgcgcagggcgaggccctccagatcgagcaccgcgaggcaggacttcctgaattcgtgtcacaagatagggtcatggatgttgggcatcactcgggctaa

SEQ ID NO: 41498 - DNA, 1266 bp, Zea mays
  Peptide Sequence Number=SeqID_83277
atggacccgctgcattggatgattgagaaggccgctgaagatggactgcttggacaggtgctgcctagaggggctaagcttcggtgctctctctacgcggatgatgcaggcatgtttgttagagctgacaaatcagacttggaggtgctgaaagggattctcaacgcgttcgaggggtgttcagggcttaagatcaactatgacaaaacaaaaattttcccaattcgatatccagcatcattatggccaacgctaatagatgtgtttcctggaaaatacactagcctacctgggaagtaccttgggttaccccttcattacaggaatattcacaagaacgctgaaggagcaggggtggagtggacgtggaaacacccaactaccaaccaaccaaccaaccaagcttcgagccgtcgagtcgaagcatctgggccacgccgccacaaaaggaaacgagaagacaaggcctccgcggctccgcccccgatgcctccgctcctcacctcacccgcctccctcccctccgcctcccctctcctcgtctcctgtatcggcgctctccaccgccccggccccttcctccaccagcgcgccgccgcctcggtccacttcctcgcgccgcacaggaagacccgaccgccccccgcgatgagctggcttgggaagctgggcctgagcgggcttggaggcagcccgcgcgcgtcggaggcgtcggcagcgctggcgcaggggcccgacgaggaccagcccgcgccggggaacgagttcgcgcaattcggcgccggctgcttctggggcgtggagctcgcgttccagcgcgtgccgggagtcacccgcacggaggtcggctacagccagggcaacatccacgatccgacctacgaggacgtctgcaccggcaccacaaaccacaacgaggtcgtccgcgtgcagtacgacccggccgcctgcaagtacgacgacctcctcgacaccttctgggcgcgccacgaccccactactcccaaccgacagggcaatgatgttggaacacagtataggtcagggatatactactataacccagagcaggagaaggcggcaagagagtccctggagaagcagcagaagcttctgaaccggaagatcgtcaccgagatcgttccagcgaagaggttctatagagcagaagagtaccatcagcagtacctggagaagggcggccgcttcggcttcgggcaatctgcagccaagggctgcaatgaccccatccgatgctacggatga

SEQ ID NO: 41499 - DNA, 1641 bp, Zea mays
  Peptide Sequence Number=SeqID_83278
atgtctacatactccaataaatcttgtcatctaacatctgtgttttttggtaaacatactgcccttatcagcattagactttgggagttccttgatcctcaggatgacagtaggctcctgcatactgatcttgttttgcttgatgaagagggaaacagcatacatgcccagatctatcctccgttatgccaacagtttagtgctctgcttgatgagggaggggtatacaacttgaagtatttcttagtcaggaaagctaacagattctacaaaccggtagaaaactgcagcatgatcagctttacaaagtggactacagttgaagttgtcctccagatcccccctgcttttccagtttgcacgtataacctcactcccatagaacagctccagccgcgcatggactacaaggaatatttcactgatgtgctcggtgttgtcagtgtgatctcccatgtttcatcgctacgcacaaggggacgacaggctgaagttatgaagagaacagtcactataagcaatgcaagggatgctggcccgactgttgatgtcgtactttggggcgagcgggccacatctttcccagctgaacaggtgcacagggacagtgactcctcgccacagatcattatatttgttggcactctcgtgaggagttacgctgataatgtgtctttatcgggtggatcatcatgcaagtggttcataaatgcaccggtcccagaagtaaacgctctcagagctagtactgaagcaaaccaccgcccggtcatttgggatcagggaaaagtgggtgctgaacgtacaatagtcgcagtccctgaacacaagaaactcaaggatattaagtacctccatccttttgaaaataagaagaaggaatggcttgtcatagtaaaggtgctcaagattgatagctcgtggtggtacaacgcatgcaaaaaatgccttcggacaaccaaaccacacggtgacacatacaggtgcaccaataattcctgtgacaacatcggatcgcctaccccaaggtacaagatacgcctcaccgctgaagacgacactgacaccgccgagtttatcttctttggccggatggcacagcgcctcattaaaaaaatgtggacaccctcatatcaactaatccacctgaaatggatggtggcagcacacttccagctacaccgccctcacagccatcatccaccatactatctcaagcatttttggcgacctgctaactttgcagcaggacaaggatcaggtgtcacacaaaacaagggggctgccttcatctgcgagtcgtcactaacaccggagagtcgcaaagtttcgtatagcgccaagggagacaacctgctgctaggaacagaagttatccctgctccgcctaacgtgcaagcgcattcaggagcccacaacacccctggtgccaacactctccgcccgctgtctctaaaactagcaaattcgcaggctaacgcttacactgtgctagatgaatctacaaacaagactcacaaaagtgttaccggaaaaaggtctcgcacatccccttccaagaaggctgccaggaaactttttagagatgaagacataacagatgatgatgctgctggttccacagacgctgatgctgagtaa

SEQ ID NO: 41500 - DNA, 3272 bp, Zea mays
  Peptide Sequence Number=SeqID_83279
ccacgacccgacgctgttctccacgcgcagaggttctcgatccgacggcggggctctcaaggatgcccgggccgctcgccgagccgttgcagttggcggacctgggggcctccgcctggatctgcgttggtacggctcgggcggggccagcgcgtccgtggcggcccgccgtcgcgaccggcgcgtccgtgcctgccggcgcttcgccgtttatcccggtgacttcatctcctcagttctcgtctgtatagctcggcatccgacatacactgttgtcgtccggtgcccgtgcccataccggcatgaacgggtcaaaagcgtgtctgctgttgcgcagcgcaggcttgtgtacaacctttgttgcagaggagacccagaggtggcccgtttattgcttaacatgctagatgagcataacaagctggtcgcggcatttcgctttgctaaagaacgtttagacgaagaagggaaccaaaaggtgacgttgcgattgttaggctgtaacacacgacatgacgcacagtacaacttaccagccaatggtgagcttgctgctgtaatagtgggcgattgctcatcttcacagtacaagtacgatgtcctcgtgcaggctagagagggtggcctcaaacatgtttcgtgcttgcacccgtcctacatggccttgcagtacccgcttcttttcccttacggtgatcgtggataccaccttggaataaaatattctgacgtgggaggaggcgatgcctcatgccgcaagtatgttacaatgcttgaatttgttaggcatcgttcccattacaggctcaacgaaccgaacccattagcggttgatgcatattacggcaggctgagcaaccagctagcggttgatgcatattctacgatcgaagcgtctcgattgcaattcatagcggatcaccaaaaggaattgcgttgtgaatccgttcaggggataaccgacgccattggcaggggtctcaccagtgcagattcagttggtggaagggtaattgtgcctgcgtcttttacgggcggtcgaaggtaccatgtaatgaactaccaggacgcgatggccatctgtagagtatacggcccaccagatctctttgtcacgttcacatgcaaccctaaatggaaggagatagtcgatgcgctgcgcttcgagcctggtcagcagccatgcgatcgttctgatatcgttgtaagggtcttccatatgaaggtcgatgaattcatagcagacattagagaaaataaagtttttggtcctatacgtgctggtcctcaaatagccccaccaaatgagatccgcgaatacattgatgccagatacctatcaacatgtgaggctctatggcgaatctttgagttcgacattcactttagagtaccttctgtggaacgcctggcggtacacttacctgcaaaaaacattgtacgatatgagccaggggcagacctacaaacgttgcttttaagccgtgcagcgaagaagacaatgttaactgaatggtttgaaacaaactcgaaatacagtgatgcgcgtcacctgccttattgtgatttcccaaaagagtggtcgtgggactcttctgttagatgttggcgtagaaggaggtcgtcgtctaccaagattggacgcatgtactacgtgcacccaacagctggggagctatactatctacgcgtgctcttgatgtttgtttctggcgcaacgagcttcgttgatataaggaccttccaaaatactgtgtacgaaacgtttagagaggcgtgcgaagcccgtggtttgctcgaaggtgacaacgagtggaaccttctatttgatgaggcaatagtctctgcgtcggcgtctcagcttcatcagctgttcgttactattgtcgttcattgtcctgtttgcaatattcgtgctttgttcgataaatattggatctactttaccgatgacatacatcgtggacttaaagaagcccttggcaacccacactacacagctccacatgaacaactcctcatgttgctttcgaggaaactagcagacacgtttgctaacagtggtgccaacatagctgattatgagctgccgatcttaccggcccgtggtgatgaagtgtttggcaaccgactgatagacgacgaactaagccctggaccattactattgtgtgaccatgctgccactgctgctgtctcacagctaaatgctgaccaacgattcatttttgaaatgcttattgaatctgcgctctcctgctcgccaggcctattttttgtatgtggacatggtgggacgggtaagactttcttgtggaacgctatactcacgcatttgaggtcccgacaaaaaatagtgcttgttgtggcgtcctctggtgtggcttcgctgctattaccaaaaggacgtactgctcattcacgtttcaaaataccctttgatctagatgagagtagtgtttgtggtgtcaagagaggtaccatgctatctgaacttatacaacggacttctcttgtcatatgggatgaggcgccgatgacccataggcattgctttgaggctctagataggactatgcgtgatattctatcggaacataaagcagaaaatgcgaacataccatttggtggcaaacctattgtccttggaggagactttcgtcaaattttacccgttgtgcgcaaaggctcacgagctgccatagtgaacgcatcaattacaagctcaccactgtggcaacatgcaactgttttgaaactacgaagaaatatgaggctctccaacccttctttacatgggaaggaacctgcaaacatggaacaatttagcaaatgggtcttagatatcggcgatggtgctctgccggccgtgacaagaggagacgagtccgaacctacatgggttacgattcctgaagatttgttgatacacaccgatggtgatgcagttgcgtccctcatatccgagatgggggacatactcattcctagccttatggttggagactgctctcacagcttgtgtgtgcgtgtctctagactttgggagttccttcatcctcaggatgacagtaggctcctgcatactgatcttgttttgcttgatgaagagggaaacagcatacatgcccagatctatcctctgttatgccaacagtttagtgctctgcttgatgagggagggatcccccctgcttttccagtttgcacttataacctcactcccatagaacagctccagccgcgcgtggactacaaggaatatttcactg

SEQ ID NO: 41501 - DNA, 915 bp, Zea mays
  Peptide Sequence Number=SeqID_83280
atggcggaggttgacttcaccagctgccgccgacggtcatggaaccttggccggtcgtcggtcggcagtcgcccctgcccactggagtactggctgtctggcttgcactctcgccgaccagggcccgagcaatatcaagacattaaatggtgcctaattggaggaattaaattgcatggactcgtggctggcaaaggtggagaattaacccatgatgaaactaccataatagcaggagctcttgaactgactgaaaagaaagctaaagatgctatgacacccttgtgtcaaacatttgcaattgatataaatgcaaaacttgacaggaatctaatgcaagaggtacttgagaaagggcatagcagagttcctgtgtattatgaaaagaaaacgaatattattggattgatattggtgaagaatttattatcagttagtgctgatgatgaggttcctataaaaagtgtaactatccgcaaaattcctcgtgttctagaagaaatgcccctctatgacatcctaaacgaatttcagaaaggtcacagccacatggctgtagtcataaggaaaaacaatccaagttaccaaccagctgaacaagctgctaatgatggtggaacttttgaggtgtccattgctattgatgataagaacaacgaaaaggtcgtgaaaaaccttccgccaccactgcaaagatggaagagctaccctaacactcagaacacatcaaatagaggaaataggcctaaaaaatggtccaaagatcaagcagacgttctgcaggtccataaagagcccttgcccacactgagcgaagatgaagaggctgttggtatcataaccatggaggatgtcatagaggagctcctgcaggaggagatatacgacgagacagacgtacatgaggaacaatga

SEQ ID NO: 41502 - DNA, 1044 bp, Zea mays
  Peptide Sequence Number=SeqID_83281
atggcggaggttgacttcaccagctgccgccgacggtcatggaaccttggccggtcgtcggtcggcagtcgcccctgcccactggagtactggctgtctggcttgcactctcgccgaccagggcccgagcaatatcaagacattaaatggtgcctaattggaggaattaaattgcatggactcgtggctggcaaaggtggagaattaacccatgatgaaactaccataatagcaggagctcttgaactgactgaaaagaaagctaaagatgctatgacacccttgtgtcaaacatttgcaattgatataaatgcaaaacttgacaggaatctaatgcaagaggtacttgagaaagggcatagcagagttcctgtgtattatgaaaagaaaacgaatattattggattgatattggtgaagaatttattatcagttagtgctgatgatgaggttcctataaaaagtgtaactatccgcaaaattcctcgtgttctagaagaaatgcccctctatgacatcctaaacgaatttcagaaaggtcacagcccacatggctgtagtcataaggaaaaacaattcaaagttaccaaccagctgaacaagctgctaatgatggtggaaccttttgaggtgtccattgctattgatgataagaacaacgaaaaggtcgtgaaaaaccttccgccaccactgcaaagatggaagagctaccctaacactcagaacacatcaaatagaggaaataggcctaaaaaatggtccaaagatcaagcagacgttctgcaggtccataaagagcccttgcccacactgagcgaagatgaagaggctgttggtatcataaccatggaggatgtcatagaggagctcctgcagaaaattatggtgactaatttttatttgttgggaactatgaagatattacgaaattcagtaaagaggagatatacgacgagacagacgtacatgaggaacaatgacgctggccttgcgccctccctccagctgttagaaagtgcgcttttatgcaaaacttatgtatag

SEQ ID NO: 41503 - DNA, 216 bp, Zea mays
  Peptide Sequence Number=SeqID_83282
atgctgaaggaccccaagaagagattatggcctgtcgtccaccaccactgcctgttatttgtgggcttcaccgagggctggaaacatttggtgacagcaaacgaccttcggactggggacgtctgcgagattgttaaggggccagacgatggtaaagaagaaggtgtcaaggcggatctccgggagttccaggacttcgacgagttcgaggattag

SEQ ID NO: 41504 - DNA, 243 bp, Zea mays
  Peptide Sequence Number=SeqID_83283
atgctgaaggaccccaagaagagattatggcctgtcgtccaccaccactgcctgttatttgtgggcttcaccgagggctggaaacatttggtgacagcaaacgaccttcggactggggacgtctgcgagattgttaaggggccagacgatggttgcctttggtgcaacctatgctcaggtaaagaagaaggtgtcaaggcggatctccgggagttccaggacttcgacgagttcgaggattag

SEQ ID NO: 41505 - DNA, 595 bp, Zea mays
  Peptide Sequence Number=SeqID_83284
tcagagatggccggagtcggtcggtccacgtgcgcaggcggggatgctcgtcggcggcgaggagtccggcctgctcacggcgagatggatcaattggacgggtcagagaggttcacggaatgccagagaagatatgggtgcaaggaattggatggagactcactggttagctctgtccacgcgcggcggcgaaagaccgaagtccggtgaggtcgatctcgggcttccggtgaagtccggcatggtccgagggcttggaaagcttcacgggccacttgcggagctagccgaagcactggctcgactcgggggtggctggagtgggctggccacggtggccgaagctctggcggcaatggcgggcggaattgagctcgccggagctaaggagagggggctggccggtgaagactcctcgccgccgacgagcatctccgcctgcgcacgtggaccggccgactccgaccatccccgacggcgacccacacatcgctgtgatccccgagacctcccctacgtcctcgaccacctcaccggagcaatctcgctgccggtaagcccctccgccctttcttccgccacagttactgtttaa

SEQ ID NO: 41506 - DNA, 615 bp, Zea mays
  Peptide Sequence Number=SeqID_83285
atggagacaaacctcttgtactctaagatcaagttggcaagtagccatattagcccaaagggtcagagatggccggagtcggtcggtccacgtgcgcaggcggggatgctcgtcggcggcgaggagtccggcctgctcacggcgagatggatcaattggacgggtcagagaggttcacggaatgccagagaagatatgggtgcaaggaattggatggagactcactggttagctctgtccacgcgcggcggcgaaagaccgaagtccggtgaggtcgatctcgggcttccggtgaagtccggcatggtccgagggcttggaaagcttcacgggccacttgcggagctagccgaagcactggctcgactcgggggtggctggagtgggctggccacggtggccgaagctctggcggcaatggcgggcggaattgagctcgccggagctaaggagagggggctggccggtgaagactcctcgccgccgacgagcatctccgcctgcgcacgtggaccggccgactccgaccatccccgacggcgacccacacatcgctgtgatccccgagacctcccctacgtcctcgaccacctcaccggagcaatctcgctgccg

SEQ ID NO: 41507 - DNA, 1235 bp, Zea mays
  Peptide Sequence Number=SeqID_83286
gagggcctgacagcttgggagccggctctggagaacgggaccctgttccatggggtggtccagagcctgtgtggccgcttagcctggttccgtacccgaaagcttgcacactccaccactccgtgacgggcccaggtcccagtcgaggctacctcctgggggccaccgccaaactctttcttaggtatgctggaatggactactctgtaccagcagggtcacgttggaagctagctccaggcagcctcaccagcggtggcgaccacctctactccgagcgaccgcctctgcaccaacggctcgccagcaacagcggtcaccttcgccctggtggcttgccggcaatggcggccatcacagtgcacacgaagaggtcctcgctcccgtcctcctacaggggtgaggacaagaccatccaagaacgcggccgccacctccacgacgtacgacgtcttgtacgaccctccggacggcgtcggaacgatgcggccgatggcgcgggggacaccacggatgtggcggacctatgcatggtgcgaccgtcgcccgtgcgatggacggacagccacgccccaatcagcggcaggagacagcgttggaggcggcaccaaagccatcgaagccaaagagatggagccgcagcacggctcgcttcccaccccaagatactagggggcgtgcgggatggagccgtggctcagcctgctgcccacctccacgaggctggtaatcatccttcaccccaaatgcaggaggaagaagcggaaagagcgtcgcctccatggacatcccgcggagaaaagtcgcactgccgctcgcgccaataccacgcctcctcgaggtcgtcgcagaaggctgagaagataaattttcaaaaccaatgcagcgacttgaggcaccccgcgcatggcccaacgaaggcattaagtgcggaggtcacgggccagtcagccgcggggacaggcgtggtagtcggcgtgaccatgggcgggccggcagtaattgcatcaacgaacgcgcaggagcagcgagccaatcgccagtcaaactttggccccacctgcaggctcgcatcctcccctaaggtgggcccgggggccactgtcgttaccctgaatcagaggtaccccttactacagtatgaagacgcggtgcccctggacctccacgagggagcaccgaacccctgtgcgcacaacccggacccccgattgtggcttgggactcccgagtaa

SEQ ID NO: 41508 - DNA, 222 bp, Zea mays
  Peptide Sequence Number=SeqID_83287
atgaaggtagttggggtcctgcctgaatggctggcacaatcgctgcctgaagagctagagggggtgcagactgaacaggaggaagctgaacaccggtatgctgaagaatatctggtactggcactgggtcctcaggggctggacgataggagccaaattggaggcatgaggcctcgagggtgccttggaactgagatggccgaatcagctgcgcaaagataa

SEQ ID NO: 41509 - DNA, 1752 bp, Zea mays
  Peptide Sequence Number=SeqID_83288
atggcggtggcggcgttcccttcctgcggcgccttcgcccctccttgcctagtgagtacaaggagagccttctcctcggtggtggccatggcttccgcagccccggtgagagctcccagcaggaagcccttcgcccctcctcgcgaggtacaccgccccgtggcgcactcgctgcccccgcagaagcgggagatcttcgagtcgctcgagtcgtgggcggcggacaacatcctggtgctcctcaagcccgtggagaggtcctggcagccgcaggactacctgccggacgccgcctccgagtccttcgacgacgaggtccgggagctgcgagagcgcgcccgggagatccccgacgactacttcgtctgcttcgtgggcgacatggtcaccgaggaggcgctgccgacgtaccagaccatgctcaacaccctggacggcggcgtccgcgacgagaccggcgccagctcgaccagctgggcggtgtggaccagggcgtgggccgccgaggagaacaggcacggcgacctcatgaacaaatacctcttcctgacggggagggtggacatgaggcagatcgagaagaccgtccagtacctcatcgcctcagggatggatcccaagacggagacgaacccgtacatgggcttcgtctacacgtcgttccaggagcgcgccaccttcatctcccacggcaacacggcgcgccacgccaggcggtacggcgacaccaagctggcgcagatctgcggcacaatcgccgccgacgagaagcgccacgagtcggcgtacgagcggatcgtcgagaagctgttcgaggtggacccggactacacggtgcgcgccttcgcggacaccatgaggaagaaggtggccatgcccgcccacctcatgtacgacggccaggacgacgggctgttcgcgcgcttcagcgctgtcgcgcagcgcatcggtgtctacacggccagggactacgtcgacatcctcgagttcctggtccgccggtggggcgtccaggaactcacggggctgtccggggaaggccgccgcgcgcaggagttcgtgtgcgagctggggccccggttcaggaggctggaggagagggcgcacgacaacaaggccaaggatccggagttcgcgccattcagctggattcacgggcgccagctcgcggaggccagggcatcagggtctccgggagagatggaggcaccgggcggcatccgatgggtcgcgacgctctccagcagatttcactccagccttggtgccttgatctcacattcaaagtttgatgtggttgatttccttatctgtgagatcgaggacacggtattggatggtcttcgtgctcgccgacagctgccatatgcgcactatctctgctacatcttcgcgcagctgatccggccacctcagttccagggcaccctcgaggcctcacgcctccaatttggatcctatcgtccagcccctgaggacccagtgccagtaccagatccagtgccagacactcaggctgaggatgcggcattccatcagttcgagactcagggcacagtcgttcctgatgatgatgatgattttgggatcccgccaccacctcatgtgcctcctcgctcacatgatcatgaggccgagagttccagtgttgcccctcctgctgttgaccctgctctggctgcgatccttcagtctctttcgcagcagcagactcttatagcatccgagcaggctcgacaggcagccgagtag

SEQ ID NO: 41510 - DNA, 2637 bp, Zea mays
  Peptide Sequence Number=SeqID_83289
atggaagtcgtggagctggtcccctgtgcccgtaataagttgggcaactggtgggattactggttctatgtttcagaggccaaagtcgaagaccacccagggctccccgcaaccattatgtgctctcattattatgtggcgtacccgccatttgaagtagcggaggatgatgagaatgaatgggcccttcggatcgctgctcgtacgagtagtgggcgcgatctagttgaggaatttatagggtatggggtgtggcccttggcgcatggatgggcattgggcgaagtatgccctcgcgagatgccctccctgggtgggcggaaagtgcgaagtccgctttttgctttggatgtgcgagggcgggatcctgtcgcggtcgtgcgagaagcggaggatggggcgacggaggccctgcggagctgggatatacgcggatccaacgaccgcctgaatagggtcttcgagttgaatcgtttaccgtatggcggttatcccagggaagacgttgtcgaccgccgcgggagaaaaccagcgattgtgactgaagaagaccctgcgcaggaggccgccccagccactaagaaaaggaagctaggtactacggtgggggaactgggggtccccgatagttttgctatggagttgattgggacatgcgcggcccccgggggaaggatgtcttcgcccgagctccgggagtcttcggcgcggatgctggaggttaccgggggtcgatggcccaagaacgttcttatcccccgcgcggctggcgaagacttctttacgtctcacatggctcgtgacttgagagtgtttccttacggacggaatattgctgctgttgtgtcggcagtgatgaacaatgaccgtcaagatgctgcgcagaagcgccgggcggtcgtcaggatggtcgatcccgtgcatgaggcaaagagggcgtggggaagcgcgaaggctgcagcctccggcagtggatggctggtgccggctgcgaaaacggctgcgcccgagggtagcaaagcatcgacgggcgagaaggctgtagccgtgggcggaaccaagcctccctcgggtggacctttgcccgcgaagctgcccccgccggggaagcgtgttgctgacatcggcatgaatatcagtgttgatgattatctggttgggtcgggcgagggacaattggttgttgtcccaccttcggtggcagccacctcgccatcggtggtggtaaaggcgaagggggccatgcaggacccgtgggccgccttttgcgcgagcggcgagattctaacggccgctgccgctagggacgtggcgggcaccatgtcccagcggctgagggaagtgtctcagcagttgtcgcagcagctgaggcagcagctgaagcaagcggccgacttcgccgaccgtgttgtgtcgggcgtcctgactgcggaagtcgccgccgaagtcgagaatcttcgggcgcagcacgcggatgctgtccgggataagtcagctgcggagagcaagaatcgcaggctggcggagaaggtggccaccctggaggccgagaagactgacctccgacgccggatggcggaggagaggagggaggctaaccaggccgtcactgaagcgcaggctgcgcaagcggaggctatggtggcgctggcgaagggtagcctcgccagccaacgcgccgaggaatgggaggcgaggttcaacgccctgcgcagtcgcgtggacaaggccgagacctcggtgcgctcagaagtcgtgcggacgcacgcgcagctcgtggaggcataccgcaatctaggtgcgcggactgtagatttcgatgtgcccgaccacgaggccagcctccgcttccttgaatggttgcaggaggagctgctggtgctcccgactattgtgcagggcttcatgtcctacgcctccctcgtcacgtgcgagggagccatgaatgcgttgtcccgcgaggggtgcaaacactatgaggtcttcgaccagtcagatgaaaactttgagcacgaaatttttaaggtcgaagaccctgtggtaaaggattccgtgggggcactcttcgattggatgtggggtcctcatggtcgggaggtggttagggagcggtctgactgggcgagagagcagatggcgcgggccgaggatgtcgaagaccttggagatctgaacggcgcgcggcccgaggctgaggtcgactcgacactgccctcggaagccggtgaaggctcctctgccgcacctgtgtctactgtgtccagtgaaggctccttcccagcccctgcgccgatggcggaggacccctcgaaggcggtggaggaactggcagcagaggatcccatggcggtggctgggccttcgcaggttcaggattttgggcctgcgcacgcaaccgctactgatactgctatttttgtggcggcttcgaccgtggttgctggaaatgaatcggatgattctgtgtctaagttttttgagtctgatgattctgggagttcggttgtgtggacggaagagtcttcggatgaagacttggattattttgcggccttggatgtggctgcggcggaggcttctccgcgtgtgacggatgctgatgtttttcctggtccgagtgctgggcgtaggtggtga

SEQ ID NO: 41511 - DNA, 375 bp, Zea mays
  Peptide Sequence Number=SeqID_83290
atgagatatcacattcagaaaaaagaaaggattattctcggcagaaggacacgaaatgaagaccttcgagaggattattttcaaaaatccactcaaagctcgggggctacacccattgggtgcaccttcggtgcaccccatgaattaccatttcaagccaagatagtgccgacttctaaggcatgggacaagataaaagacacggctgaccctcaaccaaagcacaagagtaagatgaaagtaatttctgatgaagaccttcgagtagattattttccaaaatctactcgaagctcgggggctacacccattgggtgcacctccggtgcacccgatgaagttcagggtcctacaagacgaaatgccgacctctaa

SEQ ID NO: 41512 - DNA, 174 bp, Zea mays
  Peptide Sequence Number=SeqID_83291
atgccgacttctaaggcagaaaagataaccttcaacaaaaagacacgaaaggaagaccttcgagtggattatcctcaaaaatccactcgaagctcgggggctacacccattgggtgcaccttcggtgcaccccatgaattaccatttcaagccaagatagtgccgacttctaag

SEQ ID NO: 41513 - DNA, 951 bp, Zea mays
  Peptide Sequence Number=SeqID_83292
atggccgcagatctcgcctaccatggcaagtccatgagcaccgacgcgaccggacttgcgacggcggtcggggtcgacgacgcaacggctacaggtgcgggaggggagaggggcaagggcgagtggtggtggtcgcttgcgtcgtcggcgacggaggctccggagccggggctcgggaggccccagggcgcgccggcctgcagcgggccgagcacgggcgacggtgggggatgggacgccaccgcgaacgcatgcgaggactcgggcgccgagatggcggcggcgccctgctctaccaccttctccggcgacgtgtgggcggagctgcgcctggcctccgctagcgatgtgccgcacatccaccgcctgatacaccagatggccgagttcgagctcctcaccgacctcttcgccgccaccgaagagctgctcacctccacgctcttcccctcgccgacgccgcctcccttcacctccttcacagccctcatcctcgacctatccccctcccccgtcgcccccgacccctcgtccaccatcgcctcccgccgcctcgacctctccgcgtccccgctcgcggaccccgaggccgccgccttcgcctccccgcgcggaggcgggcgcgtcacggccgggttcgtgatctgcttccccaactactccaccttcctctccaagcccgggctctacgtggaggacatcttcgtgcgcgcgccctggcgccgccgcgggctcggccggatgatgctgtccgccgtcgccggcagggcggccgagctcgggatgggccgggtggagtggtgcgtgctcgactggaacaagaacgccatcgacttctacgagggcatgggcgctgacgtgctcccgcagtggcgcatctgccggctcgccggcaaagcgctggacaagtacaaggggtccgccggcgggaaggctgcggctgcggaatag

SEQ ID NO: 41514 - DNA, 678 bp, Zea mays
  Peptide Sequence Number=SeqID_83293
atgcaccgagccatcgcagtcgcacagtgcgccacgatctacagcgcacacgccaagatcaacggccagaaggtcgtcttccccgcccagacgacattgcagcggcgcggcttcgccgacgaccgaccacaggcgcttgcaggcgactcgccgccctccctaatcaaacccgaggttacctattcgatcctagagagtaagcgaatgcaagggcagtgtcgttaccttgaatcggggcaccgaactacctggccacgacagcgcgcgtggacacggcggtgcttcgactccggcgataaatccactcgtctccggccgtcaatcctgcgcagtgtgcccggaaacaccaaccgcagggtgacggcgacacaaccacaaggcgcgacggtgattggttcacggcgtagttcatcgtcggtgggagtacttccgaggtcttcatcgcaaagcccgataccccgctcccagtacacggcaatgctccgcacgagaccgacccacaactccctcacgcggttggcgccacggctctgctcaaacccccgaccgcggcggcgtttcgctcaaccaccggcggcaccatatatcgatgacggaaggcgcatcgcagccgcgttttataggcgcagagagggcgaagatagcttcaacggcttccaaggatcccgtcagagttag

SEQ ID NO: 41515 - DNA, 546 bp, Zea mays
  Peptide Sequence Number=SeqID_83294
atgcaccgagccatcgcagtcgcacagtgcgccacgatctacagcgcacacgccaagatcaacggccagaaggccgtcttccccgcccagacgacattgcagcggcgcggcttcgccgacgaccgaccacaggcgcttgcaggcgactcgccgccctccctaatcaaacccgaggttacctactcgatcctagagagtaagcgaatgcaagggcagtgtcgttaccttgaatcggggcgccgaactacctggccacgacagcgcgcgtggacacggcggtgcttcgactccggcgataaatccactcgtctccggccgtcaatcctgcgcagtgtgcccggaaacaccaaccgcagggtgacggcgacacaaccacaaggcgcgacggagattggttcacggcgtagttcatcgtcggtgggagtacttccgaggtcttcatcgcaaagcccgataccccgctcccagtacacggcaatgctccgcacgagaccgacccacaactccctcacgcggttggcgccacggctctgctcaaacccctga

SEQ ID NO: 41516 - DNA, 1131 bp, Zea mays
  Peptide Sequence Number=SeqID_83295
atggtcagagtgaggttagctcatggtaagaagaacttggtaagggaagactccatccagggtgatggaattgtggacattgctccacaacacatcacactcagtcaaagatccaaatcatacatgtatcacaagaacaaacattcaggcatgcaggtcactttaggtacaggatttcaaagtgtgaaatccacatttgtctttagaaatgaaaagtttataggaagctccaatgcaggaatcccttgcaggaccgccatcgcagcaaaatcctcccgagggcctccctacactgaccactcccctactgcccttgcccctttcggtgaaaaggccatcgcgaaggggtatcgccagccctggaccacccgatcacatcccaacggctcggatttaatttcccctgatctaatcgtgcccgatcaatgccgatcctacggtcccggtcaacctatgcaccgagccatcgcagtcgcacagtgcgccacgatctacagcgcacacgccaagatcaacggccagaaggccgtcttccccgcccagacgacattgcagcggcgcggcttcgccgacgaccgaccacaggcgcttgcaggcgactcgccgccctccctaatcaaacccgaggttacctactcgatcctagagagtaagcgaatgcaagggcagtgtcgttaccttgaatcggggcgccgaactacctggccacgacagcgcgcgtggacacggcggtgcttcgactccggcgataaatccactcgtctccggccgtcaatcctgcgcagtgtgcccggaaacaccaaccgcagggtgacggcgacacaaccacaaggcgcgacggtgattggttcacggcgtagttcatcgtcggtgggagtacttccgaggtcttcatcgcaaagcccgataccctgctcccagtacacggcaatgctccgcacgagaccgacccacaactccctcacgcggttggcgccacggctctgctcaaacccccgaccgcggcggcgtttcgctcaaccaccggcggcaccatatatcgatgacggaaggcgcatcgcagccgcgttttataggcgcagagagggcgaagatagcttcaacggcttccgaggatcctgtcagagttag

SEQ ID NO: 41517 - DNA, 321 bp, Zea mays
  Peptide Sequence Number=SeqID_83296
atggtcagagtgaggttagctgatggtaagaagaacttggtaagggaagactccatccagggtgatggaattgtggacattactccacaactcatcacactcaatcaaagatccaaatcatacatgtatcacaagaacaaacattcaggcatgcaggtcactttaggtacaggatttcaaagtgtgaaatccacatttgtctttagaaatgaaaaggtgggagttcatgtgaagtgtaaggcttaccaaaaaggatggttagagctgagcattgcttttaaagttggtcaaattttattagcagttactaagtataagtaa

SEQ ID NO: 41518 - DNA, 345 bp, Zea mays
  Peptide Sequence Number=SeqID_83297
atggaggagctcggatctaggtcgtacaaggcgcacaagaacaacatcaagaaacccacgcgtggctgccagacctccaccaaggggtcgtacaaggcgcaaaagaacgacatcaagaagccaagcaccaccgccagacctccaccaaggggttgctggaaacaggagaaatcactttggaaaagagattgctttcttcagccaaagtctgctcagtctgggtgcaccggactgtccggtggtgcaccggacagtgtctggtgcaccaggctggctctggcgaacttgctggtctcaggacttcgacggcggtgtatgactataaatcaccggactgtccggtga

SEQ ID NO: 41519 - DNA, 588 bp, Zea mays
  Peptide Sequence Number=SeqID_83298
atggcgcggggcgtcatgttgcacgcgcccctcgcgcccgagatctccaaccttgtgaagaaggcactcaagtcagctctaactcacttgaaagcagatcatgaaggagattttcttagccgttatggccagaggattcctcatgaggccttcggatttgatacttcatggcccataacagatgagggattcacgatggctaagtcaaaggaccacatggcacataaccagtcgtacaaggcgcacaagaacaacatcaagaaacccatgcgcggctgccagacctccaccaaggggtcgtacaaggcgcaaaagaacgacatcaagaagccaagcgccaccgccagacctccaccaaggggttcaagagcatcactgatgcgccttggctcatgtgttgtaggttctgtgcatgaggagcactggttcagccttatctatttcttccgcttctgtcaggctcttttgcatgcgtcggttgctttggacaggaaacttgtggtagactgggttccttcctgtgatcttgaagattctgcagcagaagagaatcttgatgcctacgaaaaagcatgggaattgttaaag

SEQ ID NO: 41520 - DNA, 261 bp, Zea mays
  Peptide Sequence Number=SeqID_83299
atggtgagagaacgaagaacacaaacaaacacaatgagcaagaacacaagagacacaagatttatcccgaggttcggtcacaccaccaaggtgccctacttccttgttgaggcgcctacaaagagctgggtctctttcaaccctaatcctacctttgccgaccacaaaggtctcaaaaccggttttcaaaaagctgcgcacagttttttggctgacacaacagactggcagaaaaaagtgaacagtgcaaaaaccggttga

SEQ ID NO: 41521 - DNA, 183 bp, Zea mays
  Peptide Sequence Number=SeqID_83300
atggatgctcaatatgatatgactcaagaatggcttgatagggtgaagatagcaaggaaagggcttcgaggaactaagcgaaggttcaaccggttttacaacaggttcaaccggtttttgcactgttcaccttttttctgccagtctgctgtgtcagccaaaaagctgtgcgcaactttttga

SEQ ID NO: 41522 - DNA, 853 bp, Zea mays
  Peptide Sequence Number=SeqID_83301
atggctggttcaaaggatagctctgaagtttccacaagcaatatcatcaatccgacatgggaaaccttaccggctgaagaacagctcctgttcgaggagcgccaggagcagctgatccaggaagcaaaggcgaaattcctggccgacttcaaggtggacaggaacaacaaagtcgttcggcaacgggcgacagatctggcttcactccgacctactacgaatacccccaatgtgccaaaaggttcaacacaaaccaatataaagaacaagttagggttcaaaagaaggagcaaaaaggaaactgaagtgttccctggtctggcgcaccggactgtctggcgcagctccgctataattcaccggactgtccgatgtaccaccgaactgtccgatgtaccaccggactattcggtgcaccagcagagcaacggctatctgcgcacaacggtcgactctgacggaggactccaactcaaacttgccaccttcgggaatttccagaggcactccgctataattcaccggactgtccggtgtacaccggacagtgtccggtgctccaaggaagagtcgcctcaggaactcgccagcctcgggaaaacgccgcggctgctccgctataattcaccggactgtccggtgtacaccggactgtccggtgaaccagcagagcaacgactacttcgcgccaacggtcacctgcaggcgcattcaatgcgcgccagaagcgcgcgggagtcttgcacgcccatactggcgcaccggacattgaacagtacatgtccgatgtgcaccggacatccaggcgggcccagaagacagaagctccaacggtcggaatccaacggcattg

SEQ ID NO: 41523 - DNA, 975 bp, Zea mays
  Peptide Sequence Number=SeqID_83302
atggctggttcaaaggatagctctgaagtttccacaagcaatatcatcaatccgacatgggaaaccttaccggctgaagaacagctcctgttcgaggagcgccaggagcagctgatccaggaagcaaaggcgaaattcctggccgacttcaaggtggacaggaacaacaaagtcgttcggcaacgggcgacagatctggcttcactccgacctactacgaatacccccaatgtgccaaaaggttcaacacaaaccaatataaagaacaagttagggttcaaaagaaggagcaaaaaggaaactgaagtgttccctggtctggcgcaccggactgtctggcgcagctccgctataattcaccggactgtccgatgtaccaccgaactgtccgatgtaccaccggactattcggtgcaccagcagagcaacggctatctgcgcacaacggtcgactctgacggaggactccaactcaaacttgccaccttcgggaatttccagaggcactccgctataattcaccggactgtccggtgtacaccggacagtgtccggtgctccaaggaagagtcgcctcaggaactcgccagcctcgggaaaacgccgcggctgctccgctataattcaccggactgtccggtgtacaccggactgtccggtgaaccagcagagcaacgactacttcgcgccaacggtcacctgcaggcgcattcaatgcgcgccagaagcgcgcgggagtcttgcacgcccatactggcgcaccggacattgaacagtacatgtccgatgtgcaccggacatccaggcgggcccagaagacagaagctccaacggtcggaatccaacggcattggtgacgtggctggcgcaccggacatgtccggcgcagcggactgtccgatgtaccaccggactgtcccggtgcaccagcggagcaacgactatctgcgcacaacggtcgactctgacgggtga

SEQ ID NO: 41524 - DNA, 705 bp, Zea mays
  Peptide Sequence Number=SeqID_83303
atggcttctgctgctaatttcgcgacgtcatcctggcaaccggcgtccccatctccatggactgcgccgtatgccaccttcgtcatgccatcctggcaaccgccgtccccatctccatgggcagcatcgtctgccaattttgtcaccacatcctggacgccggcgtgcccatctctagggacaacgccaaatttcgtcacatcatcttcgttgacggcgtctccgtccccatgggcgacgccactcggggcagccacggctcagcaatcaccaactccatcgatgggtgacttgtcgatcaacataagggctgatctcgcaaagatgcaagccacgctccagaaggttgagcaagggctgctgcaaatcaaggtagcagtgcaacatgagcagcaccaactggcgttgtccgcatggctccagacgtcggcggttgtgggcatacaagctgctgctcgtggcttccttgcacgacggagagtgcgggacatgcgccggcagatgctcgaggcagccttggtgacggccgccacgagggcgcctccgctggttattgttgcgacctactccaggtgcccgtccatgtgctctcctttcatccagatggcgtccatgggatccaggtggctgcacacgtgcaagtccaatgcgcggaggctcgaggacgagctgcttgtccaggagaggtgtagtgtcagggcctaa

SEQ ID NO: 41525 - DNA, 390 bp, Zea mays
  Peptide Sequence Number=SeqID_83304
atggcggacttgtggaccaacataagggctgaactcgcaaaaatgcaagccatgctccagaagacgtcggcggctataggcatacaagctgctgctcgtggcttccttgcacgacagagagtgcgggagatgcgtcggcagatgctcgaggcagccttggtgacggtggacctcggcacacgagggcgcaacctcgccctgtcggacgaccatcagcagcggcaccgggccgctatctccaagtgcgagcatggtacgtgtcacgcgggcgacgaaattcaactctacggcagcgacagtaaggaaggcactcccctcgtcatcggcaagggcgcactacttagcgccaccacatttcgctaccggccgcgacgagggcgcctccactag

SEQ ID NO: 41526 - DNA, 1008 bp, Zea mays
  Peptide Sequence Number=SeqID_83305
atggtaggggcctgcctccctgttgagcactggcacgtggttgcgctgtcaggtggatccaaacactcgagtagcaggatgggggtatttataggcctgttcgagggtaggtggtcaaagtacgactctacccctggctaccaactatattcgagggatatctcgtataacagaggggaagcttctcgtataagggatgagtacagtgcaccgcgcagcacgggcgcactgtttcggcaacggactggacaggcggcgtgtcctctccgcaataaatgtgagggccgcgcggcccagagcccttacgtcatactccgcccgctggcctacgtcacggataataagccatgtgacagtattagaccctcgaccgagtggggagcggaggtgctccggatagagcccggacacacgtcaataccggacccatgcctaggtcacgacacttcctttcctgggaccttgttatgggtggtccggagctcacttggtggggtccggaccctatccaacggcttcgggctgctttacttcgggggtccgggttgtgcgcacaggggtcctgtgtcttctgggcccgatggcgttgtctccgagaacgccacctcaaccgctcacgagatactcctggggctgttctccgcgcggctaagggtagtcgcagaggcatcgtgtcttcataccgtagtaaggggtacccctaatccaggaggcgactccgctataattcaccggactgtctggtgtacaccggacagtgtccggtgcgccaaaggtggtcggcctcaggaactcgccagcttcgggaaactccaacggctagtccgctataattcaccggactgtccggtgtgcaccggactgtccggtgcgcaccggactgtccggtgcgactccggagcaacggtcttctccgcgccaacggctctctgccgcgcatttaatgcgcgctctgcgcgcgcagatggcaggcgcgcccactccggcacaccggacaaggaacagtag

SEQ ID NO: 41527 - DNA, 348 bp, Zea mays
  Peptide Sequence Number=SeqID_83306
atgggcgcgcaggagcagcgagccgatcgccagtcaaactctggccccacctgtaggctcacatcctcccatgaggcgggctcgggggccactgtcggcggcgccaaggtcaccctgcagacggcgcacctgtccaatccattatcgaaacagtgcgtccgtgctacgcggtgcactgtactcatcccttatacgagaagcttccccttgcacgccgagatctcgggtgtcagggcgcacgaagattacacgagcatggcaagcagaagctccatccttccatttgtccctgagcccatgtgtcgtggctcatgtaacacccctggtgttactgttactaaaacttga

SEQ ID NO: 41528 - DNA, 906 bp, Zea mays
  Peptide Sequence Number=SeqID_83307
atgaacgacaacaaccggcatggagacccgatgcgactgaggaaggggttcgacgacaccgccacaggaagagctagagacagcgcgaccctggatggtcagagggagctgggtgcggcgctggagagagagatggaggtagatagaagcaagggggcgaggagggagatgggcgccgagctggagggcgagcagggaggaacgtgtggctgggggagaagtagaggaagcgccgcgagggagaagaaagtcctgggcggcggcgcggctggccgcgcgccctcccagccatggaactcgcccggtcgcggtctcgccttggtctctactgcagctcgccgtcgggccgacctcaagctctaccacgccaccgtcctcgtctcccttttccatggccgccacgcctttgcttccgtgttcctctgtggcctgcgcttcccccagcccccagcgccagctccagctcggccctgccctctaccggcgctccttccctgctcgctgtcttcgtactcgctccggtcacagccgccgtcgaatcatcagaccccatcccccatggcgctcgccctactctctagtgttttcctgctcgtccgtctgcaggttccatggagatcgacgcttctctctggtctccaactcgctagctgtcaacctggccttaccgccgctgtagctccggggaccgcgactcgacgcttctctgcagtcgcgtccaccgctcaccactcgtcgctgtccttctctggtgctcgccagcacgcaagccgccaccagctctctgctcgccaccgtacgaagtcggtgcaggaagatgtacgctgtacattccctcgaacggtcgccgggaagaagaacagcagcacgcgtcaactcgggaaggcgacgaacagcaagctgtga

SEQ ID NO: 41529 - DNA, 324 bp, Zea mays
  Peptide Sequence Number=SeqID_83308
atggcgtgtacgactgatcaatgtgatcttcctcatgggtatgcccttgagccgtacgaagtcggtgcaggaagatgtacgcagtgcagtccctcgaacggtcgccgggaagaagaacagcagcacgcgtcaacttgggaaggcgacgaacagcaagctgtggacgatcacgcgagcagtcgcgaagacgctccccaaaaatctgatcgcccgcacacccgtgcaagtgtatctctgcggtcggtgatttcggaggcctgctctcccactctctctgtgctcgcagaagatgggacgggaatgtgttgtttgcaattcgcctga

SEQ ID NO: 41530 - DNA, 384 bp, Zea mays
  Peptide Sequence Number=SeqID_83309
atggaggaggggaggactcttccagttatgcgaatatctcacgcgaattgcaaacaacacattcccgtcccatctctgcgagcacagagagagtgggagagcaggcctccgaaatcaccgaccgcagagatacacttgcacggtgctttccagatacttccccctcctattgcaagccaagtcacacatactagatgcacaaaagttggcccactcatttatgatgcacctattgaaaagatcaagatacactactggacacagctgctttgccgagtgctagtgcttcaggcactcgacaaagtctttgccaagtgtgactctaggcaaagaggtctcggtgaattgtacatcggcaacggcttctttgcagactttgcctag

SEQ ID NO: 41531 - DNA, 465 bp, Zea mays
  Peptide Sequence Number=SeqID_83310
atggccgcgcccggcttgcctcgctccagccacgtctcgtccgtgcgtcacgtcgctgtgtgcccgatttgcctcgctccggccgtggtgtctgtccgtgcccagcagcatcgtcagagtagcccgagctaccccgtccatggtcatacgtcgtcgccgcgaagaggtttgcctacgttctcccttccccctccgtacgaagtcggtgcaggaagatgtacgcagtgcagtccctcgaacggtcgccgggaagaagaacagcagcacgcgtcaacttgggaaggcgacgaacagcaagctgtggacgatcacgcgagcagtcgcgaagacgctccccaaaaatctgatcgcccgcacacccgtgcaagtgtatctctgcggtcggtgatttcggaggcctgctctcccactctctctgtgctcgcagaagatgggacgggaatgtgttgtttgcaattcgcgtga

SEQ ID NO: 41532 - DNA, 858 bp, Zea mays
  Peptide Sequence Number=SeqID_83311
atggtgaaaggggtttacccggtccacgtgcgccggcgagttcttgaactccggacttttctgaaaacttcttgggggtacttccttactattaatgctggcccgaagcgcgaagaatgcgaaccgccgcacaaggagcgtgcaaccgccctgcggttatacgccctttcatctccaccgcaaccagcggtcaaggaggcgaaccgccgcacaaggagcgtgcaaccgccccctcggcttcactgcaaccggtggtccaacctctggcatgggggcctagacccacatgtcatgcaaccggcgcaccggtttctgggtgcagaaaagttgcaccgccgctcgcgccaatacctcgcctcctcgaggccgtcgcagaagactgaggtgataaattttcaaaaccaatgcagcgactcgaggcaccccgcgcatggcccaacaaagacattaagtgcggaggtcacgggccagtcagccgcggggacaagcgtggcagtcggcgtggccatgggcaggccggcagtaattgcatcaacaggcgcacaagagaagcgagccaatcgccagtcaaactttggccccacctgcaggttcgcatactcctttgaggcgggcccgggggccactgtcggtaccctgaatcaggggtaccccttactacagtatgaagacgcggtgcccctcaaggggcaccatgtggcaaggaaaaatgatacatctaggatgtatcagtcgaaccgaacctccgtgagggagcaccggacccctctacgcacaacccggacccccgattacagctcgggactcccaagtaagcatgccgagccccttggatggggtccagatccctctgagtaa

SEQ ID NO: 41533 - DNA, 243 bp, Zea mays
  Peptide Sequence Number=SeqID_83312
atgaaggagcaccggacccctgtacgcacaacccggacccctgattacggctctggactcccaagcggcactagggccatcctgcagtcggcgcacctgtccaatccattgtcaaacagtgcacccgtgctgcagggcgcactgtgctcatcatcccttatacaagaagcttcccctgcatgccaatgctacgcagatctcagacgtcagggcataagaagattgccccagcagcaagcatga

SEQ ID NO: 41534 - DNA, 462 bp, Zea mays
  Peptide Sequence Number=SeqID_83313
atgggtgtgggcaagggacggcttgacgggtggaagtgcttattgaatgctttgcgactgttcagtgaccacggttggagtatcaaacgcaagcgcgagccgactcctccgttggaggacttcggcgactcggaatactcggaggaggagttctcctccgagtccgaggggtctccggctcccttctctcccccagcgtcatctgatgattcagacgactcccaggggattgccgcggaagtctggacatacattcgggccgtcgagcgctccgggctcgagggctcggatgagtcgaagtactcctcggatgaggaggactcggacggcggcgaggatgaggatgacgacgacgacgacgacgacggcgacgacgacgacggtggcgacggcgacggtgacggcagcggcagcggcgggggtagcggcggcggcgacgggagcaagggtgagagcacctag

SEQ ID NO: 41535 - DNA, 267 bp, Zea mays
  Peptide Sequence Number=SeqID_83314
atgggtgtagcccccgaccttcaaatggattttttaaggataatccattcgaaggtcattcttttgcttgtaaaaattgtcatgaagctattcgcattatgctttggaggtatttactgcgtgctctgcacggatgtgaccgttttgaaaaatatactgataattcctgggcgtccccccccaatgggtgtgggcaagggacggcttgatgggtgggagtgcttattgaatgctttgcgactgttcagtgaccgcggttggaagtga

SEQ ID NO: 41536 - DNA, 2511 bp, Zea mays
  Peptide Sequence Number=SeqID_83315
atggataatattgatgaggtgaccgacagaagggtgatagctttgggagcaatagaaaaggacaagatcatggatgctagggtctacaataagaaggtcaaagcaaagtcatttcaagtagggggcctgcacggcgctcggacgccggggcgcgcgcatgcggtcgcgcggcaggtaataagcccctggaggacggacgtggcggccgtgcagagcccccccgagcgacgcgccgtaaaggccgggaagaggacgcccgccgccgtccgcgccatgcttcgcttgcattgccagcacctgacaaattttgatgaagggccgcccgccgccttgtccccgtgttccttggctgggagccggaggcaccggttcttcgtcgccgaccagcaggcgcgatcaacgacgttgttctgcgatcgtggcaacagattggaaccccgggcacatatagtttgtccgactgtccccgggcgcggcgagaacaagcccgaggcggggatctgcgcccctgccggcttcggtcggcggcggtttgtcccaggttcaggttcaggttcaggttcagtttcagcgcgatcatcgcggcgtattcgcatctccacaccaggaacgtcccttgggggacatcgactggagagcaggcgtactcgtgtcttgagtgattcatactgcgggcaacaaggcaaattgctgccaacaaaaataccctacgactacgactacgaggagcagcaccagcaccagcaccagccagccacaggcaccagggcccgggcctccaactccgtcaggttctcgccgcgcgccgtccgctccgtgccgcacgagtgcctccaggcgccgttccacgccgacctgccggcaccgtccaagaagcccaccgccattgccgtcccgaggcacgccgcggcgccgcgcaagtctggcggcggcggcggcaagaagcagctcaacctattccagcgcgcggcggcggccgcgctcgacgcgttcgaggaggggttcgtggccaacgtcctcgagcggccccgcgggctgcccagcacggccgacccagccgtgcagatcgccggcaacttcgcgcccgtcggggagaggctgcccgtgcatcggctccccgtctccggccgcatcccgcccttcatcagcggcgtctacgcgcgcaacggcgccaacccctgcttcgaccccgtcgccgggcaccacctcttcgacggcgacggcatggtgcacgcgctgcggatacgcgacggcgtcgccgagtcctacgcctgccgcttcaccgagaccgcgcgcctgacccaggagcgcgcggtcggccgccccgtcttccccaaggccatcggcgagctgcacggccactccgggatcgcgcgcctcgccctgttctacgcgcgcgccgcgtgcggcctcgtcgacccctcggccggcaccggcgtcgccaacgccggactcgtctacttcaacggccgcctcctcgccatgtccgaggacgacctgccgtaccacgtccgcgtcgcggacgacggcgacctcgagaccgtcggccgctacgacttcgacggccagctcggctgccccatgatcgcgcaccccaagctggacccggccaccggggagctgcacgcgctcagctacgaggtcgtcaggaggccctacctcaagtacttctacttcaggcccgacggcaccaagtccgacgacgtggagatcccgctggcccagcccaccatgatccacgacttcgccatcaccgagaacttggtcgtggtgcccgaccaccaggtggtgttcaagctgcaggagatgctgcgcggcgggtcgcccgtggtgctggacagggagaagacgtcgcgcttcggcgtcctcccgaagcgcgccgcggacgcgtcggagatggcgtgggtggacgtgccggactgcttctgcttccacctgtggaacgcgtgggaggacgaggcgacgggcgaggtggtggtgatcggctcctgcatgacccccgccgactccatcttcaacgagtcggacgtgcggctcgagagcgtgctgacggagatccggctggacgcgcgcacgggccggtcgacgcgccgcgccgtcctgccgccgtcgcggcaggtgaacctggaggtgggcatggtgaaccgcaacctcctggggcgcaggacgcggtacgcgtacctcgcggtggccgagccgtggcccaaggtctcgggcttcgccaaggtggacctggccacgggcgagctcgccaggttcgagtacggcgagggccggttcggcggcgagccctgcttcgtgcccatggaccccgccgcggcccacccgcgcggcgaggacgacgggcacgtgctcgccttcgtccacgacgagcgcgccggcacgtccgagctcctggtggtcaatgccgccgacatgcggctggaggccaccgtccggctcccgtcccgcgtgcccttcggcttccacggcaccttcatcacgggcgcggagctcgaggcccaggcctga

SEQ ID NO: 41537 - DNA, 1806 bp, Zea mays
  Peptide Sequence Number=SeqID_83316
atgcagggtctcgccccgcccacctctgtctccatacaccggcacctgccggccgggtccagggcccgggcctccaactccgtcaggttctcgccgcgcgccgtccgctccgtgccgcacgagtgcctccaggcgccgttccacgccgacctgccggcaccgtccaagaagcccaccgccattgccgtcccgaggcacgccgcggcgccgcgcaagtctggcggcggcggcggcaagaagcagctcaacctattccagcgcgcggcggcggccgcgctcgacgcgttcgaggaggggttcgtggccaacgtcctcgagcggccccgcgggctgcccagcacggccgacccagccgtgcagatcgccggcaacttcgcgcccgtcggggagaggctgcccgtgcatcggctccccgtctccggccgcatcccgcccttcatcagcggcgtctacgcgcgcaacggcgccaacccctgcttcgaccccgtcgccgggcaccacctcttcgacggcgacggcatggtgcacgcgctgcggatacgcgacggcgtcgccgagtcctacgcctgccgcttcaccgagaccgcgcgcctgacccaggagcgcgcggtcggccgccccgtcttccccaaggccatcggcgagctgcacggccactccgggatcgcgcgcctcgccctgttctacgcgcgcgccgcgtgcggcctcgtcgacccctcggccggcaccggcgtcgccaacgccggactcgtctacttcaacggccgcctcctcgccatgtccgaggacgacctgccgtaccacgtccgcgtcgcggacgacggcgacctcgagaccgtcggccgctacgacttcgacggccagctcggctgccccatgatcgcgcaccccaagctggacccggccaccggggagctgcacgcgctcagctacgaggtcgtcaggaggccctacctcaagtacttctacttcaggcccgacggcaccaagtccgacgacgtggagatcccgctggcccagcccaccatgatccacgacttcgccatcaccgagaacttggtcgtggtgcccgaccaccaggtggtgttcaagctgcaggagatgctgcgcggcgggtcgcccgtggtgctggacagggagaagacgtcgcgcttcggcgtcctcccgaagcgcgccgcggacgcgtcggagatggcgtgggtggacgtgccggactgcttctgcttccacctgtggaacgcgtgggaggacgaggcgacgggcgaggtggtggtgatcggctcctgcatgacccccgccgactccatcttcaacgagtcggacgtgcggctcgagagcgtgctgacggagatccggctggacgcgcgcacgggccggtcgacgcgccgcgccgtcctgccgccgtcgcggcaggtgaacctggaggtgggcatggtgaaccgcaacctcctggggcgcaggacgcggtacgcgtacctcgcggtggccgagccgtggcccaaggtctcgggcttcgccaaggtggacctggccacgggcgagctcgccaggttcgagtacggcgagggccggttcggcggcgagccctgcttcgtgcccatggaccccgccgcggcccacccgcgcggcgaggacgacgggcacgtgctcgccttcgtccacgacgagcgcgccggcacgtccgagctcctggtggtcaatgccgccgacatgcggctggaggccaccgtccggctcccgtcccgcgtgcccttcggcttccacggcaccttcatcacgggcgcggagctcgaggcccaggcctga

SEQ ID NO: 41538 - DNA, 936 bp, Zea mays
  Peptide Sequence Number=SeqID_83317
atggaggcccaggcccacgcgtcatgcaaccggcgcgccgagtgcttcgtgcatgcaacagcaccgccactcgcgccactaccgtgcctcctcgactgcggagccaataccgcgactcgaggcgacccagcgcacgacccagcagcgccagcctggcgcggcggtcaatgcggccaaaaatgggccggcagtaatggcggtggcaggcgggcaggagcagcggccacgtcgagaggcgggcgacgcttcgccttcgccataatgaccgagtcaaaaaagggaccgggaaagggggatgccccgaaaaggatccttcctcgtgaaggaaccaggctccgagcctccctactgatcagaggttcgaaggctggcccctcggaagggttcgacagccgcctcagatcgcgtgggccctacacccactactggtcagaggttcgaaggctggcccctcggaagggttcaacggccgcctcaggctactcgggctccgcgcccattactgatcaggggttcgaaggctggcccccgaagggacatttccgagaccagcgggaacgatcttgtaacggaatcccatcggagggaggcatcgagccctcggaccccgtcgccaggggaccgggtccgacagatcacccgcagctcaccggagacaccatgttcggcgcccatcgagggcaacatggcgctttccccctcctccttgcggaaaggcgacgcaggggcgtatgtaaaaaagtcgagtctgttcctgattgtcctctcgccctgtgcagaggctcgggggctgctctcgcaaacctggctccggccgaaccgttgacagcgtcaacataccagcccgagaacttgggacccgaccgtacacccgggctacggccagctcgcatgagggaacgaccagaccagccgaagcattacgcgaggcattaa

SEQ ID NO: 41539 - DNA, 807 bp, Zea mays
  Peptide Sequence Number=SeqID_83318
atggcgctttccccctcctccttgcggaaaggcgacgcaggggcgtatgaaacaagccgagaaaacagcgccgcctgcgctgctccgactgctgtgccacccgtcagggtgaggctgacagccgccaagaccggcctcaggcgccataggaagctccgcctcgcccaaccccagggctcggacccaacctcaacctcggacgacggactccgcctcgcccgaccccagggctcggactcagcctcgactccagaagacggtctccgcctcgcccgaccccagggcttggactcagcctcgactccggaagacggtctccgcctcgcccgaccccagggctcggactcagcctcgactccggaagacgatctccgcctcgcccgacctccggggctcggactcaacctcgaccccagacgacggtcttcgcctcgcccgacccccgggctcggactcaacctcgacctcggacaacggtctccgcctcgcccgacccccgggcccggactcagcctcgacctcggaggagcctccgcctcgcccgacctcgggctcgaaccgaccacgtcacaggggggggccatcattatcctacccctagctagctcaggctacggggaacaggaccggcgtcccatctggctcgccccggtaaaacatgtaatgatggcaccccgcgtgctccatgacgacgacggttctcagccccttacggaagcaaggagacgtcagcaaggatccgacagccccgacagctgtacttccacggggctcaagcgctcctcctacggccacgacatcacatga

SEQ ID NO: 41540 - DNA, 270 bp, Zea mays
  Peptide Sequence Number=SeqID_83319
atgacgcaacggcggcccggggcgacggtggcggacctccgcagctgcacggaggacggcggatggagggggagggggcgagtggggttctgggctcaagtggccaggggcggggcggttgcgagctccacgcgcgacgtgggcgcggagaaggcggccgcgcgcaactcgggcggcggttacgcggggatgacggggctgacagcccgggcccgcgagcagagagagaggggaaagcgggggcgggcgcgcggaaggcggctgcgctga

SEQ ID NO: 41541 - DNA, 765 bp, Zea mays
  Peptide Sequence Number=SeqID_83320
atgggtcagaggacacttgccttcaccaaactgctgatcagggacttcctctgcaacttcctcaggaaacacggactgctcgttgtctacgcggggccaggcgggcagcgcggggtgtggggaaacggccctaggccgttggatctcaggcgaacggctagggttgggctcagcctaattgaaacgggaccgcccgatctgggatgggcggcggggatcaggtggccggccttggcctctcctatggctagcagaggcggcggcgctcgtccccgcggcggagaactcgccggagacgaggggcgcggggggccctgcgggtctttggggcgacctggacggccggagaggttggggaaggcgcggggagtcttctggtgggggctaggtcggggcaggggcaccggaggggggcggtccacggcgaagcggctcggcggcggcgcaaaagggctccggcgagcaattgaacgcgacaggaggcaatacaaaggtcgggagggggcgggagaggttccttacctcaaggcggactccggggactcctcggtggcggcaatggcgcgacggcggcccgggtcgacggtggcggacctccgcggctgcacggaggacggcggcacgggggaggtgagagaggggtctgctggtgcgcaaatgagggagggagagagggcgagcggggttctgggctcaagtggccgggggcggggcggttgcgagctccacgcgcgacgtgggcgcggagaccgcgacaacgcgtag

SEQ ID NO: 41542 - DNA, 396 bp, Zea mays
  Peptide Sequence Number=SeqID_83321
atggcccgcctcggagccggcggccgtgttgacgctcctgctggctgtcggcggcggcggccgcgttcctcgcggtgccggcctcggccaagcagcatcccggggcagcgcagcagcaagtgttcgggcgccgtgggcgagtgcggcgtggacgaggaggaggagctcgggctgagcggcggcggcggcatcggcgccggcgacgcgctgcggcggacgcttgcgcagcgcaagccgaccaaccggtacatcagctacgcggcgctgcgcgcggaccaggtgccgtgcaacaagcgcggccggtcctactacaccaactgcgcggcgcagacggccgccaacccctaccgccgcggctgctccgccatcacgcgctgcgcccgcagcatgaactga

SEQ ID NO: 41543 - DNA, 333 bp, Zea mays
  Peptide Sequence Number=SeqID_83322
atggaagccaagcgctggggctgggcagagcgtcgggaactccatggcgagggagctcggtcggccagagaaacgccgggctggggcagggaggagcgcggcggccatggaggtggggagctgcgcgctatggagatgggcacacggcacgcaggggagctctggccggcgctggagctgcaaaggagctcggccggtagagaagcggcgcagggagcaggacccagggcgagcaagggaggaagaagacccgggcttgaagacgcggctgcgcgcgacgcttgcgcagggaactcgacgacagccgccatgggaagaagagaagggagctag

SEQ ID NO: 41544 - DNA, 2670 bp, Zea mays
  Peptide Sequence Number=SeqID_83323
atgccgccgcggtcaccgccgctagcagctgccgccgatgtagcctccgtagtcacccgctgccctcacgcggaaccctcttcagaactcaccgcctccacgattcccgcctaccgcgcgctcatccgcgagctcgtctctgccggccgcctcgacgacgtcgacgccgccctcgcttctgctcgctcccacctcgccccagactccctccaaccactctacgtagcctccattcaagcctacgcccgcgccggccgcctccgtgccgccgtcgacgccttcgagcgcatggacctcttcgcctgcccgcccgccgctcccgcctataacgccatcatggacgccctcgtcaacgccgcctatcacgaccaagctcacaaggtctacgtcaggatgcttgccgccggcgttgctcccgatgctcgcacccacaccgtccgcctcaagtctttctgcctcaccggccgccctcacgtcgccctgcgcctgctgcgcagcttgtcggagcgtggctgtgacgccaaaccggccgcctactgcacggttgtgcgaggcctttatgcccacggccacggttacaatgcgcgtcacctgttcgatgaaatgctcggcagggatgtcttccctgacgttgccactttcaacaatgttttgcatgctctttgccagaaaggggatgtcatggagtcgggggcactactggccaaggtcctcaagcggggcatgtcagcaaacaagttcacttgcaacatatggatccgtggcctctgtgaagacggcaggttggaagaggctgttgcgctagtggaaaggatgggtgcctacgttgcgccagatgttgtcacttacaacacattgatgcgtggcctttgcaaggactccaaggtccaggaagctgcacagtaccttggtaggatgatgaatcagggctgcataccagatgatttcacctacaacaccatcattgatggctactgcaagagcggcatgctgcaggaagctactgagcttctgaaagatgctgtctttaaaggttttgtaccagaccgggtcacatattgctcactgatcaacggactgtgtgccgagggtgacattgagagggccctagaactcttcaatgaggcacaagcaaaagatctgaagcctgaccttgtcgtctacaactctcttgtcaagggtctctgtcgccagggtctgatcttgcatgccttgcaggtcatgaatgagatggtcgaggaaggctgccatcctgacatttggacatacaatattatcatcaatggcctatgcaaaatgggaaatatttcagatgcggcagttgtgatgaatgatgccattgtgaaaggataccttccagatgtctttaccttcaacacattgattgatggctactgcaagagattgaagctggacagtgcacttcagcttgttgaaaggatgtggacgtatggcattgctcctgatgttatcacatacaactcagttttgaatggtctctgcaaagctggcaaagccaaggaagtcaatgaaacatttgaagagatgatacttaaaggatgccggccaaatgctattacttacaacatactgatagaaaatttttgcaagattaatcaactggaagaggcttctggcgtgatagtcaggatgtgtcaagatgggttggttcctgatgcagttagtttcaacacgctgattcatggattctgcaggaatggtgatcttgatggagcatacctactctttcagaagttggatgagaaagggtactctgcaacagctgacactttcaacattctgattggtgcgtattctagtaagctgaatatgcaaatggctgaaaagatttttggtgaaatgatcagcaaaggatataaacctgatttgtatacttatcgcattctagttgatgggttgtgcaaggcggcaaatgttgaccgtgcatatgcgcatcttgcagaaatgataagcaagggttttgttccatcgatggctacttttggccgcatgttaaatttactcgcaatgaatcatcgggtttctgaagctgttgctattattcacattatggtgagaatgggagttgttcctgaggttgttgataccattttgagtactgataagaaggagatagctgcaccaaagatacttgttgaggaattgatgaagaagggcatcaccggtgcccacgaattctccagaaggtaccggccgtgccctgtctactacctccagtccgagctagctcccttctcttcttcccatggcggctgtcgtcgagttccctgcgcaagcgtcgcgcgcagccgcgtcttcaagcccgggtcttcttcctcccttgctcgccctgggtcctgctccctgcgccgcttctctaccggccgagctcctttgcagctccagcgccggccagagctcccctgcgtgccgtgtgcccatctccatagcgcgcagctccccacctccatggccgccgcgctcctccctgccccagcccggcgtttctctggccgaccgagctccctcgccatggagttcccgacgctctgcccagccccagcgcttggcttccatcctagccgcgccctactcggcttctccggtgccggccgccgctccaagtcgccgttccagccgacctcattactcgttgctcctgatggctga

SEQ ID NO: 41545 - DNA, 174 bp, Zea mays
  Peptide Sequence Number=SeqID_83324
atgaaagcatttggtgcaggttttcgaatacgtccttctgaggacgacttcagtagctggggcatcgacacggggcgtcgaggcagagggcagctagggggtgtcgaggcagagggtggcgctgggcaggaaattggcccatttagaccaaagttgcttatgtcatgtaagtag

SEQ ID NO: 41546 - DNA, 273 bp, Zea mays
  Peptide Sequence Number=SeqID_83325
atgaaagcatttggtgcaggttttcgaatacgtccttctgaggacgacttcagtagctggggcatcggcacggggcgtcgaggcagagggcagctagggggtgtcgaggcagagggtggcgctgggcaggaaattggcccatttagaccaaagttgctttcttaccctggtggttggcacagtagccggagcggggcgaacagtgctgttttcctgttagaacggtcagtgaaagggcgaagtgactgcggtcacttcgaccttgccgactga

SEQ ID NO: 41547 - DNA, 239 bp, Zea mays
  Peptide Sequence Number=SeqID_83326
atgaaattcatctgcctacgcccgccggtcgccagagcctggatccctgagggagaggcggagaagcagcagaccaggggctcagcttcatcatttcccaaaatccccaagctagtagacgaagaggtgcgagtagatcgaatgcggggagttaggggtctcattggacgcttcggttcttcaaacaagaggaacatcaccatacttaagaatgtcaatggtatcctgaagccatccag

SEQ ID NO: 41548 - DNA, 4422 bp, Zea mays
  Peptide Sequence Number=SeqID_83327
atgccgatgccggagtcacatccgcacgctgttgctgctgctgcggcgggtctggctctggcgtcgacgtctagccgtcggagcctcagcttgggctcctccatctcgcagtcattccggcagatggacacggaagaccccttcggccgggcgcagtcggaccacgacgacgaggagaacctgcgctgggccgcgctcgagaagctacccacctacgaccgcatgcgccagggtatcctccgccgggcgctggacaacgatcaacagcaacaacagcggcagagcgtcgaggtcgtcgacatccacaagctggccgccggcggcgacgggggccgtgcgctcttggaccgcctcttccaggaggacagcgagcgattcctgcgccgcctcagggacagaatcgacatggttggcatcgacctccccaccgtcgaagttcgctaccaccagttgacggtggaggctgacgtcattaccgccggtcgcgccctccccacgctctggaacgccgccaccaattttctccagggtctcattggacgatttggttcttcaaacaagaagaacatcaccatacttaagaatgtcaatgagtggacagttgacgccggcccgttagtgataggggggtcaaggttcggagattttctcggctggatgacacttcttcttgggcctccatcctcggggaagagcacactcatgcgggcactcgccggcaagcttgacaaaaatctcaaggtctctggcagcattacgtattgtggccatccaatttcagagttctatcctgagaggactagcgcgtatgttggtcaatatgatctccacaatgccgagatgaccgtaagagagacactggatttctccaggcggtgcctaggcattggtgccagatatgagatgatcgccgaacttgctagaagggagcgggatgcaggcatcaagccagatcccgagattgatgctttcatgaaagctactgcagtacaaggacaggagactaatattataactgatctcactctcaaggtgcttgggctggacatttgtgctgacgttattattggcgatgagatgatcagaggaatttctggcgggcaaaagaaacgtgtgacaactggggagatgctaacggggccagcaagggctttatttatggacgaaatatccactggtctggatagctcgagcacatttgagattgtaaagtttatgaggcagttggtccatgtaatgagtgaaaccgtcatgatctctctgctccagccaccgccagagacatacaatctttttgatgacataatcctgctatcagaaggatacatagtgtaccatgggccgcgcgagaatatcctagaattctttgagtctgccggtttccggtgccctgacaggaaaggtgtcgcagactttcttcaagaggttacttccaagaaagaccaacaacaatactggtatcttgatcaggagcagtatcattatgtatctgtacccgactttgcagaacgtttcaaatcattccatgcatgccagcagatgcagaaggagttgcaaataccttttgaaaagtccaaaactcatcctgctgcgttgaccaccagaaaatatgggctttccagctgggaatcactcaaggcagtgatgtcaagagagcagctattgatgaagcgcaactctttcatctatattttcaaggtcacccagttgatcatccttgcactcatgtccatgactgtgtttctcagaataaagatgccccatgggcagattgctgatggcaccaaattctttggggctctgacttttggtttaataacaatcatgttcaatgggttcgctgagctacaattaaccataaagaagcttccagttttctacaaacatagggatttcttattcttccccgcttggaccttaggagtggcaaacataatcttaaaagttcctgtctcgttcgtggaatcagcagtatgggttgttctcacgtactatgtgatgggctttgcacctgctgcaggaaggttctttcgtcagtttatagctttctttgccacacaccaaatggcaatggctttattccggtttcttggtgctgttttgaaaacaatggttgtggccaatacttttgggatgtttgtgctgctcattattttcatctttggaggatttgtcatccgtagaaatgacatcagaccatggtggatctggggttactgggcatcacctatgatgtatagccaaaatgcaatatcggtcaacgaattccttgccagtaggtgggctattccaaacaatgacacgactatcgacgcgccaacagtaggcaaagcaattcttaaatccaaaggcttgtttactggagaatggggattttggctttccattggagccctcataggattcattattttgttcaacatgctctacctttgggcccttacatatttaagtcctagtagtggctccaatgccctggtttcagaaggtgaggatgatgtaaatgaaatggcattggaaggaagaaggaaagatgcaagaagaagcaaagatgaaatatcccaagttgtatccagtgatccaggcactaatggaggaacaaacacgctagctcaatcacgagtcactttgcctttccagcctcttgcactttgctttaaccatgtaaactattacgtcgacatgcctgcagaaatgaaggaacaaggattcacagaaagccgtttacaactactctctgatatcagtggcacttttaggccaggggttctaacagcactggttggtgtgagtggagctggaaagaccactttaatggatgtcctggcaggaaggaaaactagtggagctattgaaggagatattaccctgtcgggataccccaaaaaacaagaaacttttgcccggattagtggttattgtgaacaaactgatatccattctccaaatgttactgtatttgaatccatcacctactctgcttggttgcgtctttcctcagatattgatgatggtacaaaaaaggaagtgatggcccttgtagagcttgatgtgttgcgcgacgctctagtgggtctccctggagttagtgggttatcaactgagcaaagaaaaaggctgacaattgctgtggagctggtagcaaacccttcaatcatcttcatggatgaaccaacttctggtcttgatgctcgagctgcggcaattgtcatgcgtacagtaagaaatacggttaacactgggcgtactgtggtctgcacaatccatcagcccagcatcgacatatttgagtcttttgatgagcttctgcttttgaaacgtggaggtcaggttatttatgctggtgaacttggtcgccactctcacaaactagttgaatattttgaggcgattccaggtgttccaaagatcacagaaggatataatcctgcaacatgggtgctggaagttagttctcctctatctgaggctcgattgaacatgaattttgctgaaatttatgcaagctctgtgctttataggaaaaatcaagaggttatcaaggagttgagtattccccgatcagacaaccaggacctgtcatttcctacaaaatattcacagaatttctacgccacttacgctgctacattctttcttggggcttcaaattgcatcacggttcagcctgttgtatcgattgagcgagcagttttctaccgtgagaaggcagcggggatgtactctccgttatcctatgcatttgctcagacatgtgtggaggtcatctacaccatcttacaggggatactgtacacagtcatcatatatgcgatgatcggatatgactggaaagcggataaattcttctatttcctgtttttcatcactgcaagcttcaactacttcacattgttcggcatgatgttggtagcatgcactccctccgcattgctcgcgaacattctcatcacgtttgctctacctctgtggaacctctttgctggattcctcatcgttagaccggcaataccaatttggtggaggtggtactactgggcgaaccctgtgtcgtggaccatctatggcgttgttgcgtctcagtttggcgagaacgaaggtgagctttcagttcccggtgggacgcccgtggtggtgaagcagttcttgaaggataatctcggcatccagcatgacttactcggctatgttgtgctcgtccatttcgcctacgtcattgtgttcttcttcgtattcggttattccatcaagaggtgccgtgcgtggatcagcgtcgaggactacgtcgtcaaggtgctcaccaacggcaggtatgtgccgatgtacatgaccattggcgtcgaggactacgtccgcctggcgctgtctattaagctccaaggaaagaacgtcataggagtgtggacatcttcttattcataa

SEQ ID NO: 41549 - DNA, 1062 bp, Zea mays
  Peptide Sequence Number=SeqID_83328
atggcagaggagaagacgacaccggaaagcggagccgctgcacccggcaggatcctttgccgtaacgttgcaggccgactgcggctgacgtatggacccggccgtggtctggccccagccgccagcgaccggacgttacggcagacgaatccgttcctgtctgcacctcctcattttcacctccacccacccgactcggcggcctgcgctcgtccgcccgttcctcgccggcgccgtctcttccgcagaccggtcttgtttgttggtcacttggctagtcagctctgctcggtcggtgcacttggtgacttgcttatggcagacagaagtgatggaccgattgggaggctcccagaacatcttattatagaaatactcattcgtttaccggtctatgagtgggtgcaattagcatgtgtcaacaagcattgggcaagcatatttcaaggagaatgcgtgtggcaaactgctattgcaaggaactggccatctgctggtctccggaaacgctggcctgggccaattcctagaggttctgctaggaggagatttcaagcactgtatgtcagtgagaacttagtaccatctggtggggagattgatgagcttgttggtcacacttatctctacttaaaagaacagcttgagcgtcctgtcatgcctccttccagcatacttcatggcaccatcattgaccaattcattgcttgcggcaatacaggagaaaaggcccatgatcttgcttcaaaaatatggcttgcagtcattgacagcttggaagaaaaccagcaaactttcttactgttaaaacgtgtggcacaagaaggagaatttttccttccgtttccatactccagatcatatagggtactatggagggtgtttgacaagctgttcaccgacttccgcgactgtttcagcggggctgagtaccatgatgttctatcgactgctaagtctaggtttcagccggcgtcaaggagccctgccagggaggccgacggcagcgcacgcgtctgcgccggtcagggtgtcagcgcccgctgcagagtagaagggtga

SEQ ID NO: 41550 - DNA, 507 bp, Zea mays
  Peptide Sequence Number=SeqID_83329
atgaggcataatgaatctgttcctgggattcttgtactcacctggtgctttttttttatgagaagacagctgtcgttggctcctgtcgatgtgatcctgcggcaagaatacaacagattgcgcattgatctcagtaacctgaaagaagcagagacatgcagtgtttgtatagaatgctgtagattatcatatgcatcaatatcagacaacttaagcacaactcaaaatccaacacttcacttggatgggaagatcatcaatgcatatagtggcgtcaaggagactcgccagggaggccgacggcagcgcacgcgtctgcgccggtcagggtgtccgcgcccgctgcagagtagaaggggtatcggtggatccggccgggaaggtcacggcagcgacgaatccagccatgaagacggcgatccggccaaagggatggcggatctagccgagaaggccgcagcaacgtggatccggccggggaggccgtggcagcgacggaaccaatga

SEQ ID NO: 41551 - DNA, 189 bp, Zea mays
  Peptide Sequence Number=SeqID_83330
atgaagacaatgcgatcaacatcaaccaacaagatccaagtggcgcagcaaaagcatgtgtgggtcctaacccacaggtccaagagatcctccagaattgcatcaatcggtctcaagcatatgaagcataagtctactgaattgaaccctagagaagctttgcgtgctgcatttcatgctgaagtatag

SEQ ID NO: 41552 - DNA, 529 bp, Zea mays
  Peptide Sequence Number=SeqID_83331
atggaggaaagacgggatctacgggtcttaccagccatggcatccacatcgacgtgctgcgcaggcacggcgtcgaggcttccagccaaccagcaggggtgcacacgagggcacagcttggacgaatcgacagcgctgacgccaggggtgacctccggtggctgttgtgcgagcggggcaaagtggagggcggttctggaacagaaagatgggacagggggcttgggcacgatcgccttgcgatttggcgcggggcgcgtgggccgccaggcgtgcgagacggccggggcgcgcgcgcagagcgcacgatgcgggctggcgcggggtgctcggggaagaggaataggtggtgggctcagatacttgaaaccgattgatgcaattcttgaggatctcttggacctgtgggttaggacccacacatgcttctgttgtgccactttgatcttgttggttgatgttgatcgcattgtcttcattgaggatgccaaccggacaggtgcaagagggaagggtatagatagaaaag

SEQ ID NO: 41553 - DNA, 1437 bp, Zea mays
  Peptide Sequence Number=SeqID_83332
atggcgccgacgctgagggcaacgagcgtttggagaacgaggaggagcatgagggagaaggaggacaacgaggagggggatgagggagaaggatggggagaggtgtctccctcggagggaaaagagggtgatggagaggaaggggatgaacaagatggcgaggatggtgaatgggaggatgaggaggtgcagctcctcgccttcagcatcgccgacgagctcttcatgcgctccaagctcttccgctccctccttgctgactcgctcgacggcttcctcccgctcgccgtcgggttccgccgagcaaaccccctcccgccgccgaccatgtccgctgccttactccggaaggccgccgtccaggcgctcgagcgctggcaccatctctttggtgcgcactaccaccaactccgcctggccgttgagtacctcaaggagtccgcgcgcgtccagttctctggtctgcgggccaccgttgatgctcgtgcagctcgtgagactcgcatgcaggagatctatgctggcaaggttgagcagttgcgtgaaaaccttgcgtcaatcaaggcggagatggatagttcctgggatcccgcgacagagagcatgggcatgagctcgggagcgggcgatgatggtggggcgacgatggatggttcctgggattgcgcggccaagagcagggcaagggggagggacatcatcatgcccaacttgaagtcgtccgtgaccacaacagcgagcgcggtggagtacacggatgaagtcggcagccttgaggaggcagctaaagctaaagaagctggtgtagatgggatcattgatcaaggacgtgaggcagggggtcatgtaattggtcagatcatcgattacgtcgacgtcaaggtgaacagcaccgtccacaaggggatgacacacatgttctaccatggccgcaccagtcgcgtcaggaacaccaaatgtgccatcggcgtcgagataaacaagcagatgcttaattgtgttgattctaggtccatatatgattgggttcttgttactacattggcgtatggaaggttatatatgtacaagtgtaagtataatgatttaaagaaaccgaacacttattatgtggatagcttaggaatagtggagattcttttcaagattttggtgctgaatatttttggtgaatggatcaagttactgttgcgggagtcttcagcaggtcacttgtgcctttcagcagtgctcttgcgtctactggttataaacaataaatgctatgatggtgttaagggtgatatgtggtcatgtgaagtgattttctttgtcctcatggcggggtacctcccatttgaagattcaaacctgatgtcgctttacaagaagatcttcaaagcggatttcagttgcgctctccacaagtgcaaagaagctcttcaaaaagatacttga

SEQ ID NO: 41554 - DNA, 378 bp, Zea mays
  Peptide Sequence Number=SeqID_83333
atggcggggtacctcccatttaaagattcaaacctgatgtcgctttacaagaagatcttcaaagcggatttcagttgcccatcctgtgtccctcattgcaatgcacgggcatatacctatcttgtcactgagtttgattctttggtgccaggtgcttctaatatcaatgtcactgacagccagatcccactgactgtgccaaactctcacattggaagagatgttgttgttcacgctgctcctggtgatcttagaaaggagctattggtttttataagtgtgcaactaaagatcagtgactatatcttggttttaggccatcgaatctgtttcaagttccagcaatggagcagtgaagcacacattcatgaggattga

SEQ ID NO: 41555 - DNA, 390 bp, Zea mays
  Peptide Sequence Number=SeqID_83334
atggccgaacccaaaaaggagaggagcaaaggcaaggcgctaacaagtgtcagaacttgggatgattcttcaagtgatgatgaacctccaaggacgagcagccaccggtcctcatcacactcatcacggtcatcacacaaatgccttatggcaagaggtaccttcggacttaggtcaaaactacagtgtgaagaagcacaaagaatacgaaggatggcgcagagccgaagctatgcgcaggggagcttcggcttgataacagaaaagggaaccgacttaaaagggaaaaggctatttagaccccgatggactattatagagttattagcaaatgtaaagggcatgggtgtaattttacatgggctgcgtcccgtgcctataaatagatga

SEQ ID NO: 41556 - DNA, 366 bp, Zea mays
  Peptide Sequence Number=SeqID_83335
atgaagctgtggaaggagacttccaggagttccaagattacgacgagttctaggtgtgggttagcggcaacccccagtcggctgcctgtgaaggccgtgttatctacgtttcttttccgcactttgatttattgtaccttcggacttaggtcaaaactacagtgtgaagaagcacaaagaatacgaaggatggcgcagagccgaagctatgcgcaggggagcttcggcgtgataacagaaaagggaaccgacttaaaagggaaaaggctatttagaccccgatggactattatagagttattagcaaatgtaaagggcatgggtgtaattttacatgggctgtgtcccgtgcctataaatagatga

SEQ ID NO: 41557 - DNA, 153 bp, Zea mays
  Peptide Sequence Number=SeqID_83336
atggcgactctccggcgacgagctgggggaacctcgcttggaacttcggttgcagtgggtcacgcgtcctcggttcgaagtggtgttggaatagaacaagatattgtgattttctttgactatctgaggatgagatggttaaacgtcttctag

SEQ ID NO: 41558 - DNA, 1377 bp, Zea mays
  Peptide Sequence Number=SeqID_83337
atgaaatttagaggacgttgctggagacaacaacaccctgtaaagggtcctgtccggcctccgagagtgcgctatccacgctactcctccaccagccgccgcgaggaaacttccgcctcctcctaccccgcgctggcgactgcatctcccggggctgagccctcgagccggcgtgcttcgccgccggcatcgaggcaggtgagcgagaagcgggcgtgcggtggcgggtctggcggcgtagagctcgcaccacttcgatccgaggacgcgcgacccaccgcaaccgaagttccaagcgaggttcccccagctcgtcgccggagagtcgccatcggcaaacggcttcgtcgtccgccgacttcgtccaaggctgccggcaaaaggaagagaagctcgtcgccgccgtcgtcttcctcttcgattcggtccaccgagccagatccgcgaagaccgagagttgttcaaaagcgtagttgtgacatcattgatgtcgtcaaatcagccttccagcctttcaactcacctttggtggacgaattgaaccgagcactagttgagattgacgacctcgccaaggatcttgaagacgtagcagtgcaaactcagtgggaggtgatgtctcaatatggaagcttccttagccagaatgacgagcagcctatgggaactcaacattctgaatttccagttgatgggcaagccgagggctcaagaacaccagctgttccaaaaaagccaactcaaagaacaaagctagcaaacttcactgctgatgaggacactaggacatcactggcagcctctaggtttgcagctattgagaagaagcctttccactttttacattgttgggccatacttaaggaccaaccaaaatggatggacaaccacatgggccaacaaaatcagcatggcaacgctaatcccacccattctaacactgtcgatgtggatgcaaaagaatctgtaccatctagcttcacatcgaagaggccactgggtcgagattcttctaaggaaaaggcaaagagaactaaatctgtggacacatcttcatcagattctgagttcatgacacgcatgggagatctttctttggagtgcctgtcagtgtacaaaacagttgttacaactgaggaaaagaagttggattcaatgaacaaaaatgagaggcagaaattgctcctagaaaagaagaagttgaacctagagaaattaaggcttgaaaggcagaaactaaaggaggacaaggaagaggagatcatgatcttaagcatggatttgagcaaatgtaaccctcttctccgcaagtactatgaagccaagcaacaagagatattggctagggttactgggtcaacatcatctggcctgtga

SEQ ID NO: 41559 - DNA, 717 bp, Zea mays
  Peptide Sequence Number=SeqID_83338
atggacaggcaacaaggacgcgccccgaggactcatcacctgccgctggcggcggggagggcggcagggaaacctcgtcgtcgtaccagcggtacgacatacagcaggtggccaggtttctttgtgacaatttggattgctgcggtgatgttcaagtccaacgatatcctgtgtaagcagactgctctgaagagggagagaaaaattccagttcttgtcgggattacaatattatttgttgttcatgtatctggattttactggtgttacaagaacgaggatcttataagacctctcatgatgcttcctccaaaagaaataccaccattttggcacgcaatattcatcatcttggtgaacgatacaatgggtcaaatgttgacgattgtggaatattttctacttttgtaccgtgcattattgcctacacctatgtggtaccgttttttcctgaacaaggagtatggaagcctattttcgtctctaaccactggcttgtatctcactttcaagttgacatctgttgtggaaaagacgattcagaatgaacggattctgtatcatgtgtttcctctatacctcactatggctgttacttacatgtttgccttttggggcaatgggtgtaacttccctattggaaaaggatggtgcgtagctgcaaaagagaggacatcttgcttttgtgctcgcaagaaggatgcaaaggatctgtga

SEQ ID NO: 41560 - DNA, 525 bp, Zea mays
  Peptide Sequence Number=SeqID_83339
agggagagaaaaattccagttcttgtcgggattacaatattatttgttgttcatgtatctggattttactggtgttacaagaacgaggatcttataagacctctcatgatgcttcctccaaaagaaataccaccattttggcacgcaatattcatcatcttggtgaacgatacaatgggtcaaatgttgacgattgtggaatattttctacttttgtaccgtgcattattgcctacacctatgtggtaccgttttttcctgaacaaggagtatggaagcctattttcgtctctaaccactggcttgtatctcactttcaagttgacatctgttgtggaaaagacgattcagaatgaacggattctgtatcatgtgtttcctctatacctcactatggctgttacttacatgtttgccttttggggcaatgggtgtaacttccctattggaaaaggatggtgcgtagctgcaaaagagaggacatcttgcttttgtgctcgcaagaaggatgcaaaggatctgtga

SEQ ID NO: 41561 - DNA, 183 bp, Zea mays
  Peptide Sequence Number=SeqID_83340
atggagacagggaaacagggagccgagggaaggagcgccaagcacagggggcagagggaggtgctcgacatctgctggacagccaacaccggagggaagctgggcggccatgggaggaagggagccgagctccctgcactctgctcgctagatattaagccgaatcggatagaaattaattag

SEQ ID NO: 41562 - DNA, 831 bp, Zea mays
  Peptide Sequence Number=SeqID_83341
atgggagagagggcacaggggcttggacgccatggcatccagggagggagctgggaggcgtcggcgtgcctgctgcagtggagaagttggaaggggcaccgggcttcatccacggaagggcccgcgctgctcggcaaggaagctcgggaagggggacgccatggctgctggtttccatgggagggcgagcgttggtgcagacagcaacggggaaggaggaagatagcgtggggaagattgcaggggggcgccatggccagccgacagtgtggccgagcagggaggctccccgcgccctgcagggggagatatcacaagggaggccaccatgggagagagggcgtcggtgatctgctgttgtgggggggtgccgagcaccatggcgaggaggaggagcccggcgtgaggaggaagaaggagccgggacaggggccaccgcgccctggctggctgaagctggagctcgaccgtgcatgcgactgggcgccatggagacagggaaacagggagccgagggaaggagcgccaagcacagggggcagagggaggtgctcgacatctgctggacagccaacaccggagggaagctgggcggccatgggaggaagggagccgagctccctgcactctgctcgctgtgcgtggaagaaaacagggagagaagaaatggcggctaggaaaaaatggagggtgggagtgcaaatttgccaagtgagcacccctatttataggagcagccctagggttagggttttgaattgggcccaattgggctgggttgggctggcccaaacacgaaatcgggctgcgttaaattattttccggaataa

SEQ ID NO: 41563 - DNA, 144 bp, Zea mays
  Peptide Sequence Number=SeqID_83342
atgtcgcgtgcgttcgaggactactatatcatggactgtggcatcatctcagcgccggaggcgtggggcgtgctctccaatgatgagaccatggaaatcgtggcatatatcgaagtcgacatgatactgatggttgcaatatag

SEQ ID NO: 41564 - DNA, 276 bp, Zea mays
  Peptide Sequence Number=SeqID_83343
atggcgctatcatgccgtccagctcatcatccatctgaagcccaatctgccatccaagagtcatcggtactcgacatgtcgcgcgcgttcaacgactactatatcatggactgtggcgtcatcttggagatggaagtgacgcagaggaggaccgacagcaatgatcagtttgtcatcctccccaccgtcggggcgtggggcgtgctctccaatgatgagaccatggaaatcgtggcatatatcgaagtcggcatgatactaatggttgcaatgtag

SEQ ID NO: 41565 - DNA, 543 bp, Zea mays
  Peptide Sequence Number=SeqID_83344
atgaaaaacacgtcatatttcaattacaagatgcgcactgctcacaagaaaattgcccacatacatgtccccacagccgtcctttggcgaaggggggcgagggcagcgttttcgcttatcgtcaccaaagaacgaaacaacaaaactcggctgtttcatcacctacaacaacatgggttcgaaaaccctgagtacggagtgtacttttgcaagtcttacccgacaaaggaaaagattctcaaggatatgctagcttgtgggattcaagataaagctgatcaagaatcaaagactctgtttgcagaaatgcttactaacagtggatccttaaaaatccagttttattatcaggtttctcaagaccagaccgggttcacgccaaccgagagcacagatacaccaccgtccaacctcttgccacagagggtacacgctactctcgccatctctccactcccattgtgtggtgtcctttctggtattggtccgaccgaggcaaagcttacccatgacgaggcatgtggccagttaaaaggtccttga

SEQ ID NO: 41566 - DNA, 504 bp, Zea mays
  Peptide Sequence Number=SeqID_83345
atggaggtaaaacatcctcccaccaacacgttcaatagtttgcctcctcctttggtaccaccttcgagcagaaacaacaaaactctgctgtttcatcacctacaacaacatgggttcgaaaaccctgagtacggagtgtacttttgcaagtcttacccgacaaaggaaaagactctcaaggatatgctggcttgtgggattcaagttccaaggaaggaaatgcagcaattgtttaacacacaacttctatcatctaatgcatcatctcaagtgataaagagttttaaacaaccaaggaaaggggtaaatgcaccgaggcttgccttgtgttgtaggaggctcagggtctgtgatgaggacatcacctgcaacatgagtacgactacaccatcagcacctccacatcaagcaccacttccttcattagctgggccaataactcgggcccgtgccagagatcttaactccgtcatgctactgaagaatgagggcccagaagaatag

SEQ ID NO: 41567 - DNA, 780 bp, Zea mays
  Peptide Sequence Number=SeqID_83346
atggaaaaagagccacttgacatggttgagagctcagttcgagtcatcgagacacatgtcgacatcattcgcagtctagtgactgatggggttgtggatactagtgaaccggaatcagtgtacacacttaagaccactttgtttcaaattggagatgtatgcgacatgcttgagaagtgtgctctgtccatcaaaaagtatgctgactccaagagggctaaaattattcaagatgaagccctgcaatatgctaaagatgatgaagctgcagatgatttggaggaactcccaagcctagatctccttactcaagctgacatattggaaaaatattttggaattgagtatgatagcgaccagtctagggagtgtcaagtcaatgaactatcttcgagtactattgggaagtggatctatttgatgtatttgttttccctagtgatattgatggtgccgagtagcgcctacaatcttgactacctcatccctattctttgtttgggacttatatggagaatggcttcggctgaatgcctgaatcgggccgggaagcacggagcagatagaagtgcactttccaatgcagttagacagagaaggcatggatgtgatgttataatgctgaaggaccccaagaagagattatggcctgtcatttaccaccactacccgttatttgtgggcggtggtggtaaattgtcacacccgggttttagggcaccaagacccgggcgcgaacataatcaccaggtgtgctgggaccaagtctcacacatatga

SEQ ID NO: 41568 - DNA, 513 bp, Zea mays
  Peptide Sequence Number=SeqID_83347
atggcttcggctgaatgcctgaatcgggccgggaagcacggagcagatagaagtgcactttccaatgcagttagacagagacgacatggatgtgatgttataatgctgaaggaccccaataagagattatggcatgtcatttaccaccactgcccgttatttgtgggcttcaccgagggctggaaacatttggtggcagcaaacgaccttcgggcgggggacgtctgcgagcttgttaaagggccagacgatgaggggtacactttacccactagtccggtttctgcgatctcaccgtcgcgagacccgaatgccggatctctttctttcctcgtacgtcctaaccttaacggttatactagaaggagtcaggccaccgccatgtccaaaccggacaaaacattccccctccttatcctcccggtgctccccagccttcataaccctggggttgaaccgtacgagttcagattgagtgactgcccacacagtctcgagtggttgtattattaa

SEQ ID NO: 41569 - DNA, 711 bp, Zea mays
  Peptide Sequence Number=SeqID_83348
atggatgatttggtctccaatctagatccacggctggctacgggtggccctggccacgttcttcttatggcgggtccctctcgctcccggcggctggttccctcctcccggcggcggcgcgcgtctgggcacggagccgttcctgtacgtggcggcgcggagtgcaactacctcgtctggctcccctacaacggcctcggcaatcgcatgctgtccctggtcagcaccttcctctacgcgctcctctccgaccgcgtcatgctcgtccacttccccgccgacttcaccgacctgttctgcgagccattcccggatgccacgtgggtgctcccgccggacttccccgtcgccaacctgtccgacctcgggatgaaccacgagcagtcgtacaggaacctcctcgccagcaagaagattgcgaacgacccaatggtgcagtcgtccgtaccaccaccatgggtgtttctgaacctgtgccacgagcaggatatagacaagctgttctactgcagcgacgaccagctcgcgctcgccaaggtgagctgcctgctgctgttcagcggactggcaggacgcgtttgtgggctcgggctggcacgggccactaaatgggccgtgctatccgggtcggcccggcacgatcgggcctataccgtgccgtgctcgggaagaagtttgggcccgtcgggcggcacggcccggcacggttaa

SEQ ID NO: 41570 - DNA, 855 bp, Zea mays
  Peptide Sequence Number=SeqID_83349
atgccgctgagggaaagagtattcgtcatattagcgcctgacctaggagagttagctgccatatgtggtgcggcctcatcggctgagaactccccgcaagaccacaaatccctgatacccggacgacccaaccccagcctcagcccaacccagccacaaccgtccacgtataacattaacacccaccggcaaaccctaacccacccttcctccctcagtccctctcgctcccggcggctggttccctcctcccggcggcggcgcgcgtctgggcacggagccgttcctgtacgtggcggcgcggagtgcaactacctcgtctggctcccctacaacggcctcggcaatcgcatgctgtccctggtcagcaccttcctctacgcgctcctctccgaccgcgtcatgctcgtccacttccccgccgacttcaccgacctgttctgcgagccattcccggatgccacgtgggtgctcccgccggacttccccgtcgccaacctgtccgacctcgggatgaaccacgagcagtcgtacaggaacctcctcgccagcaagaagattgcgaacgacccaatggtgcagtcgtccgtaccaccaccatgggtgtttctgaacctgtgccacgagcaggatatagacaagctgttctactgcagcgacgaccagctcgcgctcgccaaggtgagctgcctgctgctgttcagcggactggcaggacgcgtttgtgggctcgggctggcacgggccactaaatgggccgtgctatccgggtcggcccggcacgatcgggcctataccgtgccgtgctcgggaagaagtttgggcccgtcgggcggcacggcccggcacggttaa

SEQ ID NO: 41571 - DNA, 1887 bp, Zea mays
  Peptide Sequence Number=SeqID_83350
atgaaggacgtcggcgactgcacggcactgctcgccgcgttcgtctacatcgagacgtcttctgctgccctacgcatcttgtggacgattcgggtgccccacttgactcagacgaagacaactccgtccacggcggccacggatccgtgttgtcccatctcctggagcgtgaggccgacactaccttccttccccactcagatcagcgggatggagtcgaggcgcggctcatcttgcgggtgcactcccgcctcctcgaacgtcgcctccaccgaccccgacgtaccgcccgactcggacgccgacaacatcatcatcatcaatggcaaagggcccatagagctagtttttggcaatacgaccataggtgggctcggtgacgtgagcactgtcctagatccagtggttggaggggtccccatcgcacaagaagaagtaatcaccagcaccatgccacaagcggctcacaaagcccccgacgatcttgagctcggcctcccagactactacggcgccgggtgccggcacccgctcaccagccgcgtcgtcactctcttgtaccgcgtgcctgagctactgctcggttccaacagcccaaaggccaagtcgctcctagaggcggctcttatggaagctaacagggagcggaagaagcacatcacgggcaccatgacaaccaaacccaacgacgatgacgaccttgacaaggacgacggcgagctgtgcctgggtggcatctacctggagttggcatgcgccatggaggtgcaggactgcaggcaccagatgtgcgttgctttcatgctagcgctgtgcttcaacatttccatgcctaacacgatcgctccttcagccatattgaaaatggctcaacctgatggagagctgcttgtttctgttggtgtccctggtaatgctcttgtgctcaagatttcaattcaaggtgttgtggttgcccttcacagggaaacacttcaaggcacaagtccgaatgaagagcagatgaagcaggatagtgtcgcagacaatttccattgccaactaaacaagattcttgctgacttgaatcaagatcacatcattgaccgaaaaaatgtctggaatagtatcagattcagtaatgtatatgtgaagaatctgtctgatactgttactgatgatgagttgacggagatgtttgaaaaatatggaaccataacaagtgctgttgttatgcgggataatgttggaaattctagatgttttggatttgtcatttttgaaaatgcagatgctgctggtcaggctattcaagagttgaataggaagatattcaatgataaggaactatatgttggaagagtccaacaacctatgatgcctggaaatttatattctagtaagtttgctgtttttggtgacaaggtcttcagccctaaggaaatcagtgccatgatttttggcaagatgaaggatactgctgaggcgtaccttggcaagaagatcaatgatgccatcgtctttgtccctgagtacttcaatgacgtgcagaggcaagcaaccaaggatgctgctattacaaaggttgatatattcagagatgctgcagttcttgtggtgaactatgtagacgaaattcgagcacaaggttttaagttggaatatgcagtcttacctacacctatggatctcatcaacactgtgcgagaattagttctttctcaagatattacccttatcattgaacctggacgattcttagtcagggctgatgggcaacttttctgggctctatcatctgatgcttctgatgctatgatttgtcctgaccaagagagatgcgatgagattttccaactatttgcttcttttctggggttcaagattaagaatcagcgaagcatctag

SEQ ID NO: 41572 - DNA, 753 bp, Zea mays
  Peptide Sequence Number=SeqID_83351
atgtcctgccgccggcgggacctgtgcgccaccatcgccgcgctctgcgcgcggttgctgcctcttccccgcgcaccgcctcagccttttccccacgccttacactcacgagatgctgcagttcttatgctgaattatgtcgatgaaattcgagcacaaggttttaagttggagtacctgaatatcggaggtggtttgggaatagattaccatcataccgatgcagtcttacctacacctatggatctcatcaacactgtgcgagaattagttctctctcaagatctcactcttattattgaacccggaagatccttgattgctaatacttgctgcttcgtcaatagagtaactggtgttaaatctaatggtacaaagaatttcattgttgttgatggcagcatggcagaactcatcagacctagtctgtatggagcataccagcatatcgaactggtctctccccccactcctggtgctgaagcagcgaccttcgatattgttggaccagtttgtgagtctgcagatttccttggaaaagatagggaacttccaacacctgatgagggagctggactggttgttcatgatgcaggtgcctactgcatgagcatggcttccacctacaacctgaagttgaggccaccggaatactggttgctacatggcatcaaaaacaagaacaaggcaacacacgttaagaaatttgaaccttggtccttaagttaccacttcttcgaaatgttagcttga

SEQ ID NO: 41573 - DNA, 315 bp, Zea mays
  Peptide Sequence Number=SeqID_83352
atggactactctgcaccagcagggtcacgttggaacctggctccgggcggctcaccagcggtggcgaccacctctgcaccgggcaacctcaccagtggcggcgaccacctctgcaccgacgatttgccagcggcggcaaccacctctgcgccaggcagcctccccagcggtggtgaccacatcatcgtgcgcgccatggcaaagaggccctcgcccccgccctcctatgggggtgaggacaagaccatccaagccatggagctgggagcacggcgacaggcaatgcttgcggtctggccgggaccgcgtagctaa

SEQ ID NO: 41574 - DNA, 312 bp, Zea mays
  Peptide Sequence Number=SeqID_83353
atggactactctgcaccagcagggtcacgttggaacctggctccgggcggctcaccagcggtggcgaccacctctgcaccgggcaacctcaccagtggcggcgaccacctctgcaccgacgatttgccagcggcggcaaccacctctgcgccaggcagcctccccagcggtggtgaccacatcatcgtgcgcgccatggcaaagaggccctcgcccccgccctcctatgggggtgaggacaagaccatcccaagccatggagctgggagcacggcgacaggcaatgcttgcggtctggccgggaccgcgtag

SEQ ID NO: 41575 - DNA, 789 bp, Zea mays
  Peptide Sequence Number=SeqID_83354
atgtcattaacacgcttcaattctccctgtttgtatgtgctgagcagtagtagatggtcggtgctaagtaagaatttgcagaatcctggttccatggctccgaatatcagaccaggccatgctagccctatccaggatggaacagatgccacagactacctattcacagatgatcttcccgaggatctttacagtatgttgtatcctggtactgaccagttcaatgatagcatatttttggaacaaactggccaggaaggtaataacaatcagacaaactacatgatggggattggttcatatgttcttccaaacaactttgagaatgaaactccgaatgccgaattgcagttagatcatgaaaataacaagatggatatgtcaaatgaaaataatgacaccggaattacaatacgaaggcgcagagcaactgcgcctcccgctaacatttcactagcagctggcaagattaaaatgcaggttggaattaagaggatggttacgagtaattcagaatctatcaaccagactatgaagtttacagataacagtggtcgtcgtcttgatctcaggactgatgttgagcaccagaagaaaaatgcaaacaatgtcatttctgccaagcagtctgatgcagccaatcatgaagcccacagcaaccaaggttatctcgagggcttcaaaagatgttcatcagctggattcagggcatacatatttgttgccctttttgtggttggagttgctgctctagtgctgcattatcaccgctccaatgccaacctatga

SEQ ID NO: 41576 - DNA, 546 bp, Zea mays
  Peptide Sequence Number=SeqID_83355
atggtggtggattcgcttagggtggtgggaaggagcaggagggttctgcttttgtgggcggattttgagctcctcgaccgaatttgcagaagacattgtaaaatggaagtactgcgtgatatgcacctgccaccaggatttggattccatccttctgatatagaacttgtttctcactatctcaagaggaaaatacttggtcagaaaattgaatatgatcttataccagaggtggatatatacaagcatgaaccatgggatttacctgcaaagtgcaatcttccaatcaaggacaacaagtggcatttctttgcctctcgtgacaggaagtaccctactggctctaggtcaaacagagcaacactagctggttactggaaatcaactgggaaggaccgagccataaagctgaacaagctaactctaggaacaaaaaagacgttagtttttcatgaaggccgaccaccctctggcagacgcactgagtggattatgcatgagtactacatcgacgagaatggatgtaaagtcagccctgatatgaag

SEQ ID NO: 41577 - DNA, 2247 bp, Zea mays
  Peptide Sequence Number=SeqID_83356
atgcactgcacaaagtccttctttgtagaatctggccaccaaccatatttccatcctgggtcttgtgatttggctttcctcttcacgtcaacagcttgggatgcaagctctggtggaagtgctgctatagccttttcaacaaaagcagcagagtctaaagtagcagaagctgctgaaccaggagcaccacctgatgcggctgatgattctacattattcataataacttccacttccgctgcaggactccaggaggggcagggacgcaggctgctgtgccgctgcccgccggctgtgccgccgcccgccgacaacactggcggcacgagcgccgagggaggaacacagggaaggcttgctccacaagacaagtccagtgcggcgtccccacctggcagcgagccagcagcggcacttggaaccggatgcgtccgaatcgcatccaacgagccgcaggccaacgaccacgacctcactcacacatcctgccgtccaatccatccagctactcggcgacttgcccccacgcagacaagcagtgcacccacagcttcctggctgcttcgtccatctcgcccaatcgccctcccctactactcgctccccaccaccctacctctgacgcttcccccacccagtgccgccactcccagccttgactcgtccgctgggccgaacaccgccctcgagctcttcgctgtgccccctccaggctcctcttccccgcacggcggcgccgtcctggtggttacgcggggcgccggtcgggcgcgatcggccgtgcgggcacctgggctccggagaggtgagccgatcccgtcgtcggcctcgacgtgccgtttctgttcgtctggtgctggtgccctggtcggtgtgcgacattgtaaaatggaagtactgcgtgatatgcacctgccaccaggatttggattccatccttctgatatagaacttgtttctcactatctcaagaggaaaatacttggtcagaaaattgaatatgatcttataccagaggtggatatatacaagcatgaaccatgggatttacctgcaaagtgcaatcttccaatcaaggacaacaagtggcatttctttgcctctcgtgacaggaagtaccctactggctctaggtcaaacagagcaacactagctggccgaccaccctctggcagacgcactgagtggattatgcatgagtactacatcgacgagaatggatgtaaagtcagccctgatatgaaggatgcctttgtcctctgccgtgttactaaaagaaatgactggtcattagataatgataatgaggtgggcaacaggagctctcatctggaacaaccagatgctgctacatcagttgtcagcactgtaaagccagaagatgttgctgcctcagtcatctgtccagaagaatcgaaccatgcaactacaccaattggcagtgctgaactatctaatgatgttgctcaggcagctatcactcctgcagctatcactcctgattcaacaactccaaatggtggtaatgaactggaaacatggctgcaagaactgttggatccttcacctccatttaaccttgtagctgatactggttctgctgacaatttgcagaatcctggttccatggctccgaatatcagaccaggccatgctagccctatccaggatggaacagatgccacagactacctattcacagatgatcttcccgaggatctttacagtatgttgtatcctggtactgaccagttcaatgatagcatatttttggaacaaactggccaggaaggtaataacaatcagacaaactacatgatggggattggttcatatgttcttccaaacaactttgagaatgaaactccgaatgccgaattgcagttagatcatgaaaataacaagatggatatgtcaaatgaaaataatgacaccggaattacaatacgaaggcgcagagcaactgcgcctcccgctaacatttcactagcagctggcaagattaaaatgcaggttggaattaagaggatggttacgagtaattcagaatctatcaaccagactatgaagtttacagataacagtggtcgtcgtcttgatctcaggactgatgttgagcaccagaagaaaaatgcaaacaatgtcatttctgccaagcagtctgatgcagccaatcatgaagcccacagcaaccaagctctagtggtcagtggcagcattggcttcgtccttggagtagttcgctag

SEQ ID NO: 41578 - DNA, 906 bp, Zea mays
  Peptide Sequence Number=SeqID_83357
atgagcaagtcatctgaagaatcatcggtcgcatcaggtggtgctcctggtgttggttcagcagcttctgctactctagactttgctgcttttgttgaaaaggctatagcagcacttccaccagagcttgcatcccaagctgttgacgtgaagaggaaagctaaatcacaagacccgggatggaaatatggttggtggccagattcgacaaagaaggactttgtgcagtgcattttctgtaggaagatcatcccttctaagataaaaaggttcaagcaacatctcactggaggttttggggatacaatgaaatgtggtagtgtgcctgaattgatttcaaaagagatgcttgcttacctaaggaagaatgcaaggtctttggttgtgaatgtggatgaagatggtggagaatatgaaagtgaaggtaaaaaagaacaagttgcagctgaaccaagttcagggactaaggttaagcaagcgaagaagaagataaatcagtcagccattagtgcatttgttgttttagcaccaccaaaatcacaaactcagaagcactctaatcaaagttgggagattatgcttgggtcaattgggcagtatggccctggatatcgctcaccatcataccatgacactagggttcctttgcttgatagagctgtggacaggacaacagaactgagaaagaaacatgaggaggcctggaaagaatatgggggcagtcttatgtctgatgggtggattaatatgaggcaacacgacataataaattttctcgccaatagtccagtaggtaccttctttcttgagtctgttgatgcttcatgtgaggtagctaatgctcaaatgttggtagatttactggagaagcaaatcaacaagattgggaaggagtatgtggtttag

SEQ ID NO: 41579 - DNA, 315 bp, Zea mays
  Peptide Sequence Number=SeqID_83358
atggaggctttgaatgtgtcttggaatggattgctagctcttgtattgaatgttgaaggcccacgaaagaatgaccttacgatttattgggcccttgggcctttcgtgaggtcttttactcttttagtggacccgggggatatctatcccccacaagcccccgatctttgggttaatttagagttgagggctggccttttaatcttgccccacaccctagaagtcggcactatctcagcttggaatgataatccatggggtgcaccgaaggtgcacccaatgggtgtagcccccgaccttcaaatggatttttaa

SEQ ID NO: 41580 - DNA, 513 bp, Zea mays
  Peptide Sequence Number=SeqID_83359
atggggtgcaccggaggtgcacccaatgggtgtagcccccgaccttcaaatggattttttaaggataatccattcgaagaaattggcatgaagctatttgcattatgctttggaggtattcactgtgtgccctgcacagatgtgaccgttttgaaaaatatactgataattcctgggcgtccccccccaatgggtgtgggcaagggacggcttgacgactcccaggggattgccgcggaagtctggacgtacatccgggccgtcgagcgctccgggctcgagggctcggatgagtcggagtactcctcggatgaggaggactcggacggcggcgaggacgaggatgacgacgacgacgacgacgacgacggtggcgacggcgacggtgacggtagcggcagtggcgggggcagcggcggcggcgacgggagcaagggcagcaccagaggcggcagcagcaagggcagcaccagggtcggcggcggtggcagcagcagcaaggccagtggctaa

SEQ ID NO: 41581 - DNA, 741 bp, Zea mays
  Peptide Sequence Number=SeqID_83360
atggagagagcagaagtaatgaagagagagagtgtggtggtggggggggtatttaaaggatccccaaaagctgacagccgttgggagaaaaggaccaaaaaccggttgaaccgatctccggtcggggcagtcctcaccgagggcgagcgctccgaggcagatgcttcgtgccggtgccagggcgaccgaggcttaggcctgatcgagccagtgtgcgccatgctaaggaggcgatccacgtcatcgcatcactgccccatagtccctggcgaggccgtggggcttggcaagtggtgctacaactctcttgccgcagagagcgctccggcgggggcatcccttgacggagtccgggacgcccactctggggaagcttattgtagaagggatgatgagtacagtgcgccgctcggcgtgggcgcactgttcgccaacagactgggcgaggcctggacacgtgccggcaccggacccctactcatgctggggtcctcctcgtcccgggaccctgccaaggcctggaacgggtccggtgtccctcgggggtttggagccatcgatgcaccccggggacgtattatctttccttgccacatggtgctcctaggcctgcccatgtggtgggtcgggtgctgctctttgtgtgacctggaggtgtcgtacgggcgcaatgtcttcatactgcagaagagggagcaaccgatgaagaagggcgacttgaggagtcaggagaagctttga

SEQ ID NO: 41582 - DNA, 1047 bp, Zea mays
  Peptide Sequence Number=SeqID_83361
atggccggagcttgtgtggagggaacggggcctcgggcggctccttttataggcgcccgggagagggagagggatggaggggacggcgagcaccgacaagctcgccatgatggcgggaatggagcaaacggcgattgcgacggctcgggcaggcgaggggtgaggggacggctcgggtacattggtggggtggtcgctgagaccggtgcgagccttaatggcgaggcgacggggcgtgaggcgatcggcgacgaacacgccgtttatgcctggaatagtgtatttgccccatcccttccgcacgtatgggtcactatagagaccccgacgctgaggtccctgaggttggtgttgtccggtcccactggtcagcggggatacgtatctggcatcatgcttgatagagactctttggtactgcttccatggtctgggcatggcttggtgatgtcccctcgtgctgatgtggctcgatgggataagccttcgtggcaaggtcactcgtgtgtcacaggtgataaccaacggagccgtggtgtagcgattgcgaggaaccattcgctcggagccttggatcatcaacgtcgagatctccactcaatcaagttattgtatctcacggaagatcgggccacatctactatcaagtggtatcagatttctaggttgccttcagccttcccagagctccagctttctctcgagcagaacatgtactcctttgcaatcacacccacgctcgttggacagtcacaccgatcaccgtttgccacctgcagtgctggaccaaagaaccaaatggacaaggagaagaggcctaagcttaacgacgatgagtgtgtctctcagcttgaattgaaggagatgatgcgcgtgatgactgaagcttttaaaaaataccaggactctgcggcaacatcctatgagcagcttgatcgacgagttgctgaacttgttacacgcatggacgtactggaggctcatccccccaccaactccagcaccagctcactctcctgtggacgacggcggcggcggcggcggtga

SEQ ID NO: 41583 - DNA, 501 bp, Zea mays
  Peptide Sequence Number=SeqID_83362
atggcgcctgaggctggactcggctgttgtcagcctcaccctggcgggtggcacagcagtcggagcagggcaggcgacgctgttttcctgtcaggttccgagttctcgggctggtatgttgacgctgtcaacggtttggccgtagccaagtttgcgagagcagcccccgagcctctgcatagagcgagaggacggtcaaggacggactcggcttttatcatacgcctctttgtcgcctttccgcaaggaggaggggggaaagcgccatgttgccctcggagggcgtcgaacatggtgtctccaggtccaagggctcgatgcctccctctgatgggatttcgttacagaatcgctcctgctggtctcggaaatgtcctagggtacctcaggagcgtagcccgagcctcggccatgtatcgaacgtacccagagtcatccctcgctctgcgtgttctggggcggctgtcgaacccttcggggggccagccttcgaacccctga

SEQ ID NO: 41584 - DNA, 684 bp, Zea mays
  Peptide Sequence Number=SeqID_83363
atgactctgggtacgtccgatacatggccgaggctcgggctacactcccgaggtaccctaggacatttccgagaccagcaggagcgattttgtaatggaatcccaccagagggaggcatcgagccctcagaccctatcgaacgggaccgggtccggcaaatcacctgcagaggctcgggggctgctctcgcaaccctggctacggccaaaccgttgacagcgtcaacagaccagcctgaaaactcaaaacccgaccatgcacccgagctaccatcagatctcatgagggaacaaccagaccagccaaggcatcgcgaagctcctcctcacccaaccttgggcctcagcctcagaaggaggtctctgcctcgcccgacctcagggctcggcccccgcctcggcctcggaaggtggtctctgcctcgcccgaccctagggctcggctcccgcctcggcctcggaaggtggtctccgcctcgcccgaccccagggctcggcctcaacctcggccttggaagatggtctccgcctcgcccgaccccagggctcggcctcaacctcgacctcagaaggaatcgcgtcctcaccccaccccggcctcggcctcaagaggagtctccgcctcacccgaccttgggctcggaccgaccacgccacagggggtacatcattaccctaccctag

SEQ ID NO: 41585 - DNA, 303 bp, Zea mays
  Peptide Sequence Number=SeqID_83364
atggaggacgctatgagcgagcagcaagaaaggtttcgtgaagagctgcggcaacaacaaataacattcctccaacagcaattagagtacatggctgcttacaacgcacaggcgcaacaagcaatgaatagatccggggtcatcggccacaacatgccaccaccggtgataccagcaccaggaggagcttatgcaggggagggagctactacaggagagaatccaaacccgttacacgacttcgtcaacgagttttttgcttatggaggtagtggtcacaactccaacaaccccgatatgtga

SEQ ID NO: 41586 - DNA, 303 bp, Zea mays
  Peptide Sequence Number=SeqID_83365
atggaggacgctatgagggagcagcaagaaaggtttcgtgaagagctgcggcaacaacaaataacatttctccaacagcaattagagtacatggctgcttacaacgcacaggcgcaacaagcaatgaacggatccggggtcatgggccacaacacgccaccaccggtgataccagcaccaggaggagcttatgcaggggagggagctactacaggagagaatccaaacccgttacacgacttcgtcaacgagttttttgcttatggaggtagtggtcacaactccaacaaccccgatatgtga

SEQ ID NO: 41587 - DNA, 636 bp, Zea mays
  Peptide Sequence Number=SeqID_83366
atggtcacccaagacggtgaccaccagtttgatggtggggagaagcaagccgggctgcggcctctgccccgccctcagcttcaaggatcttcatcattcttgctggggcggaggcattcaagggagaaggcgctcaccggcctagcggagggggcggacttcgacaacgctaggccgatcggccgcaagcgtcgtcagctccagcgtgcccggttcgctggctcagttggctctggcgtagcttccggtgccacctcccaccgctgggcggagtgcggctatctgcccgccgtacgggcggtcgttgcactgcgcgcaccaggagaccgcccaagacgttgcgcgctgctggggcggcgttcgtgttcttgggctgtcctgcccttgctccggcacgacgccttcgcgcggaggtcggtgctcgcccgtctgggaggacttgagtggggatctgctggcgggcaggtggctgccgtcgtcggtgctgaggtggtggcagctggagaagtccttgtcaccgacgagatcgccgctgccatccgcgctccgggcctcggctctttggctttgatagcttgtcctcgcccctcaagtgggacgtgggcgagggccttatcacagcagcgtctgccctga

SEQ ID NO: 41588 - DNA, 393 bp, Zea mays
  Peptide Sequence Number=SeqID_83367
atgccattacaaacgggactccggttccgttaccgcgggtatgaacaacctccataccaggaggcccgcgggacgacgaactccaagcggctcaccgccgcccactcctgcagcagcgacaacgacctccgctccgggcggccaaacaacagcagcgatgacctcagggcagacgctgctgcgacaaggccctcgcccacgtctccactcgaggggcgaggacaagctatcaaagccaaagagccggaggcccggagcgcagatggcagcggcgatctcgtcggcgacgaggacttctccggccacctgtccgccggcagatccccactcaagtcctcccggacgggcgagcaccgacccccgcatgaaggcgtcgtgccggagcaagggtag

SEQ ID NO: 41589 - DNA, 291 bp, Zea mays
  Peptide Sequence Number=SeqID_83368
atggccatggaggaatggagctgctgcgtcgccatggacatggacctcgccgagcagagggagaggaggaacgggagccggctggtggagatgggagagctcggctccatgcagatgtggagctcgccatttggagcagtggcagggggcgtccgtgactgctgtgctgtggaggccgacgaccatggaaggcagagagcagagggcatgcacgctaaggaggaagagggctggcgtggggagaagaagtggaggtggctgggagaaaagaaaatggcggctagggggtag

SEQ ID NO: 41590 - DNA, 495 bp, Zea mays
  Peptide Sequence Number=SeqID_83369
atgggagaggtttgcgccagcgaggagaggagggtcgagctgctgctgctgtggaggagagggagtccttgctgctggaatttctgggcactatgggaggaagaggtggacgagctgctgctcgccgtggagcaggagaggggcgctgctgctgggcagccatggagcaggaaggtggaggtcggtcggaggtggaagaaggacgccgagcacaggggctttggacgccctggttgctggccgagcagggaagaacatgggaaggcgccatgggagaaactcgagctcgctgccatgggggaaagcttcagcgcgccgaggaagaaggagcggggggggggcgccatggctggccgatgggagttgctcgccatttggagcagtggcaggggagtccgtgactgctatgctgtggaggccgacggccatggaaggcagagagcagagggcatgcacgccaaggaggaagagggctggcgtggcggagatggctga

SEQ ID NO: 41591 - DNA, 156 bp, Zea mays
  Peptide Sequence Number=SeqID_83370
atgaggtccccctgcttgacgattgacaacgcggagcagccgttctacaccgcgtccaagcggcggctgcgccggagcttgtcgtacatagcggcacatgcggccacgcgcaaggagaggatccaggtgtacaacgggggtgtagcagagtgctaa

SEQ ID NO: 41592 - DNA, 579 bp, Zea mays
  Peptide Sequence Number=SeqID_83371
atgtacgacaagctccggcacagccgccgcttggacgcggtgcagagcggctgctccgcgttgtccatcgtcaagcagggggacctcatggtcgtcgccaaccccagccaagagtcatcagtactcagtatgtcacgcgcgttcgacgactactatatcgaggactgtggcgtcatcttggcgccagaggtgacgcaggggaggaccgacaacaatgaccagttcgtcatcctcgccaccgttggggttcatttccttcatggagcatgcacggacgggggaggagatgatgggaggggttcggctggggagcacgccgaggggctgagatctgcacgccttgggaggagctcggccaagggaggcaggcagcgcagggagcaggctggctgcaccggtgctgggagaaagcaggggcacaggccaccggggcagagctcgccggctaaagagggcgtgcctaaggaaggaggagcagggcgccgaacaagaacgagcgagagggaggctgaaggtagaagaatgacgtgtgagagaagggagagaggtgggctgccatttatggaggataagctctag

SEQ ID NO: 41593 - DNA, 1035 bp, Zea mays
  Peptide Sequence Number=SeqID_83372
atggcggcagcaggcgagcgaaagcagcagtcaaatcgtctgcaggctcacgtcctctcctggagcagcaggggagccctctcccacggcgtgaagacgacgcgcccgtgttctgtccctcgaacggctcgcacaacggctgccccacgaaccacctgtcccgtcgcattaacttcgcggcagggcaagcgacacctttggcaggcgaagcgggcgacgtttcacctccgccatgatgaccgcgtcgaaaaagggaccgggaaaggggatatttcgaaagggatccttctccgcgaagaaagcggtccccaagccctcctactgatcagggccgcctcagagcactcgggctccgcgcccactactgatcaggggttcgaaggctggcccctcgaagggttcgacagccgccccagagcacgcagagcgagggatgactctgggtacgtccgatacatggccgaggctcgggctacgctcccgagtcggcaaggtcgaagtgaccgtagtcacttcgccctcccactgattgacctgacaggaaaacagcgccgctcgccctcttcgaatgctgtgccacccgctagggtgaggctgacagcagctgagtccagcctcaggcgccacaggaagctccgcctcgcccgaccttgggcctcggcctcaggagaagtctccgcctcgcctgaccccagggctcggcccccgcctcggcctcggaaggtagtctccaccttgcccgaccctagggctcggcccccgcctcggcctcggaaggtggtctccgcctcgcccgaccccagggcctggcctcaacctcgacctcgggcggaatcgcgtcctcgcccgaccccggactcggcctcaggaggagtctccgcctcacccgacctcgggctcggaccgaccacgccgcaggggccccttacggaagcaaggagacgtcagcaaggtcccgacagccccgacagttgtgcttctatagggctcaaacgctcctccgatggccacgacaccatgtacacagggccctag

SEQ ID NO: 41594 - DNA, 405 bp, Zea mays
  Peptide Sequence Number=SeqID_83373
atggcgcgtcgtctttacgccgtgggagagggctcccctgctgctccaggaggggacggttgcctcgagtcgcggcaccggttccgcagtcgagaaggcgcggcattggcgcaagtggcggtgctggcgtcctccttcgaggtggagatccttccgcccaagtcgccgtccgaggccgggccagattccgccgaaggtggaatcaacaccgagggtgctactgctccctctatcgatgacttgttcgtcggtagcagaatcgcttatccgagcgagagttacttttcgcggaaggtgatgagtgaggaccccgctatcaaagctgtcgaaaagcgcgaaagatgttatggcagaaagactttttccgaggaaaattttgacgcagagggggttccccccttctag

SEQ ID NO: 41595 - DNA, 894 bp, Zea mays
  Peptide Sequence Number=SeqID_83374
atgcaccaggggagtctttgtaaaggctacatagtgtatccctggccattcaccttggtagtgaagatcgggtctgtacaacctaggctggaaagggatcatgactcatgggtaaaatggcccgtatcaggtgcactgcacggcatcccgactactggaggagaccctgaaggagacagagacgatgacgatgccggtggcagttccagccacggcacggagctctcggaggagctggagggatggatcgctagacccatcactcatgacaccgctcgcgggtgtaacttccacgacgctctcgacaccctgctgcgtcgggccttcgaccgacacacttggtccatcgagtaccgttgtgtagtctaccagcatcgtcgcaggttatacccggaccagtgggaggctacttgctttgtgcgtcgtccggacgatgatctccggggtgcagaggccttctcagagcactattctattactgagagggatactgccgaggcagccatgcaagatgcagcacgacgagcactttctcagtattgcttgttgttcagtggggtagatgatggcctcaatctgaagtactaccctcgtcgttcgaccggcagtgctggaggtgtgattgtctcgccagttggtgagggcaatcccagactgaacaacatggtcaacttggccgccgtgctcaacatagagttggaccacgcccttgacgagttgggcaaggtttgggcggaggttgcggaattgtgtgctgagtgcgcagcacgccactatctggatggtggttctcccgcccctgtcgggattcagcacccttaccgttcaccgccccatggtcgcttcgactatggtaccccagactgcaggactcggatagatttggatccatag

SEQ ID NO: 41596 - DNA, 273 bp, Zea mays
  Peptide Sequence Number=SeqID_83375
atggggacaacctggggtggggtggtttgtaaagcaaggcctaggttgtacaaacccgatcttcactaccgaggtgaatggccagggatacactacgtagcctttacaaagactcccttggtgcatatctgctcgttaggtttcgctaggcatacaaacgcagtacacctccccaaggacgtaataggtcagaggacacttgccttcactaggttgttgctcaggaaggtctccaacaacacactcaggaacctcggactgctcgttgtctaa

SEQ ID NO: 41597 - DNA, 411 bp, Zea mays
  Peptide Sequence Number=SeqID_83376
atggcgagagtagcgtgtaccctccgtggaaagaggctggacggtggtgtatctgtcctctcggttggcgtgaacccattctgggagcgtgcgcaagatagctaccacattgctgagctatcagcggaggcaaatgctctagcccaggtagcagaactaagcgcagctttggagaatctgcaagcatactgtaacaatctgcatgaggaagtgcacgtgttatacgatcggctgcatccgaatgtgccaccagaagttgcagcaatgggagccggaacatctggagcagctagtggaggacctgatggggagttggatctttttggagcccctccttccatgaacctcgcagatgaacgctctcccgaagctggcagtggagcgggagtggccaaggacgaagataattag

SEQ ID NO: 41598 - DNA, 354 bp, Zea mays
  Peptide Sequence Number=SeqID_83377
atggccatgatgggttcaacatctaaaaagaatacctctgtcagggagcgtgcgcaagatagctaccacattgctgagctatcagcggaggtagcagaactaagcgcagctttggagaatctgcaagcatactgtaacaatctgcatgaggaagtgcacgtgttatacgatcggctgcatccgaatgtgccaccagaagttgcagcaatgggagccggaacatctggagcagctagtggaggacctgatggggagttggatctttttggagcccctccttccatgaacctcgcagatgaacgctctcccgaagctggcagtggagcgggagtggccaaggacgaagataattag

SEQ ID NO: 41599 - DNA, 363 bp, Zea mays
  Peptide Sequence Number=SeqID_83378
atgacagagtggcagcatatagttctttcagctgacaaaatggatctgataatagttcttggtaatttgcttgatctcataagtaatatggatctgggtctgggtctggatctggatctgcaatttggtagtcttatctatagagtagtgaggctggattggtttgtggactatctgcacacatttagcagctgggcacctataggcgaggaagctgagggaagaaggaaatatgtgattcgccctctgtttgaggcagatgatgttcaactaattctggaaccagagcagctgagaaccagagcagctgatcagtgtgtgcaactaattctggaaccagagcagctgagaactttcttgtag

SEQ ID NO: 41600 - DNA, 714 bp, Zea mays
  Peptide Sequence Number=SeqID_83379
atggccttgtcatcaggttcagcaagagagttgtcgcagtggaaatgcttccggctgtgggacaactactgcgtgaagaacaagagatgcgtcgacgagtgcctgggcgtggaggggaagggctacacccacggacactgcgagctgtgggcgtgcatcttgcatactccatattcaacgaagattttagggagctgccaggaacacttaatgcagatcgcattgatgcagacatccgggcaggtcaattttaagcccttactgggcattgcagagatagggaccatgatgcacgcagcaatatgcttcgctatcctcagaaaacctatggcctctcctaggatcgaaatatcctctctttcttttgaaaactcctaccagctgcccagatcactggcagagacaagacgaggagaaggccggggaagtagctcactgttgtttggagttggaaaggctcgctcgaccagctgctttcaattcactccgtggggaagtttttctgaactgaagggtaccaaccggattcacgcatgcactggccatgagatagagattcacgggcaatggcctgccctgaataaacactacaacagtctgtttgaggcagatgatgttcaactaattctggaaccagagcagctgagaaccagagcaactgatcagtgtgtgcaactaattctggaaccagagcagctgagaactttcttgtag

SEQ ID NO: 41601 - DNA, 564 bp, Zea mays
  Peptide Sequence Number=SeqID_83380
atggtgaaggcccgcctaacgccatggtgcagcaccccacggagtctgctgcgcacatggctgcccaaggcccgcagacagcagcagcgattgcctcagggcaaacgctactgtgaaaaggccctcgcccccgtcccccacacgaggggtgaggacaagccattaaagccaaagagccggaggttcgggccacaggtggcgctgacggtctcattggtggaggaaaccacttctgcagtgggaagcctaacctatggcgaccactgcctcagcaccgacgacagcagccacctgcgcgccgaggccgcaccggcgaatggcggccgccccagcgcacaaggaggtcctcactcccgtcctcgctacgggagggaggacaacaccatccggggacgcgaacaccgccctgcgacgtacgacgtgttgtgcgccccccggtgtggcccgtggtgcaggaagggccgtggatgtggccgatctgcgcactgcgagaccgtcgctcgtgcggtggacggacagccacaccccgaccaggcagcaggtggcagtttgcctcctccgtaa

SEQ ID NO: 41602 - DNA, 180 bp, Zea mays
  Peptide Sequence Number=SeqID_83381
atggccggcctgcgcacggcgcgaccgtcgctcgtgcggtggacggacagccataccccgaccaggcagcaggtggcagtctgcctcctccgcggatctccctactcgcaccccaaagcgtcacgggcaaagtctcccccgacgcgctccagggtttccaccctacgacacgggggctag

SEQ ID NO: 41603 - DNA, 786 bp, Zea mays
  Peptide Sequence Number=SeqID_83382
atggccggcctgcgcacggcgcgaccgtcgcccgtgcggtggactaacagccacaccccgaccaggcagcaggtggcagtttgcctcctccgaaaggctgggatcgagaaaaggggatatttcgaaaggatccttctcagcgaaggaagcgggccccgagccctcctactgatcaggggttcgaaggttgcgccctacggggttcggcaaccgccccagagcacccaagcttcgagccctttactgatcaggggatcgaaggctggccccttagaagggttcgacagctgccccagagcatgcagagtcagagatgaccatgagtacgtccgttacatggccaaggctcgagctacgctcccgagtcacttcgcccctttactgattgttctaacaggaaaacaacactattcaccccgttccgactactgtgccaaccaccagggtaaaactaacgacagtaagtcacgacctccctcgagttcagcctcgggcgcaatagggagctccgccacgcctgacctcaggcctcgccctcaacctcggccttgggagaaggtctccgcctcgcccaaccctaggcctcggcctcagcctcggcattgggagaaggtctccgcctcgcccgacctcgggcctcggcctcagcctcagcctcggcctcgggaggagtcacatcctcacccgacctcagcctcggcctcaggagaagtctccgcctcgcccgacctcggcctcggaccgactacgccactggggatacatgattaccatacccctagctag

SEQ ID NO: 41604 - DNA, 615 bp, Zea mays
  Peptide Sequence Number=SeqID_83383
atggtcattggatcccgaatggatggctcgggttcaaaatcacccagaattacatctaacggctgtggtgcttcccccaattccccatcggtctacggtggcgccgctagaggatcatggcggaccatcgccggagacaaccggtctgacgctacaaggcccggtacctcgcctactattgtgcagaacgtcacccggatcaagtgccgcccgcagccttcggcgaggaattcggagtcgcgtctacggttgaacccacaccgcgagcacacgggtgaattccctgcacaacggcgaagctcaccgacgcgatttctggactccacggtgacgggactgagtatggccacggaggcgtaccaatggttcgcacggcggcagaggggagctcgatggttggcttcacgagaaggatggacaacgctatttaatggggagcaggggggtatggcgccgggtcaaatgtcgcgccgctcggagagtctagctgcccccatagctcccaggattctcggtattccgctgcgcgcgcatggtttccacggggaagaagcacaggacctcgcccacggtctctggcgcgagggccccacacggcagcggaagagaggatag

SEQ ID NO: 41605 - DNA, 615 bp, Zea mays
  Peptide Sequence Number=SeqID_83384
atggtcattggatcccgaatggatggctcgggttcaaaatcacccagaattacatctaacggctgtggtgcttcccccaattccccatcggtctacggtggcgccgctagaggatcatggcggaccatcgccggagacaaccggtctgacgctacaaggcccggtacctcgcctactattgtgcagaacgtcacccggatcaagtgccgcccgcagccttcggcgaggaattcggagtcgcgtctacggttgaacccacaccgcgagcacacgggtgaattccctgcacaacggcgaagctcaccgacgcgatttctggactccacggtgacgggactgagtatggccacggaggcgtaccaatggttcgcacggcggcagaggggagctcgatggttggcttcacgagaaggatggacaacgctatttaatggggagcaggggggtatggcgccgggtcaaatgtcgcgccgctcggagagtctagctgcccccatagctcccaggattctcggtattccgctgcgcgcgcatggtttccacggggaagaagcacaggacctcgcccacggtctctggcgcgaggcccccacacggcagcggaagagaggatag

SEQ ID NO: 41606 - DNA, 3161 bp, Zea mays
  Peptide Sequence Number=SeqID_83385
atggggggccactaccgctcgcgctccgcctccgcgagctccacggcgacgcggtccgacatcaccgagctcgactttgctgcggccggcctcgactgcccattcggccgcgtcgatgcactcggtcccgttgagctccgcgagaccgcgtacgagatcttcttcatgtcctgccgctcgtccggcccggcggcacctagcaggggcggcgcggcggaaggggaggtgtcgtcgcccgttgccggcgctggcgcgaggtgtggcactgggggcggcgtcatgggcagccgagtcaagaaggccctcggactcaggccgaggcggctgtcgccgatgatgacccgcacactgagccagacgtcggggccggcgtcccctggccgcgtgcggcggccgatgacgtcggcggagatcatgcggcaacagatgcggctcaccgaccagactgacgcgcgtctgcgccgcaccctcatgcgcaccgtcgtcggtcaggtcggcggggcgcctatgacagtcctcatctacatcttttccttgagaaatgacagagtctggtttgcacaggtgggcaggagggcggagacgatcgttctccctctggaactcctccggcagctcaagcccgcagagttcggcgacaccgaggagtaccaccaatggcagttccggcagatcaagctcctggaggccggacttatcctgcacccctccctccccctcgaccgcctccactccgccgtgctccggttccgcgaggtcatgcgcgcaacagagatccgcgccatcgacaccagcaagaactccgacgtcatgcgcgccctaagcaacgccgtgcacgcgctctcgtggcgctctggcaccaccggtgccgctgtagaagcgtgccactgggccgacgggtacccgctcaacgtgctcctctactgctccctcctccaggccatctttgatctgagggagagcaccgtcgtgctcgacgaggttgacgagctcctggagctcatcaagaagacgtggccgacgctcggcatcaacaggatgctgcacagcgtgtgcttgtcgtgggtcttcttccagcagtacgtgatcacgggccaggtcgagccggacctcgccgctgcggcgctcgccatactcgttgacgtggcagccgacaccaagcacgggagccgtgacccgatgtacgtcaaggttctcctgagcgctctcggtgggatgcaggagtggtcggagaagcgccttctggactaccacgacagcttcgagaaggacatcggtggcgctgctacggaaggcatggagatcctgctgtctctggcgctcgccgcgggcaagatcgtcgctgaccgggaaggcgccagcgacgggaactttgctgtagaccgcgtcgattattacgtcaggtgttcgatgaagagcgccttcaccaacatacttgagaatggactcggcgaggttgacagcgtgatcatcgaccgcgacagcgaccctggctccgtcctgattcagctcgccagggacacggagcacctggccttgttcgagcgcaggaacttcagcccggtgctgaggcggtggcaccccgcgccggtcgcggtggccgcggtcaccctgcacggctgcttcggcgtcgtgctgaggcagtacctggccaaggtgaccatcctcaccgaggagctcgtccgcgtgctccactcggcaagcaggctggagaaggcactggcgcagatgacggccgaggacgcggcggactgcgccgacggccgggccaagggtatcgtgggcgacatggagcccttcgaggtggagtccgtcgtgatgggactgctcaaggcctggatggacgacaagcttgggcttggcagggactgcctcctccgagccagagacactgagagctggatacccaagtccaaggaggaaccgttcgccgggtcggccatggagctgatgaagctggctaggttgaccatcgatgagttctccgagatcccagcgagtgcgaaagacgaggtggttcaagatctcgtcgacggcctggagtcgatcttccaggagtacatcttctttgtggcgtcttgcggttcgaaacagaactacctccctccgctgccgccgctgacgaggtgcaaccaagactcgggcttcttccgactgtggaagaaggcggcgctgccgacgtgccaggcgccgccggatgccaccccgcgcggcggcggcggttcgcaccacgtcccgcggccgtccatcagccggggcacgcagcggctctacgtccgcctcaacacgctccactacgtgctgacccacctggaggccctcgacagctcgctgtcgtcctcgacctctcacctggaccgcgcacgcgccgcggcgcagtcgtcgatctcggccgtcgccgaggtcgccgcgcaccgcctcatcttcctggactcgcgccactccttgtaccagggcctgtacgcccgcagcgtggcggacgcccgcatccgccccgcgctccgcctgctgaagcagaacctgtcgttcctggtgtccgtgctcgcggaccgcgcgcagcccgtggcggtgcgggaggtgatgcgcgcctccttcgaggcgttcctgatggtgctcctggcgggcggcaacgagcggagcttcgtgcgcgccgaccacgccacggtggaggaggacttccggagcctgaggcgcgccttctccacgtgcggggaagggctggtccccgaggacgtggtggcgcgggaggcagagacggccgaggccgtcgtggagctcatggcacgctccacggactacctcatcgacgcgttcagcgtcgccacgtgcgactccatcagcgaggacggccgcgccggcgcaggcgggtgcacgccgctgccgcccacgacgcggaggtgggaccccgccgacccgaacaccatcctccgggtgctgtgccaccgcgacgacgaggccgccaaccagttcttgaagcgcacgttccagctggccaggaggcgagtcgatcgttgcgcgcagatagccgttgctccgctggtgcaccggacactgtccggtgacacaccagacagtccggtgaattatagcggagctgcgcctgggaaacccaaaggtgaagagttcgagctgaagcaccctggtgcaccggacactgtccg

SEQ ID NO: 41607 - DNA, 2631 bp, Zea mays
  Peptide Sequence Number=SeqID_83386
atggggggccactaccgctcgcgctccgcctccgcgagctccacggcgacgcggtccgacatcaccgagctcgactttgctgcggccggcctcgactgcccattcggccgcgtcgatgcactcggtcccgttgagctccgcgagaccgcgtacgagatcttcttcatgtcctgccgctcgtccggcccggcggcacctagcaggggcggcgcggcggaaggggaggtgtcgtcgcccgttgccggcgctggcgcgaggtgtggcactgggggcggcgtcatgggcagccgagtcaagaaggccctcggactcaggccgaggcggctgtcgccgatgatgacccgcacactgagccagacgtcggggccggcgtcccctggccgcgtgcggcggccgatgacgtcggcggagatcatgcggcaacagatgcggctcaccgaccagactgacgcgcgtctgcgccgcaccctcatgcgcaccgtcgtcggtcaggtcggcggggcgcctatgacagtcctcatctacatcttttccttgagaaatgacagagtctggtttgcacaggtgggcaggagggcggagacgatcgttctccctctggaactcctccggcagctcaagcccgcagagttcggcgacaccgaggagtaccaccaatggcagttccggcagatcaagctcctggaggccggacttatcctgcacccctccctccccctcgaccgcctccactccgccgtgctccggttccgcgaggtcatgcgcgcaacagagatccgcgccatcgacaccagcaagaactccgacgtcatgcgcgccctaagcaacgccgtgcacgcgctctcgtggcgctctggcaccaccggtgccgctgtagaagcgtgccactgggccgacgggtacccgctcaacgtgctcctctactgctccctcctccaggccatctttgatctgagggagagcaccgtcgtgctcgacgaggttgacgagctcctggagctcatcaagaagacgtggccgacgctcggcatcaacaggatgctgcacagcgtgtgcttgtcgtgggtcttcttccagcagtacgtgatcacgggccaggtcgagccggacctcgccgctgcggcgctcgccatactcgttgacgtggcagccgacaccaagcacgggagccgtgacccgatgtacgtcaaggttctcctgagcgctctcggtgggatgcaggagtggtcggagaagcgccttctggactaccacgacagcttcgagaaggacatcggtggcgctgctacggaaggcatggagatcctgctgtctctggcgctcgccgcgggcaagatcgtcgctgaccgggaaggcgccagcgacgggaactttgctgtagaccgcgtcgattattacgtcaggtgttcgatgaagagcgccttcaccaacatacttgagaatggactcggcgaggttgacagcgtgatcatcgaccgcgacagcgaccctggctccgtcctgattcagctcgccagggacacggagcacctggccttgttcgagcgcaggaacttcagcccggtgctgaggcggtggcaccccgcgccggtcgcggtggccgcggtcaccctgcacggctgcttcggcgtcgtgctgaggcagtacctggccaaggtgaccatcctcaccgaggagctcgtccgcgtgctccactcggcaagcaggctggagaaggcactggcgcagatgacggccgaggacgcggcggactgcgccgacggccgggccaagggtatcgtgggcgacatggagcccttcgaggtggagtccgtcgtgatgggactgctcaaggcctggatggacgacaagcttgggcttggcagggactgcctcctccgagccagagacactgagagctggatacccaagtccaaggaggaaccgttcgccgggtcggccatggagctgatgaagctggctaggttgaccatcgatgagttctccgagatcccagcgagtgcgaaagacgaggtggttcaagatctcgtcgacggcctggagtcgatcttccaggagtacatcttctttgtggcgtcttgcggttcgaaacagaactacctccctccgctgccgccgctgacgaggtgcaaccaagactcgggcttcttccgactgtggaagaaggcggcgctgccgacgtgccaggcgccgccggatgccaccccgcgcggcggcggcggttcgcaccacgtcccgcggccgtccatcagccggggcacgcagcggctctacgtccgcctcaacacgctccactacgtgctgacccacctggaggccctcgacagctcgctgtcgtcctcgacctctcacctggaccgcgcacgcgccgcggcgcagtcgtcgatctcggccgtcgccgaggtcgccgcgcaccgcctcatcttcctggactcgcgccactccttgtaccagggcctgtacgcccgcagcgtggcggacgcccgcatccgccccgcgctccgcctgctgaagcagaacctgtcgttcctggtgtccgtgctcgcggaccgcgcgcagcccgtggcggtgcgggaggtgatgcgcgcctccttcgaggcgttcctgatgggtgctcctggcgggttgtaa

SEQ ID NO: 41608 - DNA, 876 bp, Zea mays
  Peptide Sequence Number=SeqID_83387
atggcgccccggcccgtcgcggcgcgcgcgtctccgcccggcgcggccaccccggcgtgcccgccccgaccctctccctcccctgctggcgcagcccgcagccatggcgtggctcggcgcgataacggtctggttgaggagtccaaagaactcgcaggagaagaccctgagcagcagctggtggcgatgagaatggtggttttggtattgactatggtaatgatggctcgtcttagacacactgcacggaaatctgtcatccccttcttaccctctcgtctcgctgagcgtccgcttcgccgtccagtgactggtcagtctagccacttggagaggctacaccaccgcctgcacgaggatcgcggagtttacccggaccgctgggaggcgacctgcttagtgcgccgttcggagaacagtctccggggtgcggaggtctactcagagcactactctatctctgagcgggactcagctgaggcggccatgcaagatgccgcacggcgtgcgctttcgcactactgctcagtgctcggcggggtagtcgatggtctcaacctgaagtattacccccgtcgtccatccggcagcacaggaggcgtgattgtctcacctgttggcgaggacaatcctaggttgaacagcacaatcaacctagccgccgtgctaaacacagagctggaccatgcgttagacgagctgagtagggctcgtgctgagatcgccccgttgtgggcagagcgcgcggagcatcgtcacctggaggatggctcccccgctcccgtcgggactcagcacccgtaccgctcacctcggcgtggacaccaggcttatgacaaccccaactgcaggaccaagataaatttagaaccatag

SEQ ID NO: 41609 - DNA, 327 bp, Zea mays
  Peptide Sequence Number=SeqID_83388
atggcgaatgcaataccgtatgtcatttctcatgcatattcagtttatctactctcttgtatggtgtactgtttattccctaattcaaatggatggatgtatgtttgcgctcgcatagagaacggtctggttgaggagtccgaagaactcgcaggagaagcccctgagcagcagctggtggcaatgagaatgatgggttttggtattgactctggtaatggtaaagtgggtattccttccgtttggaaaagggttgtctgcattgcaaccactgctcaggagaagatgaagccatggaaggagacctccaggattctaagattatga

SEQ ID NO: 41610 - DNA, 1038 bp, Zea mays
  Peptide Sequence Number=SeqID_83389
atgacggtgatgcaccgggcccggtacatccagccattccagtgccgcctgcgctgcgtgcttcagattcagtttctagcggctcatgtcgctaagcccacaaagagtgcgaatgggcaggtctgccagatttgtggtgactctatagggagatgccagctgcggcagctcgtctcatccaaggctccatccgctctcggtccacggtcaacgctgcctcggcgcctagccaccttcgcagcggcgtcgtcctgctcctgctcctgtcccttgcgcgatggcaaccgccgcgcgcacggcgtcagggcctccgagtccaccgacaccgacgcgcctgcgttcgggccaccacgaccacgacggccgccgcggttcctgtgcctgcacgggttccgcaccagcggggagatcatgcggcgccaggtggtgggcaggtgggcgcccgaggtgaccgcgcgcctggacctcgtcttcgcggacgggccgttcccggccgagggcgcgtcccccgtggccggcgccttcgacccgccctactacgagtggtgccagttcgtcggcgaggatttcctcagctgcaggaacttggataggtgcttctcctacctcgaggagctgatggctagagaagggccgttcgacgggctgctgggcttctcccagggcgccggcctgtctgccgtgcttgcagggctccaggagcaggggctggccctcactggggttgctcaggtgaagtgcgtgatagttatagcgggggccaagatcagggcgccggcggcggtcgcgagggcgtttgacaccaagattacctgcccatcgcttcatttcattggtgaagaggactttgtgaaggttcacagcgaagagcttgtccgagcatttgcggacccacttgtcatacgtcatccccgaggccacactgttcctaagcttgacgagaagggtctccaaactatgctcacttaccttgacaagattgagagggagatatgggagcattcgtcaactgatgctgagatcgtgggctcaaattaa

SEQ ID NO: 41611 - DNA, 153 bp, Zea mays
  Peptide Sequence Number=SeqID_83390
atggggatggtggcgggctcgcacaaccgcaatgagttcgtcatgatccgccatgacagcgatgcgccgggcccgcgatgcttccgttgcgccgtgctaagcccacaaagagtgcgaattggtaggtctgccagatttgtggtgactctatag

SEQ ID NO: 41612 - DNA, 603 bp, Zea mays
  Peptide Sequence Number=SeqID_83391
atggtcgtgcgagtggaggttcctccgaagccgaggtcgagtatgtcttccatggccgaggtgagcccgagcccctgggtcgagcgaggcggaggttgttcggcagaggcctgggcggagtccgagccctggggtcgggcgaagcggagttcgtcgtcttctggggctgagcccgagtccgagccctgggtcgggcggagcggagttcgtcgtcttccggggcctagcccgagtccgagccctaggtcgggcggagcggagttcgccgtcttccggggcctagcccgagtccgagccctggtcggagtgtcgcaggcggcgctgtccttctgtcagactggccagtggagcggtggagtgacggcggtcacctcggctctgccgggggcgcgtgtcaggatagaggtgtcaggccacctttgcgttaaatgcccctgcaatttggtcagttggtgtggtgatttagtcaaggttgcttctgagcgaagccaaggccttgggcgagccggtgatgtgtccgccataaaaagggggcctcgggcgagacagaagtctctcgaggtcggctgcctttggccgaggctaggctcgggtgaagcgtga

SEQ ID NO: 41613 - DNA, 519 bp, Zea mays
  Peptide Sequence Number=SeqID_83392
atgacgaagaatctgtattacattgataccttcgacttgcctgaaggtgctgacgtgaaagttgtcggcgtttcgagacagggggtccctaagccgacgaccggagagatctgggcaccctgctggcgtgatgtcgtggctgtcggaggtgcggcggagcctgatggagggacatctattggagaggtcgagtccctgctgacgtcgtccggcttcctcggagtggcgcaggcggcgctgtccttctgtcagactggccagtggagcggtggagtgacggcggtcacctcggctctgccgggggcgcgtgtcaggatagaggtgtcaggccacctttgcgttaaatgcccctgcaatttggtcagttggtgtggtgatttagtcaaggttgcttctgagcgaagccaaggccttgggcgagccggtgatgtgtccgccataaaaagggggcctcgggcgagacggaagtctctcaaggtcggctgcctttggccgaggctaggctcgggtgaagcgtga

SEQ ID NO: 41614 - DNA, 327 bp, Zea mays
  Peptide Sequence Number=SeqID_83393
atggcttccattgaaagccatccgtggcttcgtatgaaaggcaatggtgtcttgcatcgtaagatagtcgtggcttgcaccgtacgactgaaaggcactcgacaaagaggactcggtgaattatacatcggcaacggcctatttgccgagtgcattatgtcgggcactcgtcaaagtctttacggagtgccaccaagtgctcggcaaagaaaagtcaccgtgatgacctttgtcgagtgcctgctggcctggcactcggcaaagaaagctccaatgggcctccacgtcagcctctttgtcgagagccacaaactggcactcgggtaa

SEQ ID NO: 41615 - DNA, 810 bp, Zea mays
  Peptide Sequence Number=SeqID_83394
atggcttccattgaaagccatccgtggcttcgtatgaaaggcaatggtgtcttgcatcgtaagatagtcgtggcttgcaccgtacgactgaaagcggtcgccgctatccgcctcccctcgccgccgccctcttctctctcacgccagatgcagggcgtcactgtgcactccccctccacttcttcgcgcggaagaatccgcccgcggcacggaccggaagcttcgcggtcgtcttctctcctgttcgaggcgactgcgtttcggcgattcgcgacgaggcgacggcgattcgggcgcgctagcgtgccggtccccgtcggagctgtggacgacgaagtggaggtggtcagcaaggtgctccgttcaagaccgaagacgaagcgggcgcaaatccggctccgtccagcacagttacgaatggcatcctcgaaagaagacaccatcaagtgtttggttaaagtacttgtcgactgtgtcgaggatgccacaaaatcccttcgtggattagtagatcatgcattagaccacatgcatgacgaagagatattagctagaaccctctttgccatgaaagaaaaacttgatttgcttcaccaagatgccttagaggcaaaagtccaagcttttcctgaaattgctaagtacgagggggatgacataagtgttgaaccgacatctccttcgacccctccaacagttactgaaccatctgtcgacgaagaggagttctactgcccggatgtgagtgacgagtggtacttcagcgactcagataggtcaactcgtaatagctattggaatatttattag

SEQ ID NO: 41616 - DNA, 393 bp, Zea mays
  Peptide Sequence Number=SeqID_83395
atggcatcctcgaaagaagacaccatcaagtgtttggttaaagtacttgtcgactgtgtcgaggatgccacaaaatcccttcgtggattagtagatcatgcattagaccacatgcatgacgaagagatattagctagaaccctctttgccatgaaagaaaaacttgatttgcttcaccaagatgccttagaggcaaaagtccaagcttttcctgaaattgctaagtacgagggggatgacataagtgttgaaccgacatctccttcgacccctccaacagttactgaaccatctgtcgacgaagaggagttctactgcccggatgtgagtgacgagtggtacttcagcgactcagataggtcaactcgtaatagctattggaatatttattag

SEQ ID NO: 41617 - DNA, 663 bp, Zea mays
  Peptide Sequence Number=SeqID_83396
atgcagggcgtcactgtgcactccccctccacttcttcgcgcggaagaatccgcccgcggcacggaccggaagcttcgcggtcgtcttctctcctgttcgaggcgactgcgtttcggcgattcgcgacgaggcgacggcgattcgggcgcgctagcgtgccggtccccgtcggagctgtggacgacgaagtggaggtggtcagcaaggtgctccgttcaagaccgaagacgaagcgggcgcaaatccggctccgtccagcacagttacgaatggcatcctcgaaagaagacaccatcaagtgtttggttaaagtacttgtcgactgtgtcgaggatgccacaaaatcccttcgtggattagtagatcatgcattagaccacatgcatgacgaagagatattagctagaaccctctttgccatgaaagaaaaacttgatttgcttcaccaagatgccttagaggcaaaagtccaagcttttcctgaaattgctaagtacgagggggatgacataagtgttgaaccgacatctccttcgacccctccaacagttactgaaccatctgtcgacgaagaggagttctactgcccggatgtgagtgacgagtggtacttcagcgactcagataggtcaactcgtaatagctattggaatatttattag

SEQ ID NO: 41618 - DNA, 390 bp, Zea mays
  Peptide Sequence Number=SeqID_83397
atgacgccggtggctctcagccccttacgacagcaaggagacgtcagcaggatcctcgccgcgctgccagctatgctcctacaggactcaggcgctcctccgacggccatgccatcacatgtacagggcccaagctctcccccaacggccacgttggcatgtgccaaaggttcacaacaaaccaatacaaagtcaagagaaagggttcaaaacaaaggagcaaagtataccgaaggcagccctggtctggcgcaccaccggacagtgtccgcaccagactgtccgatgtgccagcgaagcaacggctacttcgcgccaatggtcgtctgcgaaggcattaaatgcgctacagtgcgtgcctgcgcgcgcagaagtcagagcaggcactag

SEQ ID NO: 41619 - DNA, 552 bp, Zea mays
  Peptide Sequence Number=SeqID_83398
atgacgtcggttgctctcaaccccctacggaagcaaggaaacgtcagtaggatccgtgccgcaccatcagctatgcttctacagggcttaaggcacttctccgacggccaccggagcaacggctccttcgcgctaatggtcgtctgcgaaggcattaaatgcgctacagtgcatgcctacgcgcgcagaagtcagagcaggcgccagaaggcgcaccggacagtctacaagacctgtccggtgcaccaccggactgtccggtggccccacaagtcagagctccaaaggtcgaaccctaacggctgggtgacgtggctggcgcaccggacagtgtccggtggcgcaccggactgtccggtgcgccatgcgacagcagcctccaccaatggctactttggtggttggagctataaatacccccaaccacccaccattcattgcatccaagttttcagacttcaaaccccatacaagagctatagcattcaatacaagacacaaccaaagagatcaaatcctctcccaagtccggaatcactccaaacaaattag

SEQ ID NO: 41620 - DNA, 756 bp, Zea mays
  Peptide Sequence Number=SeqID_83399
atggaggacctgattccaaaatttgaggcatgtggtctctatcactttatgggtcagaggaccaacttcagtgagatggttgtgaaacaattcctagccactgctgagattgatatcgatgagcaatccatcacatggatgactggtttcaagaggtattctgcaacctttgttgaatttgctactgcaaatagtttggattatgatactatttcagctgggattgatttgtacactgaagataactttgaagaatttgtgcaattctatgagccagcaaggctgggaattccttggagggtcacaattcttctcaagagtggggataagagcaaaattagagacaagttctggaacattatccaccatgtcatgaatggtgagaacttagcctatgctccatgcattatggctctcatcaaagctaagaccagatttgaggggctttgtgagatagttcacactcgttttagacccttcaagaatgagattggattcctcactaggcctcttactcccttcctagatgatgaggaagaagctagtgatgatgcaggagaagctcctgaagctgatgcagaggagatgcctccttctccacctcgtcctcagcctcagcagtactggcagcctggtctaggctattttgacccttactttcagaacatgcagcaaggggtccagacccacatggatggccgcttccagggcatgatgacccatatgcaccagggcatggataacgaatcaagctga

SEQ ID NO: 41621 - DNA, 402 bp, Zea mays
  Peptide Sequence Number=SeqID_83400
atgaaggagttgctcctgaagctgatgcagctgagcagatgcctcctcctccacctcctcctcagccttagcagttctagcagcctgaacatgcagcaagggctccagacacacatggatggccgctttcagggcatgatgacccatatggaccagcacatggatgccatgcagtctcgctttgatgacaatcttgatgtgctgaactctgagctttcagaatttcgctctcacatccaagaaactattcatgatcctcttatgactagaatgaacaacatgcaacagagttttcaggataatatgggagtcttatctaatcaatttgacaacctgtccaccaatgaaagcattcaggataaccgtaagagtcaacagcagctccagactgacttcgggtag

SEQ ID NO: 41622 - DNA, 3426 bp, Zea mays
  Peptide Sequence Number=SeqID_83401
atggaaacaatcatacgtagattttgccgaatattgccccgaggaagaaggcagacacaggaacagccgaacaaacgtcttgttcatacagcaggaacgctgtcttcttgcagcgggaacgatgtcgtgtggcggcagcaacaggggtcttgttccaggcagcaggaagcaggaactggtgtcgcctggtccagcatgaatatcgacggggatgatgaaagctcaagaggggacaataactcgggtttttgcgacacaccaggagatacccgagcaactattgcttctaatgttgaccaggtgaatgggaggaacggaccaaatatggactctgctgcgcaaagtaaatctgaagagcttcatgatggaaatttagaacttacagagggcattagttcgaacaatgtggcgcttgtgaaagataatgtggtccttaataaagatccgacactagttttacatgagaagttaccggtggaatcttcatttggagatgctgatttgaatggcaaagtaatggcacatgaactattgcaaggtggtctgccaagtaagatagagctggagaataaagaaagttcaactgttgaggatggtgatgtattctcatttcaggctggaagacagaatattgacttccaaatggtggttgaaccttcagttgttgagggaccgaaacagcttagtagatttagtgacaaacctgaagatgcctctttggaagacttatttccaccaatcgacaaacggggagataatggggctgaaccttcaacatcaactactgtccaagaacttcaatataatggtgtacacaatggattcgtgaaggggctcaatgccagggtggagaagcaaaaagaaaatgatagcgagtccatgaatggtggaaaactaattgaatttgccatgcagctagaaaatattgatgcatcgggttttggtgaacatattcctggagagagtcttttccctctgcagtctgtggagtacagcaaaatagtagcacaactgaaaccaggggaaagtgaagatgtaatactgttggcgtgccaaaagcttctatcaatcttcagtcaccggcctgagcaaaaacagatctatatggcacagaatggtttcctcccgctgatggaactccttgaaattcctaaaaatcgtattttatgctcagttctgcagcttatcaacaacattgtaaaagatagtacaggcttcctggaaaatgcttgccttgttggccttattccagtggtgatgaattttgcagaaccaaatcgcccaaaggatgttcgggtgcaagcatccttgtttcttcagcagctttgtcaagccagggatatggttcatcttgcaattgacggcatttggcaggtctttaagctccagcactcaactccaagaaatgacttctgccgtatagcagcaaaaaatgggatgcttcctaggctggtgaatacactatatagcttgaacgaagcaacacgatttgcctcagtctcagggtcaggtgcttcagtaacacagaatggctcaaccccccgacgaagatctggccaattagacccttcagttcttgaaagttgcaaggcgaggctggatcatcatcattcatctggttctttgcaatctctacaagcagatgcagataagcaccacatattaatggactcctcgtcatctcctaggttcagcgacaaaacaagcagtaacttggagaggaatgagaacgacttggttattcggccacagaggcttagtgtttctgccggaaggacatctacagacagatcaccgaagcacatagaactagtttcaaatggtcataataacagtcaaaatgaccaggtccgacctctactgagtttattggagaaagaaccaccttctcgacatgaatcggagctgattgttcacgtctccttaaagtacatgtgtacctcgcttcagttatttgacttctctgtcaaatcgcatgaccaccacactgatgaaattgtgggtcgagatgctatacaggagggcaaggagccgatgaccatggatgtagacgtggtgtatggtgccctcggtgcgtatgccggtgatggcatggagggagacgactgtagcatcaggctcatcatcaagggcaacctcggcacccttgttctcgggtgccttgtcgagaatgtagtcggcggcctcaatatagaacagacactggtactggtgccacaaatgtatgcgcaggcgtgcccgcagcagcagtgcgcggtggagcaggcaatgctaacggtgctcgctggggaggccgggtggcctgatgcaccggaggtttctagacatggaagggagaatggccatctggactctagtataaaagcttcaaatagagttcatagtatgaaatatgcaccttcagcaagtgcgtctaatgaaggggcatcaacttctggagctgcatcacaaactgcatctgatgtggcacgtgaatatcttgagaaagtagcagatcttcttttggagtttgcacaggcagacaccgtggtaaaatctctgatggccagccaaagccttcttacaagggttttccaaatgtttaacaagatagagcctcctattcttcttaagattcttaggtgcattaatcatttgtcgggtgatcctaattgtcttgagacacttcaacgcacagatgcaatcaaacatctgataccgattctggagcttcgtgatggacctctggtttatcaaatacatagtgaggtccttaatgctttgttcaacctttgcaaaattaataaaagaagacaggaacaagcagccgaaaatggaatcatccctcacttgatgaaatttgtcatgtcagactcacctttgcggcagtatgccctgcctttgctgtgtgatatggctcatgcttctcgcaactctagagagcagttgagggttcatggaggactagatgtgtacttaaatctgctggaggatgatgcatgggcatgcacggcattagattctattgctgtttgtttggctcacgataatgatcacagaaaagtggaacaagcactgttgaaaaaagaggccattcagaaattagtgaagttcttccaagattgcccagaacagtattttggccatatattggacgctttcttgaagataatcacgaaatcttctaggctaaatacagcaatggctaccaatggtttaacaacattgctcattgcaagacttgaccatcgagaagctattgcccgcttgactctgctgaaactcataaaggttgtctatgagcaccatcctcgaccaaaacagctcatagtagagaatgacctccctcagaagctacagaacctcattgaagagcgcagggatggacaacggggcggccaacaagatgaaatggacgttctgtccttcagtgttgtttatatttag

SEQ ID NO: 41623 - DNA, 333 bp, Zea mays
  Peptide Sequence Number=SeqID_83402
atgtggaaagacagagtggagcatgccaaggatatatgggctctttacccagggcagactgcgcacttgacggtgaggcgaggagaggcaatgtctcatctgatggcattattggaggctaccaagattaccttggacaacagagaggaacttgtggtagacctgtccacagagatggtggaaaaggatctacaggagatccaggatatggaggccaacgaggatgtcgacatcgagggaggaggggagccggagcctgcctccagcttggacactgctggctcagggaggccaccttcccccgagtcgagcattgcctcgtttgctcactag

SEQ ID NO: 41624 - DNA, 732 bp, Zea mays
  Peptide Sequence Number=SeqID_83403
atggcttctcacggatcctcggaaggagggaacgcccagtcccacacggacggacttgcacgagagggtttcccccgtatcttgtgggaggtgcttcagggagcctgttacgcgacacctccccaggtgaggatgaccctggagcctcatcccctacagcctggctggcgttcgttggactccgagtctttcggataccgtgctaaggaccttatcgaggcgattgctcttcatgggctgaccaccttttgtggttttaaccccttagagctgtctactcatcccattggcttgttccctactgaaaaggaggacgacccaatgtggaaggacagagtggagcatgccaaggatatctgggctctttacccagggcagactgcgcacttgacggtgaggcgaggagaggcaatgtctcatctgatggcattattggaggctaccaagattaccttggacaacagagaggaacttgtggagcttgaggagctagtgggaaccagggagaataccattgaggttctcgaggatcagctcatcaacatgcagcagcaactcgcggaagctaaccaacatttggatatgcaccaccaggagatccaggacatgaaggccaacgaggatgtcgacatcgagggaggagaggagctggagcctgcctccagtttggacactgctggctcaaggagaccaccttcccccgagtcgagtgttgcctcgtttgctcactag

SEQ ID NO: 41625 - DNA, 183 bp, Zea mays
  Peptide Sequence Number=SeqID_83404
atgtcggcgtggacagaggtggagtcggctcaaaaagaggcttcgtcggcctgggagcacgtggctcccctggccgaggaggtgcagcggcggcggctggagcttggccaggaccccgctattgaagcagtcgaaaagcgtgaaagacgttctggcaaaagacttttccgaggaaaattttga

SEQ ID NO: 41626 - DNA, 1170 bp, Zea mays
  Peptide Sequence Number=SeqID_83405
atgcccgcctcgcctgccaaaggtgtcgcctgccctgccgaggagttaatgcgacgggacgggcgattcgcggggcggccgttgcacgtgcgcgagccgttcgaggaacggaacacgggcgtgtcgtctttactccgtgggagagggctctcctgccgcttcaggaggggacgcgagcctgcaggagattggaccactgcttccacccgtcagctgctgcaattactgctgggctgccttgagtcgcggcactggttccgcagtcgagaagacgcgacattggccggttttggcttcttctatttccggtctgctcgcatgacatgtgggacccagcccccgcgtcggagggtgggagccctggagctcgtcggtggagactttgcccgtgacgcttggaatgcgagtggggagagccgcctttataaaggggtcgatcccccgggcagtagacatgcctccgcactctcctcatgcattgcgcccttccaccttccgagcccccagatggggagcacccgtgttgccttcgtcttaccgctgttggaggagcggataatcaccagccttgtggtggggagaagcaagccaggctgcagcctctgccccgccttcagcttcaaggatgttcatcatccgtgctggggaggggggcgcaccgagttggggcctgcctccgcgtgggccggcgacccgcttcttcctccggcattcgggggagaagggcatcctccagctctgcggaggaggcggcctccagccatgcgggggaatgcaaactgctgctgcctaggcagggtgcagctatccgtcctcccctcgggcgacggtcgtgccgtgtgcgggccggccgcatccaggtcctccctgcgccgtcggctgcattgggaggtcgcacaacacgtcgtacgccgcgagggcggtactcgtgttctgggacggtcccgttctcgttcttatggcgagaacgggagtgaggacctgccggtgcgctttggggcggccgccgctcgctggtgcggtgttggtgggcaggtggccactgtcgttggtgctgaggtggtggtcgccacaggtgaggctgcctctgccgaagcggttgcttccgccaacgagaccgtcagcgccaactgcgctccggacctccggctctttggctttaatggctag

SEQ ID NO: 41627 - DNA, 837 bp, Zea mays
  Peptide Sequence Number=SeqID_83406
atgaacatccttgaagctgagggcggggcagaggccgcagcccgacttgcttctccccaccacaaggctgggttcccaccctccgacgcgggggctgggtcccacatgtcatgcaagctgaccagaaatagaagaagccaaactgctgcacgcgaagcagacgccccgcgaatcgcccgtcccgtcgcattaactcctcggcagggcaagcgacacctttggcaggcgaagcgggcgtcgtttcacctccgccatgatgaccgcgtcaaaaaagggaccgggaaaggggatatttcgaaaaggatccttctcagcaaaggaaacggccccccgagccctcctacttatcaggggctggcccctcggaagggttcgacagccgccccagagcactcgggctccgagcccattactgatcaggggttcaaaggctggcccctcggaagggttcgacagccgccccagagcactcgggctccgtgccctttactgatcaggggttcgaaggctggcccctcagaagggttcaacagccgccccagagcacgcagagtgagggatgactctgggtacgtccgttacatggccgaggctcgggctacgctcctgaggtaccctaggacattttcgagaccagcaggagcgatttgtaacggaatcccaccagagggaggcatcgagccctcggaccctatcgaatgggtccgggtccggcaaatcacctgcaggcttcgtcgtgaaagcaaccttggccaaatcgccttaccaaccgaccgtgtcgcaggcacattcaatgcgaagatcgcctggcaccttatcctgacacgcgcgccgtag

SEQ ID NO: 41628 - DNA, 798 bp, Zea mays
  Peptide Sequence Number=SeqID_83407
atggcggtccaccctttcacccgctggtctgggcaaaagtggaggactgctcgtaaccgttgggcagttgtgcgcaccgcgcgcggcgccatcgttcggcttcaaggattttcatcaggcagcccggccgcatcccctcgccggtggtcacccaagacggtgaccaccagctcctgggtggggaggagcaagccgggctgcgatcttggtcccgccctcagcttcaaggatcttcatcatccttgctggggcggagagcaaggtgagccggggctctacctcccgcacgggtcggcaggccacctcttctcccacctcttctcccagcttctcacagctctgtggaggaggcgtcctccagccatgccggggaaggcgaactgttgctgcccagctaggatgcaacattccgtcctctgtcctcgcttttgtggcgaggacgggagcgaggacctgccggtgcgctttggagcggcccgcgctcgctggtgcggcgttggtggacagacggacgccgccgtcggtgctgacgtggtggcagctggagaaagcttccccaccgtcgaggtcgtcagcgccgcctacggaccgacccccggctctttggctttaatatctggttcgtgtcccttgagtggggacgcggacgagagccttcccggtggccgcgtccgtcctgggaccatggctgctgctgcagaggtcactggcgagtcacccggagcttgtcgccctgcaggccctccggtgtggaggttgttcataccctcggggacggaaccggagttccgtttgtaa

SEQ ID NO: 41629 - DNA, 984 bp, Zea mays
  Peptide Sequence Number=SeqID_83408
atggcggtccaccctttcacccgctggtctgggcaaaagtggaggactgctcgtaaccgttgggcagttgtgcgcaccgcgcgcggcgccatcgttcggcttcaaggattttcatcaggcagcccggccgcatcccctcgccggtggtcacccaagacggtgaccaccagctcctgggtggggaggagcaagccgggctgcgatcttggtcccgccctcagcttcaaggatcttcatcatccttgctggggcggagagcaaggtgagccggggctctacctcccgcacgggtcggcaggccacctcttctcccacctcttctcccagcttctcacagctctgtggaggaggcgtcctccagccatgccggggaaggcgaactgttgctgcccagctaggatgcaacattccgtcctctgtcctcgcttttgtggcgaggacgggagcgaggacctgccggtgcgctttggagcggcccgcgctcgctggtgcggcgttggtggacagacggacgccgccgtcggtgctgacgtggtggcagctggagaaagcttccccaccgtcgaggtcgtcagcgccgcctacggaccgacccccggctctttggctttaatatctggttcgtgtcccttgagtggggacgcggacgagagccttccggtggccgcgtccgtcctgggaccatggctgctgctgcagaggtcactggcgagtcacccggagcttgtcgccctgcaggccctccggaaccctcggccgctcttcgatgagccgaagccggaggtagcggtgtcagtgtggacagaggcagagttggctcgaaaagaagacttcgtcggccggagcctggccgggccgtccactggcgggaccgacgccggagttgagttgccgaggccacgagccgggctgatgtcctcgggggacagctggctgaggcttcgaggtggccggccgagccgtctgctcgggctggattcctag

SEQ ID NO: 41630 - DNA, 330 bp, Zea mays
  Peptide Sequence Number=SeqID_83409
atgtcaaccagaagaacacataaggttccatgtgtgcaagttgcttcttctgttgacactatactatctgagtctgttgtgcgggcggcaattatgcaattttacccaaacagaatcagatgcaccatcttgggtaaaacacacagaaagaggtttaccaacaagtggttacactttactgtcgggggtagaagaccattcgtcaaccaacttcatagagggagggggcctaaaaaggtccagttcaccatcaagtgcttctcccgctacatgagaaggtccggcttccatcctgacaggatccgcagggacattcgggtgcagttgtga

SEQ ID NO: 41631 - DNA, 657 bp, Zea mays
  Peptide Sequence Number=SeqID_83410
atgtgtgtgcatcctcaggaggcccttggtttcattgtggtgccatcggttttagtcataacaccattgctagacgtaaccaataagaaatctcgcgtgacactaatggattgggttagggtgacaatatacaaagagatactccaccactttactgtcgggcgtaggagaccatttgtcaaccaacttcatagagggagggggcctgaaaaggtccagttcaccatcaagtgcttctcccgctacatgagaaggtccggcttccatcctgacaggatccgcagggacgttcggttattcatggctgagctaagctcctccacgcgggctcgagctttggcttccttagcccagatccccgataggatcgttgctaccactgctactttcttcatgtcttggggcaagttaatggcggggtacgccaatggatctagtagatttgcgcgcggtctttctgagaagggctttgcttcgataccagctatgacggaatctctcaagtcattaggcccacctacagttgtccttgtccaacagacatcagacaaccctgtagatgttcctgaatcacttgacaagttcggtatcttctttcttacctttccaggaacgtttcacccgtcttgcagacattatagaacatcagagatatag

SEQ ID NO: 41632 - DNA, 246 bp, Zea mays
  Peptide Sequence Number=SeqID_83411
atggcttatgtatctgccagggatgaaccaggacagatgcatttactggagatcacactgcccatgggctatcccgaaagtcctccttcaatctctgcagcgtccacaaaggcggatggtgcacggttctgccggttccgcatcccgccagattgggacgaattcggcatcggctccaccaaaggctccacggatttggcatcagctccacagattttcggtacccatgctttgtttagccagtga

SEQ ID NO: 41633 - DNA, 1110 bp, Zea mays
  Peptide Sequence Number=SeqID_83412
atggcgaaggtgacagacaagaagaagactaagaaggcactggggacaatatacgaggaggggagtcctgagcctgccaatggcgacgacgatggagctttggcactgccagagacaggattggggcttagcttgaatactgacggggtgctcaaggcgtggtgtggcagaggctctgcgtttgctgatggcaatgggcctgacttgccattgtcccctgctcatgtggtaggtcttagattattcaacattgatatgattagggagcatccccctccttgtcaagcaactcacaccattacaagatctacacgagatggcatctgcatcgccaaggcctcgctcaactcagcgcgatgtgtcgctcaggccagtcacactgctctgctgtttttcaaagaacaacctcttgctgcgtcatcaaggggtagaccagtctctgatgattcgtgtaagaatccttgggagaaagcaagtggtcctggaaatgttaccaggacatctctgaccccacaagggctgcaagcacaagcaggttcttctacatgccaccattcaatggcagatgttcagggggcacgttcatggacattagagttaactgatgtctggtctggtatcaaggaagagatgtttttaactgtgtttacgctaatcaagctaatgaatttgagcactgtgtccgggctgaaccgtggcctggcagcgagccaggaggacctggaccacacggacgcggcggcggggtgccccgttgacacgcgcacggtcaacgtgctcatcaggggctacgggcagtctttgcatctcaacgacgcgctacgcctgttccaccagatgcggccactgtactggtgcgagccggatgcattcacgtacagctacctcgtgcacgggctgagcgcgcagggccgcaccaggaacgcgtgggagctgttcgatgaaatgcgcgggagtggtctcctgggaagccataccaggtacttgcagatcctgtcagatcccactaaatcatatctaaagagaggtgctggatgtggtgcaggtcctgtcagataccgtggtgcagttcaagatgatctaatccccatagccctatcctttgtgtga

SEQ ID NO: 41634 - DNA, 465 bp, Zea mays
  Peptide Sequence Number=SeqID_83413
atggcgaaggtgacagacaagaagaagactaataagaagtcactggggacaatatacgaggaggggagtcctgagcctgccaatggcgacgacgatggagctttggcactgtcagagacaggattggggcttagcttgaatactgacggggtgctcaaggcgtggtgtggcagaggctctgcgtttgctgatggcaatgggcctgacttgccattgtcccctactcatgtggtaggaagggtgctcccagccccttggcccctcccaaccctcgtcgtcgtaacagagggtgctgcgacaagccagcggatgagcgtggcgatcccgctggagcagtccatcacgccggtgcttcaggactttatgaatctcaacatattctatctaccagtgtattactatggagagttctatgatttgcgctacagcctcgtcatcgactcccacgtccatgagaccacctag

SEQ ID NO: 41635 - DNA, 1308 bp, Zea mays
  Peptide Sequence Number=SeqID_83414
atggcgtcgtcgtgcatcccggccggcggcatccggctgccggacctggagatggtcaaggccgcgccgccggcgcactccgcggcgtcctccacgctctcggaggcgtccagcgcgtccgcagtctcctcgtcggccacctcgtcatcggtggcgtcgctgtcgctcaagcgcccgcgcacgccgcggaagcggtccagccagacgtacaacgaggcggcggcactgctcgcgtccatgtacccctccgtcttccccgtcgccaggggcggcgccgcgccgcgccgcctcctcggcctcgcctccgcgctcgccgacgactcgtcctgctccgacctcctcccgccgttcccagtccccggcggccacgccgccttcctcctccgcgacctgacgccgcggatccccgccgccgaaagctgcccgtcgcccgctgccgtcagcagcgtcttcagcgagttccgcgacccggcgccgtctcctgcgacccctgacgacgctgcggcggcgcctgacgagcgcagggatcttggcttcgacgatgacgacggtttcgacgccgattctattctgtgcggcgtcgaccagagcgcggccgagggcatcgatggcatcatgggtaagctctctatggaaaacaacggggcgtccgtatcaggctcaagcgttgactccaacatgcccggatccaagatgcacccctacctcaggaaccttatggtgctcgggctcagcttccggcaggatcagaatatcatcatcaatcaagcgctgaagcggcatagtgtcgatcctgaatggtggatgtgccctgccatacctgtgaaagacattaccccggcaccaccgccttcagtggcaatggccaaggtgacagacaagaagaagactaagaagaagtcactggggacaatatacgaggaggggagtcctgagcctgccaatggcgatgacgatggagctttggcactgccagagacaggattggggcttagcttgaatactgacggggtgctcaaggcgtggtgtggcagaggctctgcgtttgctgatggcaatgggcctgacttgccattgtcccctgctcatgtggtagttaaacatgaagacaatgatctcttcccaaagaatggtaccggcgctgttatcagggaaggcaacattctgaagatgcagcgcaagcagaagccatgcactcccctcccctccaacaagcagagtcggtactaccggcctcgggtcaaggggaggtttgtcagcaaggcttgtttcctccagcgacagcaagcgttagagaaggagagctag

SEQ ID NO: 41636 - DNA, 231 bp, Zea mays
  Peptide Sequence Number=SeqID_83415
atggggaagacggaggggtacatggacgcgagcagcgccgccgcctcgttgtacgtctggctggagaacgcgagcggcgggagggggagcagtccggcagcctgcgggtgtgggggagattggatttttgttggtgattttggtgccgcactgcagattaagagagaaatttcggttggcgtgtcatttgaccagggcccggtcctagcatttgggccttggggggtgtag

SEQ ID NO: 41637 - DNA, 594 bp, Zea mays
  Peptide Sequence Number=SeqID_83416
atggagttgatcagactccatacacctctaccaaggaagcgaggcagggtaccactacgaggcctttacaaagttccactagcttcagactacccgctacagtttataggaagctccaatgcaggaatcccttgcaggaccgccatcgcagcaaaatcctcccgagggcctccctacactgaccactcccctactgcccttgcccctttcgggtcattcattgggttgtatgcaccgagagccggatatcacaagatctatggtacggatgcatcaagggaaggggcgagtggaattggttgggagacgtccacggactccgcggaagcaccaccgcagatcacgcgctctgttagcgtaagcatcggtgaaggggatgaagctgccaaggtggccccaccagcagcggaataccgacgccagaaagagcaggtcaccaagccacgatgggcgcccgaccaagtagcagggaggcagacaagtggggtctcaagcgcagtgacacagttcgcagggaaccagtgcggaataggcgaggggagaccgcccgactgggcccacctgtcggcaccagaatcccagaagcaggagtag

SEQ ID NO: 41638 - DNA, 513 bp, Zea mays
  Peptide Sequence Number=SeqID_83417
atggatgggcagaaggagaggaggtcgcgcgtcctagatatatggcctcgagccccagggatccgcgataaccggttatggtttggccgtggaactcacgcgaagaccgccgatggctcaggcgcgcgcgtcctgcatgatgaactcctccacccgtggcggacccgctatctttctccctcgcctatccttccacgacggcggcttctttgtctgttaggatcgctggctcagcatgatgtctttggacgagcggagatcacgcgctctgttagcgtaagcatcggtgaaggggatgaagctgccaaggtggccccaccagcagcggaataccgacgccagaaagagcaggtcaccaagccacgatgggcgcccgaccaagtagcagggaggcagacaagtggggtctcaagcgcagtgacacagttcgcagggaaccagtgcggaataggcgaggggagaccgcccgactgggcccacctgtcggcaccagaatccgagaagcaggagtag

SEQ ID NO: 41639 - DNA, 473 bp, Zea mays
  Peptide Sequence Number=SeqID_83418
gatcacctattcacccccctctaggtgctctcaccaatgctcactccgtggagcactatacccaggttaagcttaagaagcgcggctccgacaccaagtaccttgccaccgtcctggccatcgacacagagtgcgacattgtccttcaggatgtagttactgttgttggctatccaattggaggagataccatatccgtgacaagtggagtggtctctaggatagaaatactttcatatgttcatggttctacagaacttctaggattgcaggctgcaattgagtacattcattctttatcaagggcacagcctgcacgttctctcaatggtgttggcctttgtcctgctagtagatcacttagcacccatgccgccactacgtcaagcacaccacagttgaaagcacaccacgtcaagcacccaggccgccactacgtcaagcaaaacagaagacgagaagaactgatgtag

SEQ ID NO: 41640 - DNA, 1104 bp, Zea mays
  Peptide Sequence Number=SeqID_83419
atggacgatccctcctccgcctccaacaagcacaagcacaagcgggggcgcaagcccaaggcatcgccgccctcccccgaccactcctccccctctccctcggtcgcccccgctccggctgggcgccgtggccgcaagccgcgacgtcatgaggccctcgccgacgtggacgccacgcgtcctccatctccaccccgccgcggggagccgaagccggtggcaaacggaggcgatgtggtggcagtggcagagtcaggccccgcgagctgggatgaggtggtgagggtagtgccatgcatggacgctgtggtcaaggtgttctgcgtgcacacggagcccaacatctcgctaccgtggcagcggaagcggcagtactgctccagcagcagcggatttatcatcagcggccaccatgtcctcaccaatgctcactccgtggagtaccttgccaccgtcctggccatcggcacagagtgcgacattgagaaatacaccaagatcattttttatggtatctatgaaacttctgaggctatagcatcatttgagttatggcatggagtttcacctattgagtttggaacattaccagtccttcaggatgcagttactgttgttggctatccaattggaggagataccatatccgtgacaagtggagtggtctctaggatagaaatgcttttatatgttcatggttctatagaacttctaggattgcagatagatgcagctattaattcaggaaattcaggtggcccagcttttaatgataggggaaaatgtgtcggtatagcttttcagtctcttaaacatgaagatgcggagaacataggttatgtgataccgactccagttattacacatttcattgaggactacaaaaatctagagaatacacaggctgcaattgagtacattcattctttatcaagggcacagcctgctcattctctcaatggtgttggtctttgtcctgctagtagatcacttagcacccatgccgccactatgtcaagcacaccacagttgaaagcacaccacgtcaagcacccaggctgccactacgtcaagcaaaacagaagacgagaagaactgatgtag

SEQ ID NO: 41641 - DNA, 747 bp, Zea mays
  Peptide Sequence Number=SeqID_83420
atggcccgtactctctctccctgcaagccagccagaggcgaccgtaacaccagggcagccggctacaccgggcagagggtctcacctacagcggacagtagcacgtcggtagaatcagtgctccgaggagattcaagtggtgcagaaccccaacccgcccaggcaaagccccgccgtcgagcacccggtggcagcgttgcacaggagccggacgtcgacaggcagaggattcgcggcggctttgagctccccagtactacccatgtcaacggcggcacggagacaaaatcgaccaccggcgaagaatctcgtagagtaccgaggcacctatgcacgctgatcccaccacagggtaccaagaacccaggcggtcatctcggcagtacccaggagggcgccatgccgccacacgccaagctccaggcttccccgctggaattcgaacgcccgcgccgcacaactccgaccccaacacacgttccttgctctcgttcacccgccacaagccatgaatcgcctcggagtgagtcgtttgaggtctggacatcgccttatcggaacgatgaggcgaggaggggtcagctcaggaagggggcgccgcaatccatggattttatggggaaggagtcggccggtggaagcggatcacgccctggtttctcgcggcggctggtgttgttcatcacgggcaggcagataaggagctggcgatttggggcccaccgggcagtgacatggcgcggttga

SEQ ID NO: 41642 - DNA, 1110 bp, Zea mays
  Peptide Sequence Number=SeqID_83421
atgacaaccgcgtttgtgtcacgaccgccaccgtgtaccagagggaatgaggcccacggcgttttgaccagaagctcgatagtggagacggcggggagcatccgagaggaaccagaagcggagcaccacttatgcgtggacaaggcccatgactctctacgcagttacttgacagaggtgcttggccctcgtgtctgctaccctttgagtaggggcactgtcacacccggctttaaggaacaaagccagtttataggaagttccaatgcagggttcctggctgaccgccatcgcagcaaaatcaaccagggacctccctacactgaccactcccctactgcccttgcccctttcgggcctcatttactgaaatgtgcaggggctaactcgcaagactgccaggacacagcgaatagtcacacatggatggcggggcagagggtctcacctacggcggacagtagcacgtcggtagaatcagtgctccgaggagattcaagtggtgcagaaccccaacccgcccaggcaaagccccgccgtcgagcacccggtggcagcgttgcacaggagccggacgtcgacaggcagaggattcgcggcggctttgagctccccagtactacccatgtcaacggcggcacggagacaaaatcgaccaccggcgaagaatctcgtagagtaccgaggcacctatgcacgctgatcccaccacagggtaccaagaacccaggcggtcatctcggcagtacccaggagggcgccatgccgccacacgccaagctccaggcttccccgctggaattcgaacgcccgcgccgcacaactccgaccccaacacacgttccttgctctcgttcacccgccacaagccatgaatcgcctcggagtgagtcgtttgaggtctggacatcgccttatcggaacgatgaggcgaggaggggtcagctcaggaagggggcgccgcaatccatggattttatggggaaggagtcggccggtggaagtggatcacgccctggtttctcgcggcggctggtgttgttcatcacgggcaagcagataaggagctggcgatttggggcccaccgggcagtgacatggcgcggttga

SEQ ID NO: 41643 - DNA, 363 bp, Zea mays
  Peptide Sequence Number=SeqID_83422
atgccatccgcattatgctttggaggtattcactgcatgccctgcacagatgtgaccgttttgaaaaatatactgataattcctgggcgtcccccccaatgggtgtgggcaagggacggcttgcgctccgagctcgagggctcggatgagtcagagtactcctcggatgaggaggactcggacggtggcggcgaggacgaggacggcgacgacgacgacgacgacgaaggcggtggcggcggtgacggtgacgacagcgacaggggcggcagcagcggcagcaaggacggtgacggcggcggcagcaggggcggcaacggcggtggcggcagcagcaggggcagcaacagggccagtggctag

SEQ ID NO: 41644 - DNA, 426 bp, Zea mays
  Peptide Sequence Number=SeqID_83423
atgggtgtagcccccgaccttcaaatggattttagaggaaattggcacgacgctattcgcattatgctttggaggtattcactgcgtgccctgcacagatgtgaccgttttgaaaaatatactgataattcctgggcgtcccccccaatgggtgtgggcaagggacggcttgtgatcgcggttggaggtgagcggttgccttctccttctataaataacgccgttgtctctctggctttttcacatctctcgctgttctctgttgctttcctttcttctctcccttctgcttccaccatgggcaagaacaacaagcgcaagcgtgagccaactcctccatcggaggagtttggtgactcggagtactcagaggaggagttctcctctgagtctgagggttctctggctcccatccccctccgttga

SEQ ID NO: 41645 - DNA, 1782 bp, Zea mays
  Peptide Sequence Number=SeqID_83424
atgtcgcagccggcggcgacggtggccgcggcggcgcagccgcagggtcgcggccccgcggggcgccagggcggcctggggcagagcatcgcaggcatcgtgcggatggcggtgttctggtactttgcgtccaagttcttcgggcccaagcgcccacccgcggaccccgggatgctcatgtccaacctcttccagaagggcgagccaatggatatgtggatgtatttgtcagagaacgagaagttcaacgattttgctaatgaggatgcacttatttggcacgaggcaaacataccatatgcagtctggggacctaccagtactagaacacggtcattaacgtactatccgtcagaggctctcaagcataatggctctttgtatgctcatgtttacttcgccccgttcggggttatcctgtggaccctacagatccagaatatgagcagaaatcttcgtttgggaggacccatcgtatctgttgtggcattcttgccaaaatcaaaagctggtaaaaagaagagcttgcttggagattcagaagagcctgaagagaaagcaccgcgcaataaggagaataaagaatctgaggataaagatgagggtccgactgaatatatatcttattggaaaccaaatgtaacaataaatcttgttgaagatttcacacgcttgacagatctgaatgtggatccagttacgggcgattattatcctacagtattcttcaatgagttttggctattgaaggataaattaatagcgctcaacgagactgtggaggaattgcccttaaaccttgaagttggtcctattagcatgaccaagtggcaattatttttacagattgagcagtccttccaggttcatcgtagttatggaagtatgcttgaaggcgaggctgatgaactcaagagggtttttcttgaaggaaatccttatcttcttggattgactatggtcgtttctctattacactccctgtttgattttctggccttcaaaaatgatatccagttctggaacaagaacaagtccatggaaggtctatcggcaaaatctgtggttctgaattttgtgtgtcaactagttgttttcctgtaccttcttgacaatgacacttcatggatgatccttgctagctctggagttggtgtgtgcattgaattttggaagattggaaaggcaatgcatattgaggttgatagaagtggaaaaattcccatgttgaggttccgagaccgtgaatcatatgcacagaataagactaaagagtacgatgccattgcaatgaagtaccttacctatgtacttttcctccttgtggtcggtttctctatctattcacttaagtatgaaaagcacaagagctggtactcatggatactttcttctatgacaagctgtgtgtacatgtttggtttcattatgatgtgcccccaattgtttatcaactacaagctgaagtctgttgctcatatgccatggagacaaatgacctacaagttcctcaacactataatcgatgacctttttgcatttgtcatcaaaatgccaatgcttcatcgtctctcagttttcagagatgatgttatcttcttgatatacctctatcagaggtggaagtatccggtcgacaagaagcgtgttaacgagtttggcttcgggggcgaggacgaaccggcagcccaggaggctgtggaaggaagtgattcagctgcagcaccccagctaacggaggccgggtccgagacgagtacggaggacaagaaaaccaagtga

SEQ ID NO: 41646 - DNA, 999 bp, Zea mays
  Peptide Sequence Number=SeqID_83425
attgagcagtccttccaggttcatcgtagttatggaagtatgcttgaaggcgaggctgatgaactcaagagggtttttcttgaaggaaatccttatcttcttggattgactatggtcgtttctctattacactccctgtttgattttctggccttcaaaaatgatatccagttctggaacaagaacaagtccatggaaggtctatcggcaaaatctgtggttctgaattttgtgtgtcaactagttgttttcctgtaccttcttgacaatgacacttcatggatgatccttgctagctctggagttggtgtgtgcattgaattttggaagattggaaaggcaatgcatattgaggttgatagaagtggaaaaattcccatgttgaggttccgagaccgtgaatcatatgcacagaataagactaaagagtacgatgccattgcaatgaagtaccttacctatgtacttttcctccttgtggtcggtttctctatctattcacttaagtatgaaaagcacaagagctggtactcatggatactttcttctatgacaagctgtgtgtacatgtttggtttcattatgatgtgcccccaattgtttatcaactacaagctgaagtctgttgctcatatgccatggagacaaatgacctacaagttcctcaacactataatcgatgacctttttgcatttgtcatcaaaatgccaatgcttcatcgtctctcagttttcagagatgatgttatcttcttgatatacctctatcagaggtggaagtatccggtcgacaagaagcgtgttaacgagtttggcttcgggggcgaggacgaaccggcagcccaggaggctgtggaaggaagtgattcagctgcagcaccccagctaacggaggccgggtcccaggtcgaggacgaatcgacgtattgtcaccaccagtgcactatggtggaggactggatgggctgcgaacgagtggacgaatttgcggtgaggtga

SEQ ID NO: 41647 - DNA, 1044 bp, Zea mays
  Peptide Sequence Number=SeqID_83426
atggccactcgacgtctacgtccacagcctacagtcatggtgttgatgtctcctttccgaccctccccttcatcattcccggtcggtttcgccggcagattcagaatcgatgggatttcacgggtcaagaggctcacccgagtcgtggcagaggaagatgaaggtcaccctttgcttccttcgtcgtatgtggttaaattcagcgagattatattccctaccgatttcattgttggtgctgctgatctaagttggatcttgaaatactggcgcatatttaatactactaggagggttagttatcggtggatatcgcagcttattgcactccttatttatgcagttctactcatgcctagtttcataaaagttgggtactactatttcttttcaagacatgttattagaagtgtaatctatggagaacaaccaagaaataggttggatttgtacatacccaaaggtaatagcaaatcaagttcagtagtggcattcgtaaccggtggagcttggatcattggaaatttccctcaaggaacaataagcgacatggtcagtgatgcttctgaggcgatatcattcatttgtaacaatgttgttagctttggaggggatcctaataaaatctacttgatgggtcaatcagcaggagcacatatcgcggcctgcgctctcttagagcaagcaattaaggaatctaagggagagaatacctattgggatgtggctcaaatgaaagcatattttggtctatctggtgggactatctaccgcacaaacattgacaagaaggtcactgaagcagatctaaagttattctttgagtccatatgtggtgagctaaaagtttgcagaaatggcaccatcaagatcgatctggagaccaacaagatcatggacttcatcaagtttgacgtcggcaacgtggtcatggtgaccggcgggaggaacaccgggcgtgtagcagtgatcaagaacagggagaagcacaagggcagcttcgagaccatccacgtgctgtttggagctttttgctatgtctag

SEQ ID NO: 41648 - DNA, 327 bp, Zea mays
  Peptide Sequence Number=SeqID_83427
atggccactcgacgtctacgtccacagcctacaggtagtcagacagtcagtcatggtgttgacttggaggaaggaggtggtgggtgtctcctttccgaccctccccttcatcattcccggtcggtttcgccggcagattcagaatcgatgggacttcacgggtcaagaggctcacccgagtcgtggcagaggaagatgaaggtcacccttcgcttccttcgtcggttagaacaatttgaattaggtcgtgttagagtctggagtccaaacaaacgcctcaatttgtccatatacaaaatttggctcggcttccatcaatgtccataa

SEQ ID NO: 41649 - DNA, 276 bp, Zea mays
  Peptide Sequence Number=SeqID_83428
atggggaagcctagcccatcactcctcatgctcctcctctgccgagtgaccgcacttgtacccaccataaccggaatgggagaccacgtctcaggtcgcgtgaggggcaaagtctgcgggcaggttcactcagggcttgccttccaaagctggggcaggcagatcctcgatggcaggctctggtgctggctcctgggctacctcctgagcaactccttgctccggaacgaggatgtattccccgtcagcgagattatagtctatcgaatgcaatga

SEQ ID NO: 41650 - DNA, 258 bp, Zea mays
  Peptide Sequence Number=SeqID_83429
atggggaagcctagcccatcactcctcatgctcctcctctgccgagtgaccgcacttgtacccaccataaccggaatgggagaccacctcttaggtcgcgtgaggggtaaagtctgcgggcaggttcactcagacaaccaatccccatggatcgttgtccacagaccaacatcattatggtatgaaaatggatacaaccaatttcctgacctcgcgcgagtgctagaaaaatcactcgacttctaccgagatccctaa

SEQ ID NO: 41651 - DNA, 171 bp, Zea mays
  Peptide Sequence Number=SeqID_83430
atggaaaaggcgtgcttgtctgttgttgcattagaggatacatctgacatggtgttagaactcggaggaaatttcaaagaaacattaaggcagttgggtggccttgatgatatttttaatgtcatggtgaattgccattcagaactggagtatactggagctgcaatctga

SEQ ID NO: 41652 - DNA, 828 bp, Zea mays
  Peptide Sequence Number=SeqID_83431
atggagataaattcattagcgactgctcctgacagctcttcattgaataaggagaacttgtgctctctgtttgatttggccatgaaattgttttaccatgataaggtctgcttcgagaagctggtgaagattgcaatgctatcattatgttctcaacaggcaagtataaaccatcatggattctatgttgaacatttgttattggtacagcaaattatcgatgctattttggttctggacattgatgatcctccctgcgctattgctgcaggagctcttttatttgttttggcaagtgatgtccaagacaataatttgctgtcttcagaaacttgtgtccatttcctcctcaaattgttaaaccctccggtgaatgttgttgatgccaaagcaccatcaataggttccaaacttcttggaatcggtaaatttcagatgcttaacggttccaataaggatgtggactcttgttcagaggacatactttcaaaagttgaagaaatcctcttaagctgcaaagagatcaaaccagcagacagggattataagagaacaacaaggccggaactatgttcaaagtggcttgctttgttgacaatggaaaaggcgtgcttgtctgttgttgcattagaggatacatctgacaaggtgttagaactcggaggaaatttcaaagaaacattaaggcagttgggtggccttgatgatatttttaatgtcatggtgaattgccattcagaactggagtatacttggagctgcaatctgatgaatattattttgagcaacatgaaaaacatgttgcaagacaaggatatgttgcagtaa

SEQ ID NO: 41653 - DNA, 654 bp, Zea mays
  Peptide Sequence Number=SeqID_83432
atgatcctgcgaacgtacgggcgcagatcccgctccttctccgacggcgggggcggggtctcgtcctcgcaggacgcgttcgactgcgacgacgccgccgacttgctggtgtcgtcggcctcgcagccgctcccgctcccgccgtcgcaggagtcctcttcgatgtgggacttcgacgaggacccacctccgtccccgccgcggccccggccggaggggcggcggcgcggggcaagaagaggagggtgggagctcgcggaagcccccgcggtggcgccgacggcaacgctgatggaggcggaggagtacggagagatgatggagagcgtggacgaagtcacgttcgcgctcgacgggctccgacccgcagcgcagaagcggacgcggcgggccagcctgctcgcgctgctcgggatctgcgcctccgccgagcgccgccgcgtgctccggtcccaaggactggtacagcaaattatcgatgctattttggttctggacattgatgatcctccctgcgctattgctgcaggagctcttttatttgttttggcaagtgatctgcaaccacttctttcacattacaatgccacttgttttcatattgcaaggctggcatgttctataaaagaatcaaataagaaacaccatgattga

SEQ ID NO: 41654 - DNA, 597 bp, Zea mays
  Peptide Sequence Number=SeqID_83433
atgggggcttccacgagctcccaccctcctcttcttgtcccgcgccgccgcccctccggccggggccgcggcggggacggaggtgggtcctcgtcgaagtcccacatcgaagaggactcctgcgacggcgggagcgggagcggctgcgaggccgacgacaccagcaagtcggcggcgtcgtcgcagtcgaacgcgtcctgcgaggacgagaccccgcccgccgtcggagaaggagcgggatctgcgcatgtgcgcactacgtcagctcctcccccgcgtcgctcccgcaggcggcttggggtgccctcgccgcgccgtcgccgggcgtcctcccccctctgcctcgccgtcgtccgagttgggggccagaagcccgacaccagcaaggagggcggcggcaggacatctcggtcgggaggcgaccatgccatgcgggaagtggcggcgctcttccccgacgaccccaggggctccttcacgacccttatggcggatccggtgcctcatcggaaggatatgagggatggcggtgcgtcaacaccgactgccatggcaccggcaccatcaactccatctgtgcggctgaaagggaaatag

SEQ ID NO: 41655 - DNA, 720 bp, Zea mays
  Peptide Sequence Number=SeqID_83434
atggaattgctaagtcaaccaactgataaaccattcaggactgaacacatgaggcgtcttgaatttgccttctggttcaaggtaagcacgccaccgcgacgtagcggtgggaggaggagcaggatagggagaagcgagacccacaagcgctggcttcgacgagagctgggcataaccaatgatgtcacgtcgcttttgcagcctgatactgccactggagatatcatctttgttctccagcagaaggagcatcccaagttcaagagaaagggcgatgacctcttccacaagcacacactgaccttgactgaatctctgtgtggcttccagtttgttctggctcacttggataacaggcagctgctgatcaaatcgaaccctggcgaagttgtgaagcctggttctttcaagacaatcaacgatgaaggcatgcccatgtatcagtggcccttcatgaagggcaagctgtacatccacttctcggtggagttcccgaactcgttgagcccggagcagtgcaaggccctggaggttgttctcccgcccaagccagtatcacagtacactgacatggagttggacgagtgcgaggagacgatgccctacgacgtgaacatcgaagaggagatgcggaggcggcagcagcagcaccaggaggcctacgacgaggatgatgatgtgccaagtggtgggcaaagggtgcagtgcgcccaacagtag

SEQ ID NO: 41656 - DNA, 465 bp, Zea mays
  Peptide Sequence Number=SeqID_83435
atgagcggctctctcgtcctcggtggcatcggaggcggcgagggcatgcagtacgtgccattggtgaagagcgcagcgagtgacaagttgtcgtacgacatgtactactacctggtgttgaggggcgtgacagtgggcgggaaggcggtgcggctctcggcgcaggcgttcgcggccaacgcagcagggtccgaaggcgccatcgtggactccggcaccacgttcacatacctagacccgaccgtgttccagcctgtggcggacgcggtggtgacggcggtgggcggtgggtataaacggtccaaagacacagaggtcgggttggggctgcacccttacttcgcgttgccacagggtgccagtcaaccaactgataaaccattcaggactgaacacatcaggcgtcttgaattttccttctggttcaaggtgagtgcccgtggcaaggcacaagcactcacctag

SEQ ID NO: 41657 - DNA, 621 bp, Zea mays
  Peptide Sequence Number=SeqID_83436
atggaggaggtggacgagcatgaagggcaacatggcatcattagtaggaagcatcttaaagagatgtctattatgctacatgttaaagaagctgaatctcctattatgctatctgttaaatttaaagagagaagatgcctaagggacgaggagcgagccatggtcgccgccaggcatgaggagcaagccatccttgttgagtgcaaggcagggtctccacctccatgtgggaaacggaaggaccggaccaacatggccccgaagaaggacaaggccccgccgccgtcgtcgaagccggccaagtccggtggtggcaagcaaaagaagaagaagtggagcaagggaaagctaaaggagaaggtaaacaacgcggtgctgttcgaccaggctacctacgacaagctgctctcggaggtgcccaagtacaagcaaatcaccccttccatcctctccgagcgtctgaggatcaacggctcccttgctcggagggccatcaaggacttgatggcgcgtggcctcattcggatggaggagctcgtctttagaacagttgccatctttgtcaagagttgccaatgttatgttactggtgatgagttccaggtgacggcaacattttag

SEQ ID NO: 41658 - DNA, 552 bp, Zea mays
  Peptide Sequence Number=SeqID_83437
atgcggcggcgcatccaccagcgacccgagttggccttccaggagctccggaccagcgagcccgtgcgggccgagctcgacgcgataggcatcccgtacaggtggctcgttgctcggatcggcgttgtggccaccatcgctggcgccgcggccaggcccatcgtcgcgctccaggccgacatggactatgagaatgtggccaaggcacttagcaagcatgacccaccgattgttctcgctaaggttgatgctaacgaggagaagaacatgccacttgctaccaagtacgaggtccaagggttcccaaccatcaagatcttcagggaccaggggaagaacattcaggaatataagggccctagggaggctgatggcattgtggattacttgaagaagcaggacgagatggaggaggtggacgagcatgaagggcaacatggcatcattagtaggaagcatcttaaagagatgtctattatgctacacgttaaagaagctgaatctcctattatgctatctgttaaatttaaagagagctctgtatctacatag

SEQ ID NO: 41659 - DNA, 228 bp, Zea mays
  Peptide Sequence Number=SeqID_83438
atggaccggccgattccagccatcaccgacggcaagccacacctcgtcgtgatcgcaagaacttcccggagccaaccccacccttcgccggaccttcctcgatgccggataacccacagaggttctctggaggacatggttgctggagtgacttggccgtccaccttgccaccaggttggatagtcgagtgggaccctacctcggcagaggaggagcatgaggagtga

SEQ ID NO: 41660 - DNA, 264 bp, Zea mays
  Peptide Sequence Number=SeqID_83439
atggaccggccgattccggccatcaccgatggcaagccgcacctcgtcgtgaccgcaagaacttcccggagccaaccccacccttcgccggaccttcctcgctgccagataacccacagagactgtaatctcgctgacggggaatacatcctcattccggagcaaggagttgctcaggaggtagcccaggagccagcaccagagtctgccatcgaggatctgcctgccccagctttggaaggcaagccccggttttatgcgtaa

SEQ ID NO: 41661 - DNA, 1413 bp, Zea mays
  Peptide Sequence Number=SeqID_83440
atggtggacatcgaccaccggatggccgggctggccccgtcggtggcgcacaccgcggcgctgcgccgcctctcgacgcgcgccgccgcggggccgtcatcggcgtccgcgtcgccgcgccacggcctccactccttccacgccgtggctgcaggcgtgctctcccacctccgcgagtccggggtggccgtcctcccgggcctctcggacgcggagctggtccgcgcggaggccgagttcgggttcacgttcccgcccgacctccgcgcggtgctcgccctgggcgtgccgtcggggcccgggttcccggactggcgcggccgggccggcctccgcgccgcgttcgacctccccgcggcggcggcgtcgctccaggtcgcgaggggcgcgctgtggccgcggtgctggggccggcggccggccgacccgggccgcgcgctgcggctcgcgcgctccgccgtacgccgcgcgccgccgctcgtgccgctcttcgaccgctgctacctgccctgccgcccctgcctcgcggggaacccggtgttcttcgtcgccgacgaccgcgtcctctgctgcggcctcgacctgctctacttcttcacgcgcgactcctccttccagccggcggaccgcgccgtcgtctcctcctcgtccccgctctccgccggcgcgagcaggccgtcgtgcacgcgccggagcctcgacgccgtccaggccccgcgctggatcgagttctggagcgacgccgcgtcggaccgccgccgccgcgactcctcgtcctccgaagcatccaccgcctcctcgtcctcctcctcgtcgtcgtcctcaggatgcccatcgccaccccggcggccaaccccgcggtgggtcgacagctacctcgacgagctggggtcaatgctgaagaaagggggctggagggaccgagaagtggacgagatggtcgaggtcaccgcctccgggttcttggacgacggcgaggaggccccaacacccgactccgaggctatcctcgacgcgctggtcctcaagaccgaccggtgctcggactcgctccggcgcgccgggtggaccgccgaggacgtgtcggacgcgctggggctcgacttccggcgcggcgaggagcgctcccggtcggccgtgcggatcccgccggagatcgccgccaaggatcccagaagagaaatgagagctaaattagccgagaagacacatttgcagttaaaaacgctccatactctgcaacggactggcaccccagcggtggcgcggcagccattaatgaaccggcgctgctaccgctgggaaggtgaagcccacggcgtcgccttgcggttggcgcctgcccactcccgtgtgtccgacatgcgcgtagatacggtcatggacatggacagtgcccatgcgcagttctga

SEQ ID NO: 41662 - DNA, 1239 bp, Zea mays
  Peptide Sequence Number=SeqID_83441
atggggaacacgtgcgtcggccccagcatcaccatgaacggcttcttccagtccgtgtccacggcgctgtggaagacgccgcaggacagcgacgcgctgcccgccgccgccgccaatggccccggcggcgccagcccgggccggtcgcagtcggcgctgccgaagccggcgtccgacgtgcaccaccacatcgccgtgctgagcgaggcccctgagcccgtcaagatcggcgcctaccactcggagccggcgcccgccgtgcagagcgaggcccctgagcccgtcaagatcgccgcctctcactcggagccggcgcccatggccgccaagcctggcgccgccgccgccaacgccagccccagccccagccccaggccgcgtccgcaggtgaagcgcgtgtcgagcgccgggctgctggtgggctcggtgctgaggcggaagacggagaacctcaaggacaagtacagcctggggcggcggctcgggcaggggcagttcggcacgacgcacctgtgcgtggagcgcggcacggggaaggagctggcgtgcaagtccatcctgaagcgcaagctggccaccgacgacgacgtggaggacgtgcggcgggagatccagataatgcaccacctggcgggccaccccagcgtggtcgccatccgcggcgcgtacgaggacgccgtggccgtgcacctcgtcatggagctctgcggcggcggcgagctgttcgaccggatcgtgcggaggggccactacaccgagaggaaggccgccgagctcgcccgcgtcatcgtcggcgtcgtggaggcctgccactccatgggcgtcatgcaccgggacctcaagcccgagaacttcctcttcgctgaccactcggaggaggccgctctcaagaccattgacttcggactctccatcttctttcgccctggccaaatcttcaccgacgtcgtgggcagcccttactacgtggcgccggaggtactgaagaagagatacgggccagaggcggacgtctggagcgctggcgtaatcatctacatcctgctgtgcggagtgccgccattctgggcagagaacgagcagggcatattcgaggaggttctgcacgggaggctggacttcgagtcggagccgtggcccagcatctccgacggcgccaaggatctcggcatccgtgggttcaggtcggtggagtggctcctgacaggccgctggactcggccgttctgtctcgcatga

SEQ ID NO: 41663 - DNA, 2010 bp, Zea mays
  Peptide Sequence Number=SeqID_83442
atggggaacacgtgcgtcggccccagcatcaccatgaacggcttcttccagtccgtgtccacggcgctgtggaagacgccgcaggacagcgacgcgctgcccgccgccgccgccaatggccccggcggcgccagcccgggccggtcgcagtcggcgctgccgaagccggcgtccgacgtgcaccaccacatcgccgtgctgagcgaggcccctgagcccgtcaagatcggcgcctaccactcggagccggcgcccgccgtgcagagcgaggcccctgagcccgtcaagatcgccgcctctcactcggagccggcgcccatggccgccaagcctggcgccgccgccgccaacgccagccccagccccagccccaggccgcgtccgcaggtgaagcgcgtgtcgagcgccgggctgctggtgggctcggtgctgaggcggaagacggagaacctcaaggacaagtacagcctggggcggcggctcgggcaggggcagttcggcacgacgcacctgtgcgtggagcgcggcacggggaaggagctggcgtgcaagtccatcctgaagcgcaagctggccaccgacgacgacgtggaggacgtgcggcgggagatccagataatgcaccacctggcgggccaccccagcgtggtcgccatccgcggcgcgtacgaggacgccgtggccgtgcacctcgtcatggagctctgcggcggcggcgagctgttcgaccggatcgtgcggaggggccactacaccgagaggaaggccgccgagctcgcccgcgtcatcgtcggcgtcgtggaggcctgccactccatgggcgtcatgcaccgggacctcaagcccgagaacttcctcttcgctgaccactcggaggaggccgctctcaagaccattgacttcggactctccatcttctttcgccctggccaaatcttcaccgacgtcgtgggcagcccttactacgtggcgccggaggtactgaagaagagatacgggccagaggcggacgtctggagcgctggcgtaatcatctacatcctgctgtgcggagtgccgccattctgggcagatttcttggccaatctccttctcaccgcgcctgtttgtcgtcgagcagagaacgagcagggcatattcgaggaggttctgcacgggaggctggacttcgagtcggagccgtggcccagcatctccgacggcgccaaggatctcgtgaggaggatgcttgtcagggacccgaggaagagactgaccgctcacgaagttctacggcatccgtgggttcaggtcggtggagtggctcctgacaggccgctggactcggccgttctgtctcgcatgaagcagttctcggctatgaataagctgaagaagatggctcttagggtgatcgccgagaacctgtcggaggacgagatcgccgggctgagggagatgttcaagatgatcgacgcggacaacagcgggcagatcacgttcgaggagctcaaggttgggctggagaaggtgggcgccaacctgcaggagtcggagatctacgcgctcatgcaagccgtaagcgcaccgcaccttgttcccgtccttgtcactggcactgtgactgcgagtgctgaaggaaaacttgctgttgctgcgttcgttcgtggtgcgcaggcggacgtggacaacaacggcacgatcgactacggcgagttcatcgcggccacgctgcacctgaacaaggtggagcgggaggaccacctgttcgcggcgttccagtacttcgacaaggacggcagcggctacatcaccgccgacgagctgcaggtggcgtgcgaggagttcggcctgggcgacgtccagctggaggacttgatcggggaagtggaccaggacaacgacgggcgcatagactacaacgagttcgtggcgatgatgcagaagccgacggtgggggtgctcccgaagaaggccgacctgcagaacagcttcagtatcgggttcagggaggcgctcaggatggcctag

SEQ ID NO: 41664 - DNA, 301 bp, Zea mays
  Peptide Sequence Number=SeqID_83443
atgcaatattcccccatagctcccggcctaggcagtggtagagagaataggaaatttatgcatcaagggaaggatggacttgccttcgtcgaagctttcctggcacagaagacctacttccggaagttcgggctctggtccctcttccggggctacgggttccggatcaacggtgacggcgtcgccgtgggccccacgtgccagagagaacgggagggggaagagaacggcgtcaggttgacgggggggaatgaaccggccgtccgcggggaggacccggccgccggtgggctcggcggcg

SEQ ID NO: 41665 - DNA, 351 bp, Zea mays
  Peptide Sequence Number=SeqID_83444
atgcaatattcccccatagctcccggcctaggcagtggtagagagaataggaaatttatgcatcaagggaaggatggacttgccttcgtcgaagctttcctggcacagaagacctacttccggaagttcgggctctggtccctcttccggggctacgggttccggatcaacggtgacggcgtcgccgtgggccccacgtgccagagagaacgggagggggaagagaacggcgtcaggttgacgggggggggggatgaaccggccgtccgcggggaggacccggccgccggtgggctcggcggcggttcgccgccggtggcccggtttttggacagtgagcagatgccttag

SEQ ID NO: 41666 - DNA, 771 bp, Zea mays
  Peptide Sequence Number=SeqID_83445
atggcgggggaggactgccgctccggcgcggaaatggacgcgctcgtacgacgcttgaagctccaccggccgtccccatccccctacgaccccgatccggccgcggcccccgtccccgccaccgccggcgacggcgagctgttccggccgcggagagctgccgtgcttgtctgcctcttccggggagacggcggcgagctccgcgtcatcctcactaagcgctcgtcctccctctccacccactccgccgccagccgccatcgcgcgctccagctatcgcgcccagacgcagacgccatcgcgcgctccaggcctccagccgccatcgcgcccaaacgcagagtcgcagacgccatcgcgccaggagccgccagccgccagacgccgtcggtcgccctccaggctccagaagactttgattgggacaatgaatgggttgatccattagctaattcttctcatgttagcaatgctcttggagatggtttcaatttatcgtgggaccaagttgatgaagctattggtgcatctgcacatctcagaggtcgtaattttcctaggagagctgctggtgggtgtgtgagaaggaatgaagaccttgaggaagaggagactaatttagcaaatgaagatgacgaggatgaggaatatattcttgatgatcttgatgtggaagatgaaattgaaggaagcaatagtggaaacgatggtgatgatcaaggcgtggatgctcatggtcttaatattgatgagttcggtgatggttactaa

SEQ ID NO: 41667 - DNA, 405 bp, Zea mays
  Peptide Sequence Number=SeqID_83446
atggagatgggagggatgagcgatgcggagcggctgttcttcttcgagatggcctgcaagaactccgaggtcgcgtacgagcagaaccccaacgacgccgcggatggaaggttgccagtccaccaaatcgcgcggatggaaggtccacctgctcctcgccgctcccgcaaatcagccccgcatgtccagctcggcccgcatcgccgccgccgtcctcgcggccgcatcgcccccgcaccccgcgccaccaacgcccgcggatggaaggttgctccaccaaatcgcgcggatggaaggtccaccacctcctcctctccccaaatcgtgcatccgccgcgccctcaaatccgcgacgggcgcggacgcctccctctcctctgccccacctcgcgagagacgaggtag

SEQ ID NO: 41668 - DNA, 1518 bp, Zea mays
  Peptide Sequence Number=SeqID_83447
atggctgataggtttcaaaaaatacgtgaggaaggaaaaaacttggatcctttgattttagaagactttgattgggacaatgaatgggttgatccattagctaattcttctcatgttagcaatgctcttggagatgatttcaatttatcgtgggaccaagttgatgaagctattggtgcatttgcacatctcagaggtcgtaattttcctaggagagctgctggtgggtgtgtgagaaggaatgaagaccttgaggaagaggagactaatttagcaaatgaagatgacgaggatgaggaatatattcttgatgatcttgatgtggaagatgaaattgaaggaagcaatagtggaaacgatggtgatgatcaatgcgtggatgctcatggtcttaatattgatgagttcgatgatggacttgttctgccttcccgcgatcggctgccgccgcgccagctccgcaaatctgccgcgccgctcccgcaaatcccccgcgcatgtccagctcggctcgcattccccgcccccggacccagcgccagcaacgcccgcggatggaaggtccacctcctcctcgccgctcccacaaatcagccgcgcaggtccagctcggcccgcatcgccgtcgccgtcctcgcgctagcaacgcccgcggatggaaggttgcgccaccaaatcgcgcggatggaaggtcccaggtctcttctcgccattaccgcgcccgccccgccatcctcctctccccaaatcgtgcatccgtcgcgccctcaaatcccgctggcgttcaactctatctcggcagtggatgcgcccgcggatggaaggtcccagatctcttctcgccattaccgcgcccgcccacaactctggtcccacaacatggtgcacgatgtctccagcgagtcactgccttcgtcttccgtccacaactccggtcaggcccccctccctctccccgctgaggccccttccgatctggattctggagacgtgcccgctggcccggcccatcctgcatacaccgtcgttgaggctcctcccgatccggatgtcagatctcgtgtggcggcacgcggatctggggctggcgcagcggcggaccagatcttagcgaagagtacgcttggaacacctctatcccctccaagcctccatgatggagttcctcagcctccgctcaacggcaggagaatcacggcgagcgcgtgctcgtgggcacccctctccatcaactgggcggctgcagatgccatggtgacgttcttgtgggtgttgtgcgcctccgcgctcgatgtctccatagcagccgtcacgtcgtaccaggggttgcaggagggcaccggccactatgcgctcctcgtcaccacgtccctcctctcggtgctcctcttcaccttcgacctcctctacggtgtgctcggtggtgccagcttcaacttcactgactttgccacctcctattccgccggactcgatagcccctccctcttctctgttgcgctccacttcctggcgtag

SEQ ID NO: 41669 - DNA, 859 bp, Zea mays
  Peptide Sequence Number=SeqID_83448
atggttggcctgctcatgccgtcgtcgtggctgccccacatgatctccctcgtcctccgctctccacccgacaccctcgccgccgacctggctctcgacggtgttcttgtccgggagcggcaacacgatatggccccggaaggccttgatgaggcagtctgcgagtgtgacgaagtaaggcagagcatagggatgagacggcgtcgatggcgttgtcgtaggagggcggagcaggcgagatctgcggagacggaggcatggcgtaccactgttgacccgcggcgttggctgcgtgttgctgctggcatcgtggccgccgccgcccgtgctgttgctggcgtggatggcgcaggcggcctgccagtcggcgcgggcgaatggggcggtggcgcggcacgcctgggatgcgaagcgcgtggatctgcaccaggctgccgggcggagctggtggcgtggcgcgccggagaaggcgtcgagcactacgacgtccatggagacaggcacaccgtctccgcagctgttgtggagacatcgagcgcggaggcgcacaacacccacaagaacgtcaccatggcgtctgcagccgccgcgcgaaccgtcgctcccatcaccatctgcgtctgcgttggcgtcgggcttctacggttctacctgcctcgtttgcggctcgatcagaaatcaatcgatcgcgcaccccagttgacggaggctgtggggctcagacccatgccttctctgatgattcgaacatacctgaggaaggagaagaggaatcaaccaccggcgagccggaagggtggcgtcgaggacacctacgactgcctggatcgagggcgaggcttgcgtggtgttggtgcgg

SEQ ID NO: 41670 - DNA, 279 bp, Zea mays
  Peptide Sequence Number=SeqID_83449
atggcgggcggatttaagctcgccggagctaaggggaagtggctggccggtgaggggacagggagttgtagcgtcaccaaggtgccagtgtcagaatgcctggtcccgaggttgagctgcgccaaaaccgtgtcaaatgaatttggtttgagttcaaactttcccagaatgtgttcaagtttggaaaagcagagaacacagatgatctttgagaagaggtctgaaattcagaaattcagaaatctgaatttctctaagggttcattgatcaagggctga

SEQ ID NO: 41671 - DNA, 279 bp, Zea mays
  Peptide Sequence Number=SeqID_83450
atggcgggcggatttaagctcgccggtgctaaggggaagtggctggccggtgaggggacagggagttgtagcgtcaccaaggtgccagtgtcagaatgcctggtcccgaggttgagctgcgccaaaactgtgtcaaaagaatttggtttgagctcaaactttcccagaatgtgttcaagtttggaaaagcagagaacacagatgatctttgagaagaggtctgaaattcagaaattcagaaatctgaatttctctaagggttcattgatcaagggctga

SEQ ID NO: 41672 - DNA, 279 bp, Zea mays
  Peptide Sequence Number=SeqID_83451
atggcgggcggaaataagctcgccggagctaaggggaagtggctggccggtgaggggacagggagttgtagcgtcaccaaggtgccagtgtcagaatgcctggtcccgaggttgagctgcgccaaaaccgtgtcaaaaggatttggtttgagttcaaactttcccagaatgtgttcaagtttggaaaagcagagaacacagatgatctttgagaagaggtctgaaattcagaaattcagaaatctgaatttctctaagggttcattgatcaagggctga

SEQ ID NO: 41673 - DNA, 279 bp, Zea mays
  Peptide Sequence Number=SeqID_83452
atggcgggcggaattaagctcgccggagctaaggggaagtggctggccggtgaggggacagggagttgcagcgtcaccaaggtgccagtgtcagaatgcctggtcccgaggttgagctgcgccaaaaccgtgtcaaaaggatttggtttgagttcaaactttcccagaatgtgttcaagtttggaaaagcagagaacacagatgatctttgagaagaggtctgaaattcagaaattcagaaatctgaatttctctaagggttcattgatcaagggctga

SEQ ID NO: 41674 - DNA, 279 bp, Zea mays
  Peptide Sequence Number=SeqID_83453
atggcgggcggaattaagctcgccggagctaaggggaagtggctggccggtgaggggacagggagttgtagcgtcaccaaggtgccagtgtcagaatgcctggtcccgaggttgagctgcgccaaaaccgtgtcaaaaggatttggtttgagttcaaactttcccagaatgtgttcaagtttggaaaagcagagaacacagatgatctttgagaagaggtctgaaattcagaaattcagaaatctgaatctctctaagggttcattgatcaagggctga

SEQ ID NO: 41675 - DNA, 279 bp, Zea mays
  Peptide Sequence Number=SeqID_83454
atggcgggcggatttaagctcgccggagctaagaggaagtggctggccggtgaggggatagggagttgtagcgtcaccaaggtgccagtgtcagaatgcctggtcccgaggttgagctgcgccaaaaccgtgtcaaatgaatttggtttgagttcaaacttccccagaatgtgttcaagtttggaaaagcagagaacacagatgatctttgagaagaggtctgaaattcagaaattcagaaatctgaatttctctaagggttcattgatcaagggctga

SEQ ID NO: 41676 - DNA, 279 bp, Zea mays
  Peptide Sequence Number=SeqID_83455
atggcgggcggatttaagctcgccggagctaaggggaagtggctggccggtgaggggacagggagttgtagcgtcaccaaggtgtcagtgtcagaatgcctggtcccgaggttgagctgcgccaaaaccgtgtcaaatgaatttggtttgagttcaaactttcccagaatgtgttcaagtttggaaaagcagagaacacagatgatctttgagaagaggtctgaaattcagaaattcagaaatctgaatttctctaagggttcattgatcaagggctga

SEQ ID NO: 41677 - DNA, 363 bp, Zea mays
  Peptide Sequence Number=SeqID_83456
atgatgatgcacccaccaggactcttccccgccgagaagagggatgacccgatgtggtgtaacagagtgagccacatgaaggatgtgtgggccatgcatcccgatctggttgggagaatcatcgtccagtgcatgagtgcactgtaccacctgaaggccttgcaaagcgacgccatgatgcaccttaccggactcgctcaagcggcaaagatcaccctcgatgatagggaggacttcatggtcgacctgtcttcagaattggtggagaaagatctacaggtggaacagatgagaaactgcatccaagcattggagcagcaggtggaaatccgggacaacaccatcgatatcctggaaaactag

SEQ ID NO: 41678 - DNA, 120 bp, Zea mays
  Peptide Sequence Number=SeqID_83457
atgacgagcttctatggataccacccactagagatgatgatgcacccacttggactcttccccgctgagaagagggaagacccgatgtggtgtaacaagtcctgcaaagcgatgccttga

SEQ ID NO: 41679 - DNA, 474 bp, Zea mays
  Peptide Sequence Number=SeqID_83458
atgacgaaggtgatacttgctgaagatgttcaaaactcaagaaatggaagtgagttcaccgaagaaataatatcgaattacaaatgtaccttcggcttgttagaaggtaaaggtacgagtgtgacgcaaaagttaatgccaaatcagcgtgaacagtacagggatactgttcatctatttataggcacgggtcgcagcccatggaaaattacaataatgtccttcacatttatcaataactctatgataactcttcgaggtctaatctggtttttcatctttaagtcggtttccttttccgccgctacttcgaagctcttctacacacagcttcggctctgcgccatcctttgtacttcttcgtaccgtggctctgatccggatccgaaggaccgagagatgatgattgtgcaagtgatgtggtgccaacaacaagatgcagttggtggacaacctaaggaaggatggacctaa

SEQ ID NO: 41680 - DNA, 330 bp, Zea mays
  Peptide Sequence Number=SeqID_83459
atgcagtcggtggacgacccaaggaaggatggacataaccagtggatgctcgctaagcgagtacctcccccagaagatgctgctgaaagtgatttggggatagagcgagtgaggagcaaccctagacagctccagccaacgactgtcaaggagcttagggagctcaagaggttcttttcaagcctggtgaccggtgtgatagccgcacgtctggccaacggtaggccgcgcaaggggcacgagatcgttgactgcgcagtgttcggtgtgcactggataatccggtgcacccgcggacagaaggcaatcagggcctactccactggataa

SEQ ID NO: 41681 - DNA, 291 bp, Zea mays
  Peptide Sequence Number=SeqID_83460
atggaggccaagtcacaccagcaacaaatcatcctaaggagtacctgcaaaaattgtgccacaagcaaggttgagtatactaatactcagctagacttacccgtgactgcacttgtaggagtggccggaatgggagaccacgtctcaggtcgcgtgaggggtaaagtccactgcgaggttcactcagtgtttgctgggggaggtactcgcttggcgagcatctactggttatgtccatccttccttgggtcgtccaccgactgcatcttgtggttggcaccacatcactag

SEQ ID NO: 41682 - DNA, 597 bp, Zea mays
  Peptide Sequence Number=SeqID_83461
atgaagaaggtggtctactacgagaccgactcttcatcaccttccacatccagcaccgagtctaccacttcgaagcgccaagagcgcaagaaggctcatttaatgctgaggcggcacatcgcccgccagtggaatggacaggcgacgtgccttatccgcattaaatgcagaggccgcatggccaagaggccttacgtcaggctccacccgctggcttacgtcacgggcagctggccacgtggcagcaacaggtctccgcctgagtggggagcagaggcgtatgcggtatggtctggacacgtgtcggctccggacccccacctggccttgactaaggtccgggtactctttgtcccagagccccgggaccctgttgtgagtgacccggaccccacacagaggggggtccggtacttcccatgggggttcggacctactgttgataccttggaggatatcgccttctctggccacgtggcggccctggaggaactggtgcccaaggaggatgactcgtgggcccgggcccccgtgtcaaaggctggtccgctgctttcggcggagatgaagaggcgtgacggttcgctcctcgcgtag

SEQ ID NO: 41683 - DNA, 513 bp, Zea mays
  Peptide Sequence Number=SeqID_83462
atgggggtccggacctacagacgataccttggaggatatcgtcttctctggccacgtggcggccttggagctgcccgcgtggtggggtcgggcgctgtttgccacgcgactagagatagtcatgtggactccgcgccttcatactgtagtaaggggtacccctattccagggtactgacaaagacaaaagagatttatcctagttcgggcaggagaaggctacttccaatgggggtggaaggtttgtattatcttgcacctaagcgctcagtaggggttacaagcagtcgagacagggagtgtgtcccaagtctcttcagtatgattgaggcagagtgccaatatcagggaggagacgtgttcgggccctgtagcggcgtggccggcgagatggctctcgtcctcatgtctgagccctatagtggcatggccgatgggattgcccttttccttacgtcgtcttttagtcaggaggtcgtccgatccttgtatcctgttctcttgacggggtag

SEQ ID NO: 41684 - DNA, 351 bp, Zea mays
  Peptide Sequence Number=SeqID_83463
atggcgcagtggcttacccggtctacgctcgccggcggtcggatggagtccggcgaccgtggactggcctctccggcgaagcagacttcgattcctcgctcggggagcttcaccgaggtgcaggcgcggaccatggcgtcggctggcctttggcgcgacgcggggcacgcgaggtcgggcgcgggcgtgctctggcgcgcgcagaacgcgtcgaacacgtggaagtgttcatctgcccgtgttcaaacgcctgctgatatcgcaaacgtgcgaatcttggcaaaaatccggcgcagacctcttcctggcacctatggctatctcccatatgtgaacacggtggatctttag

SEQ ID NO: 41685 - DNA, 219 bp, Zea mays
  Peptide Sequence Number=SeqID_83464
atggcgtcggttggcctttggcgcgacgcgaggcacgcgatgtcgggcgcgggcgtgctctggcgcgcgcagaacgcgtcgaacacgtggaagtgttcatctgcccgtgttcaaatgcctgctgagatcgcaaacgtgcgaatcttggcaaaaatccggcgcagacctcttcctggcacctatggctatctcccatatgtgaacacggtggatctttag

SEQ ID NO: 41686 - DNA, 462 bp, Zea mays
  Peptide Sequence Number=SeqID_83465
atggcgcagtggtttacccggtctacgctcgccggcggtcggatggtgtccggcgaccgtggactggcctctccagcgaagcagacttcgattcctcgctcggggagcttcaccgaggtgtgctcagtattctccgagggtcggacggggttggatgggcttggttggccggtctacggtggcaggggctcgggtggccgcggacacgtcgtgcacgggcaaacgccggcgcgggcgtggaccatggcgtcggctggcctttggcgcgacgcggggcacgcgaggtcgggcgcgggcgtgctctggcgcgcgcagaacgcgtcgaacacgtggaagtgttcatctgcccgtgttcaaacgcctgctgagatcgcaaacgtgcgaatcttggcaaaaatccggcgcagacctcttcctggaacctatggctatctcccatatgtgagttccaagggaagataa

SEQ ID NO: 41687 - DNA, 228 bp, Zea mays
  Peptide Sequence Number=SeqID_83466
atggcgtcggctggcctttggcgcgacgcggggcacacgaggtcgggcgcgggcgtgctctggcgcgcgcagaacgcgtcgaacacgtggaagtgttcatctgcccgtgttcaaatgcctgctgagatcgcaaacgtgcgaatcttggcaaaaatctggcacagacctcttcctggcacctatggctatctctcatatgttaataagttacttaaccttgtgccaaag

SEQ ID NO: 41688 - DNA, 552 bp, Zea mays
  Peptide Sequence Number=SeqID_83467
atgagctatggtggacgggaagtccagcagctgtttttgaaaatcaaaaccagtgggaaattgctaagatactgtcggtgttttgggtccgaccgcacacccggggttgcccctcaaggtgtttttaggagtaggacggtgtcgataactgtagcaaaatggttcgtgccgattgcacgagggacagtggacaaggtttacagaaattggcatgaagctattcgcattatgcttcggaggtcagcattatgtcatcaatattatgcttcagaggtctggacgtatatccgggccgtcgagcgttccgagctcgagggctcggatgagtcggagtactcctcggatgaggaggactcggacggtggcggcgaggacgaggacgacgacgacgacgacgacgacgacggtgacggtgacggcagcggcaggggcggcggcggcggtagcaaggacggtgacagcggcggcagcaggggcagcaaccggggcgacagcagcaggggcagcaccaggggcggcagcggcggcggcagcaatagggccagtggctag

SEQ ID NO: 41689 - DNA, 990 bp, Zea mays
  Peptide Sequence Number=SeqID_83468
cgacgcgtgcacgcgcgtgcggaacgtccgctgcgacgcgacagcgtcgggccgccgtgcgaggggtgggtggaggtgatggtgcccgtgttctcgcgcgcggcgtggcggtgcgtgtggggaatgctgcagaatgacctcatccacggctgggggctcgactacaggctcggatactgcgcgcagggcggacgcgctcgcaatgttggcgtcgtcgacagcgagtacgtgctccaccgcggcgtccccatgctcattgacggcggcacggcgacgccgtcggcggggcgcgcggcggtgaggttgcgatctttcaaggagatgcagctgacctacccctgctctgttccgatgtatgaggcccctgcgtgggaagtgtgcttgcttctccggcatcttcacatatcttactgccacttgttgcttactctcttctcttcttctactccaccatgggcaagagcaagaaaggtgggagttcctcaccattccggcgataagcggaagcgcgagccgactcctccctcggaggacttcggcgactcggagtactcggaggaggagttctcctccgagtcagaggactcgccggtccatggctctcccccggtgtcgtatgatgattcagacgactcccaggggatcgccgcagaggtgtggacctacatccgggccgtcgagcgcgccgggctcgagggctcggatgagtcggaggtctcctcggatgaggagggcggcggtggcggcgatggcgagggcgaccgcgacgacggaggcgacggcgatggcggcggcgacgacggtggcggcgaaggtggcggcaagggtggcagctgtcggtgttttgggtccgaccacacacccggggttgcccctcaaggtgtttttaggagtaggatggtgtcgacaactgtagcaaaatggttcgtgccgattgcacgagggacagtggacaaggtttacaggttcaggccgcttagagatgcgtaa

SEQ ID NO: 41690 - DNA, 477 bp, Zea mays
  Peptide Sequence Number=SeqID_83469
atgaggaaatgggcaaggcctggcccactactcctcctgctcctctcctgccggagcaacatcccactcgaccgtccaacccggtggcagggtggtaggccaagtcacaccatcaaccaaatcctgcatggtacctgcaaaaatggtgccacaagcaaggctgagtatactaatactcagctagacttaaccgtgaccgcacttgtacccaccatagctagcatgggagacccagtctcaggtcgcatgagggataaagtccgcgcccggcttcactcaggtactaggtttaccggttaccatttttcccggcatgtgcttagtacgttcaaaagcttgactcaggtgcttttagaaatttcaactttaaaggtgtatgatcttcttgagttaaacaaggttaactttgcttatggcagaaggggtgctttgaactacaactattacttaacagtggggtgtcataacatgacttga

SEQ ID NO: 41691 - DNA, 204 bp, Zea mays
  Peptide Sequence Number=SeqID_83470
atgggagacccagtctcaggtcgcatgagggataaagtccgcgcccggcttcactcaggtactaggtttaccggttaccatttttctcggcatgtgcttagtacgttcaaaagcttgactcaggggctgcggggagatcctcaacagcagcctcagaagcttgctcctggtcctcctcttggacagatccttgctcgaggatga

SEQ ID NO: 41692 - DNA, 642 bp, Zea mays
  Peptide Sequence Number=SeqID_83471
atggagtggaagcagaaggtgagcctcttcgatgtggtcgacgagacctccgtctccaccaagcttggtcgcgctgcctccaacggcgtcaccgccactgcgactgggggtaactcgtatgtcagccggtggaatgggcggcccacacgaacggcacttcgagatcctcgagaagcgtcatgctccctgtatggtagcagaaggaggagtttcttcactccctctacgacaactagaccctcgtccttgtcggtgaaactggaagcagaaagacaactcaggagcagtctaagcatgtgcaagactacaactttgatcaccctgggttcctatgtctatgacattaatgggaacaagtatctggactctcttgcaggattatggtgcacagctttaggtggtagcgagcctcgattagtcaaagcagcaactgagcaattaaacaaattacccttctaccattccttctggaaccgtacaacaaaaccttcgttggatcttgcgcaggagatccttagcatgttcactgcaagggaaatggggaaagttttcttcacaaacagtggttcagaagcaaatgactctcaggtgtccctattttatagcccctcagtaccatcaatgataactgaaagtgtttaa

SEQ ID NO: 41693 - DNA, 492 bp, Zea mays
  Peptide Sequence Number=SeqID_83472
atggagtggaagcagaaggtgagcctcttcgatgtggtcgacgagacctccgtctccaccaagcttggtcgcgctgcctccaacggcgtcaccgccactgcgactgggggtaactcgtatgtcagccggtggaatgggcggcccacacgaacggcacttcgagatcctcgagaagcgtcatgctccctgtatggtagcagaaggaggagtttcttcactccctctacgacaactagaccctcgtccttgtcggtgaaactggaagcagaaagacaactcaggtctctgaggcgttggtttccatttgacccttccccattgccgcttgttggcccccttttgctggtcgctgtgcaagagctgcaacgagacacagattctccaacatccaaagcgaggtcctatgtctatgacattaatgggaacaagtatctggactctctgcaggattatggtgccacagctttaaggttgtgccacggcgacttttgt

SEQ ID NO: 41694 - DNA, 252 bp, Zea mays
  Peptide Sequence Number=SeqID_83473
atgtattttagacaaaacttgcagggtgtcactgaagggggagcaatcaatgatgaaatagatgaggcattattcccaaacagggatggaaaagaggaggcttcaaagggtaggttcaaggagagtagggaaataggcataaggacaaaggatataagtaccacaaaggatggagttaagacaggacctgcaagtcgaaaagaagtgggtacgtccaagggccagataggtaaactaccactctcaagttga

SEQ ID NO: 41695 - DNA, 270 bp, Zea mays
  Peptide Sequence Number=SeqID_83474
atgagcataataaaggatggagttaaagcaagaattgtaaccggcaagggagaaaatgcaaccaaggttgggataggcgtcgaagaagggggagcaatcgatgatgaaatagatgaggcattatccccaaacagggatggaaatgaggaggcttcaaagggtaggttcaatgtaccttcggactcggatcagaaccatagtgtgaagaagcacaaagaatacgaaggttggcgcagagccgaagctatgcgcaggggagctttggcatga

SEQ ID NO: 41696 - DNA, 210 bp, Zea mays
  Peptide Sequence Number=SeqID_83475
ggtgtcactgaagggggagcaatcaatgatgaaatagatgaggcattattcccaaacagggatggaaaagaggaggcttcaaagggtaggttcaaggtagaagacatcaatattgcaagggtcaaaggcgataaccgacaaggatgtaatagagaagaggtgaaggtgcacaagaaccaagggtatgagtacaataaagaatggagctaa

SEQ ID NO: 41697 - DNA, 327 bp, Zea mays
  Peptide Sequence Number=SeqID_83476
atggcggggcccccggacacgacggcgagccacctggcgcatggtgtgatgacgagagggttggagattgccaactggataggtgcaagaggaaagggtgtagatagaaaagggggagcaatcaatgatgaaatagatgaggcattattcccaaacagggatggaaaagaggaggcttcaaagggtaggttcaaggagagtagggaaataggcataaggacaaaggatataagtaccacaaaggatggagttaagacaggacctgcaagtcgaaaagaagtgggtacgtccaagggccagataggtaaactaccactctcaagttga

SEQ ID NO: 41698 - DNA, 729 bp, Zea mays
  Peptide Sequence Number=SeqID_83477
atggcgacgcggtgccacgtcctgctcctcctcgccgccgccttcgcgtccctcctcgcgctcgtggccgcggaagggggcgaagaggggccccgcgggcgccggctgctcgtcctcctggacgacctggccgtgcggtcgtcgcactcggccttcttcggctcgctccaggcgcgtgggttcgatctcgacttccgcctcgctgacgatccaaagctctcgctccaccgctacggccaattcgacgggaatagggatggtttgcgtgcggagtctgactgcttttctgatctgacccgtactcgtggagtggagttctgtgatctgctgcgggatccagaggcaatggttattgaccatatgaactatgccgtcacagatgttgaaggtgatcacaccttgattgctggtgacgatcttatccattcggatgtgatactagggtctgaaaagattgaggctcctgtattgtttcgaggaattggacacatggctaatccatcaaacagtttggttctgaaggttctatcagcctctccatcagcatattcagctaatccaaagactaagttagcgtctcctccatcgctcactgggtcagctatatcattggtttcggttatgcaggcaagaaataatgctcgggtgctgttatctggatcactcgatctgtttagcaaccggttcctgaagtctggtgttcaaaaggctgatagcaaaacaagttaa

SEQ ID NO: 41699 - DNA, 490 bp, Zea mays
  Peptide Sequence Number=SeqID_83478
attcgacgggaatagggatggtttgcgtgcggagtctgactgcttttctgatctgacccgtactcgtggagtggagttctgtgatctgctgcgggatccagaggcaatggttattgaccatatgaactatgccgtcacagatgttgaaggtgatcacaccttgattgctggtgacgatcttatccattcggatgtgatactagggtctgaaaagattgaggctcctgtattgtttcgaggaattggacacatggctaatccatcaaacagtttggttctgaaggttctatcagcctctccatcagcatattcagctaatccaaagactaagttagcgtctcctccatcgctcactgggtcagctatatcattggtttcggttatgcaggcaagaaataatgctcgggtgctgttatctggatcactcgatctgtttagcaaccggttcctgaagtctggtgttcaaaaggctgatagcaaaacaagttaa

SEQ ID NO: 41700 - DNA, 453 bp, Zea mays
  Peptide Sequence Number=SeqID_83479
atgggcaagggtaccaagcgcaagcgtgagcccactcctccgtcggatgatttcggtgactcggaatactcggaggaggagttctcctccgagtccgagggatctccggctcccgtctctcccccggcgtcgtctgatgattcagacgactcccaggggattgccgcggaggtctggacgtacatccgggccgtcgagcgttctgggctcgagggctcggatgagtcggagttctcctcggaagaggaggactcggacggcgacgagggggaggatgacgacgacgacgacgacgacggcgatggcgacggcagtggcggtggcagcggcggcggcgaggtgagcaagggcggcaccaaggacggcagcagcgtgggcagcaccggaggcggcggcagcaaaggcggcaccaggggcggcggcggtggtagcagcagcaaggccagtggctaa

SEQ ID NO: 41701 - DNA, 453 bp, Zea mays
  Peptide Sequence Number=SeqID_83480
atgggcaagggtaccaagcgcaagcgtgagcccactcctccgtcggatgatttcggtgactcggaatactcggaggaggagttctcctccgagtccgagggatctccggctcccgtctctcccccggcgtcgtctgatgattcagacgactcccaggggattgccgcggaggtctggacgtacatccgggccgtcgagcgctctgggctcgagggctcggatgagtcggagttctcctcggaagaggaggactcggacggcgacgagggggaggatgacgacgacgacgacgacgacggcgatggcgacggcagtggcggtggcagcggcggcggcgaggtgagcaagggcggcaccaagggcggcagcagcgtgggcagcaccggaggcggcggcagcaaaggcggcaccaggggcggcggcggtggtagcagcagcaaggccagtggctaa

SEQ ID NO: 41702 - DNA, 390 bp, Zea mays
  Peptide Sequence Number=SeqID_83481
atggagtacttgcattccaaggatataatccacttcgatttgaaatgcgataacttactggtgaatctcaatgatccatctcgcccgatatgcaaggtagctgatttcggtctgtccaatttggaaaaaactacaatggtctcaggtgggatgaggggaactcttccatggatggctcctgaaatgcttgaaacgagcagcgacagctggtttactgcactagcaaatggtccattctgctttgctgctggatcgagctttgttggtgaagtcatcgctggtgttgatatggtgcttcctccattacttttgtcactatcaatgctggagttgagactgccatatcagcagacttggaagtcctccgttgatgatctggtgcttccgtaa

SEQ ID NO: 41703 - DNA, 693 bp, Zea mays
  Peptide Sequence Number=SeqID_83482
atggcaaggcgtccacagtcacggttctgccaagtccgcggatccaccgccctcctcccgctccccgccatcaaccttcaccactgcgccgccagcctcaccgcagccgtctccatctcgacctcctgctcctccttctccgcgtccccgaccacctcctacccgtcgtcgtcgcactcgcagcgacaccagccgcagaggcccgtggtgacgtcctcctcggtatcccctccagccgggtggctccgcaccgcatccggccccggccccggatccgacgcaactcacacatctccaggcgctcgcagaatcccacccgacgccatcagcgcccgccatgccatgccccagaagcccgtccacggttgctgctccaatcccttccgcggatgccgcataatcccaactgacgcagctccgcctcaagtcgtccttctcaggcggcgggtccggccgtccgggtgcgtcggcttgggcggcaccgacggatatggtgcttcctccattacttttgtcactatcaatgctggagttgagactggaagggagaagaacctcaagttcattgtgcaggtatggttcttcataatttacaccatggttgggatcgagatgcccacgatcaaggtgcggtcggcaatagtagcttccccaccgtcctcaattgcgtcgtcaatagtcaacatgcctgag

SEQ ID NO: 41704 - DNA, 765 bp, Zea mays
  Peptide Sequence Number=SeqID_83483
atgacgtcggattactctcaacctcctacggaagcaagggaacgtcagcagcatccatgccgcaccaccagctatgcttctacagggctcaaggcacttccccgacagccacctgatgttcaacttaccgaactgggtgacttgattctctatgatgcagatggcacgctcgattggtccaccaataccagtggcaagtcagtggttggtgctacatgtggggcagaaactcatagcaagtacctcagctacaaattgggccaaaggaaagttgtacgtatctcacagtgctttccaacggcatcctgtggggaatatggtgtcttttcaaatgcacagtgcagcttcccagacgcaggcctcaggcagtctggattattcaaactgattgatcctggggagattaatcgtggctgcgtcactcttgacagattctctaccctgtggtgggtgctggtgtccaaggtgtggctcgcccccgagcgacgcgcggacgacggcggagccatcaagagcgacccctgcgactacctcatcgaggaggaggaagggctcaacgaccacaacgtcgtcgtcaagtgcgccgagatccagaatgccatctccgaagccgaggacaccacatctgctgtgccagactcgtgggagacggccgacatcgacggtcacatgagccggctcatcctctccgcgtgtcgtgtgtcctcctcgctggacctcgccttctccacgaagaagacagtcacctccgttacccgaggatag

SEQ ID NO: 41705 - DNA, 735 bp, Zea mays
  Peptide Sequence Number=SeqID_83484
atgcctaagcgtcgattagggaaggggaaaggttactcactgagggaagggggaaggttacctgcgaggggactggtggacgatgtgcctcctaatcgccgtgtacaggttcgtctcccacgaccgccgacagaggaggaggagaaggagtgctcggtgtccagagaagaagaacagacggcgtggagttatacccttatccaaggcctcttggcacaccaaagagtcttggtccaggatttaagctatttgtttcaatgcaatgcgaagttgggtgacttcaaaagagggagctccgcctcgcccaacctcaggcctcggcctcgggagaaggtctccgcctcgccgaccccaagcctcggcctcagcctcggcctcgggaggagtcatgtcctcgcccgacctcagcctcggcctcaggagaagtctccacctcgcccgacctgggcctcggaccgactacgctataggggatacatcattaccctactcctagctagctgcctcaggctacgaaggaacaacaccggtgtcccatctaaggttactccggcaacaggtaatgatggttccccgcgtgcgcccatgacgtcggattgctctcaacctcctacggaagcaaggaaacgtcagcagcatccatgccgcactgccagctgtgcttctacagggctcaaggacatggacatagggagaatgcagggacgcggggcagacgagacaggcagcatgtag

SEQ ID NO: 41706 - DNA, 387 bp, Zea mays
  Peptide Sequence Number=SeqID_83485
gggtggaccatccaggccaggagcgtggaccgtccgtggaggaatttggcaaaacaggtcgctgatcatgccaagcatattcttcgtatttgcaatgagaagctacccttcggtaaggggttgactgcatttgaggttaaagaacttcgtgaagcacttgaatttgtcgccgaaggattggaccaggactcccttttttgccaagaggaattggatgcaactgttaaggaggaacaattggagcatgacgagaaggtggctttagagaggattgaaagcccactaccttctcgtgattcggactgcttcctatcccttgaagagcacattgagaagttttggggcgttgattacaactcagaccagatgcctagctactccgactag

SEQ ID NO: 41707 - DNA, 315 bp, Zea mays
  Peptide Sequence Number=SeqID_83486
atgggtcgtttaatcgagcgccttcgtcaaaacaggtcacgagtagattggggtgtactggcagggatgtcgaagagcactgaaatcatagataaagtaatcatcttgatgcaggatcatgccaagcatattcttcgtatttgcaatgagaagctacccttcggtgaggggttgactgcatttgaggttaaagaacttcgcgaagcacttgaattcgccgccgaaggattggaccaggactccctttttgccaagaggaattggatgcaacttttaaggaggaacaattggagcatgacgagaaggtggctttag

SEQ ID NO: 41708 - DNA, 393 bp, Zea mays
  Peptide Sequence Number=SeqID_83487
atggagaaatacctggatggggaaataaaggcgcagaaaaaggctttatctgctcaaggtttgaagagtggtggtattgttcaacagcatgcgtatcggcttttcttgctgaagacaaatgcacaccatcttattaggtatctagctactgcagttgttgtcaacaaaaggagaaggaatatgcttaaagagttgattaaggtcattcaacaggagcaccatagctacaaggatcccgtaactgaatgtctggaatgcttatatgttaactatgattttgatggtgctcaacagaaactcatagagtgtgagcagggtgttttggacaaagaaagcttgtaccttaaaacaggaggatacaagaagctggagtggttgtctgaaggcttttga

SEQ ID NO: 41709 - DNA, 621 bp, Zea mays
  Peptide Sequence Number=SeqID_83488
atggccctagctacaactgcaaatagtacaagggacaacagtagagaaaacaaatgcggtgagaatgagaatcaaggattgtttgatttctcttgtgggattttggtggtgtcgatgctggagagtgaattcgaggaacgatgggccaatggagaaatacctggatggggaaataaaggcgcagaaaaaaggtctaaaatagatcttgattactacagcacagttgaagaacttgttgagcttggcctagaaaaattaaaacaggctttatctgctcaaggtttgaagagtggtggtactgttcaacagctctttaagattatgtacttgaatgctatacagacaaatgcacaccatcttattaggtatctagctactgcagttgttgtcaacaaaaggagaaggaatatgcttaaagagttgattaaggtcattcaacaggagcaccatagctacaaggatcccgtaactgaatttctggaatgcttatatgttaactatgattttgatggtgctcaacagaaactcatagagtgtgagcagggtgttttggacaaagaaagcttgtaccttaaaacaggaggatacaagaagctggagtggttgtctgaaggcttttga

SEQ ID NO: 41710 - DNA, 273 bp, Zea mays
  Peptide Sequence Number=SeqID_83489
atggcagtcggcgtcagtgaggcattgtacgccaaggcggtgagccctgatctggtgacggggaatcgatggggacggttgatgtgtgtggggacggagtgcctcgccatgtcgtctagtgcttttggtaaccaaacccctcagccaaacaactgcatgtctagaggttctctagaggacatggttgctggagtgacttggccgtccatcttgccaccgggttggacagtcgagtgggaccctacctcggcagaggaggagcatgaggagtga

SEQ ID NO: 41711 - DNA, 198 bp, Zea mays
  Peptide Sequence Number=SeqID_83490
atggcgaggcacttcgtccccacacacatcaactgtccccatcgattccccgtcagcagagaggggctcaccgccttggcgcagatcctcgatggcaggctctggtgctggatccggggctacctcctgagcaactccttgctccggcacgaggatgtactctccgtcagcgatgttgcaatctatcgaatgcaatga

SEQ ID NO: 41712 - DNA, 273 bp, Zea mays
  Peptide Sequence Number=SeqID_83491
atgttggtcgacttgtgcgtggtcgaggactggcgggacacgcgtctgatcgtggaggacgtgcacgaggtgcggtgctcacgacaggttttatggtttgggcctcaaaaccacccagcgctacggatggcgggttttgctgagtttgggcctcaaaactcggcggtggaggttccggagggaaccggtggcggcacgcggcgtgatcacggagggtgtgtcaaggcgaagcaactctgtgtgaaggacgtggtcgtcggatcgaaaatttag

SEQ ID NO: 41713 - DNA, 192 bp, Zea mays
  Peptide Sequence Number=SeqID_83492
atggctgaggtgaaagtcatgcgggctcgtgcggatggatcgggagcggtgaagggcgagtgctgggtcttgactgacagatcagagcagccaggacatggtggagtggaccgtgttgccggcgtggtcgaggactggcgggacacacgtctgatcatggaggacgtgcacgaggtgcggtgctcatggcag

SEQ ID NO: 41714 - DNA, 261 bp, Zea mays
  Peptide Sequence Number=SeqID_83493
atgttggttcatgttcagtatccacttggtgcttggattaaagtcataggggttggaggtggtggctccaatgctgtgtataggatgattgaaagctccatgaagggtgtggaattctggattgtgaacactgattttcaggctatgccgatgtcacccattgaactagaaaataggttacaggttggccaggaattgacacgtggtcttggtgctggtgccgatatggtttttgtgacgataactgccaacgcttcttaa

SEQ ID NO: 41715 - DNA, 1425 bp, Zea mays
  Peptide Sequence Number=SeqID_83494
atggcagcacaactacttttctccaatgcttccagttgccactgcccattaggcatttcaaggataaacgttgggaagacacttcttggtgaaagtgcaagttttcagagaaagaagtcgttttctggtggttcctatcgcttttctcgatttgattgctctgcgaactcccgccgagctgggccaaggcgcaccaaggatactttatatgaccttcaccctgagatctccttgctttatggagaagataatggtgcagctaccttatccagcaaagagcagggtattgacactacagctgaaagattggtggacacttctccctcttaccgctataatgagcccaggattaaagtcataggggttggaggtggtggctccaatgctgtgaacaggatgattgaaagctccatgaagggtgtggaattctggattgtgaacactgattttcaggctatgcggatgtcacccattgaaccagaaaataggttacagattggccaagaattgacacgtggtcttggtgctggtgggaacccagaaattggcatgaatgcagccaaggaaagccaggagttggtagaacaggcagttgctggtgccgatatggtttttgtgacggctggaatgggaggtgggacaggcactggtggagcacctattattgcagggattgcaaagtccatgggtatattgactgttggaattgtcacaaccccattttcatttgagggaagaaggcgggctcttcaggcacaagaaggaattgcatcgttgagaagcaatgttgatacactgattgtaattccaaatgacaagttactgactgctgtgtccccaaatactcctgtgacagaagcattcaatttagcagatgatattcttcggcaaggtgttcgtgggatatcagatataatcactgtgccaggtctggtgaatgtggactttgctgatgttcgatcagttatgtcagatgctggctcatcattaatgggcattggaacagcaacaggcaagacacgagcaagagatgccgcactcaatgccatacagtctcctctacttgatattggtattgaaagagcaactggaattgtatggaatatcactggagggaatgatctaaccttgacagaggtgaatgctgcagctgaagtaatctatgatcttgttgaccctggtgcaaatctgatttttggctctgttatagatccgtcatacactggtcaagtgagcataactctaattgcaactggtttcaaacgccaggaggaaagtgagagccggtcttcacaggtttggtttctgggtctcttagttagcaaggtagagcagatgttcctgaaccgcatactaatctgtgtgcaaacttcgtcgcctgagtacattggctgggctgctttgcttctcaggaacctgcagtag

SEQ ID NO: 41716 - DNA, 417 bp, Zea mays
  Peptide Sequence Number=SeqID_83495
atgccgaagacaactcacatgcttcagcagttgcgcaaccgagcccaccacgtccttggcagcggcggccgaagcgatctcgccgctggcacaaaatttagcccaagggtcctaagcagaccccttcgccatggcgaccggcccagccaccaccgacgccgggacaacagccagttgcctagcccccgatcctacaccatagtgaaagggaaatgtgcccttgggccatttctaagtattttggtgattgggtgcaaacacaagtgcttaaatgtgaaaatatgctcatgggtgaacaaggtgcaaatcacaagtaaagggcgagaggctccaagttgtggagattcctcgcaaacgggattgagaaaagaaaagcaagaacaccgtggtattcaagttgatcattggatcacttga

SEQ ID NO: 41717 - DNA, 591 bp, Zea mays
  Peptide Sequence Number=SeqID_83496
atgcgcctaggggtcccttttatagccccaaggcagctaggagccgttgagagcacatctggaagcggcgagatcgcttcggccgccgctgccaaggacgtggtgggctcggttgcgcaactgctgaagcatgcggccgccttcgccgagaggattgcgtccggggccctgacctcggagtttgctgccgaacgacggcgactcgaagggaggaatgaatgcctccgatcgcagctcactgaggctatgcgggacaagtcagccgcggaaaacaagaaccgcaatctgacggacaagctgtcggcggcggaggctgaaaaggaggaacttggccgccgaggcgaactacaggagccttcgcggccatctggacgaggccgaggcctctacccgcacaggggtggaccgaacgcgtgcattgctcgtggacgcgaggagctggaggtgcttccatcgatcgtgatgggtctcacgtcctttgctttgctcatcacctgtgagggggccgcgaatgccttgtcccatgagggatgcaggcacttcgaagtctttgatcgatctgatgaagacttcgactgtgagatcttctag

SEQ ID NO: 41718 - DNA, 252 bp, Zea mays
  Peptide Sequence Number=SeqID_83497
atgacgaaggttgatgctttatcgaagattgtggaaaatatgaacaatatgggattacatttgtaccttcagcttgacagaaggaccttcggaagaagaaggcccccaacagttaggtttcgccagtcgtacaaacgcagtacacctccccaagctaagggcgtcccattccaccctcatggtggcactgttatcccgggtggtcactccacgaacaggtcctacggagaggtgctcaggaaaaaggcatga

SEQ ID NO: 41719 - DNA, 339 bp, Zea mays
  Peptide Sequence Number=SeqID_83498
atggccggaatacccacaacgctccatggttccaaccaatctgaccgaactggtatgcgctgctcgttaggtttcgctagtcgtacaaatgcagtacacctccccaagagcgagcactacgtcacgacccccattgacagccctcaggcaaagccaactacacccccaggttcatctaattattcagctaagggcgtcccattccaccctcatggttgcactgttatcccgggtggtcacttccgaacaggtccttacgaagaggtactcgagaaaaaaaggcctgagccccctagagtatcacaatatcatcattgggataacatcatcgtatcataa

SEQ ID NO: 41720 - DNA, 483 bp, Zea mays
  Peptide Sequence Number=SeqID_83499
atggacgcgcgcagctccctcgaggttcctctccatggccgcgctccgtattcccctgccgcgtccctcaagctcgtgctctggacgccggagcagtatatgtgtccttgcctcgccggtccgctcttcgctatcgtcgggttacgagtcactttgattgtgattggtgttaagcgccagtgggcatggccttctataagtctaagtacttcttctatacttcttattgaggatggaacaagctttgtgacttattttagatttgagcagcacggtcataacattgctgatgccaagaaagatgatcccctaggtttacaacatcttgcactatgtcctacgcgttactggccaaacgacaacgccgtggagtgcagcaatgacaggaactacctctgtaggaaccggttcaacaagtacttcgacatcacgtgggtggagcagacttggtgggcggacaactatgactgtgttgtcgtctag

SEQ ID NO: 41721 - DNA, 264 bp, Zea mays
  Peptide Sequence Number=SeqID_83500
atggaagtacttaaatcgggacttgggctaggaacaggtgatgttctacccaggttgattaaggattatagagaatgtaggcttgatgaccgaggaccttttaactggtcacatgcctcatcatggcatacccttgagagtcttttctttagtcgggttacgagtcacttgattgtgattggtgttaagcgccggtgggcacggccttctataagtctaagtacttcttctatacttcttattgaggatggtcacttaagctag

SEQ ID NO: 41722 - DNA, 171 bp, Zea mays
  Peptide Sequence Number=SeqID_83501
atggcgagagtagcgtgtaccctccgtggcaagaggctggacggtggtgtatctgtgctctcggttacgagtcacttgattgtgattggtgttaagcgccggtgggcacgaccttctataagtctaagtacttcttctatacttcttattaaggatggtcacttaagctag

SEQ ID NO: 41723 - DNA, 216 bp, Zea mays
  Peptide Sequence Number=SeqID_83502
atgacgagagtagcgtgtaccctccgtggcaagagtctggacggtggtgtatatgtgctctcggttggcgtgaacccgcaaacccttgagagtcttttctttagtcgggttacgagtcacttgattgtgattggtgttaagcgccggtgggcacggccttctataagtctaagtacttcttctatacttcttattgaggatggtcacttaagctag

SEQ ID NO: 41724 - DNA, 453 bp, Zea mays
  Peptide Sequence Number=SeqID_83503
atggcggactccagcgcactgccgtcctccaactccttcccatcgactgccttcacccaaccggtcagcggactcatgcgcggcacaaccgtccccaatcccacggcacaaccggtcagcggacccgaggtgctgtgccccgacgaggacctcgtctggatccatgactaccacctcctcgcgctcccgaccttcctccgcaagcgcttcccgctcaaccggatcccctacatctacacggtgtgccggcaggagagcaccgcgcttggaaacgactcgccaaagcagaccgtcatcgtgctctcggagttcgtcggttgctccccgtccctgagcagcgcaatctgcgtcaacccgtggagcgtggagtccatggtggaggccatgaacgccgtgttgcgggtgccggaggccgagcagcggctgcggcacgagaagcactacagattctga

SEQ ID NO: 41725 - DNA, 1032 bp, Zea mays
  Peptide Sequence Number=SeqID_83504
atggcactcaggaaccctcctccaaaacccacacgagcaggccagggcactcaccagatcgagcccccggagcgaggaggaagaagaagcacgcgcgagaggctaggggctgcgactgcgaggcggagcgtgcggcgtgctggcctcggagtcggaggaggagtggaggcgtgccgcgtctctgtgggtgtggctgagcgtgctgactgcctcacctgctctgttgctctgctcgagaaggaagcaaggaaaggcgaggccaagggcggggcggctgcgggggagggcggggcagggcagcgcaagcgtgtggactcttatgggcggcccttgacggaaatgcccctgcggcgtgctgttatttccgcgcagtattttatcctccagttgtttctagtgttcagtagagacatcaagatgctgctgcatttcaaaatcggtggcctccctttccagcgaacgctctaccactccttcctctcggccaacagggcgttcgccgaccgcctcaccgaggtgctatcccccaacgaggacctcgtctggatccacgattaccacctcctcgcgctcctgaccttcctccgcaagcgcttcccgcgcgccaagggcgttcgtcgaccgcctcaccgaggtgctgtccccgacgaggacctcgtctggatccacgattaccacctcctcgcgctcccgaccttcctccgcaagcgctttccgcgcgccaagcgtacgctctaccactccttcctctcggccaatagggcgttcgtcgactgcctcaccgaggtgctgtcccccgacgaggacctcgtctggatccacgattaccacctcctcgcgctcccgaccttcctccgcaagcgcttcccgcgcgccaagcgtacgctctaccactccttcctctcggccaatagggcgttcgtcgaccgcctcaccgaggtgttgtcccccgacgaggacctcgtctggatccacgattaccacctcctcgcgcttccgaccttcctctgcaagcgcttcccacgtgccaag

SEQ ID NO: 41726 - DNA, 261 bp, Zea mays
  Peptide Sequence Number=SeqID_83505
atggtgctggcgatcgtggtgctgctgggcgccgtggccatccatgtggtggtgctgctgctgcagccccgcgcgcggcaccgtgctccccttcaaatgcatctccaagtccaagttcttgttcttctgaccgtcgtgccctctgtattgtctagtggctactcttctgacctcagttccatggccgggctcgtaaatggtgtgcacatggtaatattcgtttccgtgagtcaaggtacaaaagattccttctatgcatga

SEQ ID NO: 41727 - DNA, 534 bp, Zea mays
  Peptide Sequence Number=SeqID_83506
atggtgctggcggtcgtggtgctgctgggcgctgtggccgtccttgtggtggtgctgctgctgcagccccgcgcgccgtacgtggcggtgcgggcggcgagcctgtacgcgctggtgtacgggcagacgggggcgctggacgacgtgcaggtcacagtccgggtggaggcccgcaacggcaacgcgcactcggcggcctacttctcgcgcctcgcgttcgccggcgcgacgctagcggtgctccgtgcctacccgttccgcgtgcccgccaggggcgtcctcccgctggcgtacgtggcgcgcgcgcagggcgccccgctgggcgacgccggcagcgtcgccatggaggccgcgctccgcgacggcgtggtgccgttccgggtggagggggaggcccggacgcgatggaaggtcgcggggatcgtcggcgtcgaccagtggacgtgcctggcatgccagctccgcttcttctggcccaacggcaccgtgctccccttcagatgcagctccaagtccaagttcttgttcttctga

SEQ ID NO: 41728 - DNA, 246 bp, Zea mays
  Peptide Sequence Number=SeqID_83507
atgtctattgttcatattattttatatgaggtagccctgcacacatcatacgaagaaggtgataatttgcaaatgcaaattaacattttgaactacatagagggcgcggtccgcacgacgcgcgccgctggactggccgaccaggctcaaggtgttccgggcaacatcctgctggactcggtgttccgggccaaggtcgccgacttcggccttgccaggatgctggcgcaggccggggcgccatag

SEQ ID NO: 41729 - DNA, 3057 bp, Zea mays
  Peptide Sequence Number=SeqID_83508
atggcgccaccgcggcgcgcgtgcccgtgcgcgcgcgcctgctttgtcctgctgctcgcgctgctcccctgctgccgcgtgcgccgagcgggcgcgcagtcgcagccggcggacgacaagcatctgctgctccggatcaagagcgcgtggggcgacccgcccgcgctggcggtatggaacgcctcgtccccgggcgcgccgtgcgcctggacgttcgtcgggtgcgacacggccgggcgcgtcacgaacctcaccctcggcagcgccggcgtcgcgggccccttcccggacgccgtcggcggcctctcggcgctcacccacctcgacgtctccaacaacagcatctccggcgcgttcccgaccgcgctctaccgctgcgcttcgctccagtacctcgacctgtcccagaacaaactcaccggtgagctgcccgtggacatcggtcgccgcctcggtgcgaacttgtccacgcttgtcctcagcaacaaccagttcgatggcagcatcccggcgtcgctctccagcctctcgtatctccagcatctcacgctggacaccaatcgcttcgtcggcaccgtcccgccgggtctcggttcactgacgaggcttcagacgctgtggttggcggccaaccggttcgtcccggcccagttgccggcgtcgttcaagaacctcaccagcatagtcagcctctgggcatcacagtgcaacctcaccggcggcttcccgagctatgtgctggagatggaggagctggaggtgctggacctgtccaataacatgttgaccggaagcatacctgcgggtgtttggagcctcaagaacttgcagcaattgtttttgtacgacaacaacttctccggcgacgtggtgattaatgacttcgccgcgacgagcttgacgcacatcgacctttcagagaattataaacttacaggacccatccctgaagcctttgggctcctgaagaaccttacacagctgtacctcttcagcaacaacttctccggcgagataccagcgagcatcggcccgttgccgtcactgtcaatatttaggtttggcaataaccgctttactggcgcgctcccgccggagcttggaaagtactcaggattgctcattgttgaggctgattacaacgagctcaccggtgctatccccggagagctgtgcgctggaggcaagttccggtacctcaccgccatgaacaacaaactgaccgggtccatcccggcaggcctcgccaactgcaacactctgaaaacgctggctctagacaataaccagctctccggagacgtgccagaggctttgtggacggcgacgctgcttaattacgtgacactaccgggtaaccagctctccgggagtcttccggccaccatggccagcaaccttacgacgttagacatggggaacaacagattcagcggcaacatcccggctactgcagttcagctcaggaaattcacggccgagaacaaccagttctccggccaaataccggccagtattgctgacgggatgccgcgtctcctgacactgaacctgtccggtaacaggctctccggcgatatcccggtgagcgttactaagctaagcgatctgacgcagctggacatgagcaggaaccagctcatcggagagataccagcagagctgggcgccatgccggtgctcagcgtccttgacctgtcgtcgaacgagctctccggtgccataccgccggcgcttgcgaacctgcgactcacctccctcaacctgtcctccaaccagcttagcggccaggtgccggccggcctagccaccggggcctacgacaagagcttcctggacaaccccggcgtctgcaccgccgctgcgggagccgggtatctcgccggtgtgcgctcctgcgccgcggggtcgcaagacggaggctattccggaggcgtctcgcatgcgctccgcacgggcctcctcgtcgccggcgccgcgctcctcctcatcgccgcggccatcgccttcttcgtggcccgcgacatcaggaaacggcgccgcgtcgcggcgcggggccactggaagatgacgcctttcgtcgtggatcttggtttcggggaggagtccatactccggggcctgacggaggccaacatcgtcggccgcggcggttccggccgcgtgtaccgcgtcaccttcaccaaccggctcaacggggccgcaggcgcgggctgctgtgctgcctctccggcgccgaggcccaagctcctcgtgtacgactacatggacaacgggagcctgtacaagtggctccacggcgacgctctcgccgccggcgggcacccaatggcgacgagggcgcggtccgcacgccggacaccgctggactggccgaccaggctcaaggtggccgtcggcgctgcgcaggggctgtgttacatgcaccacgaatgcgtgccgcccatcgttcaccgcgacgtcaagacgagcaacatcctgctggactcggagttccgggccaaggtcgccgacttcggccttgccaggatgctggcgcaggccggggcgccagagaccatgtccgccgtggccggctcgttcggctacatggctcccgagtgcgcttacacaaagaaggtgaatgagaaggtcgatgtctacagctacggcgtcgtgctcctggagctcaccaccggcaaggagcccaacgacggcggcgagcacggcagcctggtggcatgggcacggcaccactacctgtctggagggagcatccccgatgccactgacaagagcatcaaatacgccgggtactccgacgagatcgaggttgttttcaagttaggcgtgctgtgcactggagagatgccgtcgtcgcggccaaccatggacgatgtgctgcaggtcttgctcaagtgcagcgagcagacgcagcacaagggcaaaacggagcgtgtccctgagtacgaggaggctccactcctgcagccacagcgcgggagtcgccgaaaacagccctcgaacggcacggggattgacatcgaatcgaagagcgacttcgacagcattgtctga

SEQ ID NO: 41730 - DNA, 384 bp, Zea mays
  Peptide Sequence Number=SeqID_83509
atgaacccccaacttgctgatttgctcctaaggcttctctgcaaaggtgcctttttggtcgctttctcaccctatgattctgataacctgatccaggggatcgcatcacgctgcaggctgcggctgagcatccttgggttgctggtgatgaggggccagtccctgaattcatctgtagatgtgggtttggccgcaggaagaggaatgatgtccgcgaagaagtacaataacaaagcatcctcggatagtccacagctgaagctctgggacgtcagtgtcagtggatcggtgcggccgccaacctctgggatgtatgattggacaggacgagaggacgatcatacggggtacggccccgtgcaacggctgcagtacggagaatag

SEQ ID NO: 41731 - DNA, 798 bp, Zea mays
  Peptide Sequence Number=SeqID_83510
atggtgatattgatgaatatgttagccatagatcaaagcggggtggatgaaatggcgtcaagcatcgggagtcttatgcgacaagagagtgctacaaaagttgaaagtcaagatgatgatgatatgctttggagatctcctggcactcctgttttcactgccccggagtgctgtcaaggttcagcctaccatggtcgggcctctgatacatgggcagttggtgtaactttatattgtatggtttctgggcattatccatttcttggggatacattgcaggaaacttatgataagattgccaatgatcctgtgcaaatacctggagacatgaacccccaacttgctgatttgctcctaaggcttctctgcaaaggtgcctttttggtcgctttctcaccctatgattctgataacctggtgtttgctaagtttctaagcatgacgttatctgttttaatggatgtccttgccccttccttccatgtgcttgatttgcagatccaggggatcgcatcacgctgcaggctgcggctgagcatccttgggttgctggtgatgaggggccagtccctgaattcatctgtagatgtgggtttggccgcaggaagaggaatgatgtccgcgaagaagtacaataacaaagcatcctcggatagtccacaggagagggaaaaaaaagaaggaaaaatcaatgacaaaactgtgtatggctgtgcggtttttgagctgggtgcagctgaagctctgggacgtcagtgtcagtggatcggtgcggccgccaacctctgggatgtatga

SEQ ID NO: 41732 - DNA, 1683 bp, Zea mays
  Peptide Sequence Number=SeqID_83511
atgccgaaaagtgatgatgaaaaagacacagagtttgttcatgctggcgatgggtctggtgatgacaatgttggtattgttggtggagatgaaaataagggtataactaagacacgagctattcgatgctcacctggaaagtttataaagcttgtgaattctctatctgatgaattgaaaagtgaagtggttgctaaggggtttggcggcctgcttaggttcaagccacatttattgtcgagaaagttgcttagctggctgatgcggaagctcaacccagaaacaatgaaattagagattggtggtgggaaagagattcaaatcaccgaacacagtgtttggtgtgttttggagttaccaaatgttggcagtgatccgcccaccatgtccgatgcagatgctcgtgccctgcgggacgagctgggggtgcaaatttgtgggaaatcttatagacgcatatctggcatcaatatatctgttatcactgatagattgcagaagaggactctcaatggtgagctgggcctgagagcctttttcatcgcagcatttcagtgtcttctattctccaatactgacactcggatcagaattgatgatgtgaagtacactcaggacatccagaatattggcaacaagaactggtgcaaagctgtagtagacaggctgagcatagctgctcggctttatagaaaggattttgctgagaaaggcattaacgcaccaatcagtggatgcgaaatctttgtagctatgctttatgtcgacaacctgcaacatggattagacacaagtcctttttcaatccctcgatgtgctttcttggactccaagatgattgatgctatagcaaatatggatctcaggggtgatgttcttcctgggaccactgagtttggacacctcaggttgagaagtatcactgacacgtgctacggcgtccccattggtgctctagcaatattacatgctccagtaccagcacctgccccagtagcagtccctaatccaacagcagcacctaacccagtagcagcagcatttgtcccagtagcaacaacagcacctactgggacatctgctgataaggctgtgaagtattcaacaatatcccgcgaccttatggcaaaagctcaccacgagtgctacactggcattcagaagcttatcgctgacgctatcgttgagaagcgagctgccaaagagcgcaggaggaaggtgaagaacgaccctagagcaggagcaggagcaggaactagttcaattgcaccggaggaccaatctagaggaggtgatggtgaagaaattatacggagtcccgttgcaattgaccctagagctggagcagatcttgatgacagcttagattttacgagaaccccatcgtgtggtgatgacattgatctggaagagggaaatttgaatagaacacctcctgatttacgtgggtcaacccgaagtattgatgatatattggaaatgatctattccccagagcactttgcaagcattgatggcgagtcccctcccaatagccagccgactcgtgcaccacgaattgctgttcgcaagaggaaggcttcctcaaacccccctggcaatgatcaaccgcctgtgggaccacctgagacagaagaggagcctctgagcagggacactgggatgcagcatcctactgcccag

SEQ ID NO: 41733 - DNA, 1734 bp, Zea mays
  Peptide Sequence Number=SeqID_83512
cacctcctgatttacgtgggtcaaccccgaagtattgatgatatattggaaatgatctattccccagagcactttgcaagcattgatggcgagtcccctcccaatagccagccgactcgtgcaccacgaattgctgttcgcaagaggaaggcttcctcaaacccccctggcaatgatcaaccgcctgtgggaccacctgagacagaagaggagcctctgagcagggacactgggatgcagcatcctactgcccagaaggcagaggctgagaagaaaaaggctgagattgagatgaagaatgctgaagctgaggaggctgagaagagaaaggctgaagccgaacaagctgataagaagaaggcagaagaagctgagaataagagaaaggctgaggccgaagtagctgagatcaagagaaaggctgctgctgaagaagctgagaagaagaaggaagtagaagctgagaataagagaaaggctgaggccgaagtagctgagatgaagagaaaggctgcagctgaagaagctgagaagaagaaggaagaagaagctgaggataagagaaaggctgaggctgaaaaagctgagattaagagaaaggctgaggccgaagaagctgagattaagagaaaggctgaggctgaagaagctgagattaagagaatggctgcagctgaagaagttgtgaagaagaaggctgatgccgagaagaaggttgatgcggaggagaaaaggatacaggttgcaatccagaaacagctaaaggacaacatcaaagctttgaaaaagccggtgcccgctgccaagttaaagaagatgttccagttacaaatgtcaaaagaatatgctgagcagcgcccaacagaggccaaagctgagattgatagtttggagaagagcattgatggccaggcaggacccagctcatcatttgatgatatacagttcccggcggagtctgatgatgatatcaacaatttgacccaaccaatccgactttctcaagacgaagtctcagtaggccaggctgatttcagtgagtttcaaaggatgatattcaagcgcctaggtgatagagtgctgaagaagcctagggagtacatatccccgttcaagatccctcgtaatcgacctgagatacccctggccaaggctgttgcacttaggcggaagatcgcatctgatcctgagctgaaaaggagaattttgttggagtttggccttcttgttggactaactggcgaggaaattttaacatctttttctaatgacacccttggcgagtcaggaatcatagactttttcgtgcactgcatgcgacatgatgatattgtgcacaaggttgattcttgtggatacagagtgtttctgaccactggtttttatgtttttgtccctatcaaagatggtgctcactattttgtatattgcttcaattttatccataagcgtattgatgtgctggactcgaacgactacttcctgaattgttctaatcaggaagaacggcacaaggctgtctttgccaaaatcccaatcatcgatgcagccttccagaaagtttccaacctcaagttacccagattcaagggcccgatatacagatgtgagctgttgcgttacgagatcttccaccctttgaaccaagctgaaattcctggttcgcttgataagtttagaattggtggtcgtccgttgccaattgaatgggatagtagtcagtcgaacaattag

SEQ ID NO: 41734 - DNA, 411 bp, Zea mays
  Peptide Sequence Number=SeqID_83513
atggaagttggctgcgagctagcttcctgtcagggtggggagtgggatcctatagcggcatatgaaaaacaggcacctttgcactgggatgcagatggatgggactttgcagttgcatcggaatccgacggtgacctcaccgacggggacgacttccagttcctcgttgacagggagctagactccgacaccagcactgagtggtcttggacgtacgacggagaatcgtcagatgtggagtccttggacaacgatgatgacccgatgtctggacattggatgggcatggtctcctccttcgacgaagatgacgagaacaacgacagcagcagtgactacgacagcagtgacgaggacatcgacgacagtggcgatgatgacggcgatgatgatggcggggcaagccaatga

SEQ ID NO: 41735 - DNA, 378 bp, Zea mays
  Peptide Sequence Number=SeqID_83514
atgacttttgactcctctttgctcctcgaagatcgagtaaacgtcgatccagttcttgattttaatgtattggaatggtcatcggccacatttccattcatcgcaactcagaaaaaactgtggcgcctagctttacccatgtcgacatcaccgagtgattcctctgcttcttttgtctcccattcttctagccgtgaaccaaccccagagtgggatcctatagcggcatatgaaaaacaggcacctttgcactgggatgcagatggatgggactttgcagttgcatcggaatccgacggtgacctcaccgacggggacgacctccagttcctcgttgacgggcagttagactccgacaccaacactgagtggtcttag

SEQ ID NO: 41736 - DNA, 555 bp, Zea mays
  Peptide Sequence Number=SeqID_83515
atggtgttcgcggcggtcagggaggtgcatgtcgagatggagcccactgcggaggagcaggcgcttccgggggtgcacgtggccgtcgaggatctcaggctcaaccatgcccaggacatagctatggggtttcaccagtggcggaggacggaaaagattgaaggcggtgagagccaagaaggtgctgatactactcaaaatatgaatgataccgataaaaacaacagcgaaagggaagagagtgatttagctctagagaaggagagtgctacattcacctcacagaagcagcacctggaagaattatctgacgcaaaggaaacatttattggaggtcctgaggcagaggccaaatccaacaacacaaaggattctgacaatccaattgctaaggtggggagcagtgtagcatctgacaagatgagagatgggtgcaatgctaatgccattccgtgtcctgctacttcaaatcatacaactgaacacagctccatagcttcccaggaagccagtccagcaagtacaaaagacacagctatccctgaacaagtttga

SEQ ID NO: 41737 - DNA, 720 bp, Zea mays
  Peptide Sequence Number=SeqID_83516
atggcgcgggctgaggtgggtggcgaagatcgtgatggtgttggcggcgccaccgatgctgagtttcttgcagtgaaactttattttcttcgatatgcttatgatccaccaagtgacctcaaagatctggcttccactttcagcccttgcgcaggcggtgagagccaagaaggtgctgatactactcaaaatatgaatgataccgataaaaacaacagcgaaagggaagagagtgatttagctctggagaaggagagtgctacattcacctcacagaagcagcacctggaagaattatctgacgcaaaggaaacatttattggaggtcctgaggtagaggccaaatccaacagcacaaaggattctgacaatccaattgctaaggtggggagcagtgtagcatctgacaagatgagagatgggtgcaatgctaatgccattccgtgtcctgctacttcaaatcatacaactgaacccagctccgtagcttcccaggaagccagtccagcaagtacaaaagacacagctatccctgaacaagttgaaaggccaagttctgaggaattactagctgatgtttcacttccacaagggaaggtagagccgaagaagactgaacctgcacctgctgcctcgtctaatatccaacagcatgggtgcaaacaagctggaaatggcaacactggtacttcattcaaccttatacattatttttcttga

SEQ ID NO: 41738 - DNA, 783 bp, Zea mays
  Peptide Sequence Number=SeqID_83517
atggagcccactgcggaggagcaggcgcttccggtcgatgcacgagagacgtcgtccgtcgactttgaggggcctgaggatctgttttcggggagggggctcaaccatgcccaggacatagctatggggtttcaccagtggcggaggacggaaaagattgaagccaccgatgctgagtttcttgcagtgaaactttattttcttcgatatgcttatgatccaccaagcggtgagagccaagaaggtgctgatactactcaaaatatgaatgataccgataaaaacaacagcgaaagggaagagagtgatttagctctggagaaggagagtgctacattcacctcacagaagcagcacctggaagaattatctgacgcaaaggaaacatttattggaggtcctgaggtagaggccaaatccaacagcacaaaggattctgacaatccaattgctaaggtggggagcagtgtagcatctgacaagatgagagatgggtgcaatgctaatgccattccgtgtcctgctacttcaaatcatacaactgaacccagctccgtagcttcccaggaagccagtccagcaagtacaaaagacacagctatccctgaacaagttgaaaggccaagttctgaggaattactagctgatgtttcacttccacaagggaaggtagagccgaagaagactgaacctgcacctgctgcctcgtctaatatccaacagcatgggtgcaaacaagctggaaatggcaacactgctgcagccgaagcagtagcctgctga

SEQ ID NO: 41739 - DNA, 1959 bp, Zea mays
  Peptide Sequence Number=SeqID_83518
atgaccaattgctacaacgaagaaaaatttgatgaaggcatgtcaaaatctgatttcatccttatggaatctgcagatgttccagggtctggtggttctaactggactgaccatgagacattgcttcttttggaagcgttagaaattttcaaaggaaaagaatggcatgagattgctgagcatgttgctacaaaaacaaaagaacagtgcatgttacacttccttcaaatgccaatttctgaaccgtttcttgatggcgatgatttcaatgaaacaccccagaagatcacaaaacaggattcagcagaaactggtccttctgatgtacctgacaagatggatgtagatggtaatgcggaaggaaaagagagcactgatgaaaaagcttacaagaaagcagattccagttccgcagaaacaagaacaaaattagctgaccaaaatatttctgctaaagaggatactatgaaattaggtgatgatgacctagttgcttccattgttgatgaaccaaataaatcttcattggtggatcctgcacataagaagaattctgctaatgctgatgtctctggggaacacccatccaactttattactaatatcctgagatccacttttgaagcagttgaccactttctgggtaaagaagacatgggttcgtttgctgaagcaggaaatcctgtgatggcactgatccaccaagtgacctcaaagatccggcttccactttcaggcggtgagagccaagaaggtgctgatactactcaaaatgtgaatgataccgataaaaacaacagcgaaagggaagatagtgatttagctctggagaaggagagtgctacattcacctcacagaagcagcacctggaagaattatctgacgcaaaggaaacatttattggaggtcctgaggcagaggccaaatccaacagcacaaaggattctgacaatccaattgctaaggtggggagcagtgtagcatctgacaagatgagagatgggtgcaatgctaatgccattccgtgtcctgctacttcaaatcatacaactgaacccagctccgtagcttcccaggaagccagtccagcaagtacaaaagacacagctatccctgaacaagttgaaagaccaagttctgaggaattactagctgatgtttcacttccacaagggaaggtagagccgaagaagactgaacctgcacctgctgcctcgtctagtatccaacagcatgggtgcaaacaagctggaaatggcaacactgaacctaaaagcaaggaaaacgctgcggccgatgatgaccccataacaaggctacagcgagcggccggtactgccatttcggcagctgcagtgaaggccaagttccttgtggagcaggaggagggttacattcggcagctagctgcacttgtgatcgaaaagcagaagatggaaacaaaaatgtcgtttctcaccgaagttggaaacctgcagcggcttccagaacaatccagcacggggctccgcttgctagcacatcgcttcttagttgaagttctacggaagtttgaaattcaaattcatcaattgacactgaatgctatggctgcactggcgaagagttcgtcgcttgcggagtgtggcctctgccgcacggatgggttttgggcaaaattatacctcgccggatgccgacgctgggggataaattggtgcggagcccagccttcgctgtggacttgttcggacgggatgcgctcgcccttcatgcgggaggtggagtcagaggctgttaagattgttggtaaatatgcggcgaagactgagatgctaaagagttgggatatccgtggttccaacgtgaggttgaaccgtgtttttgagttgaatagcttgccatatggtccctacccggaggggaattctactgacgttggtgacgaccgaggaaaacaggcgaagcccccggcctga

SEQ ID NO: 41740 - DNA, 504 bp, Zea mays
  Peptide Sequence Number=SeqID_83519
atgcgcgcaacgaatcgggaaatggtgaaggggtttacccggtccacgtgcgccggcgagttcttgaactccggtgagcgcgatttggcttctccggtgacgcgggcccctgggtcaagcttgcgcaaggctcacggcttcaccaggaagctctctgaaggcttggatcaaacggaggaggactggagaggggctggccacggtggctgctctcgggcggcactggcgggctgcggggaggttgccagagttaatggctggctcgggcgagtccggcgcagtacggaggaggtaacggggaaggcaaccgagcgctggggtgggttttataggcgcggacgcggccggggcgtcggttcgaccgtttggcgcgacgggggcgcgacgggggcagcgcgtcgaacacgtggcgcgttgcttctgcccgtgttcttcgctctgctgagcggccaggcgtacgaatcttgccctaccgcctgtgggagatctcttccctgcacctag

SEQ ID NO: 41741 - DNA, 453 bp, Zea mays
  Peptide Sequence Number=SeqID_83520
aactgcgagggctcttttgcatatcgcatccgcgaagggggtatcgcgatcacagggccgtcagatctgagatcaaggctaccaggcggcggcgccaccagccattacggcgaggccttgccggagagtcgttactccgacgatccagagccccgatccctaccctgcaagagcgccaattcgcaccaggacggccccaaccgtggcggcaatgtttttatcttatgcggctccatcaatggctacgggagcgctggttcttatatgcccaagagccccgaccgagttatggactccgatgaagttcgcccggagatcccgcgagaccgtggagaccaggtcgacgaaggaggcgggtctgccaacacggtcccacacgacggtgaaacaacagtcgcggccgagcaggggaaggaaacagcggttggtgggctggctgcgtggagtttgtag

SEQ ID NO: 41742 - DNA, 687 bp, Zea mays
  Peptide Sequence Number=SeqID_83521
atggacggcacagatctacctactgaaatgctgcacaaatttaatctaagccgcatgcgcgaaatcgaacggccacgcgcacagcacacagtcattcatctggagccgttgatcatgagattaacggcccgacgtctttccttcctcacgcagctaccaggcggcggcgccgccagccattacggcgaggcctcgccggagagtcgttactccgacgatccagagccccgatccctaccccgcaaggttctacacgtagccgacataaaagcgagacggccccaacttcactccaggaaactccacgaagatctcagggcaagccttatgctttcaattcgcagcgccaatgaggaacggccatggcggggtggattgcacggtgatgtcgaccccattgaggattcatcccatctcccccggttgaccatgatctttttcgtgggaaccagacggagctcccagacccgttcccggatccgaacggtggcgcaccacggccccacccgtggcggcagtgtttttatcttatgcggctccatcaatggctacgggagcgctggttcttatatgcccaagagccccgaccgagttatggactccgatgaagttcgcccggagatcccgcgagaccggttggatatgcccaagggaaagggcaaggcgtccgcactaatcccgcgttga

SEQ ID NO: 41743 - DNA, 897 bp, Zea mays
  Peptide Sequence Number=SeqID_83522
atggctccaggaattaggttcagcaagacagtgagggcaggtccacaactagaggagcaaccttcaaaaggcttcagtctacagagacagatggccacaatagctgcagaggaagacatggcatccgctgctcatgatagtacaggtgatgctgaaggcaatggagcaccaaggagacccagggtagcaactaagggaaaacatctggacaggatgactaaagttatgcaaaggagactacccatagctgttgaggaaggcaaaaaaaggccacatgaacctgtgcaagctgccaagtttgcatcagaggctggcatcattattcaggaaaccatgcctatcctaactcattggaaagattacaaggacgaccagaaatactacaacaactttgtgtcacagctaaataaatacttcaatggtgtacctgcaaatgagattaggacaacttctcttgtatcttacatgactgatgaacaatggagggcattagttgcaaagtggtctgatccaaagaacatggaaataagtgaaaagaacaagcagaaccgcagtaaagtcaagtttcatcagtctacgggttctcgctgctatgtggcacacttacatgcatataagcagaagagaaacagagaagaacccagcttagatcagactgaagaactagatgcggtggacgccttcaagacctgccataccaactccaaacgtggcctgagtgaaccagcaagagaagcactttctgatatggaggctttgagggctgaacctgttgctgaaggtgagatgccagcatccagtgtgcagcttgtgtccaaggtgctgtcccagagcagctcacaccaattcctgaagagcgttggcatcaaaacaccggcatcctccaagtcttcataa

SEQ ID NO: 41744 - DNA, 433 bp, Zea mays
  Peptide Sequence Number=SeqID_83523
atgcccgcgagcttcgccggtcgtcgtgcccgcgagctccactccgtcatccttggctcctcgtccccgatactgtctcatatggaggctttgagggctgaacctgttgctgaaggtgagatgtcagcatccagtgtgcaccttgtgtccaaggtgctgtcccagagcagctcacaccaattcctgaagagcgttggcatcaaaacatcggcatcatcatcaaatcaaagtgagcttcgggaacaacttgcagctgaagcgacgactgctgttcaaggtgaactcgaccagctcaggaagaaatgtgaagaagctgaggaacagcaggcgaggacacaaagggagttggaggagtacaagaagataacagagaagaacagcaaggagatggaggagaccaatgtgctcatcaagaagctcttgtccttgcatg

SEQ ID NO: 41745 - DNA, 405 bp, Zea mays
  Peptide Sequence Number=SeqID_83524
atgcagttggtggacgacctgaagaatgatggacttaaccagtggatgctcgccaagcgagctcggatcttgacagttgaagggagcagcagcaccctcggcgtcgactacaccttcggcgagggtcttctccaagaatccggctcgagcagacggctcggccggtcaccccgaggcctcggccagtcaccccgaggcctcggccagctatcccccgaagacatcagcccggcccgaggcctcggcaactcaattccggtgtcggtcccgccagtggatgacccggccgggctctggccgaccaattcttattttcgagccaactctgcctctgtccgtgctgacaccgctacccctggcttcagctcatcgaagagcggccgaggggttcctttaactaagtaa

SEQ ID NO: 41746 - DNA, 177 bp, Zea mays
  Peptide Sequence Number=SeqID_83525
atggccagggacacaacctgccgcatcctcctgctgttcacccgaccgagagatgatgatcgtgcaagtgatgtggtgcccaaccacaagatgcagttggtggacgacctgaagaatgatggacttaaccagtggatgctcgccaagcgagcacctcacccagcaaacactatctaa

SEQ ID NO: 41747 - DNA, 375 bp, Zea mays
  Peptide Sequence Number=SeqID_83526
atggctatccgcaagacaaggggaaggttgcagcggaccatgggtgcggcattggagggatctcctcgcgcgcactggaccagaggagcgcccgcgccgtgggaggcgccatggacgagtaggagcagaggggctcgtggcttgtcctgggcgcctgcacttggagaaaatggcggccaggtggggctgccgagggggaagccccttgtgcctggaccagcgactgggagcaggaagggagcgccgaggaagctggagccgagcctccatggatggggagctgggatgaatggcgtcatgggagtttcctgcgcgttggggaagaaggcagtgctccacgggagagacggctgggagaaaaagagtggcggctaa

SEQ ID NO: 41748 - DNA, 250 bp, Zea mays
  Peptide Sequence Number=SeqID_83527
atggcgcctcccacggcgcgggcgctcctctggtccagtgcgcgcgaggagatccctccaatgccgcacccaagccgtgtcgtcatcacgcctcgcgcgtcgctcgtcggcaaagagccccgtctgagggcatgcatgagcacatttgcggttggagaacaagaagttgttgatgtgtcacgaggatggttcgtggatggtattaatcgtttgttaaaatacttcgtcataaagcagtgtgttagtcgtg

SEQ ID NO: 41749 - DNA, 1629 bp, Zea mays
  Peptide Sequence Number=SeqID_83528
atgcaggaggtagagctccggctcagctcgccctccgccccagcaaggatgatgaagatccttgaagctgagggcgaggcagtggccgcagtccggcttgcttctccccaccatcgaactggtgccgtcgcggacggagtcttcaccaacaagctccaagtgcgcgtaactgcccagcggttacaagcactcctccactttcgcccaaaccagcgggtgaaagagcggaccgccatgcaggtggcgtgcaaccgcaccaagggggcgcaccctttcgacttcgacgcgtccagcatgggggcccaggcccacacgtcatgtaaccggcgcgccggttactacgtgcgggaaactgcaccgccacttgcgccagtaccgcgccttctcgactacggaactggtgccgcgactcgaggcaaccctgcgcatggcccaatagtgccaaccgagcacattgatcacgggtcagtcagccgcgggagaaggcgcgatggtcgatatggccaaaagtgggccggcagtaatggcggcggcaggcaggcggaagcagcgatcaagtcgtctgcaggcacacggaccgggaaaggggatactccgaaagggatctttctccgcgaaggaagcgggctccgagccctcctactgatcagaggttcgaaggttggcccctcggaagggttcaacagctgcctcagagcactcaggcttcgcgcccactactggtcagaggttcgaaggctggcacctcggaagggttcgacagccgcctcaggccactcgggctccgcgcccactactgatcaggggagcgattctgtaacggaatcccatcagagggaggcatcgagccctcggaccctatcaaacgggaccgggtccggcaaatcacctgcaggctcgggggttgctcacgcaaacccggctccggccaaaccgttgacagcgtcaacataccagcccgagaacttggaacctgactatgcacccgggctacggccagtccgcatgagggaacaaccagaccggccgaagcatcacgaaacgcgctacgacctcggaggagtcaaaccactcctccgaggcctcgggggctacacccggcggctggtaacccccatcagcacaaagctgcaaaggcctgatgggcgcgattcaggtcaaggctccgtccactcaagggacacgatctcgcctcgtccgagcctagcctcgggcaaaggcagccgacccaggaggattcacgtctctcccgaggaaaacagcgccacctgccctgcttcgactgctgtgccactcgacagagtgaggctgacagcagctaagttcagcctcgagcgccataggaagctccgcctcgcccgaccccggagctcgggctcaacctcgacgccggacgacggactccgcctcgaccgaccccagggctcgcactcagcctcgacctcagacgacggactccgcctcgcccgaccccagggctcggactcagcctcgacctcggacgatggtctccgcctcgcccgacccccgggcccggactcagcctcgacctcggaggagtcaccgcctcgcccgaccccgggctcggatcgaccacgtcacagggggccatcattaccctacccctag

SEQ ID NO: 41750 - DNA, 1629 bp, Zea mays
  Peptide Sequence Number=SeqID_83529
atgcaggaggtagagctccggctcagctcgccctccgccccagcaaggatgatgaagatccttgaagctgagggcgaggcagtggccgcagtccggcttgcttctccccaccatcgaactggtgccgtcgcggacggagtcttcaccaacaagctccaagtgcgcgtaactgcccagcggttacaagcactcctccactttcgcccaaaccagcgggtgaaagagcggaccgccatgcaggtggcgtgcaaccgcaccaagggggcgcaccctttcgacttcgacgcgtccagcatgggggcccaggcccacacgtcatgtaaccggcgcgccggttactacgtgcgggaaactgcaccgccacttgcgccagtaccgcgccttctcgactacggaactggtgccgcgactcgaggcaaccctgcgcatggcccaatagtgccaaccgagcacattgatcacgggtcagtcagccgcgggagaaggcgcgatggtcgatatggccaaaagtgggccggcagtaatggcggcggcaggcaggcggaagcagcgatcaagtcgtctgcaggcacacggaccgggaaaggggatactccgaaagggatctttctccgcgaaggaagcgggctccgagccctcctactgatcagaggttcgaaggttggcccctcggaagggttcaacagctgcctcagagcactcaggcttcgcgcccactactggtcagaggttcgaaggctggcacctcggaagggttcgacagccgcctcaggccactcgggctccgcgcccactactgatcaggggagcgattctgtaacggaatcccatcagagggaggcatcgagccctcggaccctatcaaacgggaccgggtccggcaaatcacctgcaggctcgggggttgctcacgcaaacccggctccggccaaaccgttgacagcgtcaacataccagcccgagaacttggaacctgactatgcacccgggctacggccagtccgcatgagggaacaaccagaccggccgaagcatcacgaaacgcgctacgacctcggaggagtcaaaccactcctccgaggcctcgggggctacacccggcggctggtaacccccatcagcacaaagctgcaaaggcctgatgggcgcgattcaggtcaaggctccgtccactcaagggacacgatctcgcctcgtccgagcctagcctcgggcaaaggcagccgacccaggaggattcacgtctctcccgaggaaaacagcgccacctgccctgcttcgactgctgtgccactcgacagagtgaggctgacagcagctaagttcagcctcgagcgccataggaagctccgcctcgcccgaccccagagctcgggctcaacctcgacgccggacgacggactccgcctcgcccgaccccagggctcgcactcagcctcgacctcagacgacggactccgcctcgcccgaccccagggctcggactcagcctcgacctcggacgatggtctccgcctcgcccgacccccgggcccggactcagcctcgacctcggaggagtcaccgcctcgcccgaccccgggctcggatcgaccacgtcacagggggccatcattaccctacccctag

SEQ ID NO: 41751 - DNA, 522 bp, Zea mays
  Peptide Sequence Number=SeqID_83530
atgccggtcgttcttctttctcctttctcttctctcactcgcttctttcacttctctgcccgcgccgccgcgccgccttatagcccgccgccgcgccgcccgccgtatgcccgccgcagaggccgcgccgtccgccgtctgcccgccgcggaggccgcgccgcccgcccgccgtctgcccttgccgcggccgtgcgccgtgcccgccgcgccgcccgcctccgcggccgtgtgctgtgcaccgtgcgccgtgcaccgtgcccgccgtgtgccgtgcggtcgtgctctccgcggccgtgtgccgtgcgccgtgcgccgtgcccgccgtgtgccgtgcggtcgtgctctccgcggccgtgtgccgtgcgccatctgcccgccccctcaccgcggccgtccccgccgcacccgctcgctcgtcgccacgccgcctcgccgaaggatttcgaaacctccccgtgcaggggaggtgctgccgaaattttctgttgctaggcacctgttaggggatggaggaccgtga

SEQ ID NO: 41752 - DNA, 324 bp, Zea mays
  Peptide Sequence Number=SeqID_83531
atggaccgcaagccgccggagcgcttcaggcgtaggcatctcggccacgacggctcggtcgccgcgtcaacctcccgcgtccgatcccatgagaagcgcagggaccacaagccgctgaagcgcttcaggcgcaggctgatcattaagaatgggaaatggtttggacgtgactggaagaagatcgaggagcatgtcggcaccaagacgacggtccagatacggagccacgcccagaaatacttcctcaaggtccagaagcttgggctggctgctgggctgccgccgatgtacccgaggcgccacttcgccatgcagcagcagtag

SEQ ID NO: 41753 - DNA, 309 bp, Zea mays
  Peptide Sequence Number=SeqID_83532
atggaccgcaagccgccggagcgcttcaggcgtaggtttatctcgtctatgatgcaccttttaactgtttccagttcctctgatggacacacccctgattgttttcagatagcatttactgttctgattagtacatgtaagaagtttggacgtgactggaagaagatcgaggagcatgtcggcaccaagacgacggtccagatacggagccacgcccagaaatacttcctcaaggtccagaagcttgggctggctgctgggctgccgccgatgtacccgaggcgccacttcgccatgcagcagcagtag

SEQ ID NO: 41754 - DNA, 1863 bp, Zea mays
  Peptide Sequence Number=SeqID_83533
atgtcaacacgcgcacaagtcgcaacaagagctcgcaacacaacccgacgagttcacaactcaacaagagctctagatgctatcacaaagaaacaaatgtgtggaatcgaagtcttggtgcttaggaatgctttgagtatgcttgggggacttccacacgaggaagtggagctggacggcgacgtctacatcacggggaacggcagcctcgtgctcctctctggcgcctccctgacctgcgagaagtacgggtgcgttatatccgccaatttcttaggcgaggtgcgcctcagccgcggcgtccgcgtcacagccggcagggtctcgctggttgccaccaacatcacggtcgctgacacggtcgttgtgaataccagcgcgctcgctggtgatccgcctgaccagaccagtggcgttcccacggggacgcatggcaacggtggcgagcacggtggccgtggcgccagctgcttcgtcaagcaagggcagacgcaggaggattcatggggcggcgatgcctatgcatggtctgacctcgaacacccctggagctacgggagcaaagggggctcgaccagagttgagaaggactatggtggtgccggtggtggcatcgtgtggctgtttgctgaggacctggtcatgaatggcatagttctcgccaacggtggggatagcaatgagaagggtggaggtggttctggagggagcatctttataagggctgcatcgattgatttgagatgtgggaatgcaagcttagttaatcaagcagaatttggaaaacagttaccaattggggaagaccagcagtataaattggtggctacttggagtagacatgaagaaaaggtcaacatgctatacctatttggagaatatgttctaagcgcagatgctaaaggtaatgtattcatgtgggccttcagaggagcagaaccaaacattgaaccagttggaagcatatcattaggagacaagttcaccccaacgtgtatcatgcatcctgatacttatctgaataaggtaattgttggtagcgaagaaggcttcttgcagctgtggaatatcagcacaaaaaagaaactgtatgatttcaatggttggaactcacctgttcggtgttgtgtctcttctcctgtcctggatgtagttgctgtcggatgttctgatgggtcagttcatgttcataatatgattgccaaggtcgcagttgtgttccatgatgtgaatgtggcacattcttcacatcagtatgttgccactggaatgccgacaaaggcagctctaaagatcagtgtcgaaactccagttgattgtgcaactgttgttgtccaaggagtcttaaatgcagatgctgaaagtgaaaagctatggaagaaaaaagatgtaattcaaaagtttggacgcgactggaagaagatcgaggagcatgtcggcaccaagacgacggtccagatacggagccacgcccagaaatacttcctcaaggtccagaagcttgggctggctgctgggctgccgccgatgtacccgaggcaccacttcgccatgcagcagcagcagcagagctcggtggccggtggtagcagcgcggccgccatgccgctgctacacggccggcaacctacttgtgcgtcggtcgccatgccaggtctggccgagcccgacgccgttgcccatcacggttccatcggctggagcagccccagtgtggtcgtccccgcggccagcagcgccgcaagtggtagccagttcatcggggcgccgagcttgtgcgacaccagcatagactgggctggcggcggcggcggcagcggtagcccaagtgaagcgccagcgatgggcgccgtgcaggactaa

SEQ ID NO: 41755 - DNA, 1548 bp, Zea mays
  Peptide Sequence Number=SeqID_83534
atgacggttctggcgcgaactggcttgttctgtgtgcttgctgttgctgggatgcaaggcttggacttggagtgggcgacaggcgcttcggttccaggggcagcagcagcggcacgggtgaacgccgacgcgcagaggcagagcgcaccgccattattcgccgccggtaattttgcctggcgacggatctcgattcctgcagccaaaaccttggtggagaaaatgactgagctggttcgtgctggttcaggtggcagccggttcatcggggcgccgagcttgagcgacaccatcatagactgggctggcggcggcggcggcagcggcagcgcaagtgaagcgccagcgatgggcgccgtgcaggaccaacaacagatcgagctcccgttgtcacccgaggacgtgccatttgcgcaggtgtacaggttcgtcggcgacatgttcgacgctcgacgcggacgcgccgatcccggtggaagcccacctgcagaagctgaaggagatggacgacatcacagccaagacagtcctgctggtgctgcggaacctcgagaacaacctgtcgacgccccagttcgagcctgtggtaagacacggagcgctcttctaacggctctccgttctctggctgaacctgaagcttcattttcgctcactctgctcttctctggacagacaagagccctgtctgcattacatatatgcttaaagttctgccaagaggtcattaaaaagtcagtctaccatttgttggtgcaggagctgatgattcctcttaagcttgtgtttcgtgtatacacaacacaaagggcacttgatgctatctgcagaaaatttttgctggaaatgcgagtaacgattatattttgcacgcagggtgatactgcactcatcgattggattaaagaaatcccttgtgaagcaaagttcaactttctaaagcgagacggtgatgttgaaactaaaacagatgagttatatccaattaaagacatgtcacaaatatctagcgctgaaagaagggttttactttatctagaccatgacatggtgtttattccaataaatatccgagaaatgcactggtatcttgccgtgatcaatgtaagaaatatggagatacaagtgctcgactcacttggtaaatcatccggtcgcaatgacctcattaacactataaaaggactccaaagacaaattgatatggtatctcagcgtaaggaattaaaagatcacaggtggccagacctccgagttgcttcttggccacttagagaaatggaaatgaaatatgcaaagcaaacagatagctcctcgtgtggcctctttctactaaattatatcgaatactggacaggggatgaattatctgataattttacccaggaaaaattggctgctatattactattttcagatataaacaagagaaaggggtgtccgttatacaagtatgacaaagaagtcgatgctggaagctcctctgatgttcagatattagatagtcccacaaatcctaagaagaggaaactactttgtgtatcttaa

SEQ ID NO: 41756 - DNA, 1419 bp, Zea mays
  Peptide Sequence Number=SeqID_83535
atgaagcacgtggaccgtcctccaaataaccccaaacgtataacaattcagtcaagccagaagtgtttcagtgttgacattccctctgcagaacagtccaatccatgtccagaagttggaaatcctccaaatgttgacagtcaaaatttgaccaatgaaacagttcagcttgattctgatgaagatgacttcatgccagcgctgaagaagcgtaataggctcaatgtgaggtgcaaccctcaagatgtcattgcaagcattaacattttgaatgaaagacaacgtgaggctataagatgtaaaggtttctctaacattcttgatatgacagtagatgcgctgtgtagtagatcacaccttcaatggttgatggacaagctagaccccaaggacatgacaattcgtcctggtccaggaaaggaactaaagatcacaaaggacattgttcatcttatccttggtgtgccaaatcatggcggtggtaaaccattggggattgatgaagcagttgcagcaagcaacttgagggcagagcttggtttggccaaagatgagttcaatgtgacatttctacaggatcgtttaaggaaaggcgaggatgatgaccttacaatcaaatgtttcttcctcattttattcaaccgtctgttgtttccaattgctagctggggcataacatatcatgaggtgcttctgacagaagaaatgcgcagtttccatgagatcgactggtgccagttgatttttaatgatctatgtgaagctgcgaagaagtggcacaaccgaatcaccacaaaatgtctccacgactatatacggatgctccattgttgtccttccactgcccctcaaaataagactggcacacctcgcattaaattctttgataagaatagcataaaagctttgaccaaagctgacaagaggaagccggagtgcaggaccaacatttttgatgcaccgcgccctgcccccacgcctcggcccacttttaacatcaaacttccatctatcaaagagatgatgccaagtaagatcaacgatctcccacctcgtcatcgatctaaattcacagacattcttgctgcatatgacttggaggttgacaagtcatgcatagccataaaagacagcattgacaaaattattgagaagcaatacgacatagcatacaagtttatagaattgatcgacgaggtactacgtgtcgagtctgataatttagaaaacgagactgatgagccacagcatccggggaattcggctgattcagcagacatcgacgacggcttcctgaggcacgatatacgagtggcggcccgaggcgacatcggtgagcgtcgcgacggctatgactgcacgaggcacgagcggcggagcgagcgtctgcggccgctaccgcccaacgtcgagcggtga

SEQ ID NO: 41757 - DNA, 930 bp, Zea mays
  Peptide Sequence Number=SeqID_83536
atgaagcacgtggaccgtcctccaaataaccccaaacgtataacaattcagtcaagccagaagtgtttcagtgttgacattccctctgcagaacagtccaatccatgtccagaagttggaaatcctccaaatgttgacagtcaaaatttgaccaatgaaacagttcagcttgattctgatgaagatgacttcatgccagcgctgaagaagcgtaataggctcaatgtgaggtgcaaccctcaagatgtcattgcaagcattaacattttgaatgaaagacaacgtgaggctataagatgtaaaggtttctctaacattcttgatatgacagtagatgcgctgtgtagtagatcacaccttcaatggttgatggacaagctagaccccaaggacatgacaattcgtcctggtccaggaaaggaactaaagatcacaaaggacattgttcatcttatccttggtgtgccaaatcatggcggtggtaaaccattggggattgatgaagcagttgcagcaagcaacttgagggcagagcttggtttggccaaagatgagttcaatgtgacatttctacaggatcgtttaaggaaaggcgaggatgatgaccttacaatcaaatgtttcttcctcattttattcaaccgtctgttgtttccaattgctagctggggcataacatatcatgaggtgcttctgacagaagaaatgcgcagtttccatgagatcgactggtgccagttgatttttaatgatctatgtgaagctgcgaagaagtggcacaaccgaatcaccacaaatgtctccacgactatatacggatgctccattgttgtccttctattgaacattataattcttttatgtagtgtattacttggatcacctgcatacagcactgccctcaaaatagactggcacaactcgcattaa

SEQ ID NO: 41758 - DNA, 345 bp, Zea mays
  Peptide Sequence Number=SeqID_83537
atgcaggtggcatgcaactacaccaagggggcgcaccctttcaacttcgacgcatccagcatggaggctcaggcccacacgtcatgtaaccggcgcgccggttactacgtgcgagaaactgcaccgccacttgcgccagtgccgcgcatcctcgaccgcggaatcggtgccgcgactcgaggcaaccctgcgcacgacccagcagtgtcgaccaggcacgccggtcacggggcaggcgacaccttttggcaggcaaagcgggcgacgcttcacctccgccataatgaccgcgtcaaaaaaagggaccgggaaaggggatactccgaaagggatccttctccgtga

SEQ ID NO: 41759 - DNA, 1002 bp, Zea mays
  Peptide Sequence Number=SeqID_83538
atgctccaaggtcctccccctacgacacgggggctaggtcccacgcgtcatgcaagctggcccagggcagaagaggccaaaccgccgcgcgcggtgtgcgtaactgcccagcggttacaagcactcctccactttcgcccaaaccagcgggtgaaagggcggaccgccatgcaggcggcatgcaaccgcaccaagggggcgcaccctttcaacttcaacgcgtccaacatggaggcccaggcccacatgtcatgtaaccggcgtgccggttactacatgcgagaaattgcactgccacttgcaccagtaccgcgccttctcgactgcggaaccggtgctgcgactcgaggcaaccctgcgcatggcccaacagtgccaaccgagcacatcggtcacgggtcagtcagccgctggaaaaggcgcgacggtcgatacggccagaaatgggccggcagtaatggcggcggcaggcaggcggaagtagcggtcaagtcgtctgcaagctcacgtcccctcctgggacagcgagagaaccctctcccacggacatgcgacacctttggcaggcaaagcgggcgacgcttcaccttcgccataatgaccgcgtcaaaaaagcgggccccgagccctcctactgatcagaggttcgaaggctggcccctcggaagggttcgacagccgcctcagagcagtcaggctccgcgcctactactgatcagaggttcgaatgctggcccctcggaagagttcgacagccgcctcagagcactcgggctccgcgcccactactggctggcccctgaagggttcgacagccacctcagagcacgcagagcgagggatgactctgggtacgtccgatacatggccgaggctcaggctacactcccgaggaaaaatccaattggaaatgtcttggctcgagcagccaagaatctgctgagtctgggagcaccggagtgtccggtggtgcaccggacagtgtccggtgcgccaggctag

SEQ ID NO: 41760 - DNA, 147 bp, Zea mays
  Peptide Sequence Number=SeqID_83539
atgaacaagaacacaagagacacaagatttatcccgaggttcggtcacaccaccaaggtgccctacttcctcgttgaggcgcccacaaagagccggctggagttgagaaagctcaactcacctgaagttcagctcagctgcagctga

SEQ ID NO: 41761 - DNA, 336 bp, Zea mays
  Peptide Sequence Number=SeqID_83540
atgaacaagaacacaagagacacaagatttatcccgagattcggtcacaccaccaaggtgccctacttcctcgttgaggcgcccacaaagagccgggtctctttcaaccctaatcctccctttgccgaccacaaagggaaaataccccggctgaactttccctggacaccggttgaacctctctggaccccggttgaacctgtctggaccccgattgaacttgaagttcagctggagttgagaaagctcaactcagctgaagttcagctcagctgcagctcaagaagctcaactcagctgaagttcaactcagctgaaaagctcagctgcagctga

SEQ ID NO: 41762 - DNA, 351 bp, Zea mays
  Peptide Sequence Number=SeqID_83541
atggcttacttgattgctcgatccacgcgcggcggcgggcgaccgaattccggcgaggacgatctcgggcctccggtgaagttctgtcgggtccgaggacttggaaagcttcacaagctcttagcgaagctaaccgagcggatggcgcagcttggaagtgaccggagaaggctggccacggtggccgaggctcggaaggcttggctggtggtggcgcagcgtgctcggggcgaattccggcgatctttggcttgggcaggacttgtgagcgcgcggggagagaacgcgattgatctttggaaaggggctaaaattcagatttctgaatttcccccaagtgcattagtttag

SEQ ID NO: 41763 - DNA, 321 bp, Zea mays
  Peptide Sequence Number=SeqID_83542
atgaagctttccaagtcctcggacccgacagaacttcaccggaggcccgagatcgccctcgccggacttcggtcgctcgccgccacgcgtggaccgagcactccggtcgaattcctcgccgccgacgagcatctctgcctgcgcacgcggatcggtcgactccgaccatccccgacggcgacccgcacatcgccagagtacatgctcatccccgagcaaggagttgtccacgaggaagaccaggagcaagctcctgagactgccatcgaggatctccccgcagccccagctattgaaggcaagccccggttttatgcataa

SEQ ID NO: 41764 - DNA, 711 bp, Zea mays
  Peptide Sequence Number=SeqID_83543
gtctatactgattctaagactttgtttaacatgaggagcacatttgacagaacatctcgtagtggacctaaggcttttgtgagcgagtacgctgtctggagaagtgacgcgggtagaggcagtcttcttgcttcgttggctgaagctgctttcctcactggtctggagaagaacaggtggaacccggacgctatcgtcttcaactcctggcagcactatggaactcctagctactggatgcagacgattttccgcgagtcaagcggtgccatgatccatccggttaatatcagttcccggtactcgagttcgctggccgcgtctgcgatcacgtggcaggatgcagagaatagcttcctgagagtgaaggcaagtagtagagtctgtcgcatcgcatccgtcctagcctgcgcggctaaggccttgttcgtttctatcggattggtcgtgaacttcgggtcggacaccgttaacctcacggtctccacgagcggactcggggccagcgtcaacgcgctgggatcaaccgccaccgtcctcacgtctggcaacgtcatggacgagaactccttcagtaacccgaacaaggttgcgccggtgaaaagccagctgagcaacgccgcggagcagatgcaggtcacgctggctcctcactccttcaccgccttcgatctggcgctggctgagcccaagcttgtggcggagatatga

SEQ ID NO: 41765 - DNA, 783 bp, Zea mays
  Peptide Sequence Number=SeqID_83544
atggggcaccctgaacctttcctggtcaaacatgtcgcaattggaaatgaagattgcgggaaaaagttctaccgtggtaattacctcaaattctacaatgctataagagaggcctatccagacattcagatgatttcaaactgtgatggttcatctagaccacttgaccatcctgcggatttgtatgatttccatgtctatactgattctaagactttgtttaacatgaggagcacatttgacagaacatctcgtagtggacctaaggcttttgtgagcgagtacgctgtctggagaagtgacgcgggtagaggcagtcttcttgcttcgttggctgaagctgctttcctcactggtctggagaagaacaggtggaacccggacgctatcgtcttcaactcctggcagcactatggaactcctagctactggatgcagacgattttccgcgagtcaagcggtgccatgatccatccggttaatatcagttcccggtactcgagttcgctggccgcgtctgcgatcacgtggcaggatgcagagaatagcttcctgagagtgaaggcaagtagtagagtctgtcgcatcgcatccgtcctagcctgcgcggctaaggccttgttcgtttctatcggattggtcgtgaacttcgggtcggacaccgttaacctcacggtctccacgagcggactcggggccagcgtcaacgcgctgggatcaaccgccaccgtcctcacgtctggcaacgtcatggacgagaactccttcagtaacccgaacaag

SEQ ID NO: 41766 - DNA, 576 bp, Zea mays
  Peptide Sequence Number=SeqID_83545
atggaggtcctctgtgatgactgtccagctggtggtgttggtgtttataacccaggtttttggggcatgggacatggtttccgcacagaacttatatccatgcttttggatttgaaaccacgattcttgagatttcctggaggttgttttgtagaaggtgactggctaagaaatgcattcagatggagagagtcaattggtccatgggaagagaggcctggacacttcggggatgtttggcattactggactgatgatgggcttggatattatgagttccttcagcttgcggaggacctgggtgctgccccaatctgggtattcaacaatgctgtcttcatgaatgctgaaaaagatataacagtagtgggtgaccctttacttttcattcaggatgtattggacagtctagaatttgcaagggggagtgcagattcaacatggggctctgttagggctgcaatggggcaccctgaacctttcctggtcaaacatgtcgcaattggaaatgaagattgcgggaaaaagttctaccgtggtaaacttatcaactacatttgtatttgcttcctttaa

SEQ ID NO: 41767 - DNA, 1596 bp, Zea mays
  Peptide Sequence Number=SeqID_83546
atggatctcaagcaagccttctctggtacaatcttctgccttctgcttctattctgcgtgggctgcagatgtcggactttggaaatagaggccacccagacagcagccctcaaggttgatgcctcgccacagcttgcccggaagatccctgaaacactgtttgggatattttttgaggagatcaaccatgcaggagctggtggcatatgggcagagcttgtcagtaacagaggtaccccagctattcttgaattctgtgtgccttttgaaacatcactagatgcacttattttgaaagctgctgccggtgttgatgttcaagatgactcctccgtgttcgtggcgactgatcgtacatcatgtttcagtcgaaacattgttgctctgaggatggaggtcctctgtgatgactgtccagctggtggtgttggtgtttataacccaggtttttggggcatgggacatggtttccgcacagaacttatatccatgcttttggatttgaaaccacgattcttgagatttcctggaggttgttttgtagaaggtgactggctaagaaatgcattcagatggagagagtcaattggtccatgggaagagaggcctggacacttcggggatgtttggcattactggactgatgatgggcttggatattatgagttccttcagcttgcggaggacctgggtgctgccccaatctgggtattcaacaatgctgtcttcatgaatgctgaaaaagatataacagtagtgggtgaccctttacttttcattcaggatgtattggacagtctagaatttgcaagggggagtgcagattcaacatggggctctgttagggctgcaatggggcaccctgaacctttcctggtcaaacatgtcgcaattggaaatgaagattgcgggaaaaagttctaccgtggtaattacctcaaattctacaatgctataagagaggcctatccagacattcagatgatttcaaactgtgatggttcatctagaccacttgaccatcctgcggatttgtatgatttccatgtctatactgattctaagactttgtttaacatgaggagcacatttgacagaacatcacgtagtggacctaaggcctttgtgagcgagtacgctgtctggagaagtgacgcgggtagaggcagtcttcttgcttcgttggctgaagctgctttcctcactggtctggagaagaacaggtggaacccggacgctattgtcttcaactcctggcaacactatggaactcctagctactggatgcagacgattttccgcgagtcaagcggcgccatgattcatccggtcgtgaacttcgggtcggacaccgttaacctcacggtctccacgagcggactcggggccagcgtcaacgcgctgggatcaaccgccaccgtcctcacgtctggcaacgtcatggacgagaactccttcagtaacccgaacaaggttgcgccggtgaaaagccagctgagcaacgccgcggagcagatgcaggtcacgctggctcctcactccttcaccgccttcgatctggcgctggctgagcccaagcttgtggcggagatatga

SEQ ID NO: 41768 - DNA, 780 bp, Zea mays
  Peptide Sequence Number=SeqID_83547
atgtcgtgggggcatgtcgcttgtcagaagggtggacaggcggcgtgtcctctccacaataaatgcggaggccgcgcggcccagagcccttatgtcacgctccgcccgcttgcctacgccacagacaataagccatgtggcagtattagaccctcgatcgagtggggagcagaggcgctccggatagagcctagacacacgtcaataccggacccatgcctaggtcacggtacttcctctcccaggaccttgttatgggtggtccggagctcacttggtggggtccgaaccctatccaatggatccgggctgctttacttcgggggtccgggttgtgcatacaggggtcccatgccttctgggtctgacggtgtcgtctccgagaacgccaccttaacagccccacaagatactcccggggctattctccgtgcagctaaggcccgacgtcagttgttcggcggtgacctagcctttcgaggaggcgtgaggctcgtgctgccgctcgaggtaccactactaggggagctgtggcggtgggcagttgtctcatgggattttctgtttttcaccaacgatgatgctggaggagttttcgcgtgcagaggagggctttcgggctttcttgacgctgagcactcaagtctatctgcggccattgacctcggggactcagatctgagtccgtgcgagtgcgtcaaagatgaggtccccgccaccagcgaccacccctatgatctccaagtcatcggaggtggggagatggccgagggccattag

SEQ ID NO: 41769 - DNA, 537 bp, Zea mays
  Peptide Sequence Number=SeqID_83548
atggccaaccgtgaagccaatcatcttccccaaacaacgatccattttgggagcctcgacttctccttcaactgcgaaggcaaaacggccagggccctagaagcccgacctcctccgtcgaggaacctcagcacgactgcgacggccgacggtggccctcgcaacgactacaccccagtgagagtgatatggttaaagcagtgcccacctggcctccttcgcccgagagccccgacgtggtctcggaggccctgggtgccctcagcctcgccccgcacgcagcatgagaggcgtaggttggcctcacccttcgaggcagagttttccgcgttatatgacgcagaagcgacgtcctactacggtggctctagcagcggccccgacgccttcccacctcagctgtgcaatgccacggctatgatcaccgccctaatggccctcggccatctccccacctccgatgacttggagatcataggggtggtcgctggtggcggggacctcatctttgacgcactcgcacggactcagatctga

SEQ ID NO: 41770 - DNA, 282 bp, Zea mays
  Peptide Sequence Number=SeqID_83549
atggcgggcggaattgagctcgccggagctaaggagagggggctggccggtgaagagatatggagccaggaaatccggtctgtctccctgcccaaacccgaggcaaatccaagagaaaccctaggtgacactggggtgtcacaaccttccccccttaaaggaatctcgtcccgagattcgggacagagtcctcccagggtgaagagaagggtgagacttataggaaatggattcgaagggcaggaggaggggttgggggtgattacgtaccagcttccttag

SEQ ID NO: 41771 - DNA, 330 bp, Zea mays
  Peptide Sequence Number=SeqID_83550
atggcgggcggaattgagctcgccggagctaaggaaagggggctggccggtgaggagatatggagccaggaaatctggtctgtcttcctgcccaaacccgaggcaaatccaagagaaaccctaggtgacactggggtgtcacagccttccccccttaaaggaatctcatcccgagattcgggccagagtcctcccagggtgaagcgaagggttcgaagggcaggaggaggggttgggggtgattacgtaccagcttccttaggtaggcaatcggggaagttggatctcaagaattcctcggtttcccatgtagcttcctcctctgagtga

SEQ ID NO: 41772 - DNA, 144 bp, Zea mays
  Peptide Sequence Number=SeqID_83551
atggaaaacacatcccctctgcatgtttgccaagttcagggaacacctatcccatttcaggtcagtgaagctcacaccatttactacttgaactctaccactattggttgcctagaactaggtgtgaaatttgctcaaacatag

SEQ ID NO: 41773 - DNA, 483 bp, Zea mays
  Peptide Sequence Number=SeqID_83552
atgtcatggggaacatgtctcttgaaattttggagcttgtttgtgattgatccaaggggtttaagcctaaggtccctgtggagaagtggtagagagtcatttggtcgacaagttttgttaaacttgctccccctgttgccatggaaaactgagagtttgcagggggtcaacagggaggtttgccaagttcagagaacacctatcccatttcaggtcagtgaagctcacaccaattactacttgaactctaccactattggttgcctggaactagaaaacggagaagagggtgaagtgactgaagaaaagacatcaccacctttggaatctcaggcagagacttggctctacttcgacatctgcgagtccgagcctgactcacctactaacaaaggcaagccccggtgcatgcaaccccttccttgtgtttttaaatacttttcgcacactttaagtctagtgaaatgtgcattaagtttatag

SEQ ID NO: 41774 - DNA, 330 bp, Zea mays
  Peptide Sequence Number=SeqID_83553
atgggcgcgcgggcttccccgctgtgggccgaaaacagagaagagggtgaagtgactgaagaaaagacatcaccacctttggaatctcaggcagagacttggctctacttcgacatctgcgagtccgagcctgactcacctactaacaaaggcaagccccggttgtcttttgcgttaaggccttgctcaggggttatcctgaggaaagatgacttctacctgcaagaatatattttcattgggagcatggtgggatcttactgcaaagttccctgtgatgctcttttcatcctaaggaacacaaacaatcctaagggtggaaatacttaa

SEQ ID NO: 41775 - DNA, 183 bp, Zea mays
  Peptide Sequence Number=SeqID_83554
atggcttctacctgcaaaaatattttcattgagagcatggtgggatcttactgcaaagttccctttgatgctcttttcatcctaaggaatacaaacaatcctaagggtggaagcttgctgatcaaggactatcttaactggccacatgacctggaaatgggacatgatgtctttggggactag

SEQ ID NO: 41776 - DNA, 639 bp, Zea mays
  Peptide Sequence Number=SeqID_83555
atggccgtcgaggacgccgacgtcgccgtcaccgtgcagctcgacctcggcttcatggtcttcaaccggatacctgactatcatggcattataaagcattcaatggatttttcgacaataagaaagaagcttgataagggggatattccaacttggagcgatttgagtctgcaaatgtacttagtgaggctggtgcaccttgtgggctgctacaaaatatccgtaggaactgacatgggaatttttagccagtttacactctcagaaaggattttaaggcctccattcaaaaatatttattgtaaaatgctgaggatgtctgatgcgtatattgtagtcgttaacacatttactatattaatttgcttcacctttggtataatggcaaaatgcttccatgttacaaacagaggactcttggtcatcatacatgctgttgtaaatgccagattgtccaaggacagttctatgggggattctttgtacatgagaactaagaaaggatggttccctactggttctgtatataggaaggcggtcggacttgggtacaaatctgtagcacactttctaattgccaagcataataacaaacaattgcccactgatatagtgaacaacgcggaggagctccaataa

SEQ ID NO: 41777 - DNA, 243 bp, Zea mays
  Peptide Sequence Number=SeqID_83556
atggccgtcgaggacgccgacgtcgccgtcaccgtgcagctcgacctcggcttcatggtcttcaaccgggaagagattgaagtaactgctaatgttggcgtgggcgtcaaaattgtccaaagcagcagttccacagacgccggcatcgactgcgacgagcaacgtcgtgccgctccaggggccaccgcggccgcacccgcagccgtgcgcgcttcggttccaaccggcaaggagcggcactag

SEQ ID NO: 41778 - DNA, 339 bp, Zea mays
  Peptide Sequence Number=SeqID_83557
atgcggccacgtaggactgtttctagaggtcgaactggcagtcgccaagtttttcttgtcgtcgatgagcgaccccaacacgagtgcctcctgctaatggtgtttgttcagggttttcaactaggcatcggctgtacgaggaatgagaatgggcttggaatgagaatgcacaacataggaatggactgtgcgcggggagaagggaatcggaaaggcacacaacataggaatggactgtgcgcgaggaggagagaatcggaaagacagaacacggaatgggcagaacagggaatggcagaacgcggaatggccgactactattgcagtcttaataagtag

SEQ ID NO: 41779 - DNA, 231 bp, Zea mays
  Peptide Sequence Number=SeqID_83558
atgacaagaagaaacttggcgactgctagttcgacctctagaaacagtcctacgtggccgcatgtgcggcgcagccgtcgcttggacacggtgcagagcggctgctccgcgctgtccatcgtcaagcagggggacctcatggtcgtcgccaacgtcaacgactctcgggttgttctgggcaccgcattctacgacgacgccatcacgtcgtccagctcatcgtccacctga

SEQ ID NO: 41780 - protein, 64 aa, Zea mays
  Coding DNA Sequence Number=SeqID_1
MPTGQGYHDLNKQGKVKKQAGLPEYEYGFVGSFYSMSIGSCISDSGSPVPSPFKETRNLELEIS

SEQ ID NO: 41781 - protein, 175 aa, Zea mays
  Coding DNA Sequence Number=SeqID_2
MDPNASKPELFHIIFKATLGAFHVIVSQLYFLRYLRKRLWEYAWGQSVGDNLLNSVYAMGKCVQDFMADEKIHKPTLLGPHFALLVWLYEHTQVRKTVFSGKTGFRGQKERYMKKSQLKVVELPSLSGYEPIPSLEARREGISNSQSQTDKREPVSKVEAERKLYESLFPGKVYL

SEQ ID NO: 41782 - protein, 101 aa, Zea mays
  Coding DNA Sequence Number=SeqID_3
  Subcellular localization annotation: CTP_CleavageSite=64; ConfidenceScore=5.33e-01
MGLDSISIALVKGIGRNKPQMKRNISTLALTTFSSVIIGERRVRYFLGLSNRRGLVFLLSNRPWFSKKGSGSHPLGKVELPVLSTAFSTGESPAEEISAPV

SEQ ID NO: 41783 - protein, 145 aa, Zea mays
  Coding DNA Sequence Number=SeqID_4
  Homolog annotation: Hit_ID=Q8LQY2; Match level="QueryCoverage=91%, HitCoverage=16%, E-value=1e-23, Identity=43%"; Hit description =Fertility restorer homologue-like
  Pfam annotation: Domain name=PPR; Domain location=11-45; Score=11.6; E_value=0.32; Accession=PF01535.11; Description=PPR repeat
  Pfam annotation: Domain name=PPR; Domain location=46-80; Score=26.4; E_value=9.8e-05; Accession=PF01535.11; Description=PPR repeat
  Pfam annotation: Domain name=PPR; Domain location=81-115; Score=1.3; E_value=5.3; Accession=PF01535.11; Description=PPR repeat
  Pfam module annotation: Pfam domain module=PPR::PPR::PPR; Domain location=11-45::46-80::81-115
MASAWVKPDEHVYATTITGLGRLHDADRALQVLGKMREAWVELWELTYNSMVGVLVKVGRMDEVLQLKDRMMLATGKMDVILARMLMHMYYLSGEVGKTLELFDVVASDGVTLSNVAYGLMNKGCETSYPQKASKNGETSYPQKA

SEQ ID NO: 41784 - protein, 136 aa, Zea mays
  Coding DNA Sequence Number=SeqID_5
  Pfam annotation: Domain name=DUF1639; Domain location=53-102; Score =88.6; E_value=1.9e-23; Accession=PF07797.4; Description=Protein of unknown function (DUF1639)
MDRCGASVPLIGRGTFGPAASTRQAGSDDAAEAAEHAPVPTTEAKKRASSVALSKEEIVDDFAAIRGTRPPRRPKKRSRTVQRQLDLLYPGLCLADVAPGSYKIEEVAKFLEGLQYCLNKNCLDLVFQHLNLLGER

SEQ ID NO: 41785 - protein, 137 aa, Zea mays
  Coding DNA Sequence Number=SeqID_6
MARVACTLYGKRLDGGVSVLSVGVNLICCFRLIVPPMCCNIYMTSETLLGKEGKGDIEKKLRLATRQRKSEWTRARWARHHSLNEMGEAALKCRQKLQGIEEGGIIDDEIDEALSPNMDGKEEASKGRFKVSRKARA

SEQ ID NO: 41786 - protein, 167 aa, Zea mays
  Coding DNA Sequence Number=SeqID_7
MLPRAGAMRRDQDGRVQGAGNDRAEGRPEQPRAGGQGGRAEGRRDDRAQGAENGRAEGQGGAPRGAGNSRLQGARAAATWGAGTTAHRGPGGRAARTRARGGGGKSRDARGGKRKGREREREGERGGGEAHLGIQNPAITVTGSHLGHEVGERWKRGRGSCCAGKIK

SEQ ID NO: 41787 - protein, 119 aa, Zea mays
  Coding DNA Sequence Number=SeqID_8
MVRGGFHGGDGLRRAIEAASGDPRAQDASEHFPQGLRCVELVFGVGTTVEARTDCDGVSFFPSPMAVHDDVGEPGQFVNGRSRRGSTYTPMARESHQNWLVETPRCPAKDRNDTGWSRT

SEQ ID NO: 41788 - protein, 85 aa, Zea mays
  Coding DNA Sequence Number=SeqID_9
MPSEPRKGAKLIQATPIDIYHSDKSDGLPKEEREWEMRLQGWKNTYLDLDHVAERLRGGVGMEHVRRRGGRSDRQGDGTCGTVEP

SEQ ID NO: 41789 - protein, 255 aa, Zea mays
  Coding DNA Sequence Number=SeqID_10
  Gene Ontology: Mol. function=nutrient reservoir activity
  Homolog annotation: Hit_ID=Q41887; Match level="QueryCoverage=99%, HitCoverage=100%, E-value=2e-61, Identity=54%"; Hit description=22 kDa zein protein
  Pfam annotation: Domain name=Zein; Domain location=1-255; Score =526.6; E_value=2.7e-155; Accession=PF01559.7; Description=Zein seed storage protein
MATKILALLALLALFVSATNAFIIPQCSLAPSAIIPQFLPPVTSMGFEHLAVQAYMLQQALAASVLQQPIDQLQQQSLAHLTIQTIATQQQQQFLPALSQLAVMLASNPLALANVATYQQQQLQQFLPALSQLAMVNPAAYLQQQQLLSSSPLAMVNAPTYLQQQLLQQIVPALTQLAVANPAAYLQQLLPFNQLTVSNSAAYLQQRQPLLNPLAVANPLVVAFLQQQQLLPYNQFSLMNPALSWQQPIVGGAIF

SEQ ID NO: 41790 - protein, 175 aa, Zea mays
  Coding DNA Sequence Number=SeqID_11
MALPVDVADPRPRPGDVGVPPKLRSSVSSVAEAEPEPLGWARRRSFGRGQSGVRALGSGEAEFVVFRPESEPWVGRSGVRRLPGLSPSPSPGSGGAEFAVFRGLARVRALGRAERSFLWSLLARPDCPSDSLCRVALQPEWRRQRCPSVRPLYADGGYQLRIRRLEGTPNYGPRQ

SEQ ID NO: 41791 - protein, 96 aa, Zea mays
  Coding DNA Sequence Number=SeqID_12
MDLPSVDLYRVSYARNAPRIIPVDQNLYKLEKQSGLKQFRLIALKEIEKDKLAVAKAYNKKGHFGEVGSRYSPLRIVCLPTADSSPTTRAEQSISS

SEQ ID NO: 41792 - protein, 232 aa, Zea mays
  Coding DNA Sequence Number=SeqID_13
  Gene Ontology: Mol. function=DNA binding; Cellular component=nucleus; Biological process=regulation of transcription, DNA-dependent
  Homolog annotation: Hit_ID=Q8LMR9; Match level="QueryCoverage=72%, HitCoverage=54%, E-value=6e-63, Identity=70%"; Hit description =Putative RAV-like B3 domain DNA binding protein
  Pfam annotation: Domain name=B3; Domain location=39-143; Score=90.0; E_value=7.5e-24; Accession=PF02362.12; Description=B3 DNA binding domain
MEFTTPPPATRSGGGEERAAAEHNQHHQQQHATVEKEHMFDKVVTPSDVGKLNRLVIPKQHAEKYFPLDAAANEKGLLLSFEDRTGKPWRYRYSYWNSSQSYVMTKGWSRFVKEKRLDAGDTDSFGRGISEAARGRLFIDWRCRPDPPVVHHQYHHRLPLPSAVVPYAPFLEKDVALDPTNRSHGERPTFLEKDVALDAARVAAEGAGSDLEVDDDLDRRWEGRISELASLI

SEQ ID NO: 41793 - protein, 122 aa, Zea mays
  Coding DNA Sequence Number=SeqID_14
MAIMAIQGPMGQNPIRYDMSGYEYMVICTMIGTGMRFLVPLCLALVFHPCRDATGASLWRLCSVSALLVNWNTKILCWVSEYPHLPPFPHEDFPSRMALDGGKRSPDALSSDSVCSNGGRHL

SEQ ID NO: 41794 - protein, 372 aa, Zea mays
  Coding DNA Sequence Number=SeqID_15
  Gene Ontology: Mol. function=sugar porter activity; Cellular component=integral to membrane; Biological process=transport
  Homolog annotation: Hit_ID=Q8H6J2; Match level="QueryCoverage=99%, HitCoverage=100%, E-value=5e-90, Identity=82%"; Hit description =Putative sugar transporter protein
  Pfam annotation: Domain name=Sugar_tr; Domain location=7-363; Score= -122.8; E_value=0.005; Accession=PF00083.14; Description=Sugar (and other) transporter
MKSTVFSTAVVSIGYALLGWDFAALSEANHHMEKEFELLNGPSIEESPRWLASDGKISEARVSLQWLRGKKHDVSGEIAAIVEGVDIISDSTVGAARAQSFSGTSASHTWPRKHEHMNEHRDGNSDQQTRETYYAGEANNGDGLRASLLSQAASVEVNDTNTSFTSEGSSSYLRRHGTSVLAQEFMASIHDYDIEEEEEEIHGFALPHQSAPRDMESTGRHPFRHQIVRVIVLATTPVLILSLSVMSMSTLVNMGPFESAVLFHFALTICFWSYVIGLGPIPNILCSEIFPTKARATCASFCSLSFWFGGLLSAYCFPVMLSTIGLGGACGIYALVCCAPLFLVYYRIPETKMLNLELIAELFKLSRQEHVQ

SEQ ID NO: 41795 - protein, 156 aa, Zea mays
  Coding DNA Sequence Number=SeqID_16
MATHAVDVTAACCYFPPLPKQQAGRGWIGLDGERRSAIMSPSPTSTAEVEVVVGRRGRGTTSPGLLLLHGLGPPTVMVVLRGPAPPPSASAVVPAQSTAIQDASGATGSSASPDPSFGLGRNRRHARPRSRPQPRPRKEVFASPDLGLGLSLGLGR

SEQ ID NO: 41796 - protein, 499 aa, Zea mays
  Coding DNA Sequence Number=SeqID_17
  Gene Ontology: Mol. function=oxidoreductase activity; Cellular component=integral to membrane; Biological process=electron transport
  Homolog annotation: Hit_ID=Q84LG7; Match level="QueryCoverage=91%, HitCoverage=92%, E-value=1e-150, Identity=57%"; Hit description =Putative taxane 10-beta-hydroxylase
  Pfam annotation: Domain name=p450; Domain location=41-496; Score =154.0; E_value=3.8e-43; Accession=PF00067.12; Description=Cytochrome P450
  Subcellular localization annotation: CTP_CleavageSite=23; ConfidenceScore=5.33e-01
MAFIVLLAAAAAAIALVLHHLLSAQKKRSSRSAGSTSYSLPPGDLGVPVIGQTFSLLHALRSNTDDQWFRARIKRYGPVSKMSVLGSPTVLLAGTEANHFIFTNQGLILTQTRALRSLLRRSILTLTGDDLKQVRSALQGYLRPEMVRGYVGKMDAEVRRQLKLNWVGRSTVNVLPMARSLTLGVICSVVFGEEAAAIVDALATDFQQLGDAILSFPVNIPFTRFGKGMRSSAKIREAITKFARKKEEEYSLLLSQDEGCTTATATATTSAATDFVTYMLLLRSRGAHSLSLADIVDNVMGIVIGAHGTTSTLITFMVRHLANEPDVLAKITQEQDEIAGRNGRDGALTWEDVSSMKYTWRAALETLRTVPPVFGSFRTATKDIEYQGYLIPKGWKVFASQSITHMDPRFFAEPTKFDPSRFEKRSSIPPYSFLPFGGGPRMCPGTEFSRVETMVAMHYLVTRFRWKLRFEDEAYNKDPKPTPVFGCPVELELRKTPAI

SEQ ID NO: 41797 - protein, 159 aa, Zea mays
  Coding DNA Sequence Number=SeqID_18
MAREHTGCFAQLPLLCRGYIYKATTPLRARLHAYEHDYEKEMQYLSASYFSHYKNNGSKSTINKTKILNPKPVGSNSYQSPAGSRQEQAVPQWQSGRSATVADSRAAAAAGSAHSPLHYSGCQEASRQELFSQWPGLQPPGRQEQSNNRKNQRTRVWRS

SEQ ID NO: 41798 - protein, 224 aa, Zea mays
  Coding DNA Sequence Number=SeqID_19
  Gene Ontology: Mol. function=serine-type peptidase activity; Cellular component=integral to membrane; Biological process=proteolysis
  Homolog annotation: Hit_ID=Q2R135; Match level="QueryCoverage=82%, HitCoverage=82%, E-value=6e-60, Identity=63%"; Hit description =Signal peptidase I family protein, expressed
  Pfam annotation: Domain name=Peptidase_S24; Domain location=46-125; Score=38.1; E_value=3.1e-08; Accession=PF00717.13; Description =Peptidase family S24
MPGFAQRLAGIPWRSIARQGLSRVFLVAKAYCVIHVVNDHLCSVTLVRGASMLPSLNLAGDAVAVDRVSVRLGRVAPGDIVLMISPEDPRKSVVKRVVGMQGDSVTYLVDPGKSDSSRTVVILNELELCAGKTLHYATLGIFTPPDQKVPQDHVWVQGDNIFASNDSRQFGAVPYGLITGKIFCRLRRVLTVALLDVRFGRQRVLAQLMTQRSSLNAEEEPRRY

SEQ ID NO: 41799 - protein, 233 aa, Zea mays
  Coding DNA Sequence Number=SeqID_20
  Gene Ontology: Mol. function=carboxyl- and carbamoyltransferase activity; Cellular component=ornithine carbamoyltransferase complex; Biological process=amino acid metabolic process
  Homolog annotation: Hit_ID=Q8SA97; Match level="QueryCoverage=99%, HitCoverage=24%, E-value=1e-14, Identity=36%"; Hit description =Ornithine carbamoyltransferase
MALPVDVAGLCPRQGDVGAPPKPRLSLSSVAEAEPEPWGRARRKSFGRGQGGVRALGSGEAEFRRLPARVRALGSGGAEFAVFRVLARVRALGSGGAEFAVFRVLARVRALGSGGAEFAVFRVLARVRALGSGGAEFAVFRVLARVRALGSGGAEFAVFRVLARVRALGSGGAEFAVALLARPDCLSDSLCRVAPQSEWRRRRCPSVRLLYADGGYQLRIRRLEGTPNYGPQQ

SEQ ID NO: 41800 - protein, 176 aa, Zea mays
  Coding DNA Sequence Number=SeqID_21
  Gene Ontology: Mol. function=nutrient reservoir activity
  Homolog annotation: Hit_ID=Q00919; Match level="QueryCoverage=89%, HitCoverage=59%, E-value=1e-35, Identity=54%"; Hit description=22 kD alpha-zein protein
  Pfam annotation: Domain name=Zein; Domain location=1-176; Score =212.1; E_value=1.2e-60; Accession=PF01559.7; Description=Zein seed storage protein
MATKILALLALLSLLFLPSITSMGIEHPVVQAYRLQQALAANVLQQPFAQLQQQSLAHLTIQNIAMQQQQHFVPALSQLATVNPAAYLQQQLLASNPLALANIAAYQQQLQLQQFLPALSQLAMVNPATYLQQQQLLSSSPLAVGNVATYLQQQLLQQIVPALSQLAVANPAAYLQ

SEQ ID NO: 41801 - protein, 101 aa, Zea mays
  Coding DNA Sequence Number=SeqID_22
MSRAFDDYYIENCGVILAPEVTQRRIDNSDQFVIIATVRVAFVPGMRDGSIPIQRRKRIIRSCSRPMNNYGGPISISAPTRSKRSQYVLNEDVNGSPSPSP

SEQ ID NO: 41802 - protein, 526 aa, Zea mays
  Coding DNA Sequence Number=SeqID_23
  Homolog annotation: Hit_ID=Q2R127; Match level="QueryCoverage=50%, HitCoverage=87%, E-value=3e-77, Identity=57%"; Hit description=Plant viral-response family protein, expressed
  Pfam annotation: Domain name=DUF716; Domain location=112-265; Score =278.3; E_value=1.4e-80; Accession=PF04819.3; Description=Family of unknown function (DUF716)
  Pfam annotation: Domain name=zf-BED; Domain location=303-350; Score =42.3; E_value=1.6e-09; Accession=PF02892.5; Description=BED zinc finger
  Pfam module annotation: Pfam domain module=DUF716::zf-BED; Domain location=112-265::303-350
  Subcellular localization annotation: CTP_CleavageSite=39; ConfidenceScore=5.07e-01
MGSFKGHVLPGTLFLAVGLWRVWSSAARHAADPSSFRVRAWSPAPAPGPARLLELYVVAGGALADMCVEVLYSTHLRIFAGGEVNPAHLNDLEHGGMLLMFFLFGALALASQLWPRHFPLTDGALCLVAATAFTAELVLFYFHSTTHMGLEGYYHYLLVLLVGLCVAAAVLGALLPDSFPADLASGVLVALQGLWFYQTALALYGPMLPAGCARDADAHVECRSRAAQERAEQLAISQLFALVLLAFLYALGCYAVAAARYGQPPELAVVLNATKESAPTAGNTTEEKKEDNAKKRKEIAPRSEVWSHFVKICVDGHLKKGKCKYCSREIKCDPNLNGTSALRAHFNICKCNPHKNRDPNQSNLQLSHGENVAIYKFDPKAIRKAFCEMVIEDEQPFACAEKADFRKFMSIACPCWNVPSRRTITRDTVSTYFEEKAKLKTFFKQQCERVCLTTDAWTSQQQDSYMAVTAHFIDSDWKLHKKGKLSDGKVVAVKQLSRSSNQGKMQFAAEIETISRVQHRNSSRMD

SEQ ID NO: 41803 - protein, 230 aa, Zea mays
  Coding DNA Sequence Number=SeqID_24
  Gene Ontology: Mol. function=RNA binding; Cellular component =ribonucleoprotein complex; Biological process=mRNA processing
  Homolog annotation: Hit_ID=Q84N49; Match level="QueryCoverage=87%, HitCoverage=29%, E-value=1e-102, Identity=94%"; Hit description=CRS2- associated factor 1
MHPQYVVHSRAVYDRYAQYLQKCSDPDLVGISRTEPSADIALEYSPLNPVCDIMDPSLNCRSIPTNKCESRALVEKSEHCPNDYNLEMKGKRNDGTKCTVVLNSGSKVEGLLCLLEQAIHSGRALVLSEDELADSDLVYEKSVAFRKSILRRLVFENTRRKSSARRNVPDNHARTKTHIIANKMLSSPVENKFIVNGGSAMQTIDHGQECLSGVVHQGTLRVDELAKLLA

SEQ ID NO: 41804 - protein, 34 aa, Zea mays
  Coding DNA Sequence Number=SeqID_25
MEVLGRTRRSESCMLGSDTFPWGSGFTDDITGWR

SEQ ID NO: 41805 - protein, 58 aa, Zea mays
  Coding DNA Sequence Number=SeqID_26
  Gene Ontology: Mol. function=nutrient reservoir activity
  Homolog annotation: Hit_ID=P04698; Match level="QueryCoverage=98%, HitCoverage=25%, E-value=1e-15, Identity=68%"; Hit description=Zein -alpha PZ22.3 precursor
MAPPTMGCCLDKTGFIKENWLYGSNCCCCRKAATNGVATASGLKFDTISWLNGSSCCK

SEQ ID NO: 41806 - protein, 128 aa, Zea mays
  Coding DNA Sequence Number=SeqID_27
MKWDKPSWRSHLCVTGDNQRGRGVVIARIRSLGALDHQSKSPPNQVIIPHGRSCLILYQERLGTTFEGARSVAASEVARAAASAAREVARPSPAVATPGLVGATVRVATPTARAASAFGPVGEGEGLA

SEQ ID NO: 41807 - protein, 96 aa, Zea mays
  Coding DNA Sequence Number=SeqID_28
  Gene Ontology: Mol. function=protein binding; Cellular component =nucleus; Biological process=protein transport
  Homolog annotation: Hit_ID=UPI00005A96C9; Match level="QueryCoverage =98%, HitCoverage=79%, E-value=9e-49, Identity=100%"; Hit description= PREDICTED: similar to chromatin modifying protein 5, partial
MKKIFGAKKDKGPPPSIQDATERINKRGETVDEKIKKLDEELARYKEQIRKTRPGPSQEAIKARAIRLLKHKRMSVPYSVSLFRPERVGNHVDVFP

SEQ ID NO: 41808 - protein, 1241 aa, Zea mays
  Coding DNA Sequence Number=SeqID_29
  Gene Ontology: Mol. function=nucleic acid binding; Cellular component= cytosol; Biological process=transcription-coupled nucleotide-excision repair
  Homolog annotation: Hit_ID=Q7F2E4; Match level="QueryCoverage=94%, HitCoverage=99%, E-value=0.0, Identity=76%"; Hit description =Putative DNA repair and recombination protein
  Pfam annotation: Domain name=DEAD; Domain location=370-566; Score= -44.0; E_value=0.029; Accession=PF00270.19; Description=DEADDEAH box helicase
  Pfam annotation: Domain name=Helicase_C; Domain location=744-822; Score=90.0; E_value=7.4e-24; Accession=PF00271.21; Description =Helicase conserved C-terminal domain
  Pfam annotation: Domain name=SNF2_N; Domain location=372-691; Score =371.3; E_value=1.6e-108; Accession=PF00176.13; Description=SNF2 family N-terminal domain
  Pfam module annotation: Pfam domain module=DEAD::Helicase_C::SNF2_N; Domain location=370-566::744-822::372-691
MDEEDDDQRLLHSLGVQTEPKRDDEPGAAVDDPSGSSVAPEFDAQANLHQKLRSVQLEIDAVASTIKRAKNASVDGQDKKKQKQANHTSQDEPHGGALQQALATERLKSLKKAKAQIQKEILQSDPYPSGSDNRKDKMLAMLVEEEPRRKKKSLMPARGPKKTSAPRLKTMSYDDDDDFDAVLDGASAGFMETEREELIRKGLLTPFHKLKGFEKRVELPGPSHRQNDPSEQAEEAIEASRIARVAQSMQQIAQSRPTTKLLDPESLPRLDAPTAPFQRLGRPLKRPVPPSSEGRERKRQRNKTKRPLPDKKWRKANSRKESLLETDGEDVGDFATSVSEDDDQAAEGGLSPVILEGGLRIPGTIYEQLFDYQKVGVQWLWELHCQRAGGIIGDEMGLGKTVQVLSFLGSLHNSGMYKPSIVVCPVTLLQQWQREASRWYPKFKVEILHDSANGSSKKSKAYSDSDSEGSWDSDQEEVRRAKPAKKWDDLISRVVNSGSGLLLTTYEQLRILGEKLLDIEWGYAVLDEGHRIRNPNAEITLVCKQLQTVHRIIMTGAPIQNKLSELWSLFDFVFPGKLGVLPVFETEFSVPITVGGYANATPLQVSTAYRCAIVLRDLIMPYLLRRMKVDVNAQLPKKTEHVLFCSLTAGQRSTYRAFLASSEVEQIFDGNRNSLYGIDVLRKICNHPDLLEREHAAQNPDYGNPERSGKMKVVEQVLKVWKDQGHRVLLFTQTQQMLDILENFLTACDYQYRRMDGLTPAKQRMALIDEFNNTDEIFVFILTTKVGGLGTNLTGANRIIIYDPDWNPSTDMQARERAWRIGQTRDVMVYRLITRGTIEEKVYHRQIYKHFLTNKVLKNPQQRRFFKARDMKDLFTLQDDEGNGSTETSNIFGQLSKDVNVGVPNDGQQHQVHIASALSSTSEAEPSNGGNSKVDDNSDQADEESSILKSLFGAQGIHSAINHDAIMDANDDQKVRLEAEASQVAQRAAEALRQSRMLRSHDSFAVPTWTGRSGAAGAPSSVRRKFGSTVNSQLIPSSQPSETSSSRNRSLPVGALSGKALSSAELLAKIRGTREASASDALEHQLNVGSSSNLVSSPSGNGGRASNPPNRSMIVQPEVLIRQLCTFIQHNGGSATSTSITEHFKSRIQSKDMLLFKNLLKEIATLQRGAEGDLTRRNLRRCVGVVNTRIGIPTCYDLGERIADSLQATKGSAAVGRKLGTDLHLPRAFIADKRVMLAVRI

SEQ ID NO: 41809 - protein, 847 aa, Zea mays
  Coding DNA Sequence Number=SeqID_30
  Gene Ontology: Mol. function=binding; Cellular component =mitochondrion; Biological process=metabolic process
  Homolog annotation: Hit_ID=Q7XHS8; Match level="QueryCoverage=98%, HitCoverage=98%, E-value=0.0, Identity=76%"; Hit description =Putative pentatricopeptide (PPR) repeat-containing protein
  Pfam annotation: Domain name=PPR; Domain location=142-176; Score=7.3; E_value=1; Accession=PF01535.11; Description=PPR repeat
  Pfam annotation: Domain name=PPR; Domain location=177-211; Score =30.7; E_value=5.3e-06; Accession=PF01535.11; Description=PPR repeat
  Pfam annotation: Domain name=PPR; Domain location=212-246; Score =28.8; E_value=2e-05; Accession=PF01535.11; Description=PPR repeat
  Pfam annotation: Domain name=PPR; Domain location=247-281; Score =44.5; E_value=3.7e-10; Accession=PF01535.11; Description=PPR repeat
  Pfam annotation: Domain name=PPR; Domain location=282-316; Score =41.1; E_value=3.8e-09; Accession=PF01535.11; Description=PPR repeat
  Pfam annotation: Domain name=PPR; Domain location=317-351; Score =45.4; E_value=1.9e-10; Accession=PF01535.11; Description=PPR repeat
  Pfam annotation: Domain name=PPR; Domain location=352-385; Score =22.7; E_value=0.0013; Accession=PF01535.11; Description=PPR repeat
  Pfam annotation: Domain name=PPR; Domain location=386-420; Score =39.9; E_value=8.5e-09; Accession=PF01535.11; Description=PPR repeat
  Pfam annotation: Domain name=PPR; Domain location=421-455; Score =32.5; E_value=1.5e-06; Accession=PF01535.11; Description=PPR repeat
  Pfam annotation: Domain name=PPR; Domain location=456-490; Score =39.2; E_value=1.4e-08; Accession=PF01535.11; Description=PPR repeat
  Pfam annotation: Domain name=PPR; Domain location=491-525; Score =37.0; E_value=6.6e-08; Accession=PF01535.11; Description=PPR repeat
  Pfam annotation: Domain name=PPR; Domain location=526-560; Score =22.0; E_value=0.0021; Accession=PF01535.11; Description=PPR repeat
  Pfam annotation: Domain name=PPR; Domain location=561-595; Score =31.1; E_value=3.9e-06; Accession=PF01535.11; Description=PPR repeat
  Pfam annotation: Domain name=PPR; Domain location=596-630; Score =43.6; E_value=6.7e-10; Accession=PF01535.11; Description=PPR repeat
  Pfam annotation: Domain name=PPR; Domain location=631-665; Score =38.7; E_value=2e-08; Accession=PF01535.11; Description=PPR repeat
  Pfam annotation: Domain name=PPR; Domain location=666-700; Score =46.9; E_value=7e-11; Accession=PF01535.11; Description=PPR repeat
  Pfam annotation: Domain name=PPR; Domain location=701-735; Score =41.8; E_value=2.3e-09; Accession=PF01535.11; Description=PPR repeat
  Pfam annotation: Domain name=PPR; Domain location=736-770; Score =43.8; E_value=5.7e-10; Accession=PF01535.11; Description=PPR repeat
  Pfam annotation: Domain name=PPR; Domain location=771-805; Score =40.3; E_value=6.5e-09; Accession=PF01535.11; Description=PPR repeat
  Pfam module annotation: Pfam domain module=PPR::PPR::PPR::PPR::PPR::PP R::PPR::PPR::PPR::PPR::PPR::PPR::PPR::PPR::PPR::PPR::PPR::PPR::PP ; Domain
  Pfam module annotation: Domain location=386-420::421-455::456 -490::491-525::526-560::561-595::596-630::631-665::666-700::701 -735::736-770::771-805
  Subcellular localization annotation: CTP_CleavageSite=2; ConfidenceScore=5.04e-01
MAAAALWAPAARRQVLVAPTLLRIRRYLSTKPPPPHHPNTLATELLRLLSAAPSWTPDLAGAVSSSLSTASASAGDAVITVLRSLKNPSLAAPFFLASSSASPHPLPADAYNAVLPFLFHDLAAMEEVLEEMSVLGYGVPNPTCADLVAALVRTHRLDDAERMIGTMRRLKFRPAFSAYTVLIGAMAEARRPERALELLRQMQEVGYEVGVPLFTTLVRALAREGRVEGALALVDEVKGNCLEPDIVLYNVCIDCFGKAGNVDMAWKFFHELKSQGFKPDDVSYTSMIWVLCKAGKLSEAEELFGQMETERAVPCAYAYNTMIMGYGSAGQFENAYKLLDQLKDRGCIPSVVSFNSILTCLGKKCEVDQALILFEAMKKDAEPNSSTYNIIIGMLCMAGRVEEAYVIRDEMERVGLFPNLLTVNIMVDRLCKAKKFEEAYEMFETASQRGCNPNSVTYCSLIDGLGKKGNVDDAYRLFENMLDTGHNANPVVYTSLIRNFFMHGRKEDGHKIFKEMNRRGCQPDLTLLNTYMDCVFKAGDVEKGRAIFEDIKGYGFLPDVRSYSILIHGLTKAGQARETSSIFHAMKQRGFALDARAYNAVVDGFCKSGKVDKAYEALEEMKVKHVPPTVATYGSIIDGLAKIDRLDEAYMLFEEAKSKGIELNVIVYSSLIDGFGKVGRIDEAYLILEEMMKKGLAPNVYTWNSLMDALVKAEEINEALICFQSMKEMKCSPNTYTYSILINGLCRVQKYNKAFVFWQEMQKQGLVPNVVTYTTMISGLAKVGNITDACSLFERFKANGGIPDAASFNALIEGMSHANRAIEAYHAAVVGAVLREIAKSHHASRSL

SEQ ID NO: 41810 - protein, 98 aa, Zea mays
  Coding DNA Sequence Number=SeqID_31
MAVVKIVGQIKPQYHGSCKAWFFRPKAKAVTTIRQAIMPIPDAVISLFQGLLFDPDVFDAVYLLNSLMEREFAKAHCDLTKLSFIKCTVSFIKDPIFF

SEQ ID NO: 41811 - protein, 86 aa, Zea mays
  Coding DNA Sequence Number=SeqID_32
MTTIIGKISPEIAQLNTMATTHGGSRPKKVLWRGIVVVPHGPEPEAPTVPHPYSSAKLPGDVYIKYVEDKTIAHFAGGKNAPTFFG

SEQ ID NO: 41812 - protein, 96 aa, Zea mays
  Coding DNA Sequence Number=SeqID_33
  Subcellular localization annotation: CTP_CleavageSite=53; ConfidenceScore=5.24e-01
MPHWSSSDLPKTLSSPFSPLCPRIHGLFPAIEFAVAFSPSLPNFGDPGATLARACLNSGDFTTAERSSAARCHSPLPGGDAGNMEDFEEFQDYDEF

SEQ ID NO: 41813 - protein, 109 aa, Zea mays
  Coding DNA Sequence Number=SeqID_34
  Homolog annotation: Hit_ID=UPI0000E46B8A; Match level="QueryCoverage =90%, HitCoverage=17%, E-value=5e-07, Identity=34%"; Hit description =PREDICTED: similar to EGF-like-domain, multiple 6
MVDANGARVIKGLETVAIGSGVVAGRKLERREGEGLEVGETMAASSGVVAGRKLERWEGKGLEVSEIVAAGSGVVAGRKLERREGERMEVGVASGEREAGAIRSNLLGL

SEQ ID NO: 41814 - protein, 286 aa, Zea mays
  Coding DNA Sequence Number=SeqID_35
  Homolog annotation: Hit_ID=Q6QP51; Match level="QueryCoverage=59%, HitCoverage=83%, E-value=1e-15, Identity=42%"; Hit description =Putative growth-regulating factor 1
MEAQAHASCNRLAGCYVRATAPPLAPLPRLLDCEANTATRGNPACGASGGKSKRCFAFAIMTASKKGPGKGDTPKRILLREGNRPRASLLIKGSKAGPSEGFNGRLRAIGFRAHYWSEVRWPAPRKGSTAASGHSGSAPTTDQGIPSEGGIEPSDPVKGDRVRQITRSAACAAPTSEPLDKVRLTAAKSGLRRHRKLHSARPQGSDLGSAPEDGELRSARPQGSDSGSAPEDDELRSARPQGSDSGSAPEDDELCLARPQGSDSGLAPEDDELRLARPQGSDSTLA

SEQ ID NO: 41815 - protein, 138 aa, Zea mays
  Coding DNA Sequence Number=SeqID_36
  Subcellular localization annotation: CTP_CleavageSite=28; ConfidenceScore=5.47e-01
MVDHSCSHPSPTPCSTSCTSSQPWRRACSSSASPHRWLALGRREDTSKLHIRTLVLQLQPVTILYTEIFPARGSLATTSRRRCPKSDGTRLFLVGVSVSAVSPASVLDLVVPPEFLRRVMEEIRWISLRVFLAHLRLP

SEQ ID NO: 41816 - protein, 162 aa, Zea mays
  Coding DNA Sequence Number=SeqID_37
  Gene Ontology: Mol. function=diphosphate-fructose-6-phosphate 1 -phosphotransferase activity; Cellular component=6-phosphofructokinase complex; Biological process=glycolysis
  Homolog annotation: Hit_ID=Q9ZST2; Match level="QueryCoverage=62%, HitCoverage=22%, E-value=5e-23, Identity=45%"; Hit description =Pyrophosphate-dependent phosphofructokinase alpha subunit
MTPFDFAHPDEFDLICDVVACWSDTASAKEDDNVVKCCLEYACSVGTTVRVEYGDAAIAADLSCAHVISHAFPHTYGQPLAHFLRKIAVVVSYSTLLRSYLNTRWSGGSDGLLAQRTLDITNEVLASYKNQGGYDMLGRTKDQILFITLVSLFLQRLPWKLE

SEQ ID NO: 41817 - protein, 138 aa, Zea mays
  Coding DNA Sequence Number=SeqID_38
  Homolog annotation: Hit_ID=Q9SZ28; Match level="QueryCoverage=58%, HitCoverage=57%, E-value=1e-12, Identity=36%"; Hit description=STIG1 like protein
  Pfam annotation: Domain name=Stig1; Domain location=1-137; Score =68.2; E_value=2.7e-17; Accession=PF04885.4; Description=Stigma -specific protein, Stig1
  Subcellular localization annotation: CTP_CleavageSite=81; ConfidenceScore=5.18e-01
MRKATIFLMALALTLIPHEQTVATPPQPLPLQLRRSRFLAANNVNFSPPPPPSFYDCSKKPPSICLSPGSPGATCCRGTCVDTEYSSQHCGNCNKMCKLAQACCQGNCVNTLTDEKNCGGCGVKCRTKCTNGYCDYAA

SEQ ID NO: 41818 - protein, 90 aa, Zea mays
  Coding DNA Sequence Number=SeqID_39
MAVATSDDQLRPGIGGVPPAHRGVSGRNPHRKHWANFPRPPEGPKSALAPEFQWRRGAQPPGHCSFRSRLKEVAREGRCRKERLRPRFLK

SEQ ID NO: 41819 - protein, 51 aa, Zea mays
  Coding DNA Sequence Number=SeqID_40
MAKVKIMRVRVDGPGAQLVYVRGCKRDLLHPKLAKKLSVWQSAAAFGGQKL

SEQ ID NO: 41820 - protein, 91 aa, Zea mays
  Coding DNA Sequence Number=SeqID_41
MVFEMPRKMGQEESTSSRPYAFARDEKKKGKKKAPSSSSLSEEEEEEEESDDEDDRASTSSSEDEDTVQCVGKRSRVLVMLVGSTNLDIQR

SEQ ID NO: 41821 - protein, 311 aa, Zea mays
  Coding DNA Sequence Number=SeqID_42
  Homolog annotation: Hit_ID=Q7G2G8; Match level="QueryCoverage=19%, HitCoverage=9%, E-value=3e-17, Identity=73%"; Hit description=KH domain containing protein, expressed
  Pfam annotation: Domain name=KH_1; Domain location=177-232; Score =23.9; E_value=0.00057; Accession=PF00013.19; Description=KH domain
  Pfam annotation: Domain name=KH_2; Domain location=173-217; Score =13.0; E_value=0.0034; Accession=PF07650.7; Description=KH domain
  Pfam module annotation: Pfam domain module=KH_1::KH_2; Domain location=177-232::173-217
MTQPQQRRISAASSWCGDAAAGDAARSRSTTLRRGLLPQGHQLQDHGGQGVQRHAWRSKLVAAMRLLVCRCADAPARRVARSVAVWPGQVCLCGLRAEPPSADETGVRYRGSELAAISNISKSITNRLAKQTVLGKEMDFLSYKSDRCFIYNFYSVLFLLLTYFSTSQFMSLKNLVTEYRSVIGKSGANVRRVEQQTGARIKVQEIDKDASGERLIIVSSNEIPTEPISPTIEALILLHDKVVGPPAIARGALTEIASRLRTRTLRDTSTANNPPPFAPSDDPPGILNTVYMNILLASPLLKAILKDATAV

SEQ ID NO: 41822 - protein, 492 aa, Zea mays
  Coding DNA Sequence Number=SeqID_43
  Gene Ontology: Mol. function=sequence-specific DNA binding; Cellular component=nucleus; Biological process=regulation of transcription
  Homolog annotation: Hit_ID=Q6IET0; Match level="QueryCoverage=61%, HitCoverage=57%, E-value=6e-70, Identity=50%"; Hit description=WRKY transcription factor 1
  Pfam annotation: Domain name=WRKY; Domain location=226-286; Score =145.4; E_value=1.6e-40; Accession=PF03106.6; Description=WRKY DNA -binding domain
MEADDVPAVPGNKGRRSIEVDFFSDDKDKKSAAAAANDKKEDLTTINLLPGSNANDDDDDEAATRLRLPNDQDRQNRNTNELSAMQSELARMNDENQRLRGMLTQVTTSYQALQMHLVALMQARADGQPMMPPAVAQTLPVTDAAAVMPSPRQFLGLGPAAAAEETSNSSTEVGSPRPSSSAGRRQDQQQQAAERGDSPDPADPSTTARQLAQQQEASMRKARVSIADGCQWRKYGQKMAKGNPCPRAYYRCTMANGCPVRKQVQRCADDRSILITTYEGTHNHPLPPAAVAMASTTSAAASMLLSGSMPSGDNFLARAVLPCSSGMATISASAPFPTVTLDLTNGPPGAPPPARPPPHLQAAALYSATHQASSKFSGLHMSSSSTSDNINNVGTTTRVVAPDAPPHMNTVTAAAAAAIASDPNFTVALAAAITSIIGGGGHPVPIPIHHGGQGQGRQQQGLTPTSNSNANNNNAVVTSSSNNTATSNSETQ

SEQ ID NO: 41823 - protein, 53 aa, Zea mays
  Coding DNA Sequence Number=SeqID_44
MAPPRSSTAPPRLGTGWEDGMWAVDLDEQVTEDPGVQQEEIAEQELIEGKLCP

SEQ ID NO: 41824 - protein, 115 aa, Zea mays
  Coding DNA Sequence Number=SeqID_45
MATRSQPHELLHCGQTPNGNLGHKGEDTHNREWRERKSASRDLAGYGDCASGEARLACAPPDRALGVCHGGLNHGCHGYGMAARREQGPRSVTRAEEKTRGEDTVAREGRGKGVG

SEQ ID NO: 41825 - protein, 137 aa, Zea mays
  Coding DNA Sequence Number=SeqID_46
MGKNKKGRGSSHHSGDKRKREPSPPSEDFGDSEYSEEEFSSESEGSPAIERSGLKSSDESEVSSDEEKSSDSSEEESGGNGDDEGDDGDGGDGGDDDDDDGKGDEGGGGKGDGGNGGKGDGKGSGDSSKASGKAPLV

SEQ ID NO: 41826 - protein, 64 aa, Zea mays
  Coding DNA Sequence Number=SeqID_47
MAASAMGGERRRTQRVGRSARSIESDGKKAKGEREVVENFLLGEKASRRKALAEKEKESKELRE

SEQ ID NO: 41827 - protein, 263 aa, Zea mays
  Coding DNA Sequence Number=SeqID_48
  Gene Ontology: Mol. function=nucleic acid binding; Cellular component= intracellular; Biological process=chromatin modification
  Homolog annotation: Hit_ID=Q6K9W9; Match level="QueryCoverage=99%, HitCoverage=84%, E-value=4e-28, Identity=62%"; Hit description =Putative finger protein EPF1
  Pfam annotation: Domain name=zf-C2H2; Domain location=164-186; Score =20.5; E_value=0.0059; Accession=PF00096.16; Description=Zinc finger, C2H2 type
  Pfam annotation: Domain name=zf-C2H2; Domain location=64-86; Score =19.8; E_value=0.0097; Accession=PF00096.16; Description=Zinc finger, C2H2 type
  Pfam module annotation: Pfam domain module=zf-C2H2::zf-C2H2; Domain location=164-186::64-86
MAHCLILLAAGAAHASDPSPALLPSSTAPHQSQAPPPRAERYTSRKYTEAAATPDGVRAGFYVYECKTCNKCFPTFQALGGHRASHKKPRLAAVNVDGTTTTTTATTMTASPSPPPPLAIAVQPPPPPRQTTPIEFPDVAVATALSLSSSSSVAAAASGKPRAHECSICGAEFASGQALGGHMRRHRPLNAPDRAVTVATGNSNSKKEGINLELDLNLPAPSDEEAVVSLLPPPAVMLGLGQFNDGSKAGHMLTASALVDCHY

SEQ ID NO: 41828 - protein, 193 aa, Zea mays
  Coding DNA Sequence Number=SeqID_49
  Homolog annotation: Hit_ID=UPI0000DA43ED; Match level="QueryCoverage =85%, HitCoverage=98%, E-value=1e-13, Identity=29%"; Hit description =PREDICTED: similar to keratinocytes proline-rich protein
  Subcellular localization annotation: CTP_CleavageSite=66; ConfidenceScore=5.58e-01
MPTDRIAGAFNPSLASGAIGSSASPDPRARTQPRLRKTTNSASPDPRARTQPRLQKTTNSASPDPRARAQPRLWKTTNSASPDPRARTQPRLWKTLNSASPDPRARTQPRLRKTTNSASPKPRARTQPRPRKTTNSASREPRARTQPWPRTTVSASPDPGLRLDLDLGGASASPDPGLGPTTSQGGHHYPTPS

SEQ ID NO: 41829 - protein, 91 aa, Zea mays
  Coding DNA Sequence Number=SeqID_50
MVIVGAVLRLQVRMPCTKNVSALGGEDDEDPTRPFRQVKGKTVYLEQQEGRKKQRLDRATRAALADVREDAFSISDYSGQAGHSVAAFFGR

SEQ ID NO: 41830 - protein, 61 aa, Zea mays
  Coding DNA Sequence Number=SeqID_51
MSVTGRQIDGAEKKRKGGQFKVGKKKGNQALVIGFGDNDYDVRELMRFMELNEKEKNTCDF

SEQ ID NO: 41831 - protein, 776 aa, Zea mays
  Coding DNA Sequence Number=SeqID_52
  Gene Ontology: Mol. function=hydrolase activity; Cellular component =intracellular; Biological process=metabolic process
  Homolog annotation: Hit_ID=Q2QNV4; Match level="QueryCoverage=82%, HitCoverage=68%, E-value=1e-107, Identity=28%"; Hit description =Pentatricopeptide, putative, expressed
  Pfam annotation: Domain name=PPR; Domain location=103-137; Score=8.2; E_value=0.79; Accession=PF01535.11; Description=PPR repeat
  Pfam annotation: Domain name=PPR; Domain location=272-306; Score =20.5; E_value=0.0062; Accession=PF01535.11; Description=PPR repeat
  Pfam annotation: Domain name=PPR; Domain location=32-66; Score=13.0; E_value=0.21; Accession=PF01535.11; Description=PPR repeat
  Pfam annotation: Domain name=PPR; Domain location=373-407; Score =28.1; E_value=3.1e-05; Accession=PF01535.11; Description=PPR repeat
  Pfam annotation: Domain name=PPR; Domain location=474-508; Score =40.6; E_value=5.3e-09; Accession=PF01535.11; Description=PPR repeat
  Pfam annotation: Domain name=PPR; Domain location=509-543; Score =17.3; E_value=0.057; Accession=PF01535.11; Description=PPR repeat
  Pfam annotation: Domain name=PPR; Domain location=545-579; Score=9.3; E_value=0.59; Accession=PF01535.11; Description=PPR repeat
  Pfam module annotation: Pfam domain module=PPR::PPR::PPR::PPR::PPR::PP R::PPR; Domain location=103-137::272-306::32-66::373-407::474 -508::509-543::545-579
MGDPLAALLRSGGNPHSVHGVAIKLGCIVSTFLCNNLLYAYLRRQVPADARRLFDEMPRRNLVSWSVVISGSAHHGVLAEAFALFSHMLHGAGHGSWDRPDSFTLGALVAGCSRARDVDAGMQVHACVAKFGVDEDDSVAAALVDMYAKCGWVDSSWRAFTLAPQRSVLSWTSMIACLVNQGSSGYYDTSLLLFKKMLALKVWPTNATYSCILKVFDTPDLLSVGMQLHGCLLKMGTEVDTALGTALMTMYGRCGGVDEIPRLACRIRHDALSRTALLGAYARTGYNAEAIGVFKEMIMKNMAIDQSAMTGMLQVCSSFGQLRMVRQVHCYALKTFFKLDTLLLNATITVYGRCGDINSAETVFYLMEENDIISWTALLTCYTQNGLDEEVLLFFRKMLRKGLGSPVFCITSVLRASSSISNLAVGLQIHSRTLKLGIDDDNSVQNALVTLYANCGSVQVALKIFNSMSNRDIVTWNALLTSFSQHGSEVAAIQLFDLMQEEGICPDAYTFVGLLSSCSRMGLVKEGCEYFNEMKEKYNLEPKMVHYTCMVDLLARAGRFCDAMDFIDAMPYEPDQILWEALLASCKVHGNLGLGRIAAKKILEITPHDYSAYIILSSIHASVDMWDEKYWNRTVFDTQRARKDTGRSWIDAQELSENIFDALQIGVTRSSSSSAPSTQPTTTAVPLNRHPLQRTATAAPVPRPPTSPPPVDATSVPSAMSAPTTADVAKMIEDLSNTVTNLQMTMVTLQKEKSSSSSTTNGGIDGQHHNDRPPRF

SEQ ID NO: 41832 - protein, 45 aa, Zea mays
  Coding DNA Sequence Number=SeqID_53
MDGMYLSSLSPDLPSITTTFQDVAGSAQAGSRYPMSRGMNIDPYS

SEQ ID NO: 41833 - protein, 167 aa, Zea mays
  Coding DNA Sequence Number=SeqID_54
  Gene Ontology: Mol. function=protein dimerization activity
  Homolog annotation: Hit_ID=Q2QP98; Match level="QueryCoverage=95%, HitCoverage=19%, E-value=6e-38, Identity=54%"; Hit description=HAT family dimerisation domain containing protein
MVASKILNLTCSSSACERNWSVFEQVHTKRRNRLLHDRMRDLVFVKFNSKLRGKKERIDKDPLEREVDDVVGDDDNEFITGIVPLPNDVVEPAQDGRSQGEQTSQAQVQVQAKRKRSMKPRKKLRSLQSLMRDVQVQVQQSSSDSEDGDIAMESSESDKSPHAFDSD

SEQ ID NO: 41834 - protein, 103 aa, Zea mays
  Coding DNA Sequence Number=SeqID_55
MEIAMVQYLQKIAGALNLAAENKEEVVEEEVAPPTEIPPVEDNFYFDIYGTDPKSPTTQGKPWRIYSFLVVLNSLSLEMMHLVIGIECYTVAAFPTLKLITTP

SEQ ID NO: 41835 - protein, 48 aa, Zea mays
  Coding DNA Sequence Number=SeqID_56
MESLDLRAERKSRLVGGDENVGFDIDSGNGEDEVVEGDFQEFQDYDEF

SEQ ID NO: 41836 - protein, 75 aa, Zea mays
  Coding DNA Sequence Number=SeqID_57
  Pfam annotation: Domain name=Gamma-thionin; Domain location=34-75; Score=1.4; E_value=0.036; Accession=PF00304.11; Description=Gamma -thionins family
MVTTMDSQTPTNSDEEAGNMRMVGAEQCDGIRDNMCPDISKSFLICVHSGDCNKCCQEQGYVHGYCSFLSCKCCR

SEQ ID NO: 41837 - protein, 107 aa, Zea mays
  Coding DNA Sequence Number=SeqID_58
  Subcellular localization annotation: CTP_CleavageSite=9; ConfidenceScore=5.10e-01
MTPKKLRPRASRRFATAFTRAQWQRKDHRKGAALAMPPDGRGLSPGTSKSRRCGAQRKAAPVPAQRNASASGRVIQPAAPRRREKTPEPEKRVGWVVKEKATTKHPA

SEQ ID NO: 41838 - protein, 53 aa, Zea mays
  Coding DNA Sequence Number=SeqID_59
MDIAKLWVVNRTGTGRRPQSCRCRPRDIGIRGHGFLYNRNRPIPMRPWVGPLS

SEQ ID NO: 41839 - protein, 413 aa, Zea mays
  Coding DNA Sequence Number=SeqID_60
  Pfam annotation: Domain name=DUF793; Domain location=1-408; Score =423.5; E_value=2.8e-124; Accession=PF05633.2; Description=Protein of unknown function (DUF793)
  Subcellular localization annotation: CTP_CleavageSite=36; ConfidenceScore=5.56e-01
MPATDLQGSSPSTHAHSSPFPSFGRTLLSLRRDAPAAAMPPPRGAGPELGDFHAHVAVRLAGLSAPGGEEFMSVAWVRRLLEAFLLCQEEFRAAVAEARRRGGGVTAPADAEKLVAEVGERAVRALDVCNAARDGVDQARRWERLAGLAASALLAPAEGQVHEGQLWRARKALSDLSLLLADDAAAASAGAGGGLASFLASHRNRSFGRARASPSRASPSAHLRSLSWSVSRTWSAARQLQAIGAGLAAPRATEASCGFAAPAYAMGCLLHLAAWALVAAVPCPDRAAALQAHHLPAAPPRAAFPWAPPLLALQERLAEEGRRKDRRSSCGLLREIHALDKCAQRLAEAIDAAPVPLTGEREAELREAAAELAAACSAIKDGLDPLERQVRELFHRIVRSRMAGLDPPMANAD

SEQ ID NO: 41840 - protein, 77 aa, Zea mays
  Coding DNA Sequence Number=SeqID_61
MGMVTGVVVHVHPCTSILLPCLWQQANKPQRNGGVPTKLENRANLLSKLLRQMARTRKADTAGLAALCGVLLAEYRI

SEQ ID NO: 41841 - protein, 242 aa, Zea mays
  Coding DNA Sequence Number=SeqID_62
MVKVRKEEQGARSRSVTAADAGGVVQGSNGLVHAHATRRAFPPAPRARELSLRRCPSPGAAASAADRGQFGESWRRGRARWATRTRTRGWGMGMVVWSLPLLVSWLALTPVGPGLGDCHWETLGEGRPSAGGWVPVPRHAVDECGFRLQSPDSREGGREVRPDGRVARAVGRAYGPDPDPSRSLEVGPARTRAAFFRLQAKAQCRSRRTYGTHASLLAESPTLPYVASAHASGDHSDVLKYI

SEQ ID NO: 41842 - protein, 211 aa, Zea mays
  Coding DNA Sequence Number=SeqID_63
  Homolog annotation: Hit_ID=Q9FFH2; Match level="QueryCoverage=52%, HitCoverage=54%, E-value=7e-12, Identity=41%"; Hit description =Arabidopsis thaliana genomic DNA, chromosome 5, P1 clone:MLN1
MREAVPVELGEARRAGEVDSVAPQVATDSLQGISSMEVTKEFDPQNLLELFSIFAINLSSPTKDVQILTLRILSYFVKMDQRLITDEERPHKRQRTEVSGEEAVAKYANLFLTASTGAMSVRPRRERPSPAGPHPDPSSTARVPGKRGTSAKGRAGSRMQRSTNLTRTRDEGHTEVPTSKESLSCLNISTTPPTGSSTTGDAVNRISAGGP

SEQ ID NO: 41843 - protein, 131 aa, Zea mays
  Coding DNA Sequence Number=SeqID_64
MGDDNTAAAFPLNPELDDCTNVDAMAILPAPQKINHLEVLAMSGIQSVCDKFVKGLIPVHGSNLKELAFAGCLELTSTSIKTVGEYCQELTSLDLRNLNRLCDPALWHLRGCRLLRKLRLQRNAFSFFLAF

SEQ ID NO: 41844 - protein, 71 aa, Zea mays
  Coding DNA Sequence Number=SeqID_65
MDTTWVSKVACRALLLSLMVSMRGGDEGATDDVAAGGGDEEQDELDHLDRDTRLSRASDGRVAVELLEESW

SEQ ID NO: 41845 - protein, 137 aa, Zea mays
  Coding DNA Sequence Number=SeqID_66
MAAGTSTPRDHTPPLLSECLDGIRSRGLREVDDAAKGRGHDWGRELGMGGLTAREDRVSSLRLGAGSSHRNLRKMWESRCIVYTAQLENGVVNEWTRCLWFWASVEEYCAAGGALAIERVKEANNQLATEQQPTCAF

SEQ ID NO: 41846 - protein, 83 aa, Zea mays
  Coding DNA Sequence Number=SeqID_67
METTDQAKDGSKKSFEVPSAWEKVKEVEEPKARDEEEDLERRRGAGSRAPLRVEKAHSSLWSYSTVVLGPRVGFLLRRDTNED

SEQ ID NO: 41847 - protein, 112 aa, Zea mays
  Coding DNA Sequence Number=SeqID_68
MAELSGYNPKQFGQVVDHPTPHAWTIWVWNYAGNAIYGQTVQIHTRTVRPSRGLFGPYVGPSGLNQYNTFVSDPPLSTHSSPFSVSRANTPAEDVAERVMLLTQLRTGGTRV

SEQ ID NO: 41848 - protein, 94 aa, Zea mays
  Coding DNA Sequence Number=SeqID_69
MNILQAIEQTPPPASIDKAAKLTNAEATVAAEDENLTITLSKINRLISNVVAEKEVAAVDSDKGKRLMKPLQKERNSTYGTWATNSSLKRTYRS

SEQ ID NO: 41849 - protein, 73 aa, Zea mays
  Coding DNA Sequence Number=SeqID_70
MVASATDVGEWEVLGSDGGGRRGTELRLVCTMAKSVRWKPNNEHCGDYPQITDGLNFQNFKLYAQTNSNMMQM

SEQ ID NO: 41850 - protein, 73 aa, Zea mays
  Coding DNA Sequence Number=SeqID_71
  Homolog annotation: Hit_ID=Q8H1V6; Match level="QueryCoverage=87%, HitCoverage=22%, E-value=2e-26, Identity=86%"; Hit description =Hypersensitive-induced reaction protein 4
MVNTFFLFCGCVDQASVAVVEKWGRFLRLADPGLHFFNPLAGECVAGSLTTRVQSLDVRVETKTKVVCLHSFV

SEQ ID NO: 41851 - protein, 239 aa, Zea mays
  Coding DNA Sequence Number=SeqID_72
  Homolog annotation: Hit_ID=UPI000069ED77; Match level="QueryCoverage =56%, HitCoverage=34%, E-value=5e-07, Identity=29%"; Hit description =UPI000069ED77 related cluster
MQAACNRAKWARSFDSNEPSMEVQAHASCNRRAGCYVGSERRFAFAIMTASKKGPGKGDTPKGTLPREGNKLQASLLIRGSKAGPSEGFNGRLRSIGFCAHYWSEPRPSSGVIGNSASPDPRARTRAQPRKTANSAPPDPGLGHGLSPGRRRTPLRRPRARIWAQPRKTMNSASPDPRARTWAQPQETTDSASPDPRARTQPWPQPMVSASPDPGARTRPRPRKTDSTSTSEEPPHRPT

SEQ ID NO: 41852 - protein, 135 aa, Zea mays
  Coding DNA Sequence Number=SeqID_73
  Subcellular localization annotation: CTP_CleavageSite=41; ConfidenceScore=5.07e-01
MAQCSASAILFGKPYTSRGPGTPSTRTTEIGEDRSLLVDPRARRRRGLCVNSGYFASSPGVCPWPSQGGTTVVATPIARRSSADVSGLHCAVIGLPLPISRITIGGASTGVSGGSFRCTGGLHGRIGGCGRAGLS

SEQ ID NO: 41853 - protein, 146 aa, Zea mays
  Coding DNA Sequence Number=SeqID_74
  Subcellular localization annotation: CTP_CleavageSite=39; ConfidenceScore=5.16e-01
MAPTPGAHWSASSLAPALTISLDCGPARQLPRAARGITQASAGGPAPSIALVRGYSVGHWHWSPLGRRHLPRNRLAKKLATTAEFSLAGPTSPGRAYRGGLGPILPLYRALTSTNATLSCAEWHHRKKETVVVLPPWCHVPIGVMT

SEQ ID NO: 41854 - protein, 1319 aa, Zea mays
  Coding DNA Sequence Number=SeqID_75
  Gene Ontology: Mol. function=nucleic acid binding; Cellular component= chromatin; Biological process=DNA integration
  Homolog annotation: Hit_ID=Q9XEJ4; Match level="QueryCoverage=49%, HitCoverage=63%, E-value=0.0, Identity=87%"; Hit description=Copia -type pol polyprotein
  Pfam annotation: Domain name=Chromo; Domain location=1204-1258; Score= 38.1; E_value=2.9e-08; Accession=PF00385.14; Description='chromo' (CHRromatin Organisation MOd
  Pfam annotation: Domain name=RVT_2; Domain location=856-1091; Score =460.0; E_value=2.9e-135; Accession=PF07727.4; Description=Reverse transcriptase (RNA-dependent
  Pfam annotation: Domain name=rve; Domain location=464-627; Score =198.9; E_value=1.2e-56; Accession=PF00665.16; Description=Integrase core domain
  Pfam module annotation: Pfam domain module=Chromo::RVT_2::rve; Domain location=1204-1258::856-1091::464-627
MKGKRREKKRYYKKKGGEAHVCHEWNSDESSTDSSSNEDAANIAVTKGLLFPNVGHKCLMAKDGKRKKVKSKSSTKYATSSDEDNSSDEEDNLLTLFANLNMQQKEKLNELISAIHEKDELLDTQEDFLIKENKKHVKVKNAYALEVEKCEKLSSELSTCHDVIANLRNENARLIAKVDSNVCDDSISNLRDDKASLLAKIEKLNASLASLKIENEKLIAKAKDLDVCNTSISNLRSENDILYAKMVELKSCKPSTSTVEHVRCRDVNIDAIHDHMALIKQQNNHIAKLDAKIAEHELDNEKFKFARSMLYSRRCPGIKDGIGFQKGDNVKLNVPPKRLSNFVKGKAPMAQDNEGYILYPAGYPEHKIRRIQSRKSHSGSNHAFMYKSEASSSRQSTRAKLAKKKTPIAANDHNISFKTFDASYVLTNKSGKVVVKFMHPEAQVGSSIAGKQVGVHHPHKNIMTTDRLLELLHMDLFGPIAYMSIGGSKYCLVIVDDYSRFTWVFFLQEKSHTQETLKGFLRRAQNEFGLRIKKIRSDNGTEFKNSQIESFLEEEGIKHGFSSPYTPQQNGVVERKNRTLLDMARTMLGEYKTSDRFWAEAVNTACYAINRLYLHRILKKTSYELLTNKKPSVSYFRVFGSKCFILVKRGRKSKFAPKAVEGFLLGYDSNTRAYRVFNKSSRLVDVSCDIVFDETNGSQVEQVDLDELDDEEAPCVTLRNMSIGDVCPKESEEPPQAQDQPSSSIQASPPTQDEDEAQDDVGENQEDEPPQEESNDQGGDAHDQDDEDEQVPRPPHPRVHQAIQRDHPVNTILGNIQKGVTTRSRVAHFCENYSFVSSIEPHRVEEALQDSDWVVAMQEELNNFTRNEVWHLVPRPNQNVVGTKWVFRNKQDEHGVVTRNKARLVAKGYSQVEGLDFGETYAPVARLESIRILLAYATYHGFKLYQMDVKSAFLNGPIKEEVYVEQPPGFEDSEYHNHIYKLSKALYGLKQAPRAWYECLRDFLITNGFKVRKADPTLFTKTLENDLFVCQIYVDDIIFGSMMGELKYFLGFQVKQLHEGTFISQTKYIQDILNKFGMKDAKPIKTPMGTNGHLDLDTGGKSVDQKIGLAVATPDLATWLQEREMVSNLPYVQSSVTTRANQKLAFRFFGPYIVLQRVSPVAYKLQLPASSQIHPLFHVSQLKAALGRQQVAVQNLQSTTDSMQVPMQILQRRMIQRGGLTVAQVKVTWSDLDPALATWEDTTALKERFPCAPAWGQAAPQGRGNVKPALQEEAAGREEKQAKQASMSTTQEHGEDDGQARPRHERRENTRVIGPDWVM

SEQ ID NO: 41855 - protein, 154 aa, Zea mays
  Coding DNA Sequence Number=SeqID_76
MALPVDVVSLRPRLGDVEAPPRSRSSLSSVAVVESEPLGRARRRPSAEARAESEPWGRAKRSSSSSGAEPKSEPWVGRSGGINVGGDARGGVDILRSGGIDDGGDARGGVDDDGVGASEGEGGRDAGEGEDGDDRVAGEGEGKDEGDRLFIVFK

SEQ ID NO: 41856 - protein, 154 aa, Zea mays
  Coding DNA Sequence Number=SeqID_77
  Subcellular localization annotation: CTP_CleavageSite=42; ConfidenceScore=5.39e-01
MTANGMGTVAGVLHGRASRTPGRTEVLLRARGQGFRAWSSVSVLTVGYKLRRGTTGTNNATSVPAGCRGVWRLGFLAHGVGVAQGAVAASWQGRLAAVWPWRGTRSGGCELVLRLLGGEERGMEGRREKEGAGGGGYPATYELKKEMNRHGSGA

SEQ ID NO: 41857 - protein, 735 aa, Zea mays
  Coding DNA Sequence Number=SeqID_78
  Gene Ontology: Mol. function=protein binding
  Homolog annotation: Hit_ID=Q7XAK8; Match level="QueryCoverage=26%, HitCoverage=25%, E-value=2e-58, Identity=58%"; Hit description =Protein phosphatase regulatory subunit-like protein
  Pfam annotation: Domain name=LRR_1; Domain location=513-532; Score =4.3; E_value=44; Accession=PF00560.23; Description=Leucine Rich Repeat
  Pfam annotation: Domain name=LRR_1; Domain location=535-555; Score =11.5; E_value=2; Accession=PF00560.23; Description=Leucine Rich Repeat
  Pfam annotation: Domain name=LRR_1; Domain location=557-578; Score =16.1; E_value=0.13; Accession=PF00560.23; Description=Leucine Rich Repeat
  Pfam annotation: Domain name=LRR_1; Domain location=580-600; Score =9.9; E_value=3.9; Accession=PF00560.23; Description=Leucine Rich Repeat
  Pfam annotation: Domain name=LRR_1; Domain location=602-622; Score =7.6; E_value=11; Accession=PF00560.23; Description=Leucine Rich Repeat
  Pfam module annotation: Pfam domain module=LRR_1::LRR_1::LRR_1::LRR _1::LRR_1; Domain location=513-532::535-555::557-578::580-600::602-622
MEPRSASYHGYNDKSPTALHNAPPEPDTSQFTLLISHPIGSACQFRGESPPLLRLKGQRLYGSLWPSPPVGSSTTARARAHDAGAIPVSGSLLRKRSLPEQNAYLVTYSLGNGKNKGAYAKKASGNDCPKVKPVEFMDMVVADAVVDDVSRCRDSVPASACSSRLVAHAAAELARHATGENGDKAAAKRDSSSAAGSSSSGYSSDGTGDDAKSAEPDDGEPCSLGRMSPTAASPKLMRSCSNIETTRSVLTGSDLPAKSRSYDDLKTLPSHGSSSARSGGAVRASPTPASSRTSCSADRVMLKKRSSRQVLPSRSRKLWWQLFLWSHRNVHRRRGASAPTPTTLLWPSPGREGGGAAHRRDGYASDTLGTATADDAKEKGVAVEEEGPRVPTQWVAFSAEASPLDRVSAWVNSLGNGSFHAVDEDGGATGHGGDGASRLRPRPRRSEIVELPTSAAGGRRHPQPQARRRAAAAAAEAGQASGIIVQTLNTFSSVAHIAGMGLQAVPAIAAFSTLRAVNLSGNVIVRITAGSLPKGLHSLDLSRNKIAIIEGLRDLTRLRVLNLSYNRISRIGHGLSSCTAIRELYLAGNKIGDVEGLHRLLKLAVLDVSFNKIGTAKSLGQLVANYGSLRAINLLGNPVQANAGDDTLRRAVSGLLPRIEYLNKQAVKPQRAREVAKDSVAQAALGNAAGANSRRRPARRLGQSPAGSSAAKGRRGSRGRSVTRPQSSSLPLPRR

SEQ ID NO: 41858 - protein, 67 aa, Zea mays
  Coding DNA Sequence Number=SeqID_79
  Subcellular localization annotation: CTP_CleavageSite=43; ConfidenceScore=5.04e-01
MTSSASPTMLPPTPTHNMRHIQSPLKTTDQANDGGKKSFEAPRVREKVKETRNPKARGEEEDLQSQG

SEQ ID NO: 41859 - protein, 284 aa, Zea mays
  Coding DNA Sequence Number=SeqID_80
  Gene Ontology: Mol. function=prenyltransferase activity; Cellular component=integral to membrane; Biological process=menaquinone biosynthetic process
  Homolog annotation: Hit_ID=Q10QN3; Match level="QueryCoverage=96%, HitCoverage=90%, E-value=2e-88, Identity=57%"; Hit description=1, 4 -dihydroxy-2-naphthoate phytyltransferase family protein, expressed
  Pfam annotation: Domain name=UbiA; Domain location=68-284; Score= -41.6; E_value=0.015; Accession=PF01040.9; Description=UbiA prenyltransferase family
  Subcellular localization annotation: CTP_CleavageSite=42; ConfidenceScore=5.68e-01
MPLAGIALTPLLVSPLAPSPRRSRVATSAARRPRALQRARCSATAASGEAGELSHATLLWRAAKLPIYSVALIPLTVGSASAYYHAGLFFTKRYFVLLTAAVLVITWLNLSNDVYDSDTGADRDKKESVVSITGSRAMTQNAANFSLFLGFAGLLWAFAEAKDIRFILLVISAIFCGYVYQCPPFRLSYQGLGEPLCFAAFGPLATTAFYFSNSSLNTSSGGAALLPLTKTVIASSVLVGLTTTLILFCSHFHQVLCALTLPMGKTVVDYVLKHHEADENGAQY

SEQ ID NO: 41860 - protein, 209 aa, Zea mays
  Coding DNA Sequence Number=SeqID_81
MKLQAICTLGMLVFYKLLSSKRGCFQSSLLEGTQTDLNRNRLAEAGHHGINRITSYAYACVGRSEGSGNGGMVVSETEMELGRWRRPERDHPRRAKAISEASGVSSVTAREMGAGGSTARTFLLGVKQRARAKGGARFDRGFVWSNAETTMGVKTHRFCPMEAVALWKPSPNRVLETRSSNVEDTGYCGSKELWGKNGKHMNRMTNPKP

SEQ ID NO: 41861 - protein, 325 aa, Zea mays
  Coding DNA Sequence Number=SeqID_82
  Homolog annotation: Hit_ID=Q8H6L7; Match level="QueryCoverage=40%, HitCoverage=93%, E-value=2e-50, Identity=70%"; Hit description =Pollen allergen Phl p 11
  Pfam annotation: Domain name=Pollen_Ole_e_I; Domain location=188-309; Score=143.7; E_value=5.1e-40; Accession=PF01190.8; Description=Pollen proteins Ole e I family
MEVSSPEVGANVVYLFSNTVDQEQGNIIVKDWGPSSSETLSPFEYNDSWTKEVESTRHLSPVSPLEAPPAPPQGVPAIGGADGGDLDIDDDGGSSSHNTTLSEEQESEDPDYWEAICLVRFQQLVSKLRPDVVDQIASGSIPLPYRAGRAGRNKTDKDDMVRSLVALLLVATAVAAVARAAPSPGFVVTGRVYCDNCRAGFETNVSHAIEGATVEMECRHFESQEVHDKAEATTDAGGWYRMEISGDHQDEICEVLLLKSPEADCAEIERTRDRCRVPLTRNDGIRQSGIRYANPIAFFRKEPLSNCGELLRAYDLFNETSENSL

SEQ ID NO: 41862 - protein, 96 aa, Zea mays
  Coding DNA Sequence Number=SeqID_83
MKVQDERGNIAGPSPSCSVNFLEILKSLLLSKALKFEQEAEDQKNELVVSNLEKRVKEFEDSLEEKDLKDKEPEIAHSKLKEANNRYEDKGNVDEG

SEQ ID NO: 41863 - protein, 419 aa, Zea mays
  Coding DNA Sequence Number=SeqID_84
MAPIHALFRSSTSRGRASLESQPNMDRYRAPKARPDQADADDSDELGVFAAERYFYGDDDELWPCERSSSSLSSAFRTGTHEPDRSVPTPTAVTSSSEASWNSRSTLLPNPNGQAEKLHAAAAAAAAAAATPIIESRPSGAEGQRPGRRPASSSNLRRWLRGVAACACAGGASEDTASADEIGTNERFPETEVPEVTAARSSLTPASGRWLLGGDNTTLAGMEAFSSPNPIQPAGDGHRRATDLGELSTPILHPQAAATSHSDERRRIKPLETFWPVPPVGDHGSSLGSEMQRSSASAVVAGNTALGGDAQRAASGGGGSPGEDDAAPSELGCQYPPSEASVVWSVVTADGAASGIFSSGASGYYYHYCLNDLDHGAMRGAGARNTRRRRSGIVSSSSLLCMSEKAVDAVGPTRSVHRQ

SEQ ID NO: 41864 - protein, 649 aa, Zea mays
  Coding DNA Sequence Number=SeqID_85
  Gene Ontology: Mol. function=metal ion binding; Biological process =regulation of transcription
MDYDFGGTSPDPYGGGSIHLVCDHCGTSDNYTTDDADDGQFTCRTCSAVHTTQATAADPHDFPATGNISVRRVATQPTPKLGARTPAPYLRTPQAAPVPATAAFDDFTELSEPRDFVSGSGTCGEPEDLAVQVRWRYVRGLQVILQRQLEVLVERHQVGAFVCAVAGIVWVRWVAASRVFDGIWARQVLEDHKAVGRQKCYDDKKPDEMKYEWDDDMSLQRKDRHKLEFAFLRSLRMMLPVYSTLAVCFLACHIAREAILPSDIYRWAMEGNIPYVAAFTEVDRFLGSSFQDCPLDARQLFRPVRVIGAWQLEAAAGSIAQRVALRLPSVNFYAIAQRCLKDLLLPIDRILPHACQIYEWAMPAELWLSSNPARVPTRVCVMAILIVALRLLYNINGQGIWEKICEEGRNPSESHYDANSSTSRKLEASNSEEFGTRELLCAISVAYDKINTSHDYSSDLRSYLKYCKEVVFAGITSSDEQTHLIEIFWDMYKAREDDNIEDHVKSQSHSMADIPITNGVRKHYRDGAFVKASSFSASSGHDAMQMLKSEMQDHGFHYMPPRKPRKSDGYLRYRRRRLSGGFIFVAHADYYLLLRAFAKLAEIDIRIMHISVLKLEKRLACIEERIERSLNTLHNFSTGTVDELRSVSD

SEQ ID NO: 41865 - protein, 629 aa, Zea mays
  Coding DNA Sequence Number=SeqID_86
  Gene Ontology: Mol. function=nucleic acid binding
  Homolog annotation: Hit_ID=Q10R95; Match level="QueryCoverage=99%, HitCoverage=100%, E-value=0.0, Identity=66%"; Hit description =Calmodulin-binding family protein, putative, expressed
MGLSISYPPDDYLPEDDDDDDDDGIDRLFVRSLSFDNLNTHDTLESPTALLDALTSKRLMVRGSLRFERREGDPFQVETTLSMVSPKPAKKSYNYKPIVLPRYKSTENLPPDSPVIGMVSPVHQAAAIRVQKVYKSFRTRRQLGDCAVLVEQRWWKLLDFALLKRNSVSFFDVQKPESALSRWSRARMRAAKVGKGLSKDEMAQKLALQHWLEAIDPRHRYGHNLHYYYQYWLHCEGKEVNIDEHCPRWKLLQQCIRYLGPKERESYEVVVEDGKFMYKLSQKIVDTSEGPRDAKWIFVLSTTRALYIGTKSKGTFQHSSFLAGGATSAAGRLIVEDGILKAVWPHSGHYRPTEANFREFMNYLKNRNVDLTNVKLSLSEGEEDEWFRHRASSLSQLNNTESSHPTSAEDSKSHSHPAGAADKGNDTTPGTPPSTSHDKTTTSAATSGTPAMKRSSSGSKLQRKRPPRLAVSKSRLGKGSGEQGAGAFGDCLNFCKENLFRGGEGDGEGGCEGEEMVVVPQEKILHRINSKMSLHSYQLGNQLSFRWTTGAGPRIGCVRDYPPELQFRSMEQVSLSPRGGAEHPRFGGTPPRQSPCAPLVPSTPGGPVSPLYGHGGAGTPSPRLQHGAA

SEQ ID NO: 41866 - protein, 92 aa, Zea mays
  Coding DNA Sequence Number=SeqID_87
  Gene Ontology: Mol. function=structural constituent of ribosome; Cellular component=intracellular; Biological process=translation
  Homolog annotation: Hit_ID=Q7X9K4; Match level="QueryCoverage=60%, HitCoverage=65%, E-value=6e-22, Identity=96%"; Hit description=S28 ribosomal protein
  Pfam annotation: Domain name=Ribosomal_S28e; Domain location=28-92; Score=153.1; E_value=7.5e-43; Accession=PF01200.9; Description =Ribosomal protein S28e
  Subcellular localization annotation: CTP_CleavageSite=39; ConfidenceScore=5.38e-01
MGCNDSGCNPTQTNKAVGMRLVTGQLSMDTQVKLAVVVKVMGRTGSRGQVTQVRVKFLDDQNRLIMRNVKGPVREGDILTLLESEREARRLR

SEQ ID NO: 41867 - protein, 534 aa, Zea mays
  Coding DNA Sequence Number=SeqID_88
  Gene Ontology: Mol. function=endonuclease activity; Cellular component=nucleus; Biological process=regulation of transcription, DNA-dependent
  Homolog annotation: Hit_ID=Q10R99; Match level="QueryCoverage=97%, HitCoverage=96%, E-value=1e-142, Identity=77%"; Hit description =Endonuclease/Exonuclease/phosphatase family protein, expressed
  Pfam annotation: Domain name=Exo_endo_phos; Domain location=269-530; Score=18.2; E_value=0.00086; Accession=PF03372.13; Description =EndonucleaseExonucleasephosphatase family
MTQVKPAPGGRMLTVLRVHLPSEIPIVGCEITPYVLLRRPDGGVFTDDVSETAPVDGYFMRYKWYRIQSDRRAAICSVHPTEQATLQCIGCLKSKIPVAKSYHCSSKCFSDAWQHHKVLHDRAISALNENGTEDDELFGRFGSGSSSSGVISAALSGSTSNLSLSSGVNNGPTPVYPTGTEKSSGETWFEVGWSRTYTATTDDIGHVLRFECIVVDVETRGTVRAPTSVMTSRVIPAPTPTPRRLIPVNAADAMVHFDLDSRTSSFGTFTVLSYNILADTYATSDTYSYCPTWALTWAYRRQNLLREIIGYHADIICLQEVEFNKAAQSLTDAIIPAAQKKLALNRLVKDNIALIAVLEAKFSNHGTENPSKRQLLCVANTHINIHHDLKDVKLWQIHTLLKGLEKIAVSADIPMLVCGDFNSTPGSTSHGLLARGKVDHLHPDLAIDPLGILRPLSKLTHQLPLVSAYSSFVSMAGVGYDLDHQRRRMDPGTNEPLFTNCTRDFTADSLTVESLLELLDEDSLRKDTALPSPE

SEQ ID NO: 41868 - protein, 141 aa, Zea mays
  Coding DNA Sequence Number=SeqID_89
MWRTGHCTVHYPGVLRAGEVYFGEQSRPWGGAIERTEADAGSSEGFRTSRAKSWARGGAASAERRGGTTDRRAAAPASSNSPQRSGIEANRVRGVVPYLGTVLGEAQHSVWSSGRLGTVGKRHQQARSTVAMREKGCWREK

SEQ ID NO: 41869 - protein, 164 aa, Zea mays
  Coding DNA Sequence Number=SeqID_90
  Gene Ontology: Mol. function=transcription factor activity; Cellular component=nucleus; Biological process=regulation of transcription, DNA-dependent
  Homolog annotation: Hit_ID=Q8LKW9; Match level="QueryCoverage=74%, HitCoverage=57%, E-value=1e-16, Identity=42%"; Hit description=DRE binding factor 1
MNARNTPLGTVLTTCHLSVHVAYDQAAYRRRGDAARLNFPDDAASRATLDPVVNAKLEAISATIATAAASSSKNAARAKSKAVPINAPILEAVASPSSSSSSDEGSGSDDEMSMSSPSPTPVVAELGQLDFGEVPWDEAENFVDWPPCPAVADEGLGNLQAAGT

SEQ ID NO: 41870 - protein, 183 aa, Zea mays
  Coding DNA Sequence Number=SeqID_91
MDLNSKGIPSPFDIICIALCSQYCDCHSLVFIISSEFEFQDKEHQHVEEVDQKSSSKHVEISAHDMNSSRNPVKAIMQEMINICLDNKDMEASDGSKLGINGPGIILSKHNDECGGGAQEAESMENTPTTQLMMHQDQLCSNFCILHIIHHCEQMLGITTDITPDLINHAGLIVSRLNVPKEL

SEQ ID NO: 41871 - protein, 58 aa, Zea mays
  Coding DNA Sequence Number=SeqID_92
MDAEGREGPSDGGGEIGMGAAQGQGSEKQEQGLFLSSDSRRRNAAMYTNLENVCVADD

SEQ ID NO: 41872 - protein, 123 aa, Zea mays
  Coding DNA Sequence Number=SeqID_93
MEVRPATGHKEGACMAADVEGGGGGGVERLCGGGGGVVKVKRTLGKEASLPSVRRLALGRACCAECHCWTLDKAKGVLVQPATRFLPMIEQGSRHPKDTCAAYSLQEPTEASPVSASFPGPGA

SEQ ID NO: 41873 - protein, 85 aa, Zea mays
  Coding DNA Sequence Number=SeqID_94
  Gene Ontology: Mol. function=catalytic activity; Biological process =trehalose biosynthetic process
  Homolog annotation: Hit_ID=Q6ZAL2; Match level="QueryCoverage=81%, HitCoverage=23%, E-value=3e-12, Identity=50%"; Hit description =Putative trehalose-phosphatase
  Subcellular localization annotation: CTP_CleavageSite=22; ConfidenceScore=5.45e-01
MTKQGVVVPPNSAPLFQYPLPRAVSGVSVRRKYLQMGASTDRVVGGGWVGSLRASSPTHARAGIDEDRYARVCPYRIIIAYCTVE

SEQ ID NO: 41874 - protein, 124 aa, Zea mays
  Coding DNA Sequence Number=SeqID_95
MVGPRPTGFAAQGRAHVGRGHTRAGTEVPHLLLAWPIHAGDWVRCRAAARKEANDGMRESWLWPLGAHAGNGEARRIGYPQRGRRQNRRLGREEEEWSPPWWTSSGGAGPTNDGATSSTREVRV

SEQ ID NO: 41875 - protein, 148 aa, Zea mays
  Coding DNA Sequence Number=SeqID_96
MAEVTTDRASPLKMKELERTSSEDIELDIRHLGVQKLSEEYISELKEFAIAGGYKFRSMLFGGVDKEILGLLLSKALKLQQEDEDRKNELVINNLEKRVKELESFPAEKDSKIKTAETDLAKAHLQIKDQIARISDQDKQLKEAHSNL

SEQ ID NO: 41876 - protein, 310 aa, Zea mays
  Coding DNA Sequence Number=SeqID_97
  Gene Ontology: Mol. function=transcription regulator activity; Cellular component=nucleus; Biological process=regulation of transcription
  Homolog annotation: Hit_ID=Q1SP86; Match level="QueryCoverage=67%, HitCoverage=50%, E-value=3e-30, Identity=44%"; Hit description=Helix- loop-helix DNA-binding
  Pfam annotation: Domain name=HLH; Domain location=103-152; Score=3.7; E_value=0.058; Accession=PF00010.16; Description=Helix-loop-helix DNA- binding domain
  Subcellular localization annotation: CTP_CleavageSite=25; ConfidenceScore=5.09e-01
MAFPTTICSESGGGGSSYVVYGAAAASHGSSTSDVEIQLPWGSSSVLQQQQKASSPRSSSRTTATTTSPGSNMLEFSNNSSSSPRECISTVSGSAFKKARTQEPSPAQSTVKVRKEKLGDRITALHQLVSPFGKTDTASVLLEAIGYIRFLHSQIEVVFFGLIVNTPSLVFNSTLEPNMCASFMKYFGFTELALSSPYVGGSNGGGGGSKQNQQLHEASAQRESRHSIFPEDPGQLLHDSSAIKKRAGLQPADGEQDEESCDEEKKKDLRSRGLCLVPVSCTLDVGVDVVAGPADYWAAAAPAFGMGFGA

SEQ ID NO: 41877 - protein, 94 aa, Zea mays
  Coding DNA Sequence Number=SeqID_98
MLYVILEHEDLLKCLTRQRDPVVVCEVLWVHCHLNRGSGVNRKRNKLMLLRYWSDIGYCMASRNGGGGGRVGPLVTREWGRLHGKGRGEAGGAG

SEQ ID NO: 41878 - protein, 108 aa, Zea mays
  Coding DNA Sequence Number=SeqID_99
MSLIMWYLFLSYGGCETARAMSWMGRLPMVMSREVELREEWSHDNYSGKRFGRTPDGLSHGDVAQSRPAFPRWFPEFGEAAASSKHEGFVGGGPLLTPECAELVGRPS

SEQ ID NO: 41879 - protein, 456 aa, Zea mays
  Coding DNA Sequence Number=SeqID_100
  Gene Ontology: Mol. function=nucleic acid binding; Cellular component= chromatin; Biological process=DNA integration
  Homolog annotation: Hit_ID=Q10I04; Match level="QueryCoverage=99%, HitCoverage=30%, E-value=1e-171, Identity=62%"; Hit description =Retrotransposon protein, putative, unclassified
  Pfam annotation: Domain name=RVT_2; Domain location=91-340; Score =488.0; E_value=1.1e-143; Accession=PF07727.4; Description=Reverse transcriptase (RNA-dependent
MCGHRNKRSKINLLPQQWCNPQLKTMDKFIKKRRVIKGEHKMIMLWRKKHLKPLQPKSERRFKGIISSTRYWGRRGLSRSGLGVGHAGGAQQFKRNEVWTLVPRPKQNVVGTKWVFRNKQDEHGVVTRNKARLVAKGYAQVAGLDFEDTFAPVARLESIRILLAYAAHHSFRLFQMDVKSAFLNGSIKEEVYVEQPPGFEDERYPNHVCKLSKALYGLKQAPRAWYECLRDFLIANAFKVGKANPTLFTKTCDGDLFMCQIYVDDIIFGSTNQKSCEEFSRVMTQKFEMSMMGELDYFLGFQEKQLKDGTFISQTKYTQDLIKRFGMKDAKPAKTPMGTDGHVDLNKGDSDYAGCKVDRKSTSGTCQFLGRSLVSWSSKKQTSVALSTAEAEYVAAGQCCAQLLWMRQTLRDFGYNLSKVPLLCDNESAIRMANNPVEHSRTKHIDIRHHFLRDHQ

SEQ ID NO: 41880 - protein, 102 aa, Zea mays
  Coding DNA Sequence Number=SeqID_101
MARDGSETQRLAMWARPAVSHKATDITALGVSAVGCKRKRKNSEQDWAHSSPNRPTTRTRSPTMGGRATTPVNLYRPLYPIIPARMCSTPNYTIGATLGINN

SEQ ID NO: 41881 - protein, 377 aa, Zea mays
  Coding DNA Sequence Number=SeqID_102
  Homolog annotation: Hit_ID=Q016U8; Match level="QueryCoverage=31%, HitCoverage=9%, E-value=6e-23, Identity=45%"; Hit description=[A] KOG0924 mRNA splicing factor ATP-dependent RNA helicase
  Pfam annotation: Domain name=Helicase_C; Domain location=74-144; Score=0.0; E_value=0.016; Accession=PF00271.21; Description=Helicase conserved C-terminal domain
MEYCLALDSPASGAYFAQHGEKKRLNEDVIDFDLLEDLICYIDENCPQGAILVFLPGVAEIDLLIDRLSALVRFGGASSDWILPLHSLLGPSDQRKVFQSPPDNFRKVIIATDIAETSITIDDVVYVVDTGKHKENRYNPHKVGAFEGHEELSPLGYHLAKLPVDVLIGKFPPLATNTMSSLPAILRPWTTLPLPSSSFPLPILSCSLAAMVAPVVAPPATPTALHTAAPIGVAPHPAGAPPYASVAASPVTAGNILRVGVAPLMAGAPHCVPVPAAASSTAPAPLPYALADIALLAAATPVFALVAGTPPAAGAHTPASSTAAPLHLTTALPPRPHMAPGLALTRPPSSLQVSGLSMFLHRLSQTTSCGPLLHSPL

SEQ ID NO: 41882 - protein, 553 aa, Zea mays
  Coding DNA Sequence Number=SeqID_103
  Gene Ontology: Mol. function=ATP-dependent helicase activity
  Homolog annotation: Hit_ID=Q5ZEC6; Match level="QueryCoverage=16%, HitCoverage=8%, E-value=2e-08, Identity=39%"; Hit description =Putative DEAD/H box polypeptide 36 protein
  Subcellular localization annotation: CTP_CleavageSite=62; ConfidenceScore=5.66e-01
MAPKKKQPDSKQRQKPKSSSSSSAATAAPRLQISSENERRLRRLLLNSSAPSPSPANVSEVRGESREQKARRLRGVYDKLALEGFSSAQIEQALSAIPDSATFESALDWLCFNLPGDELPLKFSSAGDSTMSSLTGAEGSVKVLSTAKDNWVPQSREPEEVKVSTEGLEVRIGGRRDENVSLDDGRLSQAAWIRQYMEQQEEFLVTWPCGPDNFLEVYIVEIVYRELSYDSLPHLTAAKKNSKHGNLKEQISYPTNSVSSNSETANVEGVQNDLEASEERSESLGNIDEGSDLKKEIPKDIDKTCAKEVDEEVIELDNMFFEDSSAWEAVAPEILKQQQIEKLSHDGYGHLIGNIDDIWKKGDSGKMPKAVLQKFCQKLGWEAPKYNKISERDGKFVYSVNVLRGATGRGELSSTSRVLVTEDRRRSGFVDMLLNIDADTIPSSEIENSDTDVISMDSGNTEGSKSVNEKRQTTMTSCMGLKSAERAESAILKKQLEDKRKLPNYLKMLEARASLPIARQRQHFLQLLKENDVVVVSGETGCGKTTQIDFLSN

SEQ ID NO: 41883 - protein, 209 aa, Zea mays
  Coding DNA Sequence Number=SeqID_104
  Subcellular localization annotation: CTP_CleavageSite=27; ConfidenceScore=5.11e-01
MPLTAGSTDDALLRCPTAFGSPSTTLVAGSASPLATVDPCLGPLVPLAGGWDQASLATSFNTIALTLLPTSPDWVVNSGISYHTTPAIGTLSHSHPHPSLSSIIVGNGSTLLVPQSWYSRFASYFIPQIRQGQVIHVPVHPSVLTGVVVIDGWLRLSAAAQTAVLFKQLRMTLDAVLKELTRKPEMATFVDNEVVRSIIHLLLEEDKAR

SEQ ID NO: 41884 - protein, 69 aa, Zea mays
  Coding DNA Sequence Number=SeqID_105
MTLHLDKLHGEGSSEALTLSRGSHGGLGRLKGHDEGELGRSDISGRGAVGRGNPEVWEGFRELEQQFSG

SEQ ID NO: 41885 - protein, 89 aa, Zea mays
  Coding DNA Sequence Number=SeqID_106
MAGVRWSLGSTVTGLQLRKKRSERERGREGLAEGASERGKAGEQNARLKRGGDVRRWPEIAWSWASTVGDRGREVGDELTGGVVGASKI

SEQ ID NO: 41886 - protein, 711 aa, Zea mays
  Coding DNA Sequence Number=SeqID_107
  Gene Ontology: Mol. function=RNA-directed DNA polymerase activity; Cellular component=intracellular; Biological process=RNA-dependent DNA replication
  Homolog annotation: Hit_ID=UPI00004C1733; Match level="QueryCoverage =88%, HitCoverage=46%, E-value=0.0, Identity=94%"; Hit description =UPI00004C1733 related cluster
  Pfam annotation: Domain name=RVT_1; Domain location=56-225; Score =134.9; E_value=2.3e-37; Accession=PF00078.17; Description=Reverse transcriptase (RNA-dependent
  Pfam annotation: Domain name=RnaseH; Domain location=455-582; Score =1.8; E_value=4e-05; Accession=PF00075.14; Description=RNase H
  Pfam module annotation: Pfam domain module=RVT_1::RnaseH; Domain location=56-225::455-582
MPGIPRDVAEHSLDIRAGARPVKQPLRRFDEEKRRVIGEEIHKLTAAGFIKEVFHPEWLANPVLVRKKGGKWRMCVDYTGLNKACPKVPYPLPRIDQIVDSTAGCETLSFLDAYSGYHQIRMKESDQLATSFITPFGMYCYVTMPFGLRNAGATYQRCMNHVFGEHIGRTVEAYVDDIVVKTRKASDLLSDLEVKFRCPKAKGVKLNPEKCVFGAPWGMLLGFIVSERGIEANPEKIAAITSMGPIKDLKGVQRVMGCLAALSRFISRLGERDLPLYRLLRKAECFAWTPEAEEALGNLKALLTKAPILVPPADGEALLVYVAATTQVVSAAIVVERQEEGHALPVQRPVYFVSEVLSETKIRYPQVQKLLYAVILTRRKLRHYFESHPVTVVSSFPLGEIIQCREASGRIAKWAVEIMGETISFAPWKAIKSQVLADFVAEWVDTQLPTAPIQPELWTMFFDGSLMKTGAGAGLLFISPLGKHLRYVLRLHFPASNNVAEYEALVNGLRIAIELGVRRLDARGDSQLVIDQVMKNSHCHDPKMEAYCDEVRRLEDKFYGLELNHIARRYNETANELAKIASGRTTVPPDVFSRDLHQPSVKIDDAPEPEATSVQPEVPSAQPEAPSARPEGPSVQPEEPSASEGEALRIEEERSGATPDRNWQTPYLQYLRQGELPLDRAEARRVARRAKSFVLLGDEKELYHRSPSGIL

SEQ ID NO: 41887 - protein, 298 aa, Zea mays
  Coding DNA Sequence Number=SeqID_108
MPGEDEESARANSGVEWSRLGIVQASEGTRTKARSEDSGVTALMRLSRCDSHPINVADQEHTLYAGGLSLARHPRLFHCSLPSRASDVGGIGERIASPLVRADKKLGSIPASAAGGWVRRWIARGTGTEGKNPSMEEIIVREGGSHAGHRGRIAIGKHLHLPGPSKKRTGCRYLNQFMLIVAMAMEKKLLRKALASLLQTVEEHCAAIVDVVKASFHLGSIPEFNDFNKASVDIEYLANNLDQMSIECKYEVTKLEEPNDDELVDPNNCLPMDHEESDKLAEYRNCTFFMEDNSDSSD

SEQ ID NO: 41888 - protein, 374 aa, Zea mays
  Coding DNA Sequence Number=SeqID_109
  Gene Ontology: Mol. function=transporter activity; Cellular component= mitochondrial inner membrane; Biological process=transport
  Homolog annotation: Hit_ID=Q6YZW6; Match level="QueryCoverage=96%, HitCoverage=95%, E-value=1e-154, Identity=73%"; Hit description =Putative mitochondrial energy transfer protein
  Pfam annotation: Domain name=Mito_carr; Domain location=184-272; Score=84.5; E_value=3.2e-22; Accession=PF00153.17; Description =Mitochondrial carrier protein
  Pfam annotation: Domain name=Mito_carr; Domain location=278-369; Score=89.7; E_value=9e-24; Accession=PF00153.17; Description =Mitochondrial carrier protein
  Pfam annotation: Domain name=Mito_carr; Domain location=77-160; Score= 77.8; E_value=3.5e-20; Accession=PF00153.17; Description =Mitochondrial carrier protein
  Pfam module annotation: Pfam domain module=Mito_carr::Mito_carr::Mito_ carr; Domain location=184-272::278-369::77-160
MGYQDAPGGGGKLSLASVGFAGPGAGAGGGGYKELLVMALPQDDGLDGAKVAEAIGVRLPDVGGAVRTVLESREAREFASGALAGAMSKAILAPLETIRTRMVVGVGSRHIFGSLVEIIEQNGWQGLWAGNTINMLRIIPTQAVELGTFECAKRSMIEAQEKWKEDGYPKIQLGNMKIELPLHFLSPVAIAGAAAGIAGTLACHPLEVIKDRLTINREVYPSISLAFSKIYQTDGLGGLYAGLCPTLIGMLPYSTCYYFMYDSVKTSYCRFHKKSSLSRPELLLIGALSGLTASTISFPLEVARKRLMVGALQGKCPPNMIAALSEVIREEGFLGLYRGWGASCLKVMPNSGMTWVFYEAWKDILLSDRDRQHA

SEQ ID NO: 41889 - protein, 309 aa, Zea mays
  Coding DNA Sequence Number=SeqID_110
  Pfam annotation: Domain name=SWIB; Domain location=213-293; Score =19.6; E_value=0.00028; Accession=PF02201.9; Description=SWIBMDM2 domain
MNSTDCFSRCVERHVYSSYDEFLRLHEDEFHASRSQDSRRPKIVYQFVLVFLFVGMPDSNELMFNTEQPTYNFGAYKNSKLRKRSKRKRIEEAPPKESAREKKRSEKERRAQLDSIHVKSEAAARSCLAFRWIYLANGMWIRSRGNEPCSQVNCKEMVCSQLVLSGDSITEQPFAPVAAVSHWLTPACSRITSFTDYVFSVYLHSVGKLQPHCNKVYKRFAMRKNKFMGSNKVTIAVCIETVLCLELRKTLHGLQNQDKKTDINCDATLRSLFGGRDKVGMLEISKLLSRDFPKISKLLWSMEPGMALW

SEQ ID NO: 41890 - protein, 62 aa, Zea mays
  Coding DNA Sequence Number=SeqID_111
  Subcellular localization annotation: CTP_CleavageSite=12; ConfidenceScore=5.48e-01
MGPASQAAPYPNASTRKRGQHAPMNRLAPNLPLAPHSLTPLPSSGVVLAQNSHRHRRSSSSP

SEQ ID NO: 41891 - protein, 170 aa, Zea mays
  Coding DNA Sequence Number=SeqID_112
MAEASNREKQQQLEPGAEDDGCEGPRQPGEAKDASELGWDSLRENRPGAVEQGTARDYGEEQEMGRRADWASSVEEHGARRNSREMGDRRSDAGAGRIAWMGGTPAGRAGNDAEQGAPRRAGSLASAWEHNTMEREKRSGVSYVKEKAKEKFQRRRGYFQWSIRSRQWDI

SEQ ID NO: 41892 - protein, 62 aa, Zea mays
  Coding DNA Sequence Number=SeqID_113
MDYYRVISKCMSFITFVQDSLYPEGGSSNSQRAKKSSTYIWSSKIRNSQCHTSKGSTGDLNL

SEQ ID NO: 41893 - protein, 114 aa, Zea mays
  Coding DNA Sequence Number=SeqID_114
MGRELFGKGNEEMMTNPSKENKWGEKGKSRLRSLVPFGRWYRDPESEAVAAVTGVTGGLGRVGVGGGWGGGGSALTCTFGALVEGSVVQSGCRQSRGRVGEGGVSGECYNCNRV

SEQ ID NO: 41894 - protein, 78 aa, Zea mays
  Coding DNA Sequence Number=SeqID_115
MSSSHEPVSGEKDKTCGHVKDKGADQPSGANSVSPDSELALETNSASLEPGLGYLLPRKFRGRHSFNCGGCHRISRWI

SEQ ID NO: 41895 - protein, 141 aa, Zea mays
  Coding DNA Sequence Number=SeqID_116
MTRRLDWRLQKAAYPSQASDLPERANLESRESHDVQEGVGDGPLSCPEYRRRYPHGGPNGNIREEEKGWGASDITAADLGEEEATARRSGRRRRRCGARGGDESGGAPRQCRLKVEKLCGRLRSIDHRPCPLLDAIDFFNG

SEQ ID NO: 41896 - protein, 56 aa, Zea mays
  Coding DNA Sequence Number=SeqID_117
MGATMGWHVTVAVCRKLTSSSSRSSGIRVAGEGLRRAEVSLRGSDWEVDDAGASVD

SEQ ID NO: 41897 - protein, 283 aa, Zea mays
  Coding DNA Sequence Number=SeqID_118
  Gene Ontology: Mol. function=transporter activity; Cellular component= integral to membrane; Biological process=transport
  Homolog annotation: Hit_ID=Q19KC1; Match level="QueryCoverage=87%, HitCoverage=95%, E-value=1e-128, Identity=84%"; Hit description =NOD26-like major intrinsic protein
  Pfam annotation: Domain name=MIP; Domain location=24-221; Score =150.4; E_value=4.6e-42; Accession=PF00230.10; Description=Major intrinsic protein
MSTNSRSNSRANFNNEIHDIGTAQNSSMPPTYYDRSLADIFPPHLLKKLGQSVAGGLIVTVMIYAVGHISGAHMNPAVTLAFAVFRHFPWIQVPFYWAAQFTGSICASFVLKAVLHPIAVLGTTTPTGPHWHSLVIEIIVTFNMMFVTLAVATDTRAVGELAGLAVGSAVCITSIFAGAVSGGSMNPARTLGPALASNLYTGLWIYFLGPVLGTLSGAWTYTYIRFEEAPSHKDMSQKLSSFKLRRLQSQSVAVDDDELDHIQVQSYSYLSCYHLFQKLLVLT

SEQ ID NO: 41898 - protein, 563 aa, Zea mays
  Coding DNA Sequence Number=SeqID_119
  Gene Ontology: Mol. function=DNA binding; Biological process =regulation of transcription
  Homolog annotation: Hit_ID=Q6ZGU0; Match level="QueryCoverage=67%, HitCoverage=99%, E-value=1e-174, Identity=79%"; Hit description =Putative NAC domain protein NAM
  Pfam annotation: Domain name=NAM; Domain location=193-321; Score =296.5; E_value=5.1e-86; Accession=PF02365.6; Description=No apical meristem (NAM) protein
MTANNHEGVWLGEEPMMDARITTTQGFRGEDDSQQTTGLWKQETKLKWSGEKREHTCSGFQGGRECEVPRMPTHEKRRRKLEAEGKKKKKKVFRRQFFCGYLFTRQYLNQNHVKVVKPNNPCLKHKYWLSVVKKVRKKGTNEEGSLSKKDFGIMGESKITRLLIPSVLQIHTALRFAQWDPTSDDIEKQDEVMLPGFRFHPTDEELVRFYLKRKIQQKSLPIELIRQLDIYKYDPWDLPKLASTGEKEWYFYCPRDRKYRNSTRPNRVTGAGFWKATGTDRPIYSSDGSKCIGLKKSLVFYKGRAAKGVKTDWMMHEFRLPSLTDPTLLQKKPLEKTIPPNDSWAICRIFKKTNSTAQRALSHSWVSPPLSSTNENYIRLSSQATQRSYHSSENTSSTMTDIISSIQFTGSSYMPSIVSSCRNPLSIIDSSSRPAASLMLPSSGAEHHAMSILSAIPHDLPAGMDIASMVLNASPTTLQNLDRIPTNIEFGQPHHPSNSSMANRCTADLLDIGNSVTGAPRSINFPFNLQGALPDDWRMTLPWDSLPCTTEVSTNYKSTKYYT

SEQ ID NO: 41899 - protein, 76 aa, Zea mays
  Coding DNA Sequence Number=SeqID_120
MDDTTAVNRELWQHPVLRRPPKRVTHGLRDLGLIIEEVLHEIQEPISETAQNELFMKFKEHIMGKIDLTEDRVSFR

SEQ ID NO: 41900 - protein, 130 aa, Zea mays
  Coding DNA Sequence Number=SeqID_121
MPVVDSSLVEIRMKEVRPPGISLDEWFEFTHMRNASSMPVAAAAVRVMTNAMLPMITRIHAMETVVYFSKEEFVAFMERIAGTLQLAKLHNKRPSMLSNDDLMRLLSLFIKRRETDEAGWPIYLSGLPAG

SEQ ID NO: 41901 - protein, 199 aa, Zea mays
  Coding DNA Sequence Number=SeqID_122
MTRLGIKAERAERARWRTGNRTRGLIFPGAEARVLGVYSGAPRRPSPASSKGRFSEVDGKQRDDELEYQGDPSAVAKQWDAAARRGVTEVTEAEQRNTGDTRGMKESSPRRAETSRRSARRGRTRTRRWSRERWAQGASFTRAERQREFRPWELREMKLDVAEKEVAPAEDKGAAQRSRGAELRSSAPWREARAEVSRC

SEQ ID NO: 41902 - protein, 199 aa, Zea mays; identical to SEQ ID NO: 41901
  Coding DNA Sequence Number=SeqID_123

SEQ ID NO: 41903 - protein, 515 aa, Zea mays
  Coding DNA Sequence Number=SeqID_124
  Gene Ontology: Mol. function=oxidoreductase activity, acting on sulfur group of donors, disulfide as acceptor; Cellular component =chloroplast; Biological process=sulfate reduction, APS pathway
  Homolog annotation: Hit_ID=Q5EUC8; Match level="QueryCoverage=71%, HitCoverage=80%, E-value=0.0, Identity=96%"; Hit description =Adenosine 5'-phosphosulfate reductase 2
  Pfam annotation: Domain name=PAPS_reduct; Domain location=166-347; Score=264.6; E_value=2e-76; Accession=PF01507.9; Description =Phosphoadenosine phosphosulfate reductase family
  Pfam annotation: Domain name=Thioredoxin; Domain location=404-514; Score=27.8; E_value=9e-07; Accession=PF00085.10; Description =Thioredoxin
  Pfam module annotation: Pfam domain module=PAPS_reduct::Thioredoxin; Domain location=166-347::404-514
MASATTSISSHPAALRDVKGDMFSLFWMLFPLYNFCSDPTFQLVKCAAPQQNSPEFEAHTGLTLLISLPSVRAAARIGGLRQQQASVAPSAAAARGQRARAVRSLRAAEPARQPVAASAAAAAPAAPVADEAAALAAVDYEALARELEGASPLEIMDRALAMFGSEIAIAFSGAEDVALIEYAKLTGRPFRVFSLDTGRLNPETYQLFDKVEKHYGIRIEYMFPDASEVQELVRTKGLFSFYEDGHQECCRVRKVRPLRRALKGLRAWITGQRKDQSPGTRASIPLVQVDPSFEGLDGGAGSLVKWNPVANVDGKDIWTFLRTMDVPVNTLHAQGYVSIGCEPCTRPVLPGQHEREGRWWWEDAKAKECGLHKGNIDKDAQAAAPRSANGNGSAGAPDIFESPAVVSLTRTGIENLLRLENRAEPWLVVLYAPWCPFCQAMEASYVELAEKLAGSGVKVAKFRADGEQKPFAQAELQLQSFPTVLLFPGRTARPIKYPSEKRDVDSLLAFVNSLR

SEQ ID NO: 41904 - protein, 446 aa, Zea mays
  Coding DNA Sequence Number=SeqID_125
  Gene Ontology: Mol. function=RNA-directed DNA polymerase activity; Cellular component=intracellular; Biological process=RNA-dependent DNA replication
  Homolog annotation: Hit_ID=UPI00004C1733; Match level="QueryCoverage =99%, HitCoverage=32%, E-value=0.0, Identity=93%"; Hit description =UPI00004C1733 related cluster
  Pfam annotation: Domain name=RVT_1; Domain location=56-225; Score =146.1; E_value=9.5e-41; Accession=PF00078.17; Description=Reverse transcriptase (RNA-dependent
MPGIPRDVAEHSLDIRAGARPVKQPLRRFNEEKHRAIGEEIHKLMAVGFIKEVFHLEWLANPVLVRKKGGKWRMCVDYTGLNKACPKVPYPLPRIDQIVDSTAGCETLSFLDAYSGYHQIRMKESDQLATSFITPFGMYCYVTMPFGLRNAGATYQQCMNHVFGEHIGRTVEAYVDDIVVKTRKASDLLSNLEATFRCLKAKGVKLNPEKCVFEVPRGMLLGFIISERGIEANPEKIAAITSMRPIKDLKGVQRVTGCLAALSRFISRLGERGLPLYRLLRKIECFAWTPEAEEALGNLKALLTNAPILVPPAAGEALLIYVAATTQVVSAAIVVERREEGHALPVQRPVYFISEVLSETKIRYPQIQKLLYAVILTRRKLRHYFESHPVTMVSSFPLGGIIQCREASGRISKWAVEIMGETISFAPWKAIKSQVLADFVAEWVDT

SEQ ID NO: 41905 - protein, 98 aa, Zea mays
  Coding DNA Sequence Number=SeqID_126
MELGEDTVGTESKSIGKESTSEVPLPVNELATEERSGLTGKATPAESLTKDPLTSQYLHSKMRHTVKKATSTSASANGMLRPQWADSNAAVRLIALVV

SEQ ID NO: 41906 - protein, 191 aa, Zea mays
  Coding DNA Sequence Number=SeqID_127
MENNSNLRDFLSQAARSSSSARISHGREAPEEDLGVFYQTQLSWPPSISAPATRLHIEDLDLNSLGNDFPNLSSYQEVLQSDGATPYLGLPPLGRGIRTGRTPCQFPRSSAGAMRSRGGSQVFRGRGGSRGCRGGRGRATVTRGGRSGVNPTTDHALVQDLEYEEENELDARSPVIRKCILIFVFTNCHYV

SEQ ID NO: 41907 - protein, 195 aa, Zea mays
  Coding DNA Sequence Number=SeqID_128
  Gene Ontology: Mol. function=metal ion binding; Cellular component =integral to membrane; Biological process=ubiquitin cycle
  Homolog annotation: Hit_ID=Q7XE36; Match level="QueryCoverage=41%, HitCoverage=63%, E-value=1e-27, Identity=73%"; Hit description=Zinc finger, C3HC4 type family protein, expressed
  Pfam annotation: Domain name=zf-C3HC4; Domain location=97-138; Score =32.8; E_value=1.2e-06; Accession=PF00097.15; Description=Zinc finger, C3HC4 type (RING finger)
MNEPPARHPPGEGKPGGREVEPWRTLSEAGAWSDMMLAVTVSQVVALLSSALSGTEGGSGVAVAVGTAKAVGAEQGERWRRRCGGHDDHPASAAGYCCVCISACRDGDDVRSLPCGHAFHRDCVDRWLALCRRTCPLCRLHVGGPAVGLAEQQQQLSEDLVIWFSSLFVAGLEGEGRQRRLDLALGRDPVEEEIS

SEQ ID NO: 41908 - protein, 141 aa, Zea mays
  Coding DNA Sequence Number=SeqID_129
  Homolog annotation: Hit_ID=Q0WWY1; Match level="QueryCoverage=99%, HitCoverage=34%, E-value=2e-33, Identity=46%"; Hit description =Regulator of chromosome condensation-like protein
SGKLLTWGSADDMGQSYVTAGKHEETPEAFPLPRGVAIVRADAGWAHCVAITDEGDVYTWGWKECVPTGRVIGDQSSVGTKEKDERQMAMATDQGGRRCLGQAAGQHLVLLKAEALMIAQSDEGVKIVSVAAGGRHTLALS

SEQ ID NO: 41909 - protein, 101 aa, Zea mays
  Coding DNA Sequence Number=SeqID_130
MEEDGVPGCAKGAGAGNKERVVLMWGYLPGVSPQRSPLLGPVPVRLPPAAAAAAGDGWRDVCGGGCGFAMAISGDVSFFFFLIVPVLIRCFQLVGSSLGMW

SEQ ID NO: 41910 - protein, 377 aa, Zea mays
  Coding DNA Sequence Number=SeqID_131
  Gene Ontology: Mol. function=zinc ion binding; Cellular component =cellulose and pectin-containing cell wall; Biological process =metabolic process
  Homolog annotation: Hit_ID=Q941U5; Match level="QueryCoverage=99%, HitCoverage=60%, E-value=1e-129, Identity=59%"; Hit description =Ankyrin-like protein
  Pfam annotation: Domain name=DUF248; Domain location=180-377; Score =50.5; E_value=8e-29; Accession=PF03141.7; Description=Putative methyltransferase
  Pfam annotation: Domain name=Methyltransf_11; Domain location=301 -360; Score=-0.7; E_value=0.064; Accession=PF08241.2; Description =Methyltransferase domain
  Pfam module annotation: Pfam domain module=DUF248::Methyltransf_11; Domain location=180-377::301-360
  Subcellular localization annotation: CTP_CleavageSite=86; ConfidenceScore=5.09e-01
MKALGAHVVDLLRGPHLLRAAVLAFAVAVAFLVGYHWPNAYPRLVFFSSASSSLASRSSRSPAVALSPNSNISFEPSLIPTPTTPPASPAPNACPPPSLPPPTPAPPPPLLPPPPPARLGIVGEDGAMQDDFDIGSVGANDTDLASDETAPQEPSNGGASGGPPRVRIGRFLVCPESMREYIPCLDNEEEIKRLPSTERGERFERHCPAQDKGLSCLVPVPKGYKAPIPWPQSRDEVWFSNVPHTRLVDDKGGQNWITKVKDKFRFPGGGTQFIHGANRYLDQISQMVPNVAFGSHTRVVLDVGCGVASFGAYLLSRDVLTLSIAPKDVHENQIQFALERDGILLLEVNRLLRAGGYFAWAAQPVYKHEQAQQEAWK

SEQ ID NO: 41911 - protein, 119 aa, Zea mays
  Coding DNA Sequence Number=SeqID_132
MARELVLWMECRRAEDGGRAGTLASSTPARWRSMVQAKRREEGAGNWLGVGEWRGEAAGELENFKGRGLPRLLAHMGGVAHWPRGVVVVEWLAMAGGQCHTTGRLLFTLPHYTKLSNTW

SEQ ID NO: 41912 - protein, 117 aa, Zea mays
  Coding DNA Sequence Number=SeqID_133
MIKEGNQIQGRFLKLARIRKRKTMNRLGPKPAQVKSSSKGWAVLVTVTPGVLHSFINLYCNDEVFENKSPTLASTSGEPFFDHLRQGLNFVMPPKKASAPGSAALQPLDPNQETLSL

SEQ ID NO: 41913 - protein, 126 aa, Zea mays
  Coding DNA Sequence Number=SeqID_134
MGGAIHGNKRGGWRPHHGKEQGGRWTEGRGELQGVASATRKQKQGCALGWMLSRSWKPWKERPSAMGRDEGGTAMGEEQKMTGKLEHLVRRDREKGQRARLRNRGRRHAAVGGGRDVRSSPWVGSG

SEQ ID NO: 41914 - protein, 155 aa, Zea mays
  Coding DNA Sequence Number=SeqID_135
MGKSKKGGSSSHHSGDKRKREPTPPSEDFGNSEYSEEEFSSESKGSPVHASPPASSNDSDDSQGLAAEVWTYIRAVERAGLEGSDESEYSSDEENSSDSSEEGGGDGDGDGGDDDDDGGDGDGGGDGAESDGKGGEGDDEGDSKGSGKGSNKASG

SEQ ID NO: 41915 - protein, 84 aa, Zea mays
  Coding DNA Sequence Number=SeqID_136
MADEAIRKNEKESHDAQEEAKRAEEAAERARLIAELSLPPEPYNLEADPAMKEALDMIRITNEAIDEAVNRLLNEADEKVLKED

SEQ ID NO: 41916 - protein, 279 aa, Zea mays
  Coding DNA Sequence Number=SeqID_137
  Gene Ontology: Mol. function=nucleic acid binding; Cellular component= intracellular; Biological process=DNA integration
  Homolog annotation: Hit_ID=Q7XBC6; Match level="QueryCoverage=99%, HitCoverage=16%, E-value=7e-76, Identity=55%"; Hit description =Putative copia-type pol polyprotein
MYNRLKTLVNQVRNLGSTKWDDHEMVKVMLRSLVFLNPTQVQLIRGDPRYKLMSPEEVIGKFVSFELMIKGSKQIIERGATSTPKVQPVAFKATEEKKEESTSSRLPIDASKLDNEEMALIIKSFCQILKQRKGKTTNPVPRSDRGNDKRDKKKEKKRYYKKKGGDAHVCREWDSDESSTDSSSDEDAANIAVNKGLLFPNVGHKCLMAKDGKKKKVKSRSSTKYATSSDEENSSDDEENLFTLFANLNMQQKEKLNELISAIYEKDELLDSQEDFLIK

SEQ ID NO: 41917 - protein, 147 aa, Zea mays
  Coding DNA Sequence Number=SeqID_138
MRIKRGSRSRPHTGVWNSDDAQSTVRLNLRYNKRPVEKFRRLRSKIPQPERIIPARGGVSGTRRRERVSSGARGTAVCQRWGEWVEEREGRAQGSFITAKAMWRRSSGIALSAQLGVSCARTESSAEVGEEAADKWGPWIGDRVTGE

SEQ ID NO: 41918 - protein, 613 aa, Zea mays
  Coding DNA Sequence Number=SeqID_139
  Gene Ontology: Mol. function=protein binding; Cellular component =cytoplasm; Biological process=protein modification process
  Homolog annotation: Hit_ID=Q2QNU9; Match level="QueryCoverage=84%, HitCoverage=99%, E-value=0.0, Identity=41%"; Hit description=Leucine Rich Repeat family protein, expressed
  Pfam annotation: Domain name=LRR_1; Domain location=172-191; Score =6.2; E_value=20; Accession=PF00560.23; Description=Leucine Rich Repeat
  Pfam annotation: Domain name=LRR_1; Domain location=198-220; Score =6.1; E_value=21; Accession=PF00560.23; Description=Leucine Rich Repeat
  Pfam annotation: Domain name=LRR_1; Domain location=290-314; Score =1.6; E_value=1.4e+02; Accession=PF00560.23; Description=Leucine Rich Repeat
  Pfam annotation: Domain name=LRR_1; Domain location=316-340; Score =2.7; E_value=90; Accession=PF00560.23; Description=Leucine Rich Repeat
  Pfam annotation: Domain name=LRR_1; Domain location=342-365; Score =3.2; E_value=72; Accession=PF00560.23; Description=Leucine Rich Repeat
  Pfam annotation: Domain name=LRR_1; Domain location=368-390; Score =6.9; E_value=15; Accession=PF00560.23; Description=Leucine Rich Repeat
  Pfam annotation: Domain name=LRR_1; Domain location=418-442; Score =3.9; E_value=53; Accession=PF00560.23; Description=Leucine Rich Repeat
  Pfam annotation: Domain name=LRR_1; Domain location=444-473; Score =5.3; E_value=29; Accession=PF00560.23; Description=Leucine Rich Repeat
  Pfam annotation: Domain name=LRR_1; Domain location=495-518; Score =3.6; E_value=61; Accession=PF00560.23; Description=Leucine Rich Repeat
  Pfam annotation: Domain name=LRR_1; Domain location=521-544; Score =6.9; E_value=14; Accession=PF00560.23; Description=Leucine Rich Repeat
  Pfam annotation: Domain name=LRR_1; Domain location=68-97; Score=3.1; E_value=74; Accession=PF00560.23; Description=Leucine Rich Repeat
  Pfam module annotation: Pfam domain module=LRR_1::LRR_1::LRR_1::LRR _1::LRR_1::LRR_1::LRR_1::LRR_1::LRR_1::LRR_1::LRR_1; Domain location
  Subcellular localization annotation: CTP_CleavageSite=42; ConfidenceScore=5.10e-01
MSHDTGAGVESLSLDLLAHALAAVRDPRDRKSCRLASRAFARAEAASRRAARVLRRDALPRALRAFPALSSLDLSACAGLDDASLAAALPEEPLPVRRVRLARASGVGWRGLDALVAACPSLEAVDLSHCVAAGDREMAALAAAAGLRDLVMDKCLGVTDVGLAKVAVGCPGLQSLSLKWCREISDIGVDLLAKKCPQLRSLDISYLKVTNESLRSLSTLEKLEDIAMVSCLFVDDDGLQMLSMCSSLQEIEACVLSKLSTIGETLTVLRLDGLEIFASNLQAIGSTCKNLVEIGLSKCNGVTDDGIVSLVARCRDLRTIDVTCCHLLTNAALAAIAENCRKIECLRLESCPFVSEKGLESIATLCSDLKEIDLTDCRINDAALQQLASCSELLILKLGLCSSISDEGLVYISANCGKLVELDLYRCSAVTDDGLAAVASGCKKMRMLNLCYCTQITDGGLKHVGGLEELANLELRCLVRVTGVGITSIAVGCSSLVELDLKRCYSVDDAGLWALSRYSQNLRQLTVSYCQVTGLGLCHLLGSLRCLQDVKMVHLSWVSIEGFEMALRAACGRLKKLKLLGGLRSVLSTELLLTLQACGCRVRWVDKPLVYKG

SEQ ID NO: 41919 - protein, 523 aa, Zea mays
  Coding DNA Sequence Number=SeqID_140
  Gene Ontology: Mol. function=polygalacturonase activity; Cellular component=cellulose and pectin-containing cell wall; Biological process=carbohydrate metabolic process
  Homolog annotation: Hit_ID=Q2R052; Match level="QueryCoverage=81%, HitCoverage=89%, E-value=0.0, Identity=74%"; Hit description =Glycoside hydrolase family 28 protein, putative, expressed
  Pfam annotation: Domain name=Glyco_hydro_28; Domain location=149-498; Score=-4.4; E_value=6e-09; Accession=PF00295.8; Description=Glycosyl hydrolases family 28
MGAFQFMLAVAPNRMVCASRGAQGQGSVIPAPGGPAVPDFGILVVLALVLAAALGPATAPAPARAQLRRDHQAPPGPRPHSVTITEFGAVGDGRTLNTVPFQNAVFYVRSFADKGGAQLYVPRGRWLTGSFNLTSHLTLYLEEGAVIVGAKIWLLDVPQEGVILTSARRWNIAIAAREDSSQWLIVEPLPSYGQGLDLPGPRHQSLISGYNLTDVVITGNNGVIDGQGLVWWQWLRSHELNHSRPNLLEFLYSEDIVISNLTFLNSPAWSIHPVYCSNVKVHNVTIKTSLDAPLTDGIVPDSCSNLCIEDSTISVSHEAISLKSGWDRYGISFGRPTSDIRISRVDLLSSSGAALAFGSEMSGGISDIHVNHLRIHDSSKGISFKTSPGRGGYIEDVVISEVQMENVHVGIEFTGNCSTHPDDSFDPSDLPAIDHVTMKNMAGTNISVAGVLSGIEGAPFTAICLSNLNFSMAAGSGPSSWSCSDVSGYSEAVFPEPCTELRDPSSSSSVCYSLASYSAIETA

SEQ ID NO: 41920 - protein, 110 aa, Zea mays
  Coding DNA Sequence Number=SeqID_141
MPDKWEPSSSQMLDNEDMWEPDLRGGSGGGDRRARAAAGVVERDVEEEDSDSPSSEMSVDEPNGGAGSWFLDLQHLVSWGSLGATTRGQQWRWVTTSRWSTTMIIDDGAG

SEQ ID NO: 41921 - protein, 342 aa, Zea mays
  Coding DNA Sequence Number=SeqID_142
  Gene Ontology: Mol. function=sequence-specific DNA binding; Cellular component=nucleus; Biological process=regulation of transcription, DNA-dependent
  Homolog annotation: Hit_ID=Q2R053; Match level="QueryCoverage=93%, HitCoverage=92%, E-value=1e-101, Identity=57%"; Hit description=SRF -type transcription factor family protein
  Pfam annotation: Domain name=SRF-TF; Domain location=9-55; Score =73.8; E_value=5.6e-19; Accession=PF00319.9; Description=SRF-type transcription factor (DNA-binding and dimerisation domain)
MGRVKLKIKRLENNSGRQVTYSKRRSGILKKAKELSILCDIDLMLIMFSPTDKPTICIGDRSTLEEVVAKYTQLTPQERAKRVQTVEELSAELVSLQGQVAELQKRVSDWSDPEKVDNIDNIRAMEQSLKETINHIQIHKGNFGKQHLIGLQYAATQFQTDMQLPLGLPGESGPSSWFQNGGADGQQAMMLTDESGLLHQRDIAQGYPSYFSTVKQDPDTGGSSSDHGQVVLHHPQPPDFSQTECLTSLHLPSQQFPYPPFDHHGLYSDRIFRPDAVELHAGGVASMDFLSGQYDLPRPGDDASFHNWASAAACSATMFDQQQQQQHQHHQQPQSSPAQVSA

SEQ ID NO: 41922 - protein, 321 aa, Zea mays
  Coding DNA Sequence Number=SeqID_143
  Gene Ontology: Mol. function=DNA binding; Cellular component=nucleus; Biological process=RNA-dependent DNA replication
  Homolog annotation: Hit_ID=Q9LGH0; Match level="QueryCoverage=84%, HitCoverage=86%, E-value=1e-29, Identity=26%"; Hit description=NAM -like protein-like
MENYNYGQPSQAPGDYVPCTYTEGIDLTEIDDEGNMNFAFTKSMNMEDSQHSTPTATDPKLKKVTTWRLGNYTQAEDEILVSAYVNVSKDPAIGTNQSGKAYWRRISDYYNEHKKTANARTQHSLEHRWSDIQRDTTKFCAAYDKVIRLKQSGKSEDDQVKDALQMFEGMHKKQFRFMHCWYMLRREAKQGEDKFGSPSNTFVRPMGRDRAKKARSTSTLSNSTACMALLEKFQEDRAKFEEKATKYEDQATASTEEDRRDMKMYRDRKIQLSENMFKLHQLERDDRIMNMDLDKVAPYARDYYVYMQKDILARLPPPSDT

SEQ ID NO: 41923 - protein, 73 aa, Zea mays
  Coding DNA Sequence Number=SeqID_144
MSLPTRGAIGMQLSPLVLKEVRYRCFHIKCVNIMRVSRDRRRVRSNQAFKGTNNCLKKITPRPATHRSTVVIH

SEQ ID NO: 41924 - protein, 602 aa, Zea mays
  Coding DNA Sequence Number=SeqID_145
  Gene Ontology: Mol. function=carboxypeptidase activity
  Homolog annotation: Hit_ID=Q1SIS3; Match level="QueryCoverage=60%, HitCoverage=75%, E-value=3e-58, Identity=37%"; Hit description =Peptidase M14, carboxypeptidase A
MAADATASPSSSYLPPPLPTSRLDIQAAVAEAAELRALHAALLQGGGASNSGTYASASRSPAVIRLPPALARPAPLPTAAEDYPVFAPMYDEEPLGGTNCIRQDNRSLSENWSGVGLDHDGLEDDEVAFSDFDNHNTFSSSNSELHLSSSNEHLRNRRACRNHPSFLQPTALAADGLIRSTSRMTDLTEFKVVTTCNTCKPATINRGDDAKSLKNLDCTVPLSNYHPTVAAFPRTRHKGPQHILSWLLPKSKRKPRPDVSPTTVECENMSQLLKDWGVFSLDSLKKEVVEANEHRDAALQEVSEMKLSLGELTTKIASLEAYCSELKKALKQATSAKSMQSHHSKRSSTRSVSGSPLPVSHEVMVEGFVQVVSEARLSVKQFCKALIQQVEEDADNGLSEKLNLLLQPYQITLGDRRPKLVLYHLEALMNQAMYQDFENCAFQKNGPRRCLDPRQERQESFASFVALRNLSWSEVLRKGTRHHCKELSRFCDQKMGCVASALMNWSRPCWAEPLLQCFFVACKCVWLLHLLAFSFSPPLAILRVEEGRAFEQTYMEDVLLDMQRSQDHEPPPSARVKLMVVPGFYVQDRLLKCRVLCSYISG

SEQ ID NO: 41925 - protein, 426 aa, Zea mays
  Coding DNA Sequence Number=SeqID_146
  Gene Ontology: Mol. function=nucleic acid binding
  Homolog annotation: Hit_ID=Q6ZK85; Match level="QueryCoverage=75%, HitCoverage=46%, E-value=3e-55, Identity=43%"; Hit description=RNA recognition motif (RRM)-containing protein-like
MTPYPYTCSATSPTTQNRITGGELPSNSGDCPANPVAHPNLHASPPLAGESIPLRHAAEATRTPQRVVWGGVLEALAAMGESDDDARTFKVVFTTTGEEQFRELVREKLRGFRRGLDDTLVKDSSSRSMLGDGASRRLLQFAVRDAVKAVQPTSTSAEPASKRLCSVVATTSTEHMRDRRSERSQDYLNDRRSERSQDNLSDRRSERTRPMLQVHGAALALRAAAEAAADSAKVRSTGSVFKRLGQGNVVKQPSRSREEKRDYEDFEPVTIADEHDSDQYVNNEESEEESGELTMADRVAGSGMYVDSSSEDDMDRDEGITRYQTSLSHDDTFSPFAEKKTVSAPCSVELETNAIRPSSVNDEEQPVPSTPTASKAVAISVDVNMVEPPSYATPKDVHVVEKPYVAPMNSNAASIATNAKVSSRVC

SEQ ID NO: 41926 - protein, 215 aa, Zea mays
  Coding DNA Sequence Number=SeqID_147
MAHQTVRPQVRMVHTKNVSAQGRGDDEDPPRPFRQVKGKTMYLEQQEGRKKRRLDRAARAALAAAAAAEQAKRGGQLQISSDHIAYRVRRLASRPCSSAPSTPATTTTPPPTSPTPVAPEPSTTSAIPTTSTTPTSTVPPPAPISAPPIPLACFRERDETEVRPLAADPRLIDLQRATAARVHRFRHVPMESWLPAQRDPAAADLFSTGIQESFF

SEQ ID NO: 41927 - protein, 215 aa, Zea mays
  Coding DNA Sequence Number=SeqID_148
  Gene Ontology: Mol. function=structural constituent of ribosome; Cellular component=ribonucleoprotein complex; Biological process =translation
  Homolog annotation: Hit_ID=Q9LX88; Match level="QueryCoverage=56%, HitCoverage=95%, E-value=3e-60, Identity=92%"; Hit description=40S ribosomal protein S15a-4
  Pfam annotation: Domain name=Ribosomal_S8; Domain location=5-124; Score=174.8; E_value=2.1e-49; Accession=PF00410.9; Description =Ribosomal protein S8
MVRVSVLNDALKSMYNAEKIGKRQVMIRPSSKVIIKFLTVMQRHGYIGEFEYVDDHRSGKIVVELNGRLNKCGVISPRFDIGVKDIEGWTARLLPSRQFGYIVLTTSAGIMDHEEARRKSVGGKDHLFTLSRCSQRHQLARNRSLVFTSSLRFFNWQSIFHKSSHGLLVNAKATVSSFASSWQAIGEISELCNTIRCRRYKHRDKTEKGQNSLLV

SEQ ID NO: 41928 - protein, 160 aa, Zea mays
  Coding DNA Sequence Number=SeqID_149
  Gene Ontology: Mol. function=microtubule binding; Cellular component =nuclear outer membrane; Biological process=mitotic spindle assembly
  Homolog annotation: Hit_ID=Q8RYM1; Match level="QueryCoverage=98%, HitCoverage=46%, E-value=2e-63, Identity=69%"; Hit description=MRNA -associated protein mrnp41-like
MQAEFKRITSPLKLQTRCLAAFPDQQGFLNGVVKNYYILKDIGSIEGRVGVHHVEESQQGKNFTFKCHRDGNDIYAISSLNFHPALMEVSTFGIRTAYNRCPSPITCSAFNHDGSIFAYAVCYDWSKGAEKHNPSTAKTNIFLHSAQDSDVKGKPRAGKK

SEQ ID NO: 41929 - protein, 133 aa, Zea mays
  Coding DNA Sequence Number=SeqID_150
MGKGKRGKGWPRRADGKCKRPPSPPPEDFGESEYSKEEASSEEVEDSSDPEEWSGGEGDDNEGDGSSGGDDDGDGDDEGDDEGNGNDKGDDKGDGKGNGNDKDDGGDGKGDDDSKGDDSGEGDGKADDIMLLA

SEQ ID NO: 41930 - protein, 129 aa, Zea mays
  Coding DNA Sequence Number=SeqID_151
MVGARGPTGRGARRAALQRPAAGVAGAGWARGEGEVTALAAWDRTALAAGSLRRDIETALGRWPTALGAAQDATGLAAGLSPSGGARSLGHRTRPRLGCWPLGEGRNTGRVAGDSARAAAGGGVVAAGG

SEQ ID NO: 41931 - protein, 149 aa, Zea mays
  Coding DNA Sequence Number=SeqID_152
  Gene Ontology: Mol. function=DNA binding; Cellular component=nucleus; Biological process=regulation of transcription, DNA-dependent
  Homolog annotation: Hit_ID=Q58FS3; Match level="QueryCoverage=60%, HitCoverage=97%, E-value=5e-23, Identity=53%"; Hit description =RADIALIS
  Pfam annotation: Domain name=Myb_DNA-binding; Domain location=10-59; Score=31.4; E_value=3.2e-06; Accession=PF00249.21; Description=Myb -like DNA-binding domain
MASMSLSSSRAQWTAKQNKLFEQALAVYDRDTPDRWHNIARAVGGKSADEVRRYYELLVKDLEHIEAGKVAFPAYRCPGGYDDADSDRFQTMMNRIPEVTEAAVIEDFYRGSNDTVFVRDILQKAPATSEHLFREADIYITVDEQVKVA

SEQ ID NO: 41932 - protein, 142 aa, Zea mays
  Coding DNA Sequence Number=SeqID_153
  Gene Ontology: Mol. function=DNA binding; Cellular component=nucleus; Biological process=regulation of transcription
  Homolog annotation: Hit_ID=Q9FRL6; Match level="QueryCoverage=41%, HitCoverage=46%, E-value=2e-15, Identity=66%"; Hit description=Myb -related protein; 20671-21051
  Pfam annotation: Domain name=Myb_DNA-binding; Domain location=18-68; Score=33.0; E_value=1e-06; Accession=PF00249.21; Description=Myb -like DNA-binding domain
  Subcellular localization annotation: CTP_CleavageSite=56; ConfidenceScore=5.36e-01
MSSASNSAKGSSPSSSTSSQWTKPQNKLFERALAVYDTDTPDRWHNVARYMGGTTSVEEVRRRYQQLAVDVAQIESGEVPFHYWYAAAPPLHPATLVMSMCDLSTIYMVFRSMSYSKVAVLITITKDQPSKSSRKKSQPWVF

SEQ ID NO: 41933 - protein, 81 aa, Zea mays
  Coding DNA Sequence Number=SeqID_154
  Homolog annotation: Hit_ID=Q9FKY7; Match level="QueryCoverage=54%, HitCoverage=3%, E-value=6e-10, Identity=68%"; Hit description =Arabidopsis thaliana genomic DNA, chromosome 5, TAC clone:K2A18
MEDYPEELRTPSVSLVSNVGVKPRDPARAESPRHTAMEDYPEELRTPPVSLVYIVGCPELHPSISTTLSSQQPPMNTLALP

SEQ ID NO: 41934 - protein, 113 aa, Zea mays
  Coding DNA Sequence Number=SeqID_155
METLVGQAKGGSMGQERSDGDGGRHGTAGFSGQGFRDVRGQGFWQAHDVGMFGHPFGREEYQAHGNGSRDNSFWDTSEVEKKRISDQDAPNNDKSKKHKEVICYEICEEAHTQ

SEQ ID NO: 41935 - protein, 129 aa, Zea mays
  Coding DNA Sequence Number=SeqID_156
MTNATMEDTKMYEVSSNNDRKAQDILEEVNCEQLDAAAEEGCFELIRVAEIERKIQSMANKIMDRAVATMVEEIVDRVLDEDVNNLAFEKAYAGMETTMVGHNVAPTAIVGGDQNGYFYLTQTENNGAI

SEQ ID NO: 41936 - protein, 73 aa, Zea mays
  Coding DNA Sequence Number=SeqID_157
MALLRSCRLAVRVAVAVVLLLLCGYALGAAEGARPLPGGHGGASGGFSTANLPVYYFFCCFIGSLPVLRMLSP

SEQ ID NO: 41937 - protein, 498 aa, Zea mays
  Coding DNA Sequence Number=SeqID_158
MPFLDDRMVQSPTFAIDLRGRDAAAFIREVESEAVKIIADAGDNRGKKVKTQSEEGTSKGKVMIAATRKRKIEAKGSYSGCSDAPPVASVALEKVSSPPRAIEAAVSETGGTGQELSVDDYLVGGVAMFDAQRPLPSGPCYRRAWLKPKTHSIRAIALSGHQLTAAGRRRQAKRHAGALSPRLSPPTCNGYRSLPPDSPRHPLLPPRRNDNHPAGEGNPSEGEPSPCCSSFAVASKSLLRSLSLDRSAGLTGHFAGLVDLSPLILSRDWSVADSVRPDNSDLFSFSGSLHACAMPASSLPASPDATGDIGAALELDLEDLAAGGGTDCIGALACGRSSFSYRRLPEPRLRLTVQKLDDSFFEEPLTSQPYHLLRIELHFAQHLSVDYSPCRDPPKNQKEASHTHRRPVSMLDDLSEDDDEKFTHSRCSTSVLEDPCLYEYIEERVEEETPKKGSLFQRWFCSSKLRSNRRTHAEDTVPLSGEKKNAHPKLGKWLTFKF

SEQ ID NO: 41938 - protein, 145 aa, Zea mays
  Coding DNA Sequence Number=SeqID_159
MALALACVLLVRSADAAAEASPTPGGSTYGCNPATDKSCKPEGVGVVLPGGGIDLDGDEGYAPLYMATHRPLARGIWIVRVCAEVIIVWLSTTRTDTPSIIPYDVAYKWGQEPARPSPVLAGPGAGKAFACPSQPLRPKAFTWLK

SEQ ID NO: 41939 - protein, 94 aa, Zea mays
  Coding DNA Sequence Number=SeqID_160
MAVEKPEESSLYGSRPVAEWLRDCESYNQYHIDNYEMGVDSFSLLISCFTKRCVFNLILIYSGKNRTGGCRLLRRLDEDALCQGREFTEGVHQC

SEQ ID NO: 41940 - protein, 767 aa, Zea mays
  Coding DNA Sequence Number=SeqID_161
  Gene Ontology: Mol. function=ubiquitin-protein ligase activity; Cellular component=ubiquitin ligase complex; Biological process =protein ubiquitination
  Homolog annotation: Hit_ID=Q6Z2G6; Match level="QueryCoverage=89%, HitCoverage=90%, E-value=8e-67, Identity=29%"; Hit description =Armadillo repeat containing protein-like
  Pfam annotation: Domain name=Arm; Domain location=437-481; Score =13.9; E_value=0.22; Accession=PF00514.13; Description=Armadillobeta -catenin-like repeat
  Pfam annotation: Domain name=Arm; Domain location=522-568; Score =11.0; E_value=0.52; Accession=PF00514.13; Description=Armadillobeta -catenin-like repeat
  Pfam annotation: Domain name=Arm; Domain location=616-657; Score=8.8; E_value=0.98; Accession=PF00514.13; Description=Armadillobeta-catenin- like repeat
  Pfam annotation: Domain name=U-box; Domain location=261-333; Score =78.1; E_value=2.7e-20; Accession=PF04564.6; Description=U-box domain
  Pfam module annotation: Pfam domain module=Arm::Arm::Arm::U-box; Domain location=437-481::522-568::616-657::261-333
MEAEEGPFLANDAKEFVEHFILLYLNFPPFSPLSKHQDPEASLAITSETVLLKFEKSRSQLQESLRRIESIVTEDIGCKIVEIVGELEQIVFTLDRSEKEAGDELINLLQRNNKTNGSSDNGELEVFHISALKLGITSSRAALTERRALKKLIEKARSDEDKRKELVVSYLYNLMRKYSKFFRSETGDDTDSQGSSPCSPTVLGVDDMCSPYINGRAFGRQILSSQSFNSRFGSFNSRLGSFNCRRAAGGGPRSGNISVPPEELRCPISLQLMYDPVIISSGQTYERICIEKWFNDGHSTCPKTQQQLAHLSLTPNYCVKALIASWCESNDFPLPDGPPGTFDVNWRLASSDTEATGCVSVESFDCTSAKSVKIVLMEDARKEEPANSVSGTLDDGSCNDFDLNEGYGSLLLLLHERSNMDKQCRLVEQIRYLLKDDEEARIQLGSNGFAEALVEFLRNAVDDGNEKAQEVGAMALFNLAVNNNRNKGLLLSAGVAGLLEQMISNPRLSGPATALYLNLSCLPDAKAAIGSSQAVPFLVDCLYIQDASDTNGSSSKHDALYTLYNLSSHQASVSALLAAGIVDALHRLLAESAAPPEEGLGWTEKALAVLISLAATEAGRKEIVSTPGLVSTLATVLDTGEPTEQEQAVSCLLVMCSADDECVAAVLREGVVPSLVSVSAAGTGRGREKAQKLLKLFREQRQRDTAPAPQPQQQLLQSQLAEGGNGGGAIIACHHRESKPLFNVKSRKLGRTLSSLWKNRGFSLYQC

SEQ ID NO: 41941 - protein, 129 aa, Zea mays
  Coding DNA Sequence Number=SeqID_162
  Gene Ontology: Mol. function=catalytic activity; Cellular component =peroxisome; Biological process=metabolic process
  Homolog annotation: Hit_ID=Q7F1X5; Match level="QueryCoverage=95%, HitCoverage=22%, E-value=1e-51, Identity=79%"; Hit description =Putative 4-coumarate-CoA ligase
MELSCGSCALIRRAFLILKQHGYVGDDEATAATVDSEGWLKTGDLCYFNEDGLLYIVDRLKELIKYKGYQVPPAELEHILNSHPDIMDAAVIPYPDEDAGQLPMAFIVRKPGSNLTEQQVMDFVAKQKS

SEQ ID NO: 41942 - protein, 361 aa, Zea mays
  Coding DNA Sequence Number=SeqID_163
  Gene Ontology: Mol. function=triacylglycerol lipase activity; Cellular component=chromatin; Biological process=lipid metabolic process
  Homolog annotation: Hit_ID=Q5N8V4; Match level="QueryCoverage=90%, HitCoverage=72%, E-value=2e-98, Identity=62%"; Hit description =Putative DAD1
  Pfam annotation: Domain name=Lipase_3; Domain location=102-261; Score= 165.6; E_value=1.2e-46; Accession=PF01764.16; Description=Lipase (class 3)
GCNPWCAMSWRGTGELVGACYKVLDVDPSSARYMCCKHAKERVLEEAGMAGAGYEVTRYIYATPDVAGPSTSGRGHGRASWVGYVAVSTDEMTRRLGRRDVLVSLRGTVTQAEWAANLMSALEPARLDARRDVKVEAGFLNLYTSSPGGGGGMESCRDQLLREVSRVIKSFSKDRPREDMSVTLAGHSMGSALAVLLGYDLSQLGLNRDVSGRRVPVTVFSFGGPRVGNAAFKDRCDELGVKVLRVANIRDPVTMLPGALFNEGTRGFIASWAAGDCYTHVGVELALDFLSLRDLGSVHDVGAYVSAIKAEACGKVSRSDNAAADSRGVAVLAKKAMEFIGSHRTAAFAWPETVLGIGGVA

SEQ ID NO: 41943 - protein, 130 aa, Zea mays
  Coding DNA Sequence Number=SeqID_164
MEQFYRRIRLRSSQQVQESPIRALDHYCPHGQQLLPVEDHVLGARQSIINLFQISLDLEYGSFPDVDIYGDPGFTFPVCDAMEFHAPPAAHPVIMFVCGAEVGSLSRDELWRKALGRPATSLRPHHRACR

SEQ ID NO: 41944 - protein, 81 aa, Zea mays
  Coding DNA Sequence Number=SeqID_165
MERLISMIPLWMNLRRTWILLITRGFWTLNLLGTITNHRKDLSVLHNVRISVHQNKGKQKNNIEFMAYDMEHKNNSTAITD

SEQ ID NO: 41945 - protein, 117 aa, Zea mays
  Coding DNA Sequence Number=SeqID_166
  Subcellular localization annotation: CTP_CleavageSite=49; ConfidenceScore=5.07e-01
MRLPYGGRSTIGSKQGNSGSQRRPCRFLFRSGDRAQLLGRLSVQIWRPCAAVGWWYDDDDHEADCVVCPLQACNRTWVLSMVGPTIAAMERLQCGGRRCGGSGVVAPVRQLKRDGSQ

SEQ ID NO: 41946 - protein, 159 aa, Zea mays
  Coding DNA Sequence Number=SeqID_167
MALNLCEMMWLKQLLGELKVLRNGTMRLHCDNIVAINNTNNAVQFERTKHVKINKFFIKVKIDSGVLRDLIAYNQYKVTVGVFGHTVRLTEQELLLKRRPKASRAFNARETLPATYAGKYVSHLYSMIAGPMSEAFVRHRPVAYAMVVWPRVGAGALPG

SEQ ID NO: 41947 - protein, 1046 aa, Zea mays
  Coding DNA Sequence Number=SeqID_168
  Gene Ontology: Mol. function=transferase activity, transferring glycosyl groups; Biological process=response to oxidative stress
  Homolog annotation: Hit_ID=Q7XZZ4; Match level="QueryCoverage=98%, HitCoverage=98%, E-value=0.0, Identity=87%"; Hit description =Putative phosphoribosyltransferase
  Pfam annotation: Domain name=C2; Domain location=10-102; Score=71.4; E_value=3e-18; Accession=PF00168.20; Description=C2 domain
  Pfam annotation: Domain name=C2; Domain location=466-559; Score=25.2; E_value=0.00023; Accession=PF00168.20; Description=C2 domain
  Pfam annotation: Domain name=C2; Domain location=632-728; Score=79.5; E_value=1e-20; Accession=PF00168.20; Description=C2 domain
  Pfam annotation: Domain name=PRT_C; Domain location=891-1046; Score =370.0; E_value=3.6e-108; Accession=PF08372.1; Description=Plant phosphoribosyltransferase C-ter
  Pfam module annotation: Pfam domain module=C2::C2::C2::PRT_C; Domain location=10-102::466-559::632-728::891-1046
MVAEGARRRVVVEVCNARNLMPKDGQGTACAYAVVDFDGQRRRTATRPRDLNPQWGERLEFLVHDPGAMASETLELNLYNDKKAITAAGSGRRGGTFLGKVKVAGASFAKAGDETLVYYPLEKRSVFSQIKGEIGLKIWFVDDPPPPPAPAAAEEKEAAAAAAGEGKDVKDKAPDAAAAPAAEEKKPETAPSEEKKPAEAKAEEKKPESAEKKDDKKKSPEKGKKDGDKPKEEGKAEKDKKDAAAPPPSPSKLAPPRSPSKKDLAIAGVAGDLEIRPQSAAEKSMAASGASASYDLVDRVPYLFVRLLKAKRHGGGDGQPLYAQLSIGTHAVRTRAATAAGEWDLVFAFHKDSLTDTSLEVTVLEEAKKPAKEGDPVPPEANLGFVSFDLQEVPKRSPPDSALAPQWYTLEGHGSEDGAAVCDVMLSVWVGTQVDEAFQEAWQSDSGGYLVHTRSKAYLSPKLWYLRLSVIQAQDLRLPSPPDAKAKQCGPIFPELYVKAQLGAQVFKTGRVQLGSAAAGTANPSWNEDLLFVAAEPFDPFLTVVVEDVFSGQAVGQSRVPLSTVHRRSDDRVEPPSRWLNLCGGEARPYAGRVHVRVCLEGGYHVLDEAANVASDVRAASKQLSKPPVGMLEVGVRGAANLVPMKIAKDGASGSTDAYVVLKYGPKWARTRTILDQFNPRWNEQYAWDVFDPCTVLTIAVFDNVRYKAAAADDPGKLPRDSRIGKLRIRLSTLDTNRVYANTFALTAVHPVGVRKMGELELAIRFTCPSWLTLMQAYGSPLLPRMHYVKPLGAAQQDVLRHTAMRTVSGRLARSEPPLGPEVVQYLLDTDTQSWSMRRSKANWFRVVGCLSHVATAVRWAHRVRTWAHPPTTVLVHLLLVAVVLCPEMILPTVCLYLFLVLLWRYRARARQPAGMDPRLSHVDSVSPDELDEEFDGLPSGRPADVVRMRYDRLRAVAARAQTLLGDVAAQGERVEALLSWRDPRATAVFAVVCLLAALVLYAVPFKVLLLGMGFYYLRHPRFRGDMPSAGFNFFRRLPSLSDRVF

SEQ ID NO: 41948 - protein, 259 aa, Zea mays
  Coding DNA Sequence Number=SeqID_169
  Homolog annotation: Hit_ID=Q67X40; Match level="QueryCoverage=44%, HitCoverage=63%, E-value=4e-13, Identity=37%"; Hit description =Integral membrane family protein-like
  Subcellular localization annotation: CTP_CleavageSite=40; ConfidenceScore=5.09e-01
MKAYFIKILIRAINLFDKWTRTLVGLERPSLPSGLCLMAQANMRMSTIKTSTTRKVVTTELLVRWQKPWNYMQMGIQLACQLPECATYIMATATRADAIYNTITTMSHTSSYNHTLIASLGQMMPTMEKGSDNTRYPATTVLATSTEVKAGKLSNMDWKELVNMDRLSSIVLVKRAVTTSGPKRTTSATSRPRPGSAGTPRCPSSVGMGDHCHQWSSCAAPLTAKTICSADYSISLLYITLYSLVIKMQTNPPCNRANF

SEQ ID NO: 41949 - protein, 94 aa, Zea mays
  Coding DNA Sequence Number=SeqID_170
MAVVGEVWSLVIHSSVVLLSAPEDGLCFPSFETSYMMYMSITSTKNGDSQPQPLYGIADELISRANTTTAIPAWQIGALDTVGPSESFPGQSDP

SEQ ID NO: 41950 - protein, 246 aa, Zea mays
  Coding DNA Sequence Number=SeqID_171
  Gene Ontology: Mol. function=DNA binding; Cellular component=nucleus; Biological process=regulation of transcription
  Homolog annotation: Hit_ID=Q5JK15; Match level="QueryCoverage=72%, HitCoverage=65%, E-value=4e-44, Identity=56%"; Hit description =Putative development regulation gene OsNAC4
  Pfam annotation: Domain name=NAM; Domain location=13-146; Score =107.4; E_value=4.2e-29; Accession=PF02365.6; Description=No apical meristem (NAM) protein
MEGRRPGAPVAGLPIGFRFRPTDEELLLHYLRRKALACPLPAGVIPDADLARLHPWDLLPAAAPGGSGADADGERFFFHRPATQCWRKGGGAARAAGTGVWRPSGKETLVLSPRCKRPVGTKRTLVFCPRRGRARTHWAMHEYRLLPAGLHPYGCAAGAGANAPPPTNVSSHGGDAAADWVVCRIFRRARPAHRARLGGGAREELEEEHAAEESPSSCVTDASETLDQEEDDGDEGSSSSTVASSN

SEQ ID NO: 41951 - protein, 182 aa, Zea mays
  Coding DNA Sequence Number=SeqID_172
MARQLGGGRKQQAGLAALGHGGSWHWHGRTGTGEQAGRLLPCEDEQACADVLDGSSMLCCVVVGEPRTQLCDRAAVTAAHRRRVWEWGGQWSVSQAWIRHMNNSNTSRMHAASKDWRAMALSASNLGWLVRASMDDACPHTGHSHRRSLFRGERRPAARVACALSQRQIRPSHHGLVVSRPV

SEQ ID NO: 41952 - protein, 122 aa, Zea mays
  Coding DNA Sequence Number=SeqID_173
MGLRASPCELYTRGGWSGMPASDQEKREVTEGKRSDVGDRQREKTRPGFADGDGTMDRSATELMSRRFGCPPCHAHSRCRLVRRLPKTLLATTSGRGQNRPRLDQLLCRLWWETIVFLGLQI

SEQ ID NO: 41953 - protein, 508 aa, Zea mays
  Coding DNA Sequence Number=SeqID_174
  Gene Ontology: Mol. function=magnesium ion binding; Cellular component=chloroplast; Biological process=metabolic process
  Homolog annotation: Hit_ID=Q2NM14; Match level="QueryCoverage=99%, HitCoverage=92%, E-value=1e-105, Identity=39%"; Hit description =Terpene synthase 10
  Pfam annotation: Domain name=Terpene_synth; Domain location=1-180; Score=122.3; E_value=1.4e-33; Accession=PF01397.11; Description =Terpene synthase, N-terminal domain
  Pfam annotation: Domain name=Terpene_synth_C; Domain location=185 -456; Score=285.6; E_value=9.8e-83; Accession=PF03936.6; Description =Terpene synthase family, metal binding domain
  Pfam module annotation: Pfam domain module=Terpene_synth::Terpene _synth_C; Domain location=1-180::185-456
MKEEVKKMLLDVGSSDLSHKLDCIDTLERLGLDYHYTKEIDELMCNVFEARDQDLDLTTTSQLFYLLRKHGYHIFFWWMSHMLLVSNADVFLKFRDDKGDIVTNDARCLLRMYEAAHVRVNGEEILDNILIHTKRQLQCIVDDLEPTLQEEVRYALETPLFRRLNRVQARQFISTYEKSTTRINMLLEFSKLDFNILLTLYCEELKDLTLWWKEFQAQANTTIYARDRMVEMHFWMMGVFFEPQYSYSRKMLTQLFMIVSVLDDLYDSHCTTEEGNAFTAALQRWDEEGVEQCPTYLRTLYTNIRATIKAIEEDLNFQNNKHAKLVKGLIIDMAMCYNAETEWRDKKYVPATVDEHLKISARSSGCMHLVSQGFISMGDVATSEALEWASTYPKIVRAVCIIARLANDIMSYKREASNNTMVSTVQTCAKEYGTTTVEQAIEKIRELIEEAWMDITHECLRQPQPKALLERAVNLARTMDFLYKDADGYTDSRSIKGILDSLYVHLID

SEQ ID NO: 41954 - protein, 67 aa, Zea mays
  Coding DNA Sequence Number=SeqID_175
MNVATGSRMWPQLDVERQREEEDNSIGETTYLEPEPFPCIKVLEPKPKPVKLLFMASSPRYKNDSNF

SEQ ID NO: 41955 - protein, 88 aa, Zea mays
  Coding DNA Sequence Number=SeqID_176
MTGIISPCGKPRGNFCQCQNTCHDICPTIAQPVSSGIDTRALAFCRAAIARDRTTTRATMEDGAIAPSCRAKAHHDDECLPLPSLWQR

SEQ ID NO: 41956 - protein, 70 aa, Zea mays
  Coding DNA Sequence Number=SeqID_177
MAHRTVRCATGLLVLGEMCGTEAACAVQTCDNYPGKQLEGCDYRSAPKNGVNCVLHLLRTDDRLSCTPHA

SEQ ID NO: 41957 - protein, 542 aa, Zea mays
  Coding DNA Sequence Number=SeqID_178
  Gene Ontology: Mol. function=glucose-1-phosphate adenylyltransferase activity; Cellular component=chloroplast; Biological process =glycogen biosynthetic process
  Homolog annotation: Hit_ID=Q6AVT2; Match level="QueryCoverage=99%, HitCoverage=99%, E-value=0.0, Identity=75%"; Hit description =Putative ADP-glucose pyrophosphorylase
  Pfam annotation: Domain name=Hexapep; Domain location=418-435; Score =8.4; E_value=14; Accession=PF00132.14; Description=Bacterial transferase hexapeptide (th
  Pfam annotation: Domain name=Hexapep; Domain location=490-507; Score =11.5; E_value=3; Accession=PF00132.14; Description=Bacterial transferase hexapeptide (th
  Pfam annotation: Domain name=NTP_transferase; Domain location=73-370; Score=374.7; E_value=1.4e-109; Accession=PF00483.13; Description =Nucleotidyl transferase
  Pfam module annotation: Pfam domain module=Hexapep::Hexapep::NTP _transferase; Domain location=418-435::490-507::73-370
  Subcellular localization annotation: CTP_CleavageSite=57; ConfidenceScore=5.60e-01
MGLRVAATAPAPAGVRVLGRGAARVTPRPWAAVGGRRRFSVRMSVATTEATTTIAVGASEDQALEARNSKTVVAVILGGGAGTRLFPLTRRRAKPAVPIGGAYRLIDVPMSNCINSGINKVYILTQFNSQSLNRHLSRAYDFSNGVAIGDGFVEVLAATQRPGTEGKRWFQGTADAVRQFDWLFDDAKSKDIEDVLILSGDHLYRMDYMDFVQSHRQRGAGISICCLPIDGSRASDFGLMKIDDTGRVISFSEKPKGDELKAMQVDTTVLGLSKEEAENKPYIASMGIYIFKKDILLNLLRQKGIRILHFMFKYSIQLTAQLLVYLKPDYIIVSKRNRCKGTSAYLFNDYWEDIGTIKSFFEANLALAEQPPRFSFYDADKPMYTSRRNLPPSMVNNSKITDSIISHGCFLDNCRIEHSVVGVRSRIGSNVHLKARSLPLLPGVFHYTDIEKQDTVMLGADYYETAVERGELLAEGKVPIGIGENTTIQKCIIDKNARIGKKVVISNSEGVDEADRTSEGFYIRSGITVVLKNAIIADGLVI

SEQ ID NO: 41958 - protein, 202 aa, Zea mays
  Coding DNA Sequence Number=SeqID_179
MAKRSGDRRFVVKSPSSPCVFKLSSSAWQPHGDGSAEEGKTKAATRKKLSATQTHGFASLRCGLYTECGGAVSECGVGVESVGGGGRGLLSLARQSVRYPARGLTSTRRLRLPFSPAVGFFLKLPCLSWQSAGPPHPGLRLGRSAPVAIGIFQISVPALDACTLQCHRSHGSKSRSPEWRELLSRERLWAAQERGLRSLLAR

SEQ ID NO: 41959 - protein, 105 aa, Zea mays
  Coding DNA Sequence Number=SeqID_180
MAAPPLLRLRSPASSPNSALRYSESLRTAHEEIGQIQTYVITRAFVVLGSRQVLVRSQEPSMRMALVRVWEGEDGSEHRGPPVGETAGETREGETGTRAHLSARK

SEQ ID NO: 41960 - protein, 197 aa, Zea mays
  Coding DNA Sequence Number=SeqID_181
  Homolog annotation: Hit_ID=Q39620; Match level="QueryCoverage=97%, HitCoverage=41%, E-value=2e-08, Identity=28%"; Hit description=VSP-3 protein precursor
  Subcellular localization annotation: CTP_CleavageSite=41; ConfidenceScore=5.22e-01
MTWSVRALGRARQRLLRGRGRVCLPRSRSSPSPGLGERRPSSEAKAESEPWARARRSSLSSGAEAESEPWGRARRSSSSSGAEAESEPWGRARRSPSSEAEIGAEPWGRARRSFLWRPKPDLAAAILALNAPAIWSVGVAIWPRLLLCEDWASGEPKLCADGGYQLRLGVLGTKTVLTQLCVRKALQPRPADMTGDK

SEQ ID NO: 41961 - protein, 262 aa, Zea mays
  Coding DNA Sequence Number=SeqID_182
MASGSVITPTGTGSKPPPVDATGGEDPLPTGDDEHQPCKNTHGGGGGEGEGKSTMPDAITIAATINNNNEGMQSHVDEQRNAGSQLVDHDPVTCAVLDRRREHGSKRASERKRKKNTDAMRAAPQDLEGDRSDPSTPARGATVPVPPWSSELRGPGKPSEANRLARYRNHERCAFSCSLVVPARPRPDGSAVLFPPSSGRLSSGSLAVWLMPETLAAVCLSREMARAERRCGKCGDGGIRDQQPFLARLVAFAFRLNARLVL

SEQ ID NO: 41962 - protein, 489 aa, Zea mays
  Coding DNA Sequence Number=SeqID_183
  Homolog annotation: Hit_ID=Q6K9I9; Match level="QueryCoverage=17%, HitCoverage=50%, E-value=4e-32, Identity=73%"; Hit description =Protein kinase-like
  Pfam annotation: Domain name=Pkinase_Tyr; Domain location=26-169; Score=-118.4; E_value=3.3e-05; Accession=PF07714.7; Description =Protein tyrosine kinase
  Subcellular localization annotation: CTP_CleavageSite=63; ConfidenceScore=5.66e-01
MAAFAAPSLSSRILLASPHSPPTLLRLRRAGGRSLELSSRRGGSARLRVVRRAVTEEDSGTARGDEEVEEAPEEPVAGRDLITLAACLVGLLTGVSIVLFNLSIDVYSFGIVMWELLTREEPYSGGIVNDSLRPQIPSWCDPEWKGLMESCWSSDPAERPSFTDISQRLRKMAAAMNVNIAVDDPTPSDNLSSADFMGEHLCHGDSKACLMFSFNPRVNRLPFAFRRKQCVVMLDLECDDFINDMFHHFLRTLNSGHSEAVICCMKTIIMRLVIEESEDVQPQIASCLPQNVRKEEKASTCVCSASINLGLQTLHLARRSGHGNDVDWWAFGVFLYELVYGRTPFKGHTKEATLKNILSKQATYPQLDGEADASDPSCGTSWGCCWSATCAAAWASRAAPPRSSGTRSSPAWTGRSSGDQARELEQHEQQLRQQEAEEQQQQLREETHIHLRGKAGGLPHAHELEPGEPVQQQDQDDDKQRKMNETKCS

SEQ ID NO: 41963 - protein, 141 aa, Zea mays
  Coding DNA Sequence Number=SeqID_184
MTVSTVRVLRPVTLACSFGPCGIPSHGDGRRHSNTNTGGGREVWHGHPRSAVASCGSDSDTGDLLLGAIANGAEVTQLGAIGYGAEERARCGVDGDVARCTLLEWHLRPTAIVIASGQYGKQRQTADKLRCVANWYRSGGR

SEQ ID NO: 41964 - protein, 200 aa, Zea mays
  Coding DNA Sequence Number=SeqID_185
  Gene Ontology: Cellular component=chloroplast thylakoid membrane
MARGKGKLPKKVWELSVLCDPHIGHRHHQDPNQETTVLLQQINRPASEGTEIWMHPYELAAAAGNGKWSARESGNWVSRSKDAESESPAPLGGDKRQQVLAQIAMLQAQMVRITGFLDERSACLTKSAKDADSEFYMIGQNAMKELDAVGDQVSVSCNQNSAYCCPLFAIKLRCLVRKILERLGKMKAFEDTAEVQRQEI

SEQ ID NO: 41965 - protein, 240 aa, Zea mays
  Coding DNA Sequence Number=SeqID_186
  Gene Ontology: Mol. function=sedoheptulose-bisphosphatase activity; Cellular component=chloroplast; Biological process=reductive pentose- phosphate cycle
  Homolog annotation: Hit_ID=P46285; Match level="QueryCoverage=87%, HitCoverage=53%, E-value=1e-115, Identity=95%"; Hit description =Sedoheptulose-1,7-bisphosphatase, chloroplast precursor (EC 3.1.3.37) ...
  Homolog annotation: Hit description=(Sedoheptulose-bisphosphatase) (SBPase) (SED(1, 7)P2ase)
  Pfam annotation: Domain name=FBPase; Domain location=1-225; Score =276.5; E_value=5.2e-80; Accession=PF00316.10; Description=Fructose-1- 6-bisphosphatase
MAFQAFHLAETGTRGFSVAFDPLDGSSIVDTNFTVGTIFGVWPGDKLTGVTGGDQVAAAMGIYGPRTTYIVALKDCPGTHEFLLLDEGKWQHVKDTTTIGEGKMFSPGNLRATFDNPEYDKLINYYVKEKYTLRYTGGMVPDVNQIIVKEKGIFTNVTSPTAKAKLRLLFEVAPLGFLMEKAGGYSSDGKQSVLDRVINELDERTQVAYGSKNEIIRFEETLYGSSRLAASATATARALI

SEQ ID NO: 41966 - protein, 418 aa, Zea mays
  Coding DNA Sequence Number=SeqID_187
  Gene Ontology: Mol. function=protein serine/threonine kinase activity; Cellular component=membrane; Biological process=protein amino acid phosphorylation
  Homolog annotation: Hit_ID=Q8W0H6; Match level="QueryCoverage=76%, HitCoverage=91%, E-value=1e-115, Identity=69%"; Hit description =Putative calcium/calmodulin-regulated receptor-like kinase
  Pfam annotation: Domain name=Pkinase; Domain location=93-375; Score =94.5; E_value=3.1e-25; Accession=PF00069.15; Description=Protein kinase domain
  Pfam annotation: Domain name=Pkinase_Tyr; Domain location=93-372; Score=80.4; E_value=5.8e-21; Accession=PF07714.7; Description =Protein tyrosine kinase
  Pfam module annotation: Pfam domain module=Pkinase::Pkinase_Tyr; Domain location=93-375::93-372
  Subcellular localization annotation: CTP_CleavageSite=70; ConfidenceScore=5.71e-01
MQAARDRTSPAGHGGFSGFNSESQSDPGFSWTSTYTPRSRMVNRKARSSISFRERVAAILGSCANCFTPRPEVKKAHENPPIEAHDVSASPSNFGTVYKAKLRDGSIIAVKRATKMHGGHLSEEFRSEIQSLSKVEHLNLVKFLGYVEYEDERLILVEYVNNGTLRQHLDGSKGEPLEFAQRLNIAIDIVHAIAYLHGYTASLCLTNIFLRWEADHPIIHRDIKSSNILLTEHLRAKVADFGFARLAPENPEATHVSTLVKGTAGYVDPEYLRTSQLTDRSDVYSFGVLLVELVTGRRPIERGRGRGRHQRLTTEWALRKCREGFAVVVMDPRMRRTSAVVAAVEKVMVLAAECTAPDRAARPAMRRCAELLWSVRRDLQQEQQRASAASAGARRHDGSTYAPPSVTSLRQDRFQNLR

SEQ ID NO: 41967 - protein, 358 aa, Zea mays
  Coding DNA Sequence Number=SeqID_188
  Pfam annotation: Domain name=VQ; Domain location=154-184; Score=45.2; E_value=2.3e-10; Accession=PF05678.4; Description=VQ motif
MAESLFLRNRPRSCLPGGNPSGRRDPRVCLGIGKPPKMPLVDVEPKRDGDLRRVKTWYVLIPTGDAMKNPGAGARAGVARHAAFKVHRDSHSIHKATSPLSYSLSSINSSMSSSSNAVIPSSGHHRPAPALQPPARRQMQQPPQQQKHQPVIIYTHSPKVIRTNPRDFMSIVQKLTGLDGPGHHARGAAGAAPAPPAGRINSGSVVVPSPQDESSSSSSSSESCANTHAAGPPPYADTRLMPPAPPAPSLDAHFMAPDIPLLFAPDAAASDPQHLCAPRGLYGQFPQVDAAAIGPVMSTNMNSAATNGGAVFSPSMVETASGDDAAMQEPLLCDACAITGGSFLLDLFFLVMVDTVNV

SEQ ID NO: 41968 - protein, 343 aa, Zea mays
  Coding DNA Sequence Number=SeqID_189
  Gene Ontology: Mol. function=DNA binding; Biological process =regulation of transcription
  Homolog annotation: Hit_ID=Q7G1M8; Match level="QueryCoverage=99%, HitCoverage=100%, E-value=4e-96, Identity=56%"; Hit description=No apical meristem, putative, expressed
  Pfam annotation: Domain name=NAM; Domain location=6-134; Score=299.1; E_value=8.3e-87; Accession=PF02365.6; Description=No apical meristem (NAM) protein
MGTMTLPPGFRFHPTDDELVSYYLKRKVDNLKIELEVIPVVDLYKSEPWELPDKSFLPKRDLEWFFFCPRDRKYPNGSRTNRATATGYWKATGKDRRVACDGGVYGLRKTLVFYRGRAPGGERTDWVMHEYRLCQDLVHGACNFIGAYALCRVIKRHEAGLLLPPPASRAKAAGSARGHMMSEVSSGEQLSASSSPSPFTPANSSPTRPTLDAAGAVTCAMAPEPGNAFQLAHDASAALPSLALPPPPLLLPSPHEDDTFFVSEGLPAAAADWFGGDMGGVSESEQELKWDALFPCTGTFPSVGVDTWNAAAASPTTMLCRQASDGIDDLAAFFFSEDNRIVF

SEQ ID NO: 41969 - protein, 313 aa, Zea mays
  Coding DNA Sequence Number=SeqID_190
  Gene Ontology: Mol. function=RNA-directed DNA polymerase activity; Cellular component=mitochondrion; Biological process=RNA-dependent DNA replication
  Homolog annotation: Hit_ID=Q8S463; Match level="QueryCoverage=99%, HitCoverage=16%, E-value=1e-159, Identity=87%"; Hit description =Putative prpol
MKNSHCRDPKMEAYCDEVRRLEDKFYGLELNHIARRYNETADELAKIASGRTMVPLDVFSRDLHQPSVKTDDTPEPEKVSTLPEVPSAQPEAPSAPGGEALRVEEERDGVPPNRNWQTSYLQYLYRGELPLDRAEARRLAQRAKSFVLLGDGKELYHRSPSGILQRCISIAEGQELLQEIHSGACGHHAAPRALIGNAFRQGFYWPTAVADATRIVRTCRGCQFYAKQTHLPAQALQTIPITWPFAVWGLDLVGPLQKAPRGYTHLLVAIDKFSKWIEVRPLNSIRSEQAVVFFTNIIHRFGVPNSIITDNGT

SEQ ID NO: 41970 - protein, 263 aa, Zea mays
  Coding DNA Sequence Number=SeqID_191
MVTLENLRRIYGHVVERATLARDLLAPAVGQLSGNLHSRCILAQQLDLSFPEKDDDLRADLEKFGAIEAIALCRHLFMAVIVFRDEASVPVAFRRQEEISSGLYSAVPPPHLALSTSFIHPNSIKVNLYSNTSTASSGDSTAKHSTEPTTTEAATSIGQSMMPLWMESRPATVFQNYLGDGSRFVPSRRSQIYGPTLGADGRLWMEGFNIVQCGNYAQSVPTAIPVAQLGYMSQASESLAPEMQSICSRLQSLVQGTLSIVRV

SEQ ID NO: 41971 - protein, 116 aa, Zea mays
  Coding DNA Sequence Number=SeqID_192
MASAGNSGGGDDDDAGENSEKLLADRYHEAPKPCRQRTCAAASVPRWWSFPVARAVRLAGSSTSSSIASTMASYFGVYESNVCSRFRLQPPPSNLYSPMVTIMHHLWKMPKTSCSD

SEQ ID NO: 41972 - protein, 619 aa, Zea mays
  Coding DNA Sequence Number=SeqID_193
  Gene Ontology: Mol. function=nucleic acid binding
MARPPPAGAISSRWRPIILSGLWRSRQKKGRAFSYMRNLIAVLHAMEPQVLEDPHFLERCLILDGVPASVSSLDLFQSIVGVQTAVLVRDIQTGFRVALLVFDALDSTIQTPREGLFATCTPATWHGKEVSVRTSILDGVAEGSARRCTALVLRSLVPPQYILADQDRDFHLRCILIGARSGSTISQGAHGLCDMAWKVLFVRAYVVAAIVRSDREAGVLVYDDTESTELVARRAPPLMYKLGLKLYDSSLFPMRADPTDRDACMLRRLLPPCVADGEESYRHRVLLLVGMDTQKLDAAELAHFLQFEADLVHAAEAVIIHRSEGLVVVVLGSSEDTTRLRQTPEETWIRFFGQKPSCANVYGFGGPDISSEQKKKEQQHQPVMTMGDTAAFQQVRELREGDSDTIALVHCLIRFCALATPECVLRSGFPERCLLLSGVVHGTTLFDLSARLSAFGDHHVSLHDLERKALVVFVCWDGAARLLREPQDTWKGLGFLECTRVPGAAEHAGVIVQEGGVQRVHIIDVIVGGPLFLELFTIDSFGMMIASSVSKIHVSINEIAGGYSNMDLTVQNKLGKMNTSFSGFVVLMAENEILVGKRMSSLPYNYLKAKELFVSSKAK

SEQ ID NO: 41973 - protein, 554 aa, Zea mays
  Coding DNA Sequence Number=SeqID_194
  Gene Ontology: Mol. function=oxidoreductase activity; Cellular component=membrane; Biological process=electron transport
  Homolog annotation: Hit_ID=Q84PV7; Match level="QueryCoverage=94%, HitCoverage=95%, E-value=1e-122, Identity=48%"; Hit description =Putative Reticuline oxidase
  Pfam annotation: Domain name=BBE; Domain location=487-552; Score =90.7; E_value=4.4e-24; Accession=PF08031.2; Description=Berberine and berberine like
  Pfam annotation: Domain name=FAD_binding_4; Domain location=82-232; Score=103.1; E_value=8e-28; Accession=PF01565.13; Description=FAD binding domain
  Pfam module annotation: Pfam domain module=BBE::FAD_binding_4; Domain location=487-552::82-232
  Subcellular localization annotation: CTP_CleavageSite=37; ConfidenceScore=5.34e-01
MYTNSSPTSLLLGILSILLSTHPHVIASQSPRDNGVRARSLSTCLLASGVRNFSMAGSPGYATIFDFSIQNLRFAAPGIRKPEAVVLPTSRRGLQRAVLCARSASLAIRVRSGGHSYEGQSYTVSGGVLDGKAPFVVIDLMNLNKVRVHAASATAWAESGATLGEVYHAVAHSSPSNRSSLALTAASCSTIGLGGHISGGGFGPVSRKFMLAADNVLDALLVDAVGRVLDRRAMGEDVFWAIRGGGGGSWGVVYAWKLRLVPVPDTVTVFTPRREGSVDAMAGLVYRWQFVGPALPDEFYLSASLTIGSSSSSSQEDRDLRNVAFTGLVLGPKEMAMSVLNERFPELGLAEAEVSEMSWVESAARLAGLSSVDELTSRVSKTKYYGKNKSDYVQRPISRDSLAAILRYLSDGPPAGYVTMDPYGGAMARLSATATPFPHRAGNLYALQYGVTWDSDAGEASVSARIQWLRSLYAYMTPHVSSNPRAAYVNYIDIDLMGFDESLGPVRLASSVSHARATWGAAYFTVENFDRLVRAKTRIDPANVFYNAQSIPLH

SEQ ID NO: 41974 - protein, 38 aa, Zea mays
  Coding DNA Sequence Number=SeqID_195
MVGWGLGAFIPLAYKVGDKTKWNYHKCTNIITFGDLIY

SEQ ID NO: 41975 - protein, 154 aa, Zea mays
  Coding DNA Sequence Number=SeqID_196
  Homolog annotation: Hit_ID=Q6QP54; Match level="QueryCoverage=65%, HitCoverage=36%, E-value=9e-08, Identity=54%"; Hit description =Putative kinase
MAPPVDVAGLRPRLGEVEAPPKLRSSLSSVAEAESEPLVGRGGGRRLRPGRCPSPGVGRSGVRHLPGLSPSPSPGSGGAEFAVFRDLARVRALGRAERSFLWCLLQDLTACQPHSVKWHCSRRGAGGAVLLSGRSVERRSDGGHFGSAGGRMPG

SEQ ID NO: 41976 - protein, 189 aa, Zea mays
  Coding DNA Sequence Number=SeqID_197
MASRMLCDDGSSQPPYGSKRTKDQGPLREGWPRGDEDETGALLGPLASLSRVDACNPLLQAHPTWARDEHEGRGIPTSLTPVSGRLASPPFALALALDPSGLGHAATLTRRPEGPPGLETPTTAYSVRNRRADEVSRNTTERQVCVCRIQIQRDTEMCTAVLRTAASNVFGCRAVNGRLEAGRTRAAGY

SEQ ID NO: 41977 - protein, 528 aa, Zea mays
  Coding DNA Sequence Number=SeqID_198
  Gene Ontology: Mol. function=transporter activity; Cellular component= integral to membrane; Biological process=transport
  Homolog annotation: Hit_ID=Q7FS87; Match level="QueryCoverage=92%, HitCoverage=39%, E-value=1e-177, Identity=63%"; Hit description =Putative glycerol 3-phosphate permease
  Pfam annotation: Domain name=MFS_1; Domain location=29-448; Score =156.5; E_value=6.7e-44; Accession=PF07690.6; Description=Major Facilitator Superfamily
  Pfam annotation: Domain name=Sugar_tr; Domain location=44-489; Score=- 142.1; E_value=0.02; Accession=PF00083.14; Description=Sugar (and other) transporter
  Pfam module annotation: Pfam domain module=MFS_1::Sugar_tr; Domain location=29-448::44-489
MASKKPPGLRLFGGAGSLRTYQTLVLVLTFFAYACFHMTRKITSIVKSALDPQTKMGFSHWGRLHLHTSEAPALNTGWLPFNTADGSALLGEIDVAFLAAYSIGMFFAGHIGDRIDLRIFLTIGMVGTAVFTALFGAGYWLNVHSFYYFLVVQMVSGLFQSVGWPSVVAVVGNWFGKSKRGLIMGVWNAHTSIGNIAGSLLAAFLLEFGWGWSFAVPSLVMALVGLVVYVSLPVSPEVMEIDIAGSGELNCEKDTGTVKEPLLEPGQQVKHKAVGFLEAWRIPGVAPFALCLFFSKLVAYTFLYWLPFYISHTRIGGVYLSDAMAGSLSTIFDVGGVLGGVLAGHISDRLNARAITAASFMYCAIPALFLYRAYGSTSMAWNVCLMFVTGMFVNGPYALITTAVSADLGTHSSLNGNSRALATVTAIIDGTGSIGAAIGPLLTGYISSKSWSAVFTMLMAAALLAGLLLTKLVCAELQGKTPTSASKDVADAQDQGRSKGGRTALSRASVRKTAGPVLRGLVRSSLDR

SEQ ID NO: 41978 - protein, 32 aa, Zea mays
  Coding DNA Sequence Number=SeqID_199
MNNRNDIKLQVYLRLEREQKYKCDAKANAKSA

SEQ ID NO: 41979 - protein, 112 aa, Zea mays
  Coding DNA Sequence Number=SeqID_200
MENYLETSRERERIQAGQETSSRADKIIEMTEEVSTRRRWNCGTRLEINGYKGEFVRNLCLGYRIGVKFGEYVTGGIMKVPEKFGIDWSKFGWFGHFIEHLACEGLGFEGNG

SEQ ID NO: 41980 - protein, 111 aa, Zea mays
  Coding DNA Sequence Number=SeqID_201
MVRTKNVSVPRGGDDEDPPRPFRQVKGKTVYLEQQEGRKKRRLDRAARAALAAAAAAEQAERGGQLQISSYQIAYRIRHLASRPRSFYTRHSYHSTSHFASVGHLFSNAMS

SEQ ID NO: 41981 - protein, 74 aa, Zea mays
  Coding DNA Sequence Number=SeqID_202
MGKPVPSLLVLLLSRVTALVPTITGMGDHVLGRVRGKVYCQVQSDNTSPWTVVHRPPLLRYQNGYNQFLTSCEC

SEQ ID NO: 41982 - protein, 96 aa, Zea mays
  Coding DNA Sequence Number=SeqID_203
MAQVAYQMQLVRVLIYTFSALQSGGLHLSLFIAILAKGRYLRTWVKSIYNVKSMVVTKAGFAPKLRIRELWLDGGKRNRLKGGKGYLVPIGLSISQ

SEQ ID NO: 41983 - protein, 379 aa, Zea mays
  Coding DNA Sequence Number=SeqID_204
MAASGYSGSAPITDQGFEGWPPKEGQRRLHHSDCSATRQSEFDRQSGLAKGATANSAPPDPRARTRAKTRKTANSAPPDPRARTRAKTQKTANSAPPDPRARTRAKTRKTANSAPPDPRARTRAKTRKTANSAPPGPRARTRAKTRKTANSAPPDPRARTRANTRKTTKLRFARPQGSDSALASAERLPPRPTPWLGLGHGNGRHTQPRLRRNPHVALPRAQTATSTGSAIIILPRIDSGRRQQGLDRSNSCPSSRLRRTSDSHDITPAGCPDLSGCHIGMAFLEKVGRAGPRTGQALSWGRSLPSPAWTLVTPLLQAHLTWARDEHEGRGTSTSLTLDTGHLASPPFALAHALDPSGLGHAAHSLVGLGTPLSRNADR

SEQ ID NO: 41984 - protein, 117 aa, Zea mays
  Coding DNA Sequence Number=SeqID_205
MSEDHTKREIVPSDKPTISGRTLSREFGNKHKEESSSSIKSHRRGDKKNKMKKVVYYETDSSSPSTSSSESSVTSKRHERKYREEPQAMYNRLKTMVNQVCNLGTQNGMTMKWSRLF

SEQ ID NO: 41985 - protein, 190 aa, Zea mays
  Coding DNA Sequence Number=SeqID_206
  Gene Ontology: Mol. function=protein serine/threonine kinase activity; Biological process=protein amino acid phosphorylation
  Homolog annotation: Hit_ID=Q1SJP6; Match level="QueryCoverage=40%, HitCoverage=19%, E-value=3e-18, Identity=58%"; Hit description =Protein kinase
MDVVTGPKFNPSNFRLADADGMLSEDLLKRQSAEDPDGSFYTGDDPDVSFYNGDDLDRSFYNGDDPDRSFYDRDDTDYIEGSDDGPPRKSSEDIVQLRTQNGFACREISVKETKKVFRSEDENGNKMVNQYVHLGKIGSGSYGKVVLYRNIKDGKLYAIKRREDSQAELAWEGLDYWRDLGLRAPLKCRN

SEQ ID NO: 41986 - protein, 69 aa, Zea mays
  Coding DNA Sequence Number=SeqID_207
MANKGHSSSCIGRRRTAQLRGQPVSPIDWRGVWCAVWGSVMAGYVCIYGAAALALCAAALTVWARKKKP

SEQ ID NO: 41987 - protein, 66 aa, Zea mays
  Coding DNA Sequence Number=SeqID_208
MSQLAAGLRLRSVVVRGGMIASVQPPRRNDNEIRADMGAGSDWRSPRLELHDFVAHESLYLIGVLL

SEQ ID NO: 41988 - protein, 755 aa, Zea mays
  Coding DNA Sequence Number=SeqID_209
  Gene Ontology: Mol. function=translation elongation factor activity; Cellular component=intracellular; Biological process=translational elongation
  Homolog annotation: Hit_ID=P34811; Match level="QueryCoverage=91%, HitCoverage=88%, E-value=0.0, Identity=87%"; Hit description =Elongation factor G, chloroplast precursor
  Pfam annotation: Domain name=EFG_C; Domain location=657-745; Score =149.7; E_value=7.6e-42; Accession=PF00679.14; Description=Elongation factor G C-terminus
  Pfam annotation: Domain name=EFG_IV; Domain location=536-655; Score =222.3; E_value=1.1e-63; Accession=PF03764.8; Description=Elongation factor G, domain IV
  Pfam annotation: Domain name=GTP_EFTU; Domain location=65-340; Score =391.8; E_value=1e-114; Accession=PF00009.17; Description=Elongation factor Tu GTP binding domain
  Pfam annotation: Domain name=GTP_EFTU_D2; Domain location=381-448; Score=63.1; E_value=9.3e-16; Accession=PF03144.15; Description =Elongation factor Tu domain 2
  Pfam annotation: Domain name=MMR_HSR1; Domain location=68-195; Score=- 6.8; E_value=0.0042; Accession=PF01926.13; Description=GTPase of unknown function
  Pfam module annotation: Pfam domain module=EFG_C::EFG_IV::GTP _EFTU::GTP_EFTU_D2::MMR_HSR1; Domain location=657-745::536-655::65 -340::381-448::68-195
  Subcellular localization annotation: CTP_CleavageSite=10; ConfidenceScore=5.09e-01
MAAEAPVRAPAAARSARRPAAVVSASRLLLGYGPFLAPRFAAERAAVAGPAAGLCARPHRQVPLHDYRNIGIMAHIDAGKTTTTERVLYYTGRNYKIGEVHEGTATMDWMEQEQERGITITSAATTAFWNKHRINIIDTPGHVDFTLEVERALRVLDGAICLFDSVAGVEPQSETVWRQADKYGVPRICFVNKMDRLGANFFRTRDMIVANLGAKPLVIQLPIGSEDNFQGVVDLVRMKAIVWTGEELGAKFEYRDIPADLQEMAQDYHVQMLETIIELDDDVMEKYLEGTEPDEETVKKLIRKGTISASFVPVLCGSAFKNKGVQPLLDAVVDYLPSPLDLPPMKGTDPEDPEILLERQPSDDEPFSGLAFKIMTDPFVGSLTFVRIYSGKLIAGSYVLNANKDKKERIGRLLEMHANSKEDIPVAVTGDIVALAGLKDTITGETLCDPDKPVVLERMEFPDPVIKVAIEPKTKADADKMATGLIKLAQEDPSFHFSRDEETNQTVIEGMGELHLDIIVDRLKREFKVEANVGAPQVNYRESISKVAEIQYVHKKQSGGSGQFADILVRFEPLEAGSGYEFKSEIKGGAVPKEYVPGVMKGLEESLPNGVLAGYPVVDFRAVLVDGSYHDVDSSVLAFQIAARGAFREGMRKAGPRLLEPIMRVEVITPEEHLGDVIGDLNSRRGQVNSFGDKPGGLKVVDAFVPLAEMFQYVSTLRGMTKGRASYTMQLAKFDVVPQHIQNQLSTAKAEEAAA

SEQ ID NO: 41989 - protein, 98 aa, Zea mays
  Coding DNA Sequence Number=SeqID_210
  Subcellular localization annotation: CTP_CleavageSite=35; ConfidenceScore=5.10e-01
MMTVAVRAVAQSLWRSKSQKDGSPDPSLVMPLAVVISTGAVGLIPLPQQKMESRRHPSSEPQLEVPPAPLQGTLADGGDPDGDDDGGSSSHSMETSEE

SEQ ID NO: 41990 - protein, 92 aa, Zea mays
  Coding DNA Sequence Number=SeqID_211
MNICELTLAVSHPQQEKNRCDSLVLALGLSGSSDWLLGQEGDVPDCSASSTDFLPVDYAGGTAATATERTNSGIAAGADAGSSADILAGDSA

SEQ ID NO: 41991 - protein, 137 aa, Zea mays
  Coding DNA Sequence Number=SeqID_212
  Subcellular localization annotation: CTP_CleavageSite=52; ConfidenceScore=5.03e-01
MVEVHDKKGKGKVPMSHFMVIRRGSMLDPHGRLDSRGKRRSRSRLLREVGVVRMEITAARVLRVALVSFTGRVRFVELTKGARVSTPFLQLGRGEEGKVGRKGEENGPVWEVNGPGAVPAFGRQPLDRFQPLEDLED

SEQ ID NO: 41992 - protein, 120 aa, Zea mays
  Coding DNA Sequence Number=SeqID_213
MVEPATGGIGPLMLMGPRGPVWALLRVSKKSLMTPTRWNQGQGDRNGSTSYWPGITHRCLGTAVELLLYVGRAPNVMWDSSFRARDSGTPAYLRRVCLGAAALGNGRMVGEALQSSGTQM

SEQ ID NO: 41993 - protein, 85 aa, Zea mays
  Coding DNA Sequence Number=SeqID_214
MGVAPELRVDFCKQSTRRSSLQVLSEISFIFHLCFFRGVIISPAQLTGVPMGVVLCEAASAAWRVFRRFELHIEFLRLFGGCGRR

SEQ ID NO: 41994 - protein, 138 aa, Zea mays
  Coding DNA Sequence Number=SeqID_215
  Subcellular localization annotation: CTP_CleavageSite=54; ConfidenceScore=5.33e-01
MSDGSGDPSFRLLLLRKLCVVAQTATVVVISVKVSSSSRGAKGSTQTNKKVKVRVQKKGAKETVENPGLAHRTVSGVPPDSVRCPGLIDFKLATFGFLKSRSAIIHRTVRCDTGLSGVPAEQRLGSAMVDSNGCLQRE

SEQ ID NO: 41995 - protein, 78 aa, Zea mays
  Coding DNA Sequence Number=SeqID_216
  Gene Ontology: Mol. function=ubiquitin-protein ligase activity; Cellular component=intracellular; Biological process=protein modification process
  Homolog annotation: Hit_ID=Q9LUV3; Match level="QueryCoverage=77%, HitCoverage=6%, E-value=2e-26, Identity=88%"; Hit description =Arabidopsis thaliana genomic DNA, chromosome 3, P1 clone: MGD8
MVRRIDGGGIFKDFMENITRAAFDVQYGLFKETADHLLYPNPGSGLVHELHLQYFHFLGSLLGKANVVVGGYGGYNTR

SEQ ID NO: 41996 - protein, 315 aa, Zea mays
  Coding DNA Sequence Number=SeqID_217
  Subcellular localization annotation: CTP_CleavageSite=44; ConfidenceScore=5.57e-01
MKSTLPSMSFQSPCFKIQPATQQSLWPPRRQSTRKPGLPLKLIRAALGPDANGGLLNADRRGATLPSSPLSDVVQEFYSSLNERNSKRLDKLMAPDCIIEDTAYYKPLDAKVNFSPASAFQSPMDHLRFWQGSPEYKATTGINVVVVLGLCLQLCNADKLPHHRIAVKRRGATLAMATVSWFKDSEFVNDFSMHIIDLELIGKLKAKEEQYDLGGSNGGEALAGLNLTENELVAHVVLQQWKLGRQSDVARHESWRGSGHNRIEDGGSTQWVFTEDLEPVALMASAFANDTRLPPTKAAPTPTPKIHLDENWMFV

SEQ ID NO: 41997 - protein, 580 aa, Zea mays
  Coding DNA Sequence Number=SeqID_218
  Homolog annotation: Hit_ID=Q1SD81; Match level="QueryCoverage=20%, HitCoverage=10%, E-value=2e-07, Identity=32%"; Hit description=H+ -transporting two-sector ATPase, alpha/beta subunit, central region; TonB box, N-terminal
MAATHVLHSFWRRHRWTVLRSLLLVALLHRLHLLAFLAASSPVWLLTAFLLGAVLVNSEPNVPLAVAAALEDHEGRHLTTAGTGPSSSSSSSDDGANESEEDVDEDHLVVDKKEAVAWTADDEHSIQSIGSLELERNARLEKLMSRITVHRGLTDLDVHTPAVLAPRTKNPFDLDLDHDAAMDAPGSAPSSLLGQHTNPFDIHIQQPDEVEEEDDDKKAAMLVGRHDSFTAQPSRFMPYFVADVPEEEGGGGSGRDAGSDNSNSNSSSPSASTASDHQTQQEAAVKVEEAPAAMASTWDGKGNGTVVAVDVELISDSSDDDMSLQADDATGGSLNNAHDPSDEDEEDSFEVESITQQVAAAKQQLQPVSPPSEQGHRDEEDKEVASIVSGRNEWVPLTTLVSVEEKEKGERGLTENREHHILGAVPAIDASAGARVGAAGAVVAAAPTPPATDVASGPPPVTAAAPTPRPTTVAPPTPPATDAAAGPPPVAAAPPPPATDVASGPPPVAAAPPPRPTTVAAPPPPATDVASGPPQPAAAAPPRPTAAVASAPPSGKLSSKSKVASKKIDPKKAVFGFFRK

SEQ ID NO: 41998 - protein, 706 aa, Zea mays
  Coding DNA Sequence Number=SeqID_219
  Gene Ontology: Mol. function=binding; Cellular component =intracellular; Biological process=protein amino acid phosphorylation
  Homolog annotation: Hit_ID=Q1S1V5; Match level="QueryCoverage=88%, HitCoverage=82%, E-value=1e-126, Identity=36%"; Hit description =Tetratricopeptide-like helical
  Pfam annotation: Domain name=PPR; Domain location=120-153; Score =14.1; E_value=0.16; Accession=PF01535.11; Description=PPR repeat
  Pfam annotation: Domain name=PPR; Domain location=19-53; Score=4.3; E_ value=2.3; Accession=PF01535.11; Description=PPR repeat
  Pfam annotation: Domain name=PPR; Domain location=223-257; Score =30.2; E_value=7.2e-06; Accession=PF01535.11; Description=PPR repeat
  Pfam annotation: Domain name=PPR; Domain location=258-292; Score=4.3; E_value=2.3; Accession=PF01535.11; Description=PPR repeat
  Pfam annotation: Domain name=PPR; Domain location=325-359; Score =37.7; E_value=4.1e-08; Accession=PF01535.11; Description=PPR repeat
  Pfam annotation: Domain name=PPR; Domain location=428-462; Score =14.9; E_value=0.13; Accession=PF01535.11; Description=PPR repeat
  Pfam annotation: Domain name=PPR; Domain location=529-563; Score =33.6; E_value=6.7e-07; Accession=PF01535.11; Description=PPR repeat
  Pfam annotation: Domain name=PPR; Domain location=564-598; Score =12.5; E_value=0.25; Accession=PF01535.11; Description=PPR repeat
  Pfam module annotation: Pfam domain module=PPR::PPR::PPR::PPR::PPR::PP R::PPR::PPR; Domain location=120-153::19-53::223-257::258-292::325 -359::428-462::529-563::564-598
  Subcellular localization annotation: CTP_CleavageSite=46; ConfidenceScore=5.05e-01
MPWQPSPLFAVFRQQRLASSWAAAIAGHARCGRHAAALTVFRRVLRAHPAVAASDQFAYAALLRCRDRRLAYQIHAQACRRGLTASNPVLACSLLIFYADCEEWNGATRVFSEMPCPDTVSYTAMISALLRAGDCHGALALYPCMLPLCAPTQHTFSKLLAPCASMRLHRHGSQLHAQLLRWGCWGPHLGLVLKTALVHMYAACGAMVSARAVLHATPETDVVLWTAIITAYTRRGQLHRALLAFRDMERSAVLPNAFTYAALIAACSADHSLHIGQQLHGRLFKSGLEHDTSACNALLDLYSKSSARSLDLLLAFHAADMPNVVTWTSFIAGLMRHGREQEALAAFARMRATGVKPNSFTLSTLLKGCTSAHACLHAAKIHAYVLKTSSESLDAAAGNSFVDVYARSARMDDAWKVATTMSFVRDRFTYTSLAKGLNQMGLHHRALGMILHMFHEEVSIDGFSLACFLSAAATLASIESGKQLHCCAVKLGLSGQVSLSNSLINMYSRCKSLEDAKSVFQSIREPSVVSWNAIIFGMAFNGSYTEALSVFEDMILAGAQPDGVTFTVVLSACSHGGLVDIGIKHFNSMANMFDVPPQKSHYTLFLDMLGRSGRFTEVAHTIEAMPVQPDLSIYRTLLVYCKFHNEPVVGEYIAKKALELDPSDSVSRNTLSGIRRAPRIQDHDEQIYLWDEEGCRHPSSVLPINC

SEQ ID NO: 41999 - protein, 86 aa, Zea mays
  Coding DNA Sequence Number=SeqID_220
MARFEVVSSGNTNSTFVYDEGVPIAGGVPSVGVYVLHVVGIVGEPGADVAPLMCPSEPNTGTTSLVPDIDVMSSVPSFSDSTVSVP

SEQ ID NO: 42000 - protein, 375 aa, Zea mays
  Coding DNA Sequence Number=SeqID_221
  Gene Ontology: Mol. function=binding
  Homolog annotation: Hit_ID=Q10A88; Match level="QueryCoverage=23%, HitCoverage=22%, E-value=8e-37, Identity=78%"; Hit description =Rhodanese-like domain containing protein, expressed
MELAATRVGGDNCRPEHDVGFGSGVEHGACGDHGAASGVHVDERGLEDQAEVGAPAAPAEELRVELAAVAVQAHGGAGREQLGEGVLGGCAKWEHARVERERPVAVPGAEEGGYHGGVGHGVWARHFAEHPGGAVPLLAVGIEDEEGASEDGVGGGQATTARLGMYLVREAAVAAPEQGGIGELVGGSDGGVGSENAAEDEPEFVPLQEEEEEEEDARFVVVTFYKFVPLFDPHAEVARHLNFLQGRDIHGRIYLNEKGINAQYSGPHKDAVAYADWVKKHHQFSDMLVQTSPAVTGHAFPRLKLRYKPSLVQEKFLALCFKIQSRSLYVLVTSLQIQKLIHGDDLPQFCPQSPGPSHVPTFLLMMNYLTAFCQN

SEQ ID NO: 42001 - protein, 302 aa, Zea mays
  Coding DNA Sequence Number=SeqID_222
  Gene Ontology: Mol. function=zinc ion binding; Cellular component =nucleus; Biological process=nucleotide-excision repair
  Homolog annotation: Hit_ID=Q10A88; Match level="QueryCoverage=67%, HitCoverage=62%, E-value=2e-84, Identity=63%"; Hit description =Rhodanese-like domain containing protein, expressed
  Pfam annotation: Domain name=Rhodanese; Domain location=100-203; Score=40.9; E_value=4.3e-09; Accession=PF00581.10; Description =Rhodanese-like domain
MAKAAQGGNVVEVESHALGGEDDLRDIGVVQGVSYTRLGKKACATSWGMSRDGGEAATVRGLGKTAGLEGGSLHLPLLDPNMRATPLTPSEWKERLEARTCLDVSSGETSGRGLLLLDVRNDYEWDVGHFEGAQRPNVDCFRSTSFGLSGETDPLNGVDKERTDILMYCTGGIRCDVYSTILRKKGFRNLYTLEGGVSNYLKVEGPAGWVGNLFVFDGRLSLPPATFNEEEDEEEQQENKRCCGWCAEELCGCCCSDCKVAPRLRPLLPGHQRYLKWHVYRDGRTDDENKLYGFVDDDSSGL

SEQ ID NO: 42002 - protein, 806 aa, Zea mays
  Coding DNA Sequence Number=SeqID_223
  Homolog annotation: Hit_ID=Q10A91; Match level="QueryCoverage=93%, HitCoverage=61%, E-value=0.0, Identity=58%"; Hit description =Expressed protein
  Pfam annotation: Domain name=DUF733; Domain location=276-368; Score= -20.6; E_value=0.068; Accession=PF05306.2; Description=Protein of unknown function (DUF733)
MVFESADEYSKNGMSYGQDGDQGSWNVFQSFLLRADEKRDNDADLFASEKKAPPARMKVSTSVDVDSILLVEQNSAGANEHNTTGFSMENERIRPQQMLSGDELMMYGEGEGMSFGCDDIKEIEAGGVRYRRGTSDDFMIYGQEKSMDRGSSLDPLAEAQYKSPTLVDKNVHSLADESFMIPLRSTSEDNHEPECRTAIDIDVELPSTVQKISDAKAGSQLFYEPAELMPERGCEDVSFGYDPAMDYNSQIQSQSATMVEDAHMEDALLSTVDEIKKPEKDKKLRSSQESLDKRRKDASARRLSSSKGPLTDAQKRAQNLRIYKADLQKAKKEQEEEQIKRLERLKLERQKRIAARSSTSNAPTPQQPRVKPSPKVSPSTYKSSKLSDTELASSSPLRKFPIKTTPGTDPEKTAKSSKLNDNTNAVSKPTLTDMKERSGRTESSNERLRKLAEPKTNSSTGHTLNSKSASVDRPRRKSMPQDSQTKKISAIMQLDQSKSATLPELKVKYSQAPAVVKNAVASRERKEVSAGAKSLRTTETASVKETNGNISRMNSSDDNVVVEKTVVMLEDEAVILHSGRNAAKETCSDDRTEKPSPESEYIAIRAPLSPVILPEAERSDDLGSSYEVVTECLKDEPEEPTLGAVEKPYQAPFARVTSLENASDNSPLPESLAHANSIKARVPEPVYTVSVEGHVVSEKPRSKEPKGLRKLLKFGRKSHAEGAMDSSVDEASAGDGSMLKNLISQDDSGASSSKGCVHNLSLESISNNHDLVVVVECSLCLFTVSSASRSFSLLSPFRSKHKVIVL

SEQ ID NO: 42003 - protein, 54 aa, Zea mays
  Coding DNA Sequence Number=SeqID_224
  Homolog annotation: Hit_ID=Q7XI09; Match level="QueryCoverage=87%, HitCoverage=5%, E-value=3e-15, Identity=79%"; Hit description=COP1 -interacting protein 7 (CIP7)-like protein
MSARSEFPPFNPSGIMFMGDNMKQTMESMSVSNGDANGEDASKAAHNSLFLETG

SEQ ID NO: 42004 - protein, 59 aa, Zea mays
  Coding DNA Sequence Number=SeqID_225
MEGEDVEHGVEPGSWALGRRAECEHEEEGGAGEGRATSMEREAGTGKGETGGHERWLMN

SEQ ID NO: 42005 - protein, 318 aa, Zea mays
  Coding DNA Sequence Number=SeqID_226
  Homolog annotation: Hit_ID=Q10A91; Match level="QueryCoverage=63%, HitCoverage=16%, E-value=2e-81, Identity=76%"; Hit description =Expressed protein
MKVCILYNALANAIFYDSCRCDLVVVANGRKEKIASGLLNPFVAHLKVAQEQIAKGGYSITLEPDPEIDAPWFTRGTLDRFVRFVSTPEVLERVTTIESEILQIEDGIAVQGSDSLGLRSVEYYNGKLVDCMEGSKASYNPDADRALVPYKAGTQPIPPLQNHDATQEENSKDQLLRVLETRKTVLRKEQAMAFARAVAAGFDIDNLVYLITFAECFGASRLMGRGEMLTGSTSRESKSKGGEEPLRGNILIENNMTRDDDAVDEKVKASVSLVIRGVIEEETSSGTRHKFVGGSGRCVGIASTPDDAKVLVGGCQRG

SEQ ID NO: 42006 - protein, 264 aa, Zea mays
  Coding DNA Sequence Number=SeqID_227
MSFTTASWVQREQGLDDGHVALLRVSGAMQGAQVCVLARASGWALGASALAARRPAGWHARLGSSACRGEGREKKRQHVSTGMGGGLNEQGTWQRDERRRAGFDGQGTTRLLVSVRAELRLGDTNGEYELRRVSTDGERRTAADGPAMSFTTASWVKREQGLDDGHVALLRVPGAMQGARVCVLARASGWALGAGALAARRPAGWHARLGSSACRGEGREKKRRHVSTGMGGGLNEQGTWRRLKISFPDEWAPRGIHTKMKHAQ

SEQ ID NO: 42007 - protein, 68 aa, Zea mays
  Coding DNA Sequence Number=SeqID_228
MTEERQPPWGRAPPTAARRRQHGCSPSGGSEGTGKGDILKRILLGEGNGPPSPPTHQGFEGWPHGRVR

SEQ ID NO: 42008 - protein, 104 aa, Zea mays
  Coding DNA Sequence Number=SeqID_229
MQISASKGTKAEFLVYSNKMSHEAPSIYDQPPEYIPEASCGMSTVDMQEQLAKFMKDRFSILSKRKVIAYAKQRPDEFNRMTLSSKFKCLSSHLIGTPPSIPGP

SEQ ID NO: 42009 - protein, 133 aa, Zea mays
  Coding DNA Sequence Number=SeqID_230
MASGEARLGMASGRCSRGWTLASRGAGASAVGGDAAEARVGDVAGSLGRIVWPLEARVVSNWKKAALDESPSDDGLPNKQTDKSKKSVRVNFLPRKKTGKPMSFWAAKLALTSSYSYQPKLKVSSKPAYGANH

SEQ ID NO: 42010 - protein, 587 aa, Zea mays
  Coding DNA Sequence Number=SeqID_231
  Gene Ontology: Mol. function=nutrient reservoir activity
  Homolog annotation: Hit_ID=P15590; Match level="QueryCoverage=58%, HitCoverage=70%, E-value=1e-125, Identity=83%"; Hit description =Globulin-1 S allele precursor
  Pfam annotation: Domain name=Cupin_1; Domain location=187-314; Score =80.9; E_value=4e-21; Accession=PF00190.13; Description=Cupin
  Pfam annotation: Domain name=Cupin_1; Domain location=372-505; Score =45.3; E_value=2e-10; Accession=PF00190.13; Description=Cupin
  Pfam annotation: Domain name=Cupin_2; Domain location=218-297; Score =7.5; E_value=0.048; Accession=PF07883.2; Description=Cupin domain
  Pfam module annotation: Pfam domain module=Cupin_1::Cupin_1::Cupin_2; Domain location=187-314::372-505::218-297
MGMITAVTGGGQADADAGPVVSAFPNTPSHNDDAFESLWNVPSHSNPQEDDVSDWELGLVGSSSSPVIRVRTSASSPFPPDTTPPLPLLGSDAVGSRRRALRSSLHLIPFPCSPSHDVWRSEDRPWHQRPRCLEQCREEREKRQERSRHEADDRSGEGSSEDEREHEQEKEEKQKDRRPYVFDRRSFRRVVRSEQGSLRVLRPFDEVSRLLRGIRDYRVAVLEANPRSFVVPSHTNVHCICYVAEGEGVVTTIENGERRSYTIKQGHIFVASAGAVTYLANTDGQKKLVIAKILHTISVPGEFQFFFGPGGRNPESFLSSFSKSIQRAAYKDKGIIVRATEEQTHELRRHASEGGHGPHWPLPSFGESRGPYSLLDQRPSIANQHGQLYEADARSFHDLAEYDVSVSFANITTGSMSAPLFNTRSFKIAYVPNGKGYAEIVCPHRQSQGGESERERDKGRRSEEESSEEQEEAGNEKVFLAGADNVLQKLDRVAKALSFAAKAEEVDEVLGSRHEKGFLPGPEESGGHEEREQEEEEREERHGGRGVRERHRREEREKEEEEREGRHGRGRREEVVETLMRMVTARM

SEQ ID NO: 42011 - protein, 114 aa, Zea mays
  Coding DNA Sequence Number=SeqID_232
MAPRYVLRWHKRTSWRRRGTELGAMNLGAELRSVQKTCLAQLVKYKALKLVVVGSSPTDQNAKNSGTHATKPQTPGQAESLACAQPGSNKGAVIPWTRLDFNWATKIEIRILRI

SEQ ID NO: 42012 - protein, 360 aa, Zea mays
  Coding DNA Sequence Number=SeqID_233
  Gene Ontology: Mol. function=hydrolase activity; Cellular component =cellulose and pectin-containing cell wall; Biological process =aromatic compound metabolic process
  Homolog annotation: Hit_ID=Q6ESF3; Match level="QueryCoverage=83%, HitCoverage=84%, E-value=1e-115, Identity=62%"; Hit description =Hydrolase, alpha/beta fold protein-like
  Pfam annotation: Domain name=Abhydrolase_1; Domain location=92-340; Score=29.1; E_value=1.5e-05; Accession=PF00561.10; Description =alphabeta hydrolase fold
  Subcellular localization annotation: CTP_CleavageSite=64; ConfidenceScore=5.10e-01
MAVSGEKPPPPPPPATASGGTARKLILALLTCLSSALLYRQIQPLPPKIPGTPGGPPVTATRTRLSDGRYWMCFAELVKLVWVQELAQELGVYMLSFDRPGYAESDPHPARTEESIALDIAELADNLQLGRKFYLAGFSMGGEIMWSCLKYIPHRLSGVAILGPVGNYWWPGLPSNVSRDAWYQQLPRDQWAVWVAHHLPWLTYWWNTQKLFPASSVIAYNPALLSQEDEMLMAKFGYRAYMPQIRQQGEHECLHRDMMVGFGKWSWSPLQLENPFADADADDGQGAGKVHLWHGAEDLIVPVSLSRYISQKLPWVVYHELPKSGHLFPIAEGMADIIVKSLLLGDDHLSSSASQPPHSP

SEQ ID NO: 42013 - protein, 177 aa, Zea mays
  Coding DNA Sequence Number=SeqID_234
MASSFSDDVEALPEAGEEVDQQAKGACAVTEENEAALQEQHDDDKAPVPDEHKETMSSAPEQATEAPAPEDQHGDEKGQVVVEPKAAADDQESTRERLKRHRREMAGRVWVPEMWGQEKLLKDWVDYAVFDRPLVATGLLTARRALIAECCTRRPDRAAAASSSTSSNPLRVRNGCS

SEQ ID NO: 42014 - protein, 349 aa, Zea mays
  Coding DNA Sequence Number=SeqID_235
MAELGARRSWETRRRRPSELETVRALGHRQGLAVLDTRKSARRKKKRREMGMGKADEQRREGWTWHERGANTRELSAQERQARRARCAEEGEEGDGRAEHAAKSELAERMAGSWGIIVARAGTGYGKHRDTDARGQQESSRELDCAVTRERLTGRARSRGREGDALEKTGGRRRSCTAGIELRGARASRERRVEGDAHAWIRSRPRRVGERAKGCSRLEADDHGSRVPRDHYGRRAEKLARAGREREGAVMVELGMRRPWETRRRRPSELETGRALDHGQGLAALDTRKSARRKKKREMGMGVADEQRGEGGVWHGRGANTRELSVQERQVRRARYAEEGEEGDGRAVC

SEQ ID NO: 42015 - protein, 223 aa, Zea mays
  Coding DNA Sequence Number=SeqID_236
MRASRAGWTPGITSELKKDSARELDACRETSRCEVTAKDDGARATQGKAPAMCAASANRWSNIGHPWRSTGCQTKKHAVKSELAERMAGRWGIIAARVGTGHDEHRDTAVRGQLESSRETARRPGSDSPDEQGAEAGRETRWRRREGAEGVAQQGSSYAERKRAERDAHAWYGSIRARAAQRPTEKSRGKQDVQGRARRSEPVRERTEGERTELSAGGMVYWI

SEQ ID NO: 42016 - protein, 56 aa, Zea mays
  Coding DNA Sequence Number=SeqID_237
MARVACTLHGGKRLDCGVSVLSIKWPEDGLSFTTNDRIITTSDIGRTLRSILSRIP

SEQ ID NO: 42017 - protein, 122 aa, Zea mays
  Coding DNA Sequence Number=SeqID_238
  Subcellular localization annotation: CTP_CleavageSite=55; ConfidenceScore=5.63e-01
MNPAALAWRHFSPSNLPATSIQSSKVPTAPEAAPAMANRRRAHSRSLGLAAWTLMASQVVVSCDRWKERSTEPAPRLGLALHRSPPLPPSTVRISPHLHVNGAVTLAVGVVLRISGEGSGIG

SEQ ID NO: 42018 - protein, 122 aa, Zea mays
  Coding DNA Sequence Number=SeqID_239
  Subcellular localization annotation: CTP_CleavageSite=55; ConfidenceScore=5.72e-01
MNPAALAWRHFSSSNLPATSIWPSKVPTTPEAAPAMANRRRAHSRSSGLAARTLMASQVVVSRDRWKERSTEPAPRLGPALHRRPPLPPSTVRISTLLQINGAVTLAVGVVLRIPGEGSGIG

SEQ ID NO: 42019 - protein, 88 aa, Zea mays
  Coding DNA Sequence Number=SeqID_240
  Gene Ontology: Mol. function=protein kinase activity; Biological process=protein amino acid phosphorylation
  Homolog annotation: Hit_ID=Q84TC6; Match level="QueryCoverage=46%, HitCoverage=12%, E-value=1e-14, Identity=95%"; Hit description =Serine/threonine-protein kinase SAPK2
MERYEVIKDIGSGNFGVAKLVRDVRTKELFAVKFIERGMKVRPAFESVLPLPYGIPSRVEKVRSWSAFDRLMRIMAAGSRDGMNAALR

SEQ ID NO: 42020 - protein, 159 aa, Zea mays
  Coding DNA Sequence Number=SeqID_241
MNGRIEAQRRGNGCREVARFGRCARSVSRCSAPGLRKVGSGAWCRGLVGAGGSGARDLRGLRGGSSTGARPALRLGQGGRGVLGAGVTQCKEKTGDKQEQELKPTNKISNTYINKTNKKAATPYLIKKKKNGKVVAIKANKQADKGKRAKFIWVSKEII

SEQ ID NO: 42021 - protein, 105 aa, Zea mays
  Coding DNA Sequence Number=SeqID_242
MGRGHRVAGRVAAEAWTHRGAGASHREARARKATGDAGAWERGHQATGARARGGVGAGAAGVGAPTGSRGHATGRKKGSLKNLHWLLYIGQVLLDLQAFHWQLLF

SEQ ID NO: 42022 - protein, 120 aa, Zea mays
  Coding DNA Sequence Number=SeqID_243
MAKLLVLYTASYCHYDFLISPHRAAVTLPLRFPLLAAVDHPLLCCHVLGALPRSVRRRLGRLSAAAIDRRAPAGNRGLALRIARKGSLASSAAGELCGAAASTLGMGTMSLGRWMASGRR

SEQ ID NO: 42023 - protein, 96 aa, Zea mays
  Coding DNA Sequence Number=SeqID_244
MARIRCTARKSVIPIFPSCLAEHPLRRMVPAGGVWEAAYPAPQPEMPPAPPLGIPAAGGDPDGDGDDDDAGGSSSHGTELLEEQEQEGWIACHTRF

SEQ ID NO: 42024 - protein, 116 aa, Zea mays
  Coding DNA Sequence Number=SeqID_245
  Subcellular localization annotation: CTP_CleavageSite=63; ConfidenceScore=5.74e-01
MAAVPPQSSSSVPMFPSVSRARSPSPLLCVCASLFGCRHAEPGFQRPFMLWFSLFASMCKRLRARIPWARFAFARHRLRVEFSFAELLGLSPIGVESSSCGVWREDTEGKVVAGYG

SEQ ID NO: 42025 - protein, 238 aa, Zea mays
  Coding DNA Sequence Number=SeqID_246
MELGAEGGSPRPRRWTVGHHGLKKREGTGREQKGEDEAEGLHSGQANAGRASVGASAGHRKDAGQDELEGTTAEPPGRGCGEPTRLLVGGGRLGTHDRAGRRAACLRETSWRGAAMAREMGGTRPALGKEMREAEEQGRGIRGRAEPAGALARGLSDAARAGREMARPWIKARATRAARRLELTAMGRAPASWSRREEGLACGELEEDKARKEYQGGARGWKRGWAQGGLEGAQHATQ

SEQ ID NO: 42026 - protein, 61 aa, Zea mays
  Coding DNA Sequence Number=SeqID_247
MGVSTTPSRFLGPVGVWGAGSCSWYLSVSMGWMLGRFTVGEEESLRFLSINPQSYCWLSES

SEQ ID NO: 42027 - protein, 216 aa, Zea mays
  Coding DNA Sequence Number=SeqID_248
  Subcellular localization annotation: CTP_CleavageSite=59; ConfidenceScore=5.32e-01
MDDGKGRGGRKGARPGFQRDTSKTARSKQKLARRAERAESRPGARRRGKSSRGAPSWSSAALEKERARQPWKQERAEKKPAARGWRSRVRAGTWARGTEGPSRTRRAEKPRRREEEIRAGRDELEKDSGRGRVRQGGVGGGGVHGKGLQERVGKLDEGAARRRSQGGAEERLDAMAWRERRRGGGDKCKNRPGDEHIAWEKIKGHGRPGDRNVGFF

SEQ ID NO: 42028 - protein, 440 aa, Zea mays
  Coding DNA Sequence Number=SeqID_249
  Gene Ontology: Mol. function=protein-tyrosine kinase activity; Cellular component=membrane; Biological process=protein amino acid phosphorylation
  Homolog annotation: Hit_ID=Q10KZ7; Match level="QueryCoverage=95%, HitCoverage=95%, E-value=1e-175, Identity=73%"; Hit description =Protein kinase APK1A, chloroplast, putative, expressed
  Pfam annotation: Domain name=Pkinase; Domain location=100-385; Score =112.3; E_value=1.4e-30; Accession=PF00069.15; Description=Protein kinase domain
  Pfam annotation: Domain name=Pkinase_Tyr; Domain location=100-385; Score=128.4; E_value=2.1e-35; Accession=PF07714.7; Description =Protein tyrosine kinase
  Pfam module annotation: Pfam domain module=Pkinase::Pkinase_Tyr; Domain location=100-385::100-385
  Subcellular localization annotation: CTP_CleavageSite=63; ConfidenceScore=5.01e-01
MPKPWRPVLASATKCCAAEDAAVAPDGLARCRPQQSELSRRLASFRRLSSLANSPVSATATTVADKDGGSVKQAACGEMAGPLQLHSFGLGELRGVTHDFSSNFLLGEGGFGAVYKGFVDAGMRPGLDAQPVAVKQLNAAGFQGHREWLAEVILLGQFRHPHLVRLLGYCCEDEERLLVYEFMPRGSLENHLFRSRISTTTLPWGTRLKVAIGAAKGLAFLHAANTPVIYRDFKASNILLDSDFTAKLSDFGLAKMGPEGEDTHVTTRVMGTHGYAAPEYVQTGHLNVKSDVYSFGVVLLELLTGRRAMEHVRARSAHAEQQVKLVDWTRPYLSGGSRRLRCIVDQRLAGHYSVKGARAVAQLAVQCTAQQPRDRPRMAAVVEALEKLQGLKDMAVAVGLWPAGAATATGAGNRSAKVVRAEVKGAGAASRRRSSSSKLA

SEQ ID NO: 42029 - protein, 60 aa, Zea mays
  Coding DNA Sequence Number=SeqID_250
MGWALAASALLLPVGGGAGGLLGGGCPSSGGFVLVNLARDTGIFGGQKPPKIRPLPNQKG

SEQ ID NO: 42030 - protein, 151 aa, Zea mays
  Coding DNA Sequence Number=SeqID_251
  Subcellular localization annotation: CTP_CleavageSite=54; ConfidenceScore=5.34e-01
MVQALSGRVTSSRHGRSGLRRRGRLWRVHRWRTAPAKRDSPSSYLSSGARPWACCERARGAATSPGSRRGASAPGMGPAQTDRGRGCDGKKAVNGDGGQGRARDREDARAHVGWAGSRVAPEAEKTAAPTRSMRMRSWRPGPHPPQTSRVG

SEQ ID NO: 42031 - protein, 217 aa, Zea mays
  Coding DNA Sequence Number=SeqID_252
  Homolog annotation: Hit_ID=Q10KZ6; Match level="QueryCoverage=77%, HitCoverage=33%, E-value=1e-82, Identity=87%"; Hit description =Proline-rich family protein, putative, expressed
MTSADAGYRLLGVHTGLYSSRNIRALTTLRLLRDINPPAPIFGFYSSLIVCGATRPVYALEPHDVGRYLQAEIDVGGEIAVAKTAGPVDPDAGLVDYVETLVRKPETEFNVVVLQSNGVDQPKESVHVLNVGRLRMRLTKGKSVVAKEFYSSSMQLCGVRGGGEAASQAMFWRPRNDLSLVLAFESTRERNAAIMLARRFAVDCNIILAGPGDKTPW

SEQ ID NO: 42032 - protein, 231 aa, Zea mays
  Coding DNA Sequence Number=SeqID_253
  Homolog annotation: Hit_ID=Q10KZ6; Match level="QueryCoverage=87%, HitCoverage=55%, E-value=1e-73, Identity=58%"; Hit description =Proline-rich family protein, putative, expressed
MTKAATIYGSKTQSDALRPGPLRPANIIRNKFPTYKNGSNGIVIKLADGPEIPPLKEIVAKETADLLDRRQRLSVRELAMKFEKGLSTATLLSNEVEILTVQLSKREAELVQQKEEVTKLAKSLKQASEDAKRIVEEERANAHTEIETAKGAVQRVQQAVQEHEKMSQNTGKQKQAMDLENEIRILRNTFAEKSKDCVSLLKEQHNRPPPHTPLPLLPSLPLDRLRPQLRH

SEQ ID NO: 42033 - protein, 512 aa, Zea mays
  Coding DNA Sequence Number=SeqID_254
  Gene Ontology: Mol. function=nucleoside-triphosphatase activity; Cellular component=membrane; Biological process=cell division
  Homolog annotation: Hit_ID=Q84SZ7; Match level="QueryCoverage=89%, HitCoverage=87%, E-value=1e-124, Identity=53%"; Hit description =Putative AAA-type ATPase
  Pfam annotation: Domain name=AAA; Domain location=260-455; Score =53.7; E_value=6.2e-13; Accession=PF00004.19; Description=ATPase family associated with various cellular activities (AAA)
  Pfam annotation: Domain name=AAA_5; Domain location=260-413; Score= -22.0; E_value=0.085; Accession=PF07728.4; Description=ATPase family associated with various cel
  Pfam module annotation: Pfam domain module=AAA::AAA_5; Domain location=260-455::260-413
MDVVSWFSQVSVVVGVLAVCWTVVWQNLQHIHLQQFFARSFNRRARRLAAVVDPYLSVTFEEYEGGRIKSSDAFDEIKSYLTTASTRDVRHLRAESGGGGRRDAAATDRDKLVFSMAKGEEVADTFRGAMVWWSAAGVPPPSDTVPWSRASRAERRFFRLEFHEGHRDLVLNEYLPYVRRQGRAVMAKNRQRRLYTNILREGFDDGFYRDVWTHVPFEHPKTFDKLAMDPAKKKDVIDDLDMFKQSKDYYNRVGKPWKRGYLLYGPPGTGKSTMVAAMANHLGYDVYDFELTSVKTNTDLRKLLIETKSKSIMVFEDIDCSLQVTGKRKSKEEEEGSKDGNGDDPYAAKQKEEEEDAKSSSKVTLSGLLNFIDGIWSACGEERLVVFTTNHVDKLDPALIRTGRMDKKIEMSYCDFESFKFLARMHLRDDVVEAHGAQCDRVRALLQEVNMVPVDVGEHLTPRSPDEFEDAGPCLARLVTALEKAKKEAAILPKPQAQPDVSGIVVDDDSNN

SEQ ID NO: 42034 - protein, 143 aa, Zea mays
  Coding DNA Sequence Number=SeqID_255
  Subcellular localization annotation: CTP_CleavageSite=27; ConfidenceScore=5.46e-01
MMVSASVAATSFSILLLFSLPSCISLRATQFSVENMGAGASSPYSSDTSPDTDQRSGYCTSTRMFHSMRTPSFSPSSDVAFALFFLPNLLPPPTVTAVSRPTLIDTDAHVFVVSIFSNEHVCSPLPFMLYESLELGEARDEGP

SEQ ID NO: 42035 - protein, 202 aa, Zea mays
  Coding DNA Sequence Number=SeqID_256
  Gene Ontology: Mol. function=RNA-directed DNA polymerase activity; Biological process=RNA-dependent DNA replication
  Homolog annotation: Hit_ID=UPI00004C1733; Match level="QueryCoverage =33%, HitCoverage=5%, E-value=6e-32, Identity=94%"; Hit description =UPI00004C1733 related cluster
GTRAIIHRTVRCTPDSVRCSSEELPQELASLGKSERLLRYNSPDMSGVHRTVRCNSGATAISAPTATCDALNARAARVEVRRAHTGAPDTQQNAFRQGFYCPTAVADATRIVRTCEGCQFYARQTHLPAQALQTKPITWLFAVWGLDPVGPLQKAPGGYTHHWEGLFVIAKVLRPGTNKLADSQGEVYTNTWNIQQLRRFYP

SEQ ID NO: 42036 - protein, 143 aa, Zea mays
  Coding DNA Sequence Number=SeqID_257
MSMELLIKSYPTKEKTLKGMLVVRESRAILSIVKPFVKTGFQGRKRKRKTCNSTGPILAQTAQQHRESGRAHARGGNFAERPSGFSLTGNGFLHCYSESLTVCTKALEVLFLYRLKSTTASSAGEASPILWDSNVIQLLVPGG

SEQ ID NO: 42037 - protein, 63 aa, Zea mays
  Coding DNA Sequence Number=SeqID_258
MAGSREMDRGKWIWPKSGRRIISITMVYKFGYYICKTESLIIEKPYLDSLTTSIPLRVFSLVG

SEQ ID NO: 42038 - protein, 286 aa, Zea mays
  Coding DNA Sequence Number=SeqID_259
  Gene Ontology: Mol. function=carboxyl- and carbamoyltransferase activity; Cellular component=ornithine carbamoyltransferase complex; Biological process=amino acid metabolic process
  Homolog annotation: Hit_ID=Q8SA97; Match level="QueryCoverage=99%, HitCoverage=24%, E-value=2e-30, Identity=51%"; Hit description =Ornithine carbamoyltransferase
MAPPVDVAGPRPRLGDVEAPPKPRSSLSSVAEVESEPLGRARRRPSAEARAESEPWGRAKRSSSSFGAEPKSEPWVGRSGVCRLLGLSPSPSPGSGRAEFIVFWDLARVRALGRAERIGAAQAALSFCQVGQWSGEVTVLYADGGYQLRIRSLEGTPNYGPRQCLMTNDVQRNFYRQPRWVEREGEREGGRARRPETGVREVGIPRPSCSSRAQVGVMMAPPVDVAGLRPRLGDVEAPPRPRSSLSSVAEAESEPLGRARRRPSAEARAESEPWGRAKRSSSSSGT

SEQ ID NO: 42039 - protein, 883 aa, Zea mays
  Coding DNA Sequence Number=SeqID_260
  Gene Ontology: Mol. function=binding; Cellular component =intracellular; Biological process=protein kinase C activation
  Homolog annotation: Hit_ID=Q1SV87; Match level="QueryCoverage=58%, HitCoverage=96%, E-value=3e-87, Identity=34%"; Hit description =Pentatricopeptide repeat
  Pfam annotation: Domain name=PPR; Domain location=157-191; Score=8.3; E_value=0.79; Accession=PF01535.11; Description=PPR repeat
  Pfam annotation: Domain name=PPR; Domain location=227-260; Score =16.1; E_value=0.091; Accession=PF01535.11; Description=PPR repeat
  Pfam annotation: Domain name=PPR; Domain location=289-323; Score =35.4; E_value=2e-07; Accession=PF01535.11; Description=PPR repeat
  Pfam annotation: Domain name=PPR; Domain location=390-424; Score =48.5; E_value=2.2e-11; Accession=PF01535.11; Description=PPR repeat
  Pfam annotation: Domain name=PPR; Domain location=425-458; Score =22.8; E_value=0.0012; Accession=PF01535.11; Description=PPR repeat
  Pfam annotation: Domain name=PPR; Domain location=461-495; Score =10.5; E_value=0.43; Accession=PF01535.11; Description=PPR repeat
  Pfam annotation: Domain name=zf-C2H2; Domain location=651-673; Score =26.5; E_value=9.1e-05; Accession=PF00096.16; Description=Zinc finger, C2H2 type
  Pfam annotation: Domain name=zf-C2H2; Domain location=675-697; Score =13.9; E_value=0.32; Accession=PF00096.16; Description=Zinc finger, C2H2 type
  Pfam annotation: Domain name=zf-C2H2; Domain location=705-730; Score =9.1; E_value=1.1; Accession=PF00096.16; Description=Zinc finger, C2H2 type
  Pfam annotation: Domain name=zf-C2H2; Domain location=733-754; Score =8.0; E_value=1.4; Accession=PF00096.16; Description=Zinc finger, C2H2 type
  Pfam annotation: Domain name=zf-C2H2; Domain location=763-788; Score =22.6; E_value=0.0014; Accession=PF00096.16; Description=Zinc finger, C2H2 type
  Pfam annotation: Domain name=zf-C2H2; Domain location=794-820; Score =16.8; E_value=0.076; Accession=PF00096.16; Description=Zinc finger, C2H2 type
  Pfam annotation: Domain name=zf-TRAF; Domain location=725-781; Score =5.4; E_value=0.027; Accession=PF02176.8; Description=TRAF-type zinc finger
  Pfam module annotation: Pfam domain module=PPR::PPR::PPR::PPR::PPR::PP R::zf-C2H2::zf-C2H2::zf-C2H2::zf-C2H2::zf-C2H2::zf-C2H2::zf-TRAF; Domain location=157-191::227-260::289-323::390-424::425-458::461
  Pfam module annotation: Domain location=675-697::705-730::733 -754::763-788::794-820::725-781
  Subcellular localization annotation: CTP_CleavageSite=12; ConfidenceScore=5.36e-01
MPPWGDQAAAPRGSTTRGSAQQPNAPMHGGTLELHPFLAPAFRRTTSLTTGRIVAAAVFPVISALIPGVNIQGIKERKPPDFVTSRRRYMNRSICHHLLAHCKKLRELQRIHALAVTHGLHPNHQSVSCKIFRCYADFGHVADARKLFDEIPHPDLIFFTSLMSLHLKLDHQREAISLFARVVAAGHHLDGFAVVGALSASSGAGDLVVGRAVHGLIFRLGLDHEVVVGNALIDMYSQCGEFESAVKVFDRMFLKDEVTWGSMLHGHIKCAGLDSALSFFDLVPVRSAVAWTTLITGHVQGRQPVRALELFGRMVLEGHRPTHVTIVGVLSACADIGALDLGSVIHGYGSKCNASSNIIVSNALMDMYAKSGRIEMSFSVFQEIQSKDFFTWTTMISCCTVQGDGRKALELFQDMLRAGIVPNSVTFVSVLSACSHAGLIEEGRELFNRMRQVYKIDPRLEHYGCMIDLLGRGGLLEEAEDLIADMNLVPDIVIWRSLLSACLVHGNNRLAEIAGKEIIKIEPGDDGVYVLLWNMYASSNKWREAQELRQQMLTLEIFKKPGCSWIELDGVVHEFLVEDKTHDDRREIYETLEYMTRQLKTHIRLSSWEQHVVRSKKCLIQAHMVAHHKDELDKSEIYNSDGEKIVHEQEHRCQECGRCFQKPAHLKQHMQSHSHEEDGCNKVFRYSSKLKKHEESHVKLDYVEVVCCEPGCMKMFRNVEYLRAHNQSCHQYVQCEICGEKHLKKNIKRHLQSHDKVPSDGRMKCTFDGCEHFFSNKSNLTKHVKACHDQLKPFKCGIVGCGKAFTYKHVRDNHETSGAHGDFEELDEQLRARPRGGRKRKALTVETLTRKRVTISGEASSLDDGVEYLRWLLSGGDDSIDCQ

SEQ ID NO: 42040 - protein, 56 aa, Zea mays
  Coding DNA Sequence Number=SeqID_261
MGEIVSPGAFAGTENFSPHRDEDGEQFPDGEFPVAISIYKYENENAAQTSSKRVKR

SEQ ID NO: 42041 - protein, 82 aa, Zea mays
  Coding DNA Sequence Number=SeqID_262
MDKASKATVPSTIGSLDIIESLDHLQFGPIGGGNGRWCVPQSTFTKIMGMLDPARDSFHGLPLSGLEDMPDSPSNGINQILA

SEQ ID NO: 42042 - protein, 71 aa, Zea mays
  Coding DNA Sequence Number=SeqID_263
MGRDNNSPVATAHWEWHSEEVKGGDDKIVLEDVWLHTFLRLVRDLYAPLDEVNYEEAPRDLKVLETFDEFI

SEQ ID NO: 42043 - protein, 205 aa, Zea mays
  Coding DNA Sequence Number=SeqID_264
MAVGEAICRWVHRTVRCVTQPLGFDRWSSDRWDHRTVRWCTGQGAESLNLAKTCTQIGGKVAQFETYTFTPRIGKTLGEVVEIVSCTKNKWGNWWDFWFYVALEDTEGVLELPSSILYSHYYIAFPRFRLKKGDKSEDTLRRTARTRSDHDLVEEIVLSPAFAIEMWGLSRVFELNGLRYGPYPEEGFADAGDERGKLKVMIRVV

SEQ ID NO: 42044 - protein, 159 aa, Zea mays
  Coding DNA Sequence Number=SeqID_265
  Subcellular localization annotation: CTP_CleavageSite=57; ConfidenceScore=5.35e-01
MAVKASRIPKAPPVLLLPWRRLVGPAGQCAARSCGRACRRRGTAGRWGDRTTGRGVRALAVAASQPVARRAGRDQSQTVQNEDPQGVKSRGGGFITPWPCCRPHTHPVSDSLKAQAQKPTSPFHEARPLVASSHSPQRLGAEEGGRGGAARAPSQQAVV

SEQ ID NO: 42045 - protein, 140 aa, Zea mays
  Coding DNA Sequence Number=SeqID_266
  Homolog annotation: Hit_ID=Q6QP51; Match level="QueryCoverage=96%, HitCoverage=57%, E-value=1e-13, Identity=47%"; Hit description =Putative growth-regulating factor 1
MMYPPCNVVGLSPRSGEAVTPLRSRLRPALGSGEAETVFQGRGGGRALGSGEAETVCRGRGGGRALGSGEAETVFRGRGGGRAPRSGEAELPMAHEAGLGCCQPHPGGWHSSRSRAGGAVFLLGQSVEGRSDCGHFGSAD

SEQ ID NO: 42046 - protein, 108 aa, Zea mays
  Coding DNA Sequence Number=SeqID_267
MYDLGPISEIPRPEHKQQAWTEEFGGGSDDVSAIGTVADGPEVVLVLVNRESIGNESTVATSKSMGAWNDAEREERDREPLVNNKPDRRGTRDATRLSEACCVHACYG

SEQ ID NO: 42047 - protein, 343 aa, Zea mays
  Coding DNA Sequence Number=SeqID_268
  Homolog annotation: Hit_ID=Q8RZ91; Match level="QueryCoverage=34%, HitCoverage=13%, E-value=1e-13, Identity=38%"; Hit description =Vacuolar protein sorting-associated protein VPS16-like
MHPTLFLKTECDKSGATPDSPVNYSGVAPRKPEAEQFRVDLTGAPDTVRKRFDPISLSISPHGDPVQYKYGETTKQVPQFDGVNFFSNSSMEFLHRVLDVPTSFVGIGSIFLITLLNDVHGHYDSHSKGSVQYGITGLRQWWLNVFSSGNSGMAVQSQFDNQRKAMNKLVGLQFRMVYDKRKENLVTNYYVQNMWPIVTIQSPYEVVFSVQQDKVIRLHELGVDRSAAFSTILISTFYDSIVWEYFGRAVSSMLKEQLVRDQQFMESDEECIGFNNDMRQFAIHFLCVLHYLISATMTSVKCCLRVLEQRNSDLQKFAVNLISFSHILFIVVGFHSLTSRCSQ

SEQ ID NO: 42048 - protein, 179 aa, Zea mays
  Coding DNA Sequence Number=SeqID_269
  Homolog annotation: Hit_ID=Q6QP51; Match level="QueryCoverage=45%, HitCoverage=30%, E-value=5e-23, Identity=76%"; Hit description =Putative growth-regulating factor 1
MEAEGTRDRERGYFERDPSPRRKRAPSPPTDQGFEGWPLGTVSTAAPEHSGFKLITDQGFEGWPLGRVRQPPQSTRAPRPLLIRGSKAGPSEGFDNCPRARRARDDSRVRLTTAKFSLRGNRKLRLARPWASDSGGGLRLARPQGSAPASASEGSLRLARPQGSPSTSASEGGLRLARP

SEQ ID NO: 42049 - protein, 153 aa, Zea mays
  Coding DNA Sequence Number=SeqID_270
  Subcellular localization annotation: CTP_CleavageSite=54; ConfidenceScore=5.31e-01
MPGAPALHRCAQLAPAWLSVAHAQRCCSWPPCARPLPASAWLPACSSSTLLPVRARRGPSTARPWLAWPWCLCVACPPARDFAQRDAQRPAMLVACPSTPSHPSTPPHVVMRMMVLVLTMVMVARLRHTARKSVIPFLPSRLAERPLRRPVTG

SEQ ID NO: 42050 - protein, 51 aa, Zea mays
  Coding DNA Sequence Number=SeqID_271
MAFIGAGVDASFIEQVTNRYYVSEMKFYYDVNPVVKQEHFLLNGIWSDYPG

SEQ ID NO: 42051 - protein, 262 aa, Zea mays
  Coding DNA Sequence Number=SeqID_272
  Homolog annotation: Hit_ID=Q6QP51; Match level="QueryCoverage=80%, HitCoverage=90%, E-value=2e-12, Identity=43%"; Hit description =Putative growth-regulating factor 1
MQAACNRTKGAHPFDFDASSMEAQAHTSWTGKGDTPKGILLREGNGPRAPLLIRGSKAGPSEGFNSSLRALGLRAHYWSEVRRPAPEKGSTAASDHSGSTPITDQGFVGWPPKGSTVASDAEQRMTLAAKSGLGRHRKLHLARPQGSDSGSAPEDDELRLARPQGSDSGSAPENDELRLARPQGLDSGSALEDDELRLAQPQCSDSASAPEDDGLRLARRPRARTRPRRTDSTPASEEPPSRPTQVSDQPRHRWSHHYPTPS

SEQ ID NO: 42052 - protein, 140 aa, Zea mays
  Coding DNA Sequence Number=SeqID_273
MKTMRSTSTDKIRVAQRKPLPSAPSSPASKLASWSHQPPAPPDPLLSHLDAPAEPGAIAAVEARWPGIPWWPVWPGAVRGVPAHVRCPQRTRSALGAARRGTRCPRRVPAHAQCPSAVKKKENGVEVDLWEFQDFDEFEN

SEQ ID NO: 42053 - protein, 53 aa, Zea mays
  Coding DNA Sequence Number=SeqID_274
MAAELSLPPEPYDLEADPFLNEALETIKIANEAIDEAVNKLLNEATEKVLKED

SEQ ID NO: 42054 - protein, 183 aa, Zea mays
  Coding DNA Sequence Number=SeqID_275
  Subcellular localization annotation: CTP_CleavageSite=35; ConfidenceScore=5.13e-01
MARSVNRAMLGLAPDLGTRPCWRTRARPTVDASPSAAAPAAPSLFPFPAELLPCIAVGFAAARSLPCCAEQHIVHAPPVRRYAESGRRALNHAMQQQCTPFSPCAVVLAHYLTKYTDERCVVDGAMVVPYVLAARPRLALAYSPSSSSSSAPRARPRQGQAAPSSTPKFFGETSLFRVPDFVK

SEQ ID NO: 42055 - protein, 295 aa, Zea mays
  Coding DNA Sequence Number=SeqID_276
SELEQLTPRLESELASALVALVAEVLFVGGDLGQSCREPHPRSSPPFPLRASAGHYPSSPGVSARNLQVQATNTFPMASLSISSPASSSMRTCRPPDLAPSRFRAICSFIDAMVRSVNRAMLGLAPDLGTRPCWRTRARPTVDASPSAAAPAAPSLFPFPAELLPCIAVGFAAARSLPCCAEQHIVHAPPVRRYAESGRRALNHAMQQQCTPFSLCAVVLAHYSTKYTDERCVVDGAMVVPYVLAARPRLALAYSPSSSSSSAPRARPRQGQAAPSSTPKFFGETSLFRVPDFVK

SEQ ID NO: 42056 - protein, 150 aa, Zea mays
  Coding DNA Sequence Number=SeqID_277
MEKTARERAPTWGRGCHSLAEGGSENVSHASYGGYKCGHSTAVVGVSGALYAKAAHPLQPGWRSLDSETLGFRADDTTEAAELKALTTFYGYHPLEMVMHPLGLFPTEKRDDPMWCNRVSHVKDVWAMHPDQVGRITVWCMSALYHLQAL

SEQ ID NO: 42057 - protein, 147 aa, Zea mays
  Coding DNA Sequence Number=SeqID_278
MAGPTGELASANPRSGARPSMALLTDLAMASMKEHMARNLDGARSGGLQDWPRSPPTKRTSATNATRAEASSDSSLGINCSSSDLGEEAHDHRGRRRLGCGRKGRWLRMGEEECLLACVRSWRPGNASALRNREERRLKGGCSRVIG

SEQ ID NO: 42058 - protein, 92 aa, Zea mays
  Coding DNA Sequence Number=SeqID_279
METIQQPFTIWDDKCVDSPKKIIGIIDEKKKDDDDEESEAKNRRQCPTAQVKMANREKMVCDKVVKAVERWTCGYSYSHDMRVLSWTPMMPF

SEQ ID NO: 42059 - protein, 62 aa, Zea mays
  Coding DNA Sequence Number=SeqID_280
MVPVVGVYKHTGRGEVPKSLEMIEGSLPYLYTKGSVRSKAESCIRKRDALTSDVTANHVKVA

SEQ ID NO: 42060 - protein, 555 aa, Zea mays
  Coding DNA Sequence Number=SeqID_281
  Gene Ontology: Mol. function=receptor activity; Cellular component =integral to membrane; Biological process=transport
  Homolog annotation: Hit_ID=Q53JM5; Match level="QueryCoverage=97%, HitCoverage=91%, E-value=1e-145, Identity=51%"; Hit description =Expressed protein
  Pfam annotation: Domain name=Ank; Domain location=13-45; Score=10.7; E_value=0.89; Accession=PF00023.20; Description=Ankyrin repeat
  Pfam annotation: Domain name=Ank; Domain location=162-194; Score =13.9; E_value=0.3; Accession=PF00023.20; Description=Ankyrin repeat
  Pfam annotation: Domain name=Ank; Domain location=235-267; Score =11.5; E_value=0.68; Accession=PF00023.20; Description=Ankyrin repeat
  Pfam annotation: Domain name=Ank; Domain location=268-304; Score =11.5; E_value=0.69; Accession=PF00023.20; Description=Ankyrin repeat
  Pfam annotation: Domain name=Ank; Domain location=305-338; Score =23.8; E_value=0.0006; Accession=PF00023.20; Description=Ankyrin repeat
  Pfam annotation: Domain name=Ank; Domain location=55-87; Score=14.1; E_value=0.29; Accession=PF00023.20; Description=Ankyrin repeat
  Pfam annotation: Domain name=Ank; Domain location=96-132; Score=7.1; E_value=2.9; Accession=PF00023.20; Description=Ankyrin repeat
  Pfam module annotation: Pfam domain module=Ank::Ank::Ank::Ank::Ank::An k::Ank; Domain location=13-45::162-194::235-267::268-304::305-338::55- 87::96-132
MWIYGSDDGTTSITNTCLHIAALCGHQNFCSEVLAQESRLHRPGPSSLLSTTNDDGETPLLVAVKSGRVSLALHLLDQHYSRHNLLVEHLLKQDTGKCNVLHHAIRNGYVDLALELIHRQPALSESCNARDESPMFIAVLKGFRSIYMELLRNERSEYGGARGYNALHAAVKYGNQDFVEQLVEQHPEKAKELARQADTQHDTPVQLAAHFNRDTILTLMLRGDRSLGYRVHTEHSTPLLYIAANRGHVAFARALLEHCPDAPYKNDRSRTCLHEAVEQDRTEFVRFILDDNSKLRKLVNMVDDVGDTALHLAVQKSNPRMVRALLRHPDIDLTVINNRVNTAIWNMYNDGDEVKTINWNKIYLLIRNADRRAKNDIYNFREEIRNKVNYATRKDAKSLIQTYTTNTSLVAILLATITFAAAFTLPGGYSSDAGSEGLPIMARKVAFQAFLIFDTSAMCASLAVAFICVIVRWMDFEFLLHYRSVTTKFMWFAYMATTLAFATGLYTVLEDRLPWLAIAICVLSVLLPILTMMVGGWPILKLRIQYGNSDFLDMV

SEQ ID NO: 42061 - protein, 358 aa, Zea mays
  Coding DNA Sequence Number=SeqID_282
  Gene Ontology: Mol. function=transferase activity, transferring groups other than amino-acyl groups; Cellular component=cellular _component; Biological process=biosynthetic process
  Homolog annotation: Hit_ID=Q2R3A5; Match level="QueryCoverage=60%, HitCoverage=54%, E-value=3e-56, Identity=52%"; Hit description =Chalcone and stilbene synthases, N-terminal domain containing protein
  Pfam annotation: Domain name=ACP_syn_III; Domain location=165-245; Score=13.0; E_value=5.7e-05; Accession=PF08545.1; Description=3 -Oxoacyl-[acyl-carrier-protein (ACP)
  Pfam annotation: Domain name=Chal_sti_synt_N; Domain location=6-231; Score=280.4; E_value=3.4e-81; Accession=PF00195.10; Description =Chalcone and stilbene synthases, N-te
  Pfam module annotation: Pfam domain module=ACP_syn_III::Chal_sti_synt_ N; Domain location=165-245::6-231
MTDYRLDDRLVAMAGEPQARDDVLTAGDDGWVGGWADVLYPLRKKGMKKNEFTMTHSSSRNQCHKSAIKKRYFHHTEELLLGHPAFIDRSMPSLDERQAIMATAVPELAAAAAADAIAEWGRPATEITHLVVTTYSGAHMPGVDWLVASLLGLRPTVRRTMLYMNGCSSGCAALRLAKDMAENNRGARVLVACAELTLMVFRAPHEAQVDTLITQSLFGDGAGAVVVGADPVSVEEPEFEMVSASQTMIPESKQVASGQLSEDGLRFHPSREIPSLRSWSSKMDALSTPSSQPGTTPAVLQYTDDTLILFKGATSAARCLKDTLDQFSLATGLHINYSKTIMVPVHLVFAGFIFLSQL

SEQ ID NO: 42062 - protein, 111 aa, Zea mays
  Coding DNA Sequence Number=SeqID_283
  Subcellular localization annotation: CTP_CleavageSite=26; ConfidenceScore=5.43e-01
MTKALVDLTTAITQMISRAPTPLPPPASTSPTSIPYGMPGRGPHLSIRVPPARLGRARASALYAYTGYAILDVSIVGWASGCCLRPGSTDVQAPYPSGNDGATPLGAMLQL

SEQ ID NO: 42063 - protein, 103 aa, Zea mays
  Coding DNA Sequence Number=SeqID_284
  Homolog annotation: Hit_ID=Q8RUA3; Match level="QueryCoverage=75%, HitCoverage=7%, E-value=1e-07, Identity=38%"; Hit description =Putative disease resistance protein
MADAGVTGVLAKLGELTEEEATTLLRVDAEIRALRQKLAYLQALVRGADRQRRGRASELLLLWLRETRVVAFAGGSAIHSGDGSSSQDYHFYTEQACSHEVVM

SEQ ID NO: 42064 - protein, 285 aa, Zea mays
  Coding DNA Sequence Number=SeqID_285
  Homolog annotation: Hit_ID=Q8S0N4; Match level="QueryCoverage=31%, HitCoverage=45%, E-value=4e-21, Identity=60%"; Hit description =Vesicle transport v-SNARE (Vesicle soluble NSF attachment protein receptor) protein-like
  Subcellular localization annotation: CTP_CleavageSite=49; ConfidenceScore=5.20e-01
MELQESNSSIPQRRTPISLLSRPETLSSGNRRPRPPISSPETLSLPSTPAVLEFSILIRSDSDAAGADEDEDATPSPPPRHCHQQQLVTRELFPAGAAALGRARLLPRRPTAATGAGSRNKSIASPSLCCRLLQGHDAHRPQHRGGGGRGGGGGAAFSRGGGGVTRQVGHRRSAMVVVGGQEPGGVRAPRARLFIASTRSSVSTTSFIEGQLRGSPARQPSKLSEIHSDVEEAESLAGLLAKLREYKSDLNNVKSELKRISAPNARQATREELLESGMADTLAVS

SEQ ID NO: 42065 - protein, 93 aa, Zea mays
  Coding DNA Sequence Number=SeqID_286
  Gene Ontology: Mol. function=receptor activity; Cellular component =integral to membrane; Biological process=intracellular protein transport
  Homolog annotation: Hit_ID=Q8S0N4; Match level="QueryCoverage=69%, HitCoverage=29%, E-value=8e-21, Identity=91%"; Hit description =Vesicle transport v-SNARE (Vesicle soluble NSF attachment protein receptor) protein-like
MTRIDLNTVEEEDEAEAEALPFLVAAAGFGRWTWRQGAYSLALRLVCFAKLREYKSDLNNVKSELKRISAPNARQATREELLESGMADTLAVS

SEQ ID NO: 42066 - protein, 103 aa, Zea mays; identical to SEQ ID NO: 42063
  Coding DNA Sequence Number=SeqID_287
  Homolog annotation: Hit_ID=Q8RUA3; Match level="QueryCoverage=75%, HitCoverage=7%, E-value=1e-07, Identity=38%"; Hit description =Putative disease resistance protein

SEQ ID NO: 42067 - protein, 186 aa, Zea mays
  Coding DNA Sequence Number=SeqID_288
  Gene Ontology: Mol. function=DNA binding; Cellular component=nucleus; Biological process=regulation of transcription, DNA-dependent
  Homolog annotation: Hit_ID=Q8GRY3; Match level="QueryCoverage=94%, HitCoverage=69%, E-value=1e-36, Identity=48%"; Hit description=Myb13 protein
MDPQVPNAKIWSKIAAKLPGRTDNEIKNHWNTHIKKKLVKMGIDPATHQPLANSKAAASSQSTVTDESAKTSNTRKELSLKNDGSRREAPLSTDSSEQSSWPESGSCSNVCDQGPELLENWLSETGLSMDEPWLDFTSRNDELGNVEGTLPWDGTTDWLLDYQDFGMCSSNSVDSSVFHASNGSNF

SEQ ID NO: 42068 - protein, 85 aa, Zea mays
  Coding DNA Sequence Number=SeqID_289
MALNGVKSRGGNWLSLMTNCDVVTWSIAWCNRDKWRLPRRRSHGHVAGQVGLLQDMVDGVTWPATLPPIWTVEWDAASAREDQEE

SEQ ID NO: 42069 - protein, 101 aa, Zea mays
  Coding DNA Sequence Number=SeqID_290
MAVGPCVSLCSTRPARQPNTEIHGEQHRALDFLHIDNKRAKKNSGFLPCCRTAAVTSCAVSSTSHAKPLRNVVELHLVPMKKFLATPGTIGDRISANFSSE

SEQ ID NO: 42070 - protein, 140 aa, Zea mays
  Coding DNA Sequence Number=SeqID_291
MTAIAAKSSQGPSYTDHSPTALAPFGGLAWEVELAAHDVTATVRQQGRNPLFFGAFIADVEEVKGAMELTMDLGVRLPCWPCGAEGDTGADGHGEKWSVQGAYIYCAQAKGCGGREIKSQQPGAIPAEADPLGLLVWGRI

SEQ ID NO: 42071 - protein, 101 aa, Zea mays
  Coding DNA Sequence Number=SeqID_292
MANSTVGTMPVWGNRRARYTTGRINMACARCEASAKGCGCVNEGRGGRAGAGQLEKGWDGYERGHGVRRGRGVHGDAWVVRGHSKGTSSIDGTHRSERVDK

SEQ ID NO: 42072 - protein, 118 aa, Zea mays
  Coding DNA Sequence Number=SeqID_293
MEVVPEFLLGDGFKVGMGGEVEVGVVAAAPTASLLRSDQSLGLLGFASGTSAQWSSGVAVATAAELHLPRVPTTPAEHALHLGVCSQTSIESTHISDLTPQSFSIRKDRWKIFIALNN

SEQ ID NO: 42073 - protein, 241 aa, Zea mays
  Coding DNA Sequence Number=SeqID_294
MPSSEATLSNLAVVEFQPDHTVEFGTSWIFSGHMLEMQQLGYFSNGVTRALGAEEAVYSYGRQPSVEVFAKNYCLHWQKRKIGDKIAKFGSCTFTLRTGKTSSEVVEIVPCARNKWGNWWDFWFYVASGDVEGLSSLPPAILSSHCYVAFPRFEVADEDKDKGALRYAARLSSGHDLVEEFIAYGVWPLAHGWPLGEVSHCRMPTLGGQMVRSPTFAVDLRDCDAATFVREVEAEAVKIVG

SEQ ID NO: 42074 - protein, 99 aa, Zea mays
  Coding DNA Sequence Number=SeqID_295
MHAIVILTLRLKTASTFMNWASGQGCGDVLDIDCTVVFGNLSDSLLVLRSMEHSGVLIAMNKNSVNLFVDVAPIKTPTGQSTLLGDNVETFEQRIAKLL

SEQ ID NO: 42075 - protein, 156 aa, Zea mays
  Coding DNA Sequence Number=SeqID_296
MGALGMWHQTIRYAPDSLAMVGSNGRLTWLRHWTVRCVSDSLGISRIQRLTAIDPNGRLMWQAPDTVWYAPDCLLARAPYLCGWPCGDFGLLFTKKKEHSPDLVTVGERERVGLALELGVASNEVIVAPTPKTPILVHMLSVLVVVVKPLEIFDDQ

SEQ ID NO: 42076 - protein, 49 aa, Zea mays
  Coding DNA Sequence Number=SeqID_297
MRCELKKTAPWMREKIKPHGLHCMLPCWFPTIREFEETACTLGLKSALQ

SEQ ID NO: 42077 - protein, 135 aa, Zea mays
  Coding DNA Sequence Number=SeqID_298
  Gene Ontology: Mol. function=oxidoreductase activity, acting on the CH-OH group of donors, NAD or NADP as acceptor; Cellular component =mitochondrion; Biological process=isocitrate metabolic process
  Homolog annotation: Hit_ID=A0EJ87; Match level="QueryCoverage=63%, HitCoverage=17%, E-value=5e-29, Identity=72%"; Hit description =Cytosolic NADP+-isocitrate dehydrogenase
MAFEKIKVSNPIIEMDGDEMTRVFWQSIKDKAFRLDDDNIFFQLIFPFLDLDIKYYDLGILHGEATDDKVTVEAAEATLKYNVAIKCATITPVVVALPPAPAVAAAPQTQPATHRSRLPHRVACGPQLQLPPEQP

SEQ ID NO: 42078 - protein, 44 aa, Zea mays
  Coding DNA Sequence Number=SeqID_299
MRMTSGRMLQRSLALAVSIPSMSVMNNKSVVRIKKWWHWPPDPT

SEQ ID NO: 42079 - protein, 81 aa, Zea mays
  Coding DNA Sequence Number=SeqID_300
MCGLYLVRARVFTRVGFLYHAAAPGLYSVRARLQWTEGALSRGEEGLARPTTGTAQATRGVVKIDGELLHDWSLPLEDLGY

SEQ ID NO: 42080 - protein, 570 aa, Zea mays
  Coding DNA Sequence Number=SeqID_301
  Gene Ontology: Mol. function=binding
  Homolog annotation: Hit_ID=Q6Z3Z9; Match level="QueryCoverage=94%, HitCoverage=91%, E-value=1e-158, Identity=60%"; Hit description=Arm repeat containing protein-like
  Pfam annotation: Domain name=Arm; Domain location=196-238; Score =18.1; E_value=0.032; Accession=PF00514.13; Description=Armadillobeta- catenin-like repeat
  Pfam annotation: Domain name=Arm; Domain location=239-283; Score=8.6; E_value=1; Accession=PF00514.13; Description=Armadillobeta-catenin -like repeat
  Pfam annotation: Domain name=Arm; Domain location=284-327; Score =19.9; E_value=0.009; Accession=PF00514.13; Description=Armadillobeta- catenin-like repeat
  Pfam annotation: Domain name=Arm; Domain location=328-370; Score=2.0; E_value=6.9; Accession=PF00514.13; Description=Armadillobeta-catenin -like repeat
  Pfam annotation: Domain name=Arm; Domain location=372-413; Score =29.6; E_value=1.1e-05; Accession=PF00514.13; Description =Armadillobeta-catenin-like repeat
  Pfam annotation: Domain name=Arm; Domain location=415-455; Score=3.0; E_value=5.1; Accession=PF00514.13; Description=Armadillobeta-catenin -like repeat
  Pfam annotation: Domain name=Arm; Domain location=457-499; Score =14.4; E_value=0.19; Accession=PF00514.13; Description=Armadillobeta -catenin-like repeat
  Pfam module annotation: Pfam domain module=Arm::Arm::Arm::Arm::Arm::Ar m::Arm; Domain location=196-238::239-283::284-327::328-370::372 -413::415-455::457-499
MMGEAGEEESAAAPAEVSRQAELDEQRCLAEALDALSSLVSASLSATLFPLKWQLTRDRLHACLADTTVPAGDESGEDRRDAFVNLLRDVAATAREARELVPRSQGRQYGGGKLRLRSDLDVLAAALDAHVARLDEVHASGALTRARALVVPRPGAGATRDDVRFYVRDLFARLRAGGAEMRREAATALSEVLRDDEKCVRVVASDVADGVGVLVALLECPDARVREDVLEAVSVIAGSDAHRGDLVVGGVIAPVVRVLDAAASASSEAAKERAARVLCKLTENSDNAWAVAAHGGVTALLDLCTDHGASGGELVCAACRVLRSLAGVDEIRKYMVADAGAVPVLVSLSQRATDDAARIQAMELVVAIGSGDSSAREAVVQEGAIEVLVRALDASSSSKVREVALRAIDGLCLSPPTSTDRLLAAGFLDSVLSLLRTGDTTLQHCALKAAHRLCPVSEEIRKAMGDAGFMLELVSVLGASSKSPEAREMAAESLCALVSVHRNRKRFVQEDRDDVARVLQLLGSGDEEKLTPAKRFLLSTVTRLADSSSGRRKILTSEHVRHKQHTPTYQ

SEQ ID NO: 42081 - protein, 254 aa, Zea mays
  Coding DNA Sequence Number=SeqID_302
MATPAPTLPEPAAQELTAAVAGAGQRQQPHHQHPLLAAAAAASLLAVLYLPRPVLLLVLSPASLSSLLLLLSLLHLGSTPPPPPPALAAPPPSSPPPTEEKKQQEQEQAPEAACPPPPPPPPPPEPERGAVFPELLEFASWAAKGRALEVIHEEFEAEWGLPEEMGLPWDSDSDSDPDSGSDDGYVRGGGDADDGMIEIELEEDSLIEIDISRCRLRALVSDPLQQLQSGPAEDQLNGLRRRKLAMMYGEAEKG

SEQ ID NO: 42082 - protein, 191 aa, Zea mays
  Coding DNA Sequence Number=SeqID_303
MRSAAQRYQGLQETRALHGKGDPGPSAGVGLGLDRTDAWLPPRLAVCCLTFWRASIVAGGPVPAGGTIIQQFDPATGRLRPRRQAPPHDTGAGARRPVVHWCWGAAAIRLSGDRKGTLATAAPDDINVDEEVIDPYHIYANCSKVLQDYRVAIDNNIIILSNMIMSCFYKLESKTIGYVDLPVEKSALNQP

SEQ ID NO: 42083 - protein, 340 aa, Zea mays
  Coding DNA Sequence Number=SeqID_304
MEYRLITKIAAPPKLAQRTSGVLSPAAAACSLSFGDSGHHGELAMCLCRCLVRRRFRPHPHPFGKYLPPTGLMNLPFLTKTSHTGGLSWSWRMRKPENRLFLISQPRHHVTNPSRLVGDAASQTGLHHPFNGWSSDPHDRTTYPVRQHLAPFDPTRSSPPHELRANPLQQTSQVFCLITCREAHEELGFDSGRTGQREEGGLLPVATSLSFSNCRSSTRIIGRKRVAVSPTPGSRTPHSPSRTLRKQRSVRFHFHMDDAVNLLESLPLDVLTIYARELHFKFSTPSAKPVFRDEEAGGGDDTCPCAPKQHRAAKSRLRGQNLERIAVNLSASYESMLPEV

SEQ ID NO: 42084 - protein, 80 aa, Zea mays
  Coding DNA Sequence Number=SeqID_305
  Subcellular localization annotation: CTP_CleavageSite=3; ConfidenceScore=5.05e-01
MACARTAAAPAPPTTRFFLFLGGHHGHSYRPMRPHRIFAGGASCHWNRRETGSLFIATGILVIRVKVADGQMGQAVMWLD

SEQ ID NO: 42085 - protein, 72 aa, Zea mays
  Coding DNA Sequence Number=SeqID_306
MDLIPIHASGIGVNEQSLTWRTVGDQIGGVTRQLRLWENLHLPIRDFCHQRPAHQGPCSRNDTNRSLGDRVT

SEQ ID NO: 42086 - protein, 119 aa, Zea mays
  Coding DNA Sequence Number=SeqID_307
MARGRAWNDGQKKRRREWEREREGLRRGGWGRRGRLGRERWFPGRDDTWDPCGTRTQAAATAGARRRSRVWGRGVDAGWAALGYAGVEGEGVWAETRGGPVEGRACGARPRRGSRWAAL

SEQ ID NO: 42087 - protein, 105 aa, Zea mays
  Coding DNA Sequence Number=SeqID_308
MAIVGGDCGTVVMHQQVYGRLPKLAGASMGEENHQCPTNLSSSIIHRRKSAVRHGREALCLHLGSVGARRTVPPWGGPALRSVGQAWKDQSRPSDLVGADRIWGA

SEQ ID NO: 42088 - protein, 137 aa, Zea mays
  Coding DNA Sequence Number=SeqID_309
  Subcellular localization annotation: CTP_CleavageSite=10; ConfidenceScore=5.41e-01
MPLSFPAAARARSLASLLLPVGGCPTATMNGRGRAPIPPPAPRVAWGLPDFSTQPPVLTLAASAPTATVATPPLSLSALIVAPWVDPILETRKSALTLTVAPYSILPTSIIAIVGVLALCGVKVKQLLLVGQCEALA

SEQ ID NO: 42089 - protein, 530 aa, Zea mays
  Coding DNA Sequence Number=SeqID_310
  Homolog annotation: Hit_ID=Q9FFD1; Match level="QueryCoverage=69%, HitCoverage=62%, E-value=1e-102, Identity=49%"; Hit description =Genomic DNA, chromosome 5, P1 clone:MQK4
  Subcellular localization annotation: CTP_CleavageSite=60; ConfidenceScore=5.24e-01
MACAAAHMFVYNATLCACDPGYYLFTNSTGGGNASSASTSCVSLPRSGDGFGDWQVGSVGASRNQSFYFLTPVLSLDVVRRLTQSQAVILWVALLTLLSWLAFCAAARFAGQDPERHKKLFGARFWVSRLDCIFDNNHYANDQKVLRKRKTELGGTFSVATLILFLGLVIVLLYQAINRRNAQVHRVKPANAPDLLDFVNDLEFHITTVSSMSCAQVVAPSTIAMGTPGFMDFRVLPLSTLLTYSCQNTSEGPSITLKCNGCRIPPRDHYVSWQFVDLPRQPAAAVGFQFNLTAREHGDYKDMSFVSGTLSSDNYDDAKLKTFRGPDSNVLKIQLFPQIYNHLHGLKLLQPLVQDFTQGSILSDLSSLNASLHNPRDGVINTTLFISYLSDYIVEISNENVLGPVSILASIGGLYAFSVAFFLCLMAQCEGRIKKLRDEDTRMLKILSKQRAQRNWNKVRKFVMYTWGPSNLDPTDRSGKWPEGSVMDSIHGSFHKIRKPTRRGTSNGSKPKEPADMVHYFLFFSRSSHI

SEQ ID NO: 42090 - protein, 117 aa, Zea mays
  Coding DNA Sequence Number=SeqID_311
  Gene Ontology: Mol. function=steroid hormone receptor activity; Cellular component=nucleus; Biological process=regulation of transcription, DNA-dependent
  Homolog annotation: Hit_ID=Q6EPQ3; Match level="QueryCoverage=89%, HitCoverage=15%, E-value=2e-31, Identity=71%"; Hit description=SPX (SYG1/Pho81/XPR1) domain-containing protein-like
MVLIDIAMSFCLTPHYSVPQYVMSSLITLVFAEVLEGVNLFLLSLVMSSRLSRETYNGRLLSTEAETLARVAADMTITAAEYVGQSCLLNTTLLPSLVICLASIVACIPLLWLVTSP

SEQ ID NO: 42091 - protein, 92 aa, Zea mays
  Coding DNA Sequence Number=SeqID_312
MRLLVCRCVCSKSRSFGGGQGQVRIPSKPSEAAGKAQEVVHGEPSRVEREPLDDKLHVGVICRYSAPLEVKGSGSSKHRSLSCEKMCRPLVN

SEQ ID NO: 42092 - protein, 241 aa, Zea mays
  Coding DNA Sequence Number=SeqID_313
  Gene Ontology: Mol. function=sequence-specific DNA binding; Cellular component=nucleus; Biological process=regulation of transcription
  Homolog annotation: Hit_ID=Q5FZT4; Match level="QueryCoverage=92%, HitCoverage=97%, E-value=3e-17, Identity=47%"; Hit description=WRKY21
  Pfam annotation: Domain name=WRKY; Domain location=99-139; Score=8.0; E_value=7.4e-05; Accession=PF03106.6; Description=WRKY DNA -binding domain
MTLDTPAAVVLELMTMGQQSAAHLGDLLRAASPAAASPHQELAAEILRCCGRVIDALRAAAAASGHKRKAAAEYQDAAAGGGASPPPPPPPPGPPLKRRLYYRCAHKDQGCDATRRVQRTREQPAAYEIAYYGDHTCRGAATAWQQGAPAPAVVDFGSNSWGSADTTSGGSPASVPLGGWWSPSASSEVGFEAHAAAHEWRDTAAAAPDPVMEFLDGAFGWESVLEDRFDLGGLHGIATFQ

SEQ ID NO: 42093 - protein, 294 aa, Zea mays
  Coding DNA Sequence Number=SeqID_314
  Gene Ontology: Mol. function=aminoacyl-tRNA ligase activity; Cellular component=methionyl glutamyl tRNA synthetase complex; Biological process=tRNA aminoacylation for protein translation
  Homolog annotation: Hit_ID=Q8RUP8; Match level="QueryCoverage=88%, HitCoverage=65%, E-value=1e-94, Identity=66%"; Hit description =Methionyl-tRNA synthetase-like protein
  Pfam annotation: Domain name=tRNA_bind; Domain location=193-285; Score=70.6; E_value=5.1e-18; Accession=PF01588.10; Description =Putative tRNA binding domain
MDWIKFCSDFTASDGKQHALLDNLNQELSQKSVLLGDGFKLSAADNDVFATVHPFVIRVSDSELQKYPHVLRWMDYIQNTVGAGTTLQKINVTKSDFDPPSHPRKADKKDAESSSKKAISVQKTADKSNGSADSKKSTREPPENKENPTAAGNSKTSGEKKKVQEKSAGKTTEKAPEKIADKESECDISILNIQVGLIRKAWKHPSADSLLVEEIDLGDGNVRQVVSGLAKYCSPDDLTNRHVVLITNVKPGKLRDVMSAGLPRNAMVDNVFHLSLTVEIECDTDIPPFSKVII

SEQ ID NO: 42094 - protein, 237 aa, Zea mays
  Coding DNA Sequence Number=SeqID_315
  Gene Ontology: Mol. function=sequence-specific DNA binding; Cellular component=nucleus; Biological process=regulation of transcription
  Homolog annotation: Hit_ID=Q2RBC4; Match level="QueryCoverage=19%, HitCoverage=13%, E-value=3e-10, Identity=54%"; Hit description=WRKY DNA binding domain containing protein
  Pfam annotation: Domain name=WRKY; Domain location=64-110; Score =18.5; E_value=3.8e-06; Accession=PF03106.6; Description=WRKY DNA -binding domain
MSRGIRPIPSALGMQVNERFLDLACTHAYRLRRCHAVSSFAFENNEFGRICLATRDSLGMDGSGGSQRCYYRCTYHQDHGCPATKHVEQNNSQDPPLFRVIYTNEHTCCSTHVSDYMASSIYIQQIADASLREAEVEIPSQLAQCFGGHELIEEENDAIISSLLTAISGCDVATLDGGQHAAIEENTPARMPRSRIEASPSISPVLLHASSDKLKTDFIEPLETQWFELLDLGWFIE

SEQ ID NO: 42095 - protein, 376 aa, Zea mays
  Coding DNA Sequence Number=SeqID_316
  Gene Ontology: Mol. function=sequence-specific DNA binding; Cellular component=nucleus; Biological process=regulation of transcription
  Homolog annotation: Hit_ID=Q8RUJ6; Match level="QueryCoverage=44%, HitCoverage=43%, E-value=2e-24, Identity=43%"; Hit description=WRKY transcription factor 64-like protein
  Pfam annotation: Domain name=WRKY; Domain location=117-181; Score =81.7; E_value=2.2e-21; Accession=PF03106.6; Description=WRKY DNA -binding domain
MATDQDAKLFDVLAGGYHLTTQLQALLGGRRPLDGIGQQEAMAFSQELSRVFKVSMSMLNGSAVAGAKTAPAVRPGAIVQAVAKDKRARSDSREVVTPARRSREDGVTRKEITASPYKDGYVWRKYGQKNIQNCNFVRYYFRCSRDRRCEAKKKVQQQDDDGSHLPPMFEVTYLNEHTCHALRATTTANGDAAVPVPVAASPPTTNRRWYYRDDAARDDDGGLQFDLSSFPRMSGPGGAGGSAQENQTIVSCLADVIRGAAPSPWSPVAADASDAGAASYGPAPMQMQMMQASGSGHSASVAQDGGATMMTTMIGTDDTDFCCWDPSLVGEADHQMMDEDHRDMLHVVDVARLADTVWPRHTTPAGAWHCPLCPQI

SEQ ID NO: 42096 - protein, 194 aa, Zea mays
  Coding DNA Sequence Number=SeqID_317
  Subcellular localization annotation: CTP_CleavageSite=26; ConfidenceScore=5.48e-01
EGVHTSSCPRQSPTRGFLPRPKSSPPAFNAGSRTPKFLPTIGALSQTHPWLPPPHAAAEMPPSTRGFLPTNGALPYHAPAPAMLVRPRLRPARAAGYAPMSKVVGAERRDVTPCLAASQPAPPSPCLHPGALSFYCQCTHVQLSKFNRIFGKPKEQPNSNALITLDKFCSVPHVAQSSMGMTDASHSLVQLFWL

SEQ ID NO: 42097 - protein, 42 aa, Zea mays
  Coding DNA Sequence Number=SeqID_318
MAGTRASDQGIGVGLLLGLPEDPVELGQLDMGALAIETQSAC

SEQ ID NO: 42098 - protein, 181 aa, Zea mays
  Coding DNA Sequence Number=SeqID_319
  Gene Ontology: Mol. function=metal ion binding; Cellular component =integral to membrane; Biological process=ubiquitin cycle
  Homolog annotation: Hit_ID=Q8S0Z1; Match level="QueryCoverage=98%, HitCoverage=99%, E-value=6e-40, Identity=47%"; Hit description =Putative RING-H2 zinc finger protein
  Pfam annotation: Domain name=C1_4; Domain location=106-150; Score= -11.6; E_value=0.067; Accession=PF07975.2; Description=TFIIH C1-like domain
  Pfam annotation: Domain name=zf-C3HC4; Domain location=107-148; Score= 26.2; E_value=0.00012; Accession=PF00097.15; Description=Zinc finger, C3HC4 type (RING finger)
  Pfam module annotation: Pfam domain module=C1_4::zf-C3HC4; Domain location=106-150::107-148
  Subcellular localization annotation: CTP_CleavageSite=73; ConfidenceScore=5.01e-01
MGVHARAMSWYTSPPGSPAPGSAAEAEHALSSSPRGGDTNMVIVLAALLFALLFALGINSLARCLIRWARRAPAAEGGGAGGLEKRVLRSMPVEVYGAAAVTVADVCAICLGEFADGEKVRVLPRCAHGFHVRCVDTWLLSHDSCPTCRGSVLDGAKAATPAGGGSRWQGSEAAAIAVVIG

SEQ ID NO: 42099 - protein, 257 aa, Zea mays
  Coding DNA Sequence Number=SeqID_320
MSADEDRAMAAAFPGSTYRAFREKVDTLASKMEDIAKAVIRVLHDNVKNPKASAEPREAAPSILRLALYSSDTSSTCWNELDSTTAPNSHALSVHLCGQDRRICLRRSLGGSTVSTLPAGCMLVTVGKQIQEWSNGQFKAAVGGEVVLFETTDEPGPFVSAELIGPDTGRSGFAVFVLPLPGLIRVDRSVWTGLSIPFATSEMARFYSLVGPVTTACPSLLAGYGDDGGKHRVDCGGMQQVVRVFVVICMAFLFLEG

SEQ ID NO: 42100 - protein, 403 aa, Zea mays
  Coding DNA Sequence Number=SeqID_321
  Homolog annotation: Hit_ID=Q8GSM4; Match level="QueryCoverage=16%, HitCoverage=18%, E-value=3e-11, Identity=53%"; Hit description=Ovate protein
  Pfam annotation: Domain name=DUF623; Domain location=300-359; Score =118.7; E_value=1.6e-32; Accession=PF04844.4; Description=Protein of unknown function, DUF623
MGRHKFRLSDMMPNAWFFKLRDMHARGGGAAATSPRVAASRPPPSTPRAAAWLPHRASHYYTPRAGDLGGLGSPLHPRASDTHFPPLQLSPPRRSRRRHRRRSVKLAPPPSASSSSSSGVASSPASAACRCRQELVVVEAPDTPPCRRDIFAGYSSDGDDECVKKPTVAVRAHHRLDGKVITSATDIIFDLRTKKRPAKSLPPIATKPATKREPDVCQLEDKHIDVLTHAARRTSPAVPEQSTLKPRRRSVSSARRLKTRANTPRLASPSSKKCKSPTTTTAARSPPPPLAKSFAVVKSSRDPRRDFRESMEEMIAENGIRAAADLEDLLACYLSLNAAEYHDLIVEVFEHIWVTLSDVKGNKVVTVGRSFGWDQQWKRILLRSTRWTNCRKLCSLQQQQQQE

SEQ ID NO: 42101 - protein, 102 aa, Zea mays
  Coding DNA Sequence Number=SeqID_322
MAPMIAMISKTQGTQQTGWKDGVGVERSASATASACACCLARAGQIPLRIDEGRKGSRSAGVSLHNHSHRGRHGLDDSAAGSIRTGRAGPWRCTDAFGETRT

SEQ ID NO: 42102 - protein, 278 aa, Zea mays
  Coding DNA Sequence Number=SeqID_323
  Homolog annotation: Hit_ID=Q6H4Z9; Match level="QueryCoverage=74%, HitCoverage=31%, E-value=1e-29, Identity=37%"; Hit description =Leucine zipper protein-like
  Pfam annotation: Domain name=DUF632; Domain location=83-278; Score =22.0; E_value=2.4e-11; Accession=PF04782.3; Description=Protein of unknown function (DUF632)
MDRKEEKEEHDNADDDEDDDEDDGEEYEHSVECMVSNVNFDANMKQETKGFESKGIQCTEAPEPCETVELEIKAHKKELMRNRVANAEETPGFTVYLNRRPASLVEAMKDIDSKMLNPVAFLRSASSRSSSSRFLLAPSSSIDDLFDNETSSCYSEESCSTMSGSHHSTLDRLYTWEKKLYKKVKAGERLRIEYEKRLTHLRNQDVKGEEPTSVDKICAALRSLHTRLKVSIHTVQSVSRRIEILRDEELHPQLMELILDTETISKHDVIRDFPSHLL

SEQ ID NO: 42103 - protein, 260 aa, Zea mays
  Coding DNA Sequence Number=SeqID_324
  Gene Ontology: Mol. function=hydrolase activity, acting on ester bonds; Biological process=lipid metabolic process
  Homolog annotation: Hit_ID=Q5VMA7; Match level="QueryCoverage=60%, HitCoverage=55%, E-value=1e-31, Identity=49%"; Hit description =Putative CPRD49
  Pfam annotation: Domain name=Lipase_GDSL; Domain location=107-240; Score=54.4; E_value=3.7e-13; Accession=PF00657.12; Description=GDSL -like LipaseAcylhydrolase
MGARPRSRSALPRLSFLPRRRPRPRPHLICLLPDAAEVVAAAPPAHCTAPEPPSCISEFGSEAPRDSQSSSLDLAVEVAGPLDQQASWCRAADSPTREKEPDMRPRLVLFGDSITELSFTSGGWGAALTDRFARQADVVLRGLSGYNTRWALKVLPRAMEGAAGAGADPAAVTVFFGANDASLPDQVQAHQHVPLKEYQSNLRAICAYFKVKLWAYLGFGCLGLVTHLSVAWVLRSQERWPSTAVILITPPPIYEPARIR

SEQ ID NO: 42104 - protein, 376 aa, Zea mays
  Coding DNA Sequence Number=SeqID_325
  Homolog annotation: Hit_ID=Q53RK7; Match level="QueryCoverage=14%, HitCoverage=21%, E-value=3e-16, Identity=80%"; Hit description =Peptidyl-prolyl cis-trans isomerase, FKBP-type, putative
MVNGGGTDLVLACCCETSKHVLSCSDTTPIARKPAHASPAPIPDRRVNDEAIQSVESATPACFGLAAAAACCGCACTECHYFCGSGCSLDDGEAEENPYLGSRSARSRRSASVAPTGAGGPHIRSDLARCAPHPRAGRALALPDFQAGIEGCNYSRKFSHKGDTYRKTVTFWWDIKGSGSADICDTFDMIKEPGELIVSPKLQFAMQKQFLQKSDVSPGVAEGKACAAADLSSWIASKEAGSQNDINNDRPKTSLCHADSMKIKVSDELPVKQWTYCDHMSDLHSSFTSANNDIAKEMNEVLFKSLPADTSALDLLASSDLLSQRKIDLIGKERLGVRKTRLRLKEQILTMKFKAYRHLWKEDVLMYGYFLQRNSD

SEQ ID NO: 42105 - protein, 89 aa, Zea mays
  Coding DNA Sequence Number=SeqID_326
MAAGGNQITRGANRGGVLDALGWEGGIGGRVGWGLEARRRVPGEARRGETDDGARACGAVASKFQIRLRLAVATVHGRLAVWLTAAYCD

SEQ ID NO: 42106 - protein, 118 aa, Zea mays
  Coding DNA Sequence Number=SeqID_327
MNSDTLDWWEREECRHVDRRPDQVRASVSAMSAGGSRARQNAMRSGVVVLGAVAFGYLSFRVGFKPYLDQAQEAIDSARDPDPDPATTAARDASDDPGAGRPGGDLGPSKDPAVVLRD

SEQ ID NO: 42107 - protein, 553 aa, Zea mays
  Coding DNA Sequence Number=SeqID_328
  Homolog annotation: Hit_ID=Q5XWK4; Match level="QueryCoverage=57%, HitCoverage=87%, E-value=7e-62, Identity=39%"; Hit description =Expressed protein-like
  Pfam annotation: Domain name=DUF616; Domain location=188-476; Score =573.8; E_value=1.6e-169; Accession=PF04765.4; Description=Protein of unknown function (DUF616)
  Subcellular localization annotation: CTP_CleavageSite=24; ConfidenceScore=5.39e-01
MTGSAASLGLRSGSYGSLAAAAVVGSGGRKAGATACRTLRVEKERLHRALRLVGRRRTGVLLLLAVASAALFCSLFAVVKDDANSTSIVNNYEVPNAIQKSVYPSRTRPLMMSGNQESTSVVNKIDFPNRLHLSFANFTHPCEGFSVPPPLVDKKRTGPRPCPVCYVSVDQAFALMPLQASPSPVLKDLNYVSEDGVTANLSNQGSGFGGHPSLDQRNDSFNINESMTVHCGFVRGKKPGQGTGFDIKDDDLLEMEQCHDLVVASAIFDEETEAYVKNSSSLYNNNKVGLWRLVVVRNLPYEDPRRTGKIPKLLLHRLFPNVRFSVWIDAKLELVVDPYLLLERFLWRKNTTFAISRHYKRFDVFEEAEANKAAGKYDNASIDYQIEFYRNEGLTHYSSAKLPITSDVPEGCVIIREHIPITNLFTCVWFNEVDRFTSRDQISFSTVRDKIRARVGWMPEMFMDCERRNFVVQVYHRELLEQMIASGRMPPLAAAVTHANVRVGSRKAPPTKKPSVKRKREKKSSSRRRLPKPIAQGLDANVTQVFFSVAESG

SEQ ID NO: 42108 - protein, 536 aa, Zea mays
  Coding DNA Sequence Number=SeqID_329
MEKQKFLGANSTARRRPLSSLSGNKPSPALQSLICKAHPHADPAAQATTAEVDAALDRLLFARTDLVGIVSQIDELISEALKCQNVSKKATREIESFNGFLTDTKASFKQWSSRLKQALETGLVKTEAIPKNTPGTCLNTAAKGNDKLISCSTKLPDTGSSKNTPGTCLNNAAKGNDKLIRGSSKLPDTYSSQNTPGTCLHTAVKGSGKLISGSSKLPDTDPLESPCSNFTEVDMIVSPSPLVSWNTGSCIVESGKQLFLLTPLPKTKACSSRCQTSKTQMKTVSSTDQLNNLLRPVSKLTISDNNHPDLEQSVKVKESWTSTTTPHVALANKASLEDKLCSPRTFSVQKSRTLPRSCLKTALSSKQQLFSPIPEGRKEEDIDSNGSIGDDKCSSDKISKDLASRYDIYGLNQSNRQVEDPLQWFLSPLKTMVLIDPSEDNQLPTPARSNMGERLDIADDKPIHTPAVHSKALLGTPWKGLESTNLKGRCAGETTLKKELWTRFEAASTNELHFDKVRFQQTDAKCFLDMLEEEAS

SEQ ID NO: 42109 - protein, 498 aa, Zea mays
  Coding DNA Sequence Number=SeqID_330
  Gene Ontology: Mol. function=transferase activity, transferring glycosyl groups; Cellular component=chloroplast; Biological process =glucan biosynthetic process
  Homolog annotation: Hit_ID=Q1KVP6; Match level="QueryCoverage=85%, HitCoverage=51%, E-value=0.0, Identity=79%"; Hit description=Starch synthase IV
  Pfam annotation: Domain name=Glyco_transf_5; Domain location=61-287; Score=326.0; E_value=6.6e-95; Accession=PF08323.2; Description =Starch synthase catalytic domain
MVRLAELLVAHARTPTVPARDMAMLAAMQWRLARTYSGDWCRLFHVCSRNCSKNVGTRMRKVGGLADVISGLGKALQKKGHLVEIILPKYDCMQHNQINNLKVLDVVVKSYFEGNMFANKIWTGTVEGLPVYFIEPQHPGKFFWRAQYYGEHDDFKRFSYFSRVALELLYQSGKKVDIIHCHDWQTAFVAPLYWDVYANLGFNSARICFTCHNFEYQGIAPAQDLAYCGLDVDHLDRPDRMRDNSHGRINVVKGAVVYSNIVTTVSPTYAQEVRSEGGRGLQDTLKVHSKKFVGILNGIDTDTWNPSTDRFLKVQYSANDLYGKSANKAALRKQLKLASTQASQPLREFEGIADQFQNNNNVRLLLKYDDALAHMIFAASDMFIVPSMFEPCGLTQMVAMRYGSVPVVRRTGGLNDSVFDLDDETIPMEVRNGFTFLKADEQDFGNALERAFNYYHRKPEVWKQLVQKDMKIDFSWDTSVSQYEEIYQKTATRARAAA

SEQ ID NO: 42110 - protein, 788 aa, Zea mays
  Coding DNA Sequence Number=SeqID_331
  Gene Ontology: Mol. function=metal ion binding; Biological process =metal ion transport
  Homolog annotation: Hit_ID=Q5JL93; Match level="QueryCoverage=26%, HitCoverage=55%, E-value=9e-21, Identity=31%"; Hit description =Glycine-rich protein-like
MADKEKLESEEEYESDLDDAPLSALRRRDAASDDEDEDEDGGMPLRRRKAGSDADSDGQGAAEVYDEDGAYEESEEYEEYEYGGFKAGGGGVRGVAVEAVAGAGHEEGEAGDGEAEKAGEAAPGGEEEDKKGNEPYSVPTTGAFYMHDDRFQEGRGRGRGRQRRMVNSRRLWSPKDEQAWVHDRFDEMDLHDFHGDNPKRKQGGVFRGRGGGQGGRTRGISRGNFRGSRTRTYYHDGSKNYSYVPKESHAYRDNTKNAHHSSHINGKNRVPKPSRDHYDGAKSYDIVPNESHIYHGDAKSQKNAPRVVRGRGSKRYQPRLKSTSDVSSVQNTKSQSLEGTSSNANLVKDEAQGPNSRLEQVLPIKQTVASNLNSASPPFYPARSSSQEFAVGQGENTQELSTNLVRGKAFVPSGHVEAAINGMNRPALLPPASSSNGPFPVATNQVNRDYGHPAHPIVQQNPVQPPTRSAPRMPAQMFGATFSNGSKISPAQPTSTILDDDAEISSPSGSNKYDSRLTVKGQPDDQGEERASFLYGGARVLGATSAMGITLGDQNFHGTPALLPVMQFGGQRPVGRGVPSIGMALPGFVSQQQLGINNSEMTWLPILTGASGALGAPYGSPYIAVDGSYYSRPPEQPSSSVSNRESSANNASSLKSQEITEVAGDARTQHQNKPRRQLCLQNLDIARVQVSLSAFQVFGILGPHYASERLCDTSVLALSGEIFCVHHVSDCVWVCAASAYELFGGCRIFELTNKKERVEHQIEKGGRSSPVRTVRACGLHGLRKRRTD

SEQ ID NO: 42111 - protein, 82 aa, Zea mays
  Coding DNA Sequence Number=SeqID_332
  Subcellular localization annotation: CTP_CleavageSite=46; ConfidenceScore=5.16e-01
MAERARSAAAWLCIAYPFTTPEIKKSCQRFPRRAISRLFPLPAAITNMHRSSFPAARFDLSLCYRCPFLSQVAAIGTRLKVA

SEQ ID NO: 42112 - protein, 101 aa, Zea mays
  Coding DNA Sequence Number=SeqID_333
MGRGERRGQVRASGQDGRTSCQACSNRKRATTPSLQYSLRVQEALVIGGLKECISASPAGGKGSSGGFQRGIDQRGDSKPTNYGTGGQATDDWYLVCRSSA

SEQ ID NO: 42113 - protein, 79 aa, Zea mays
  Coding DNA Sequence Number=SeqID_334
MDMASGSGFQQSKQPYVIRQWTWAATGQQPYYNMKQIITRRFQVFETFVESTLLYNQHLSLTTQLRYHHWQNHIGGLVA

SEQ ID NO: 42114 - protein, 95 aa, Zea mays
  Coding DNA Sequence Number=SeqID_335
MMIAVKCRYSVKMCPRRSFADSTTFLVTHQAITSALHYITGSAPVIHVDKNVDEPLEPAAKKMREKKATYEEENLADDEDNGKDSDIDDYMEMDI

SEQ ID NO: 42115 - protein, 197 aa, Zea mays
  Coding DNA Sequence Number=SeqID_336
  Gene Ontology: Mol. function=protein disulfide oxidoreductase activity; Cellular component=chloroplast; Biological process=cell redox homeostasis
  Homolog annotation: Hit_ID=Q7G8Y5; Match level="QueryCoverage=52%, HitCoverage=100%, E-value=6e-45, Identity=90%"; Hit description =Putative glutaredoxin
  Pfam annotation: Domain name=Glutaredoxin; Domain location=106-170; Score=65.7; E_value=1.5e-16; Accession=PF00462.14; Description =Glutaredoxin
MDDLLLPSKCSIFHTKPTRGVARKKLGHYPDTIGLAGQIAWKLSLSNGYINQPHFTNSGQSKHRYLKHLTRSSSSYSSSREEVVICLISKYTIMDRVTKLASQRAVVIFSASSCCMCHTVTRLFRELGVNPTVVELDEDPSWGKEMEKALARLLGRSPAVPAVFIGGRLVGSTDKVMSLHLSGNLDTMLRNAGALWV

SEQ ID NO: 42116 - protein, 360 aa, Zea mays
  Coding DNA Sequence Number=SeqID_337
  Gene Ontology: Mol. function=trans-octaprenyltranstransferase activity; Cellular component=cyanelle; Biological process=isoprenoid biosynthetic process
  Homolog annotation: Hit_ID=Q75HZ9; Match level="QueryCoverage=85%, HitCoverage=75%, E-value=1e-144, Identity=86%"; Hit description =Putative polyprenyl diphosphate synthase
  Pfam annotation: Domain name=polyprenyl_synt; Domain location=62-319; Score=248.5; E_value=1.4e-71; Accession=PF00348.8; Description =Polyprenyl synthetase
  Subcellular localization annotation: CTP_CleavageSite=87; ConfidenceScore=5.72e-01
MAAAPSSLASSSHIPRRATATAPAQSHSPPLPQQLRPARSFKRGALAQHVRYSFAGREASRRRTPAEQIFGAGGKRLRPALVFLVSRATAELAGLSELTAEHRRLAEIIEMIHTASLIHDDVIDDSGMRRELTVSGKETIHQLYGTRVAVLAGDFMFAQSSWFLANLENIEVIKLISQVIKDFASGEIKQASTLFDCDITLDDYLLKSYYKTASLIAASTKSASIFSGVSTTICEKMYAYGRNLGLSFQVVDDILDFTQSAEQLGKPAASDLAKGNLTAPVIFALQSEPELREIIDSEFSDTDSLATAIELVHRSGGIRRAHELAREKGDLAIQNLQCLPRSDFRSALEKMVEYNLERIE

SEQ ID NO: 42117 - protein, 81 aa, Zea mays
  Coding DNA Sequence Number=SeqID_338
  Subcellular localization annotation: CTP_CleavageSite=37; ConfidenceScore=5.01e-01
MDTPMPQASCGKGSEKKSYFMNVTAIVVFPQFWKLARCKRVQRSSQAFESEIPIGERDHQNQIDRLHGFFSRKIYKNLSRS

SEQ ID NO: 42118 - protein, 344 aa, Zea mays
  Coding DNA Sequence Number=SeqID_339
  Gene Ontology: Mol. function=metal ion binding
  Homolog annotation: Hit_ID=Q9LSW9; Match level="QueryCoverage=48%, HitCoverage=51%, E-value=3e-17, Identity=29%"; Hit description=RING -H2 finger protein ATL5K
  Pfam annotation: Domain name=C1_4; Domain location=137-181; Score= -11.3; E_value=0.06; Accession=PF07975.2; Description=TFIIH C1-like domain
  Pfam annotation: Domain name=PHD; Domain location=137-182; Score= -1.1; E_value=0.073; Accession=PF00628.19; Description=PHD-finger
  Pfam annotation: Domain name=zf-C3HC4; Domain location=138-179; Score= 35.2; E_value=2.3e-07; Accession=PF00097.15; Description=Zinc finger, C3HC4 type (RING finger)
  Pfam module annotation: Pfam domain module=C1_4::PHD::zf-C3HC4; Domain location=137-181::137-182::138-179
  Subcellular localization annotation: CTP_CleavageSite=76; ConfidenceScore=5.79e-01
MDPPPPLALFASSSSSSSPSPPTSSSSGASITMVIITVVGILAAFALLASYYAFVTKCQLLRAVWSRQPPWHRRVRGAGGGGLTGRRDEPSSVVRGDGRRGLGLPLIRMLPVVKFTAASCDAGAGAGGVAPRISVSECAVCLSEFVERERVRLLPNCSHAFHIDCIDTWLQGSARCPFCRSDVTLPAIPSARRAPAAAAAVLPTSRRRDDALASESIVIEVRGERERWFSSSHGTTTTTPRRQPPKQPAPRCSKAAESVGDEAIDTRKTDAEFAVQPLRRSVSLDSSCGKHLYVSIQELLATQRQAATAPSHSQHKDKAAGFPDRIYERDLGRLALHWDMLFMS

SEQ ID NO: 42119 - protein, 76 aa, Zea mays
  Coding DNA Sequence Number=SeqID_340
MAWSPLAASGEGNCFESLGEGEDDDCAVEYRRGRQGRLQVRNGCESTITRARGCDIYGEVKKGKSLLVPVVYNNRY

SEQ ID NO: 42120 - protein, 302 aa, Zea mays
  Coding DNA Sequence Number=SeqID_341
  Gene Ontology: Mol. function=zinc ion binding
  Homolog annotation: Hit_ID=Q10RQ6; Match level="QueryCoverage=79%, HitCoverage=80%, E-value=4e-40, Identity=46%"; Hit description=Zinc finger, C3HC4 type family protein, expressed
  Pfam annotation: Domain name=C1_4; Domain location=117-161; Score= -12.7; E_value=0.092; Accession=PF07975.2; Description=TFIIH C1-like domain
  Pfam annotation: Domain name=zf-C3HC4; Domain location=118-159; Score= 42.4; E_value=1.5e-09; Accession=PF00097.15; Description=Zinc finger, C3HC4 type (RING finger)
  Pfam module annotation: Pfam domain module=C1_4::zf-C3HC4; Domain location=117-161::118-159
MDAAAGAPIPAPSDAGQGTAAAFPIAIVIAIGFMVTTLILISYYFLVVRCWLRGGGPGGLLHRARREDDRGGLAERVSAVFFADHDAAELPGGLDPDVVAALPVVRYYRRRARSASECAVCLGEFAPGERLKLLPGCSHAFHIDCIDTWLHHNVSCPLCRAVVTAVGVLARHDHDASCRDLLQLGGGDARRVVDAAARVGYGSSCRFPTKAAPAVAQEPIARSFSMDCFAGGLGRKPQEKEPAAGSCGEAGPSLAVAAAGGSSDVADRGAGETSGRFRRLLSSFGLGRSSRSTVLPIHLDNP

SEQ ID NO: 42121 - protein, 108 aa, Zea mays
  Coding DNA Sequence Number=SeqID_342
MGKADQRVGKVEQRVGKRRQRITGDGSSDGGEVASGGNRLGYKLAMEFQEQVMDAYSRCGHGALDDFKEAERLLEQIKMKAQGLRHAVFPANSLPDSALALAQRNKDD

SEQ ID NO: 42122 - protein, 154 aa, Zea mays
  Coding DNA Sequence Number=SeqID_343
MGKSNKRKRESTPPSEDFGGSEYSEEEFSSESEGSPAPVSPPASSDDSDDSQGIAAEVWTYIRAVERSGLEGSDESEYSSDEEDSDGGGEDEDDDDDDGDDDDGGDGDGSGSGRGSSDSGRDGDGGNSRGSTKGGSSKGSTKGGGGGSRGRASG

SEQ ID NO: 42123 - protein, 71 aa, Zea mays
  Coding DNA Sequence Number=SeqID_344
MASWNNGPGVFREAFLPSSGPEDICPPQAPNLCADFEIIGPKIPEVDALLSEVKDSLGAPKVHLMGVAPEL

SEQ ID NO: 42124 - protein, 162 aa, Zea mays
  Coding DNA Sequence Number=SeqID_345
MLDGEAVKNKGGNHDQENSTSFFFLVTAVAPPAGPGTVCLHLGLGLLLRLPPSLLLLVPAESRSQRAVLGVRVQRRTKERQRADVTKEKGSYRREARQRVEVAGGGEDGSSSSAATAPGSHGLTGFVPDPCSLGSNPGPSLAKKNPKPMGLKSSGLNRTKIN

SEQ ID NO: 42125 - protein, 712 aa, Zea mays
  Coding DNA Sequence Number=SeqID_346
  Gene Ontology: Mol. function=sequence-specific DNA binding; Cellular component=nucleus; Biological process=regulation of transcription
  Homolog annotation: Hit_ID=Q94IB3; Match level="QueryCoverage=96%, HitCoverage=97%, E-value=1e-121, Identity=41%"; Hit description=WRKY DNA-binding protein
  Pfam annotation: Domain name=WRKY; Domain location=276-334; Score =139.4; E_value=9.7e-39; Accession=PF03106.6; Description=WRKY DNA -binding domain
  Pfam annotation: Domain name=WRKY; Domain location=484-543; Score =150.6; E_value=4.1e-42; Accession=PF03106.6; Description=WRKY DNA -binding domain
  Pfam module annotation: Pfam domain module=WRKY::WRKY; Domain location=276-334::484-543
MEWNDPNPGPESLTSFQTEAVRPDTAGGHSNDDVEAGFEKHGLAVTVRPPEEEARSVPLTPQLGQKSSPGSSLAERMQARAGFMVSKLNMPFSTAAGADNSVPEVPSPYLTIPPGLSPATLLESPVFVSNSMGQASPTTGTLFMFGSTNDNDPIRFGGGPPSVGDGPNAFPFKPLDLKSSHYTAEAMKEQNTKSSVKTETKILTVQEASLLSQLNQLNHNSQTIINSGGPHDPKLSRPASGAGAGNEHISPPDHGQTAEESDAREDYPAMATTTPAEDGYSWRKYGQKQVKHSEYPRSYFKCTHPNCLVKKKVERSHEGHITEIIYKGAHNHPKPTQSRRPGVQPVHPFGDSAQADAADNLGSQANALDANQPRRAGVQDGMDATSSPSVPIERCDSPASMQVDSATRFGSPEGADVTSVSDEVGGDDRVTRGSMSQGGADAEGDELECKRRKLESYAIDMSTASRAVREPRVVIQTTSEVDILDDGYRWRKYGQKVVKGNPNPRSYYKCTYPGCVVRKHVERASHDLKSVITTYEGRHNHEVPAARNSGHPGTAAATGAGGPRRLEHPSLRDGLMGHLGGCGVPFGLPPPRDPLAPMGNYPTYASSIPLGGAGPTSLPSLPVPAGTLSAVDGLKLPMLAPSSLQQHPLLRHRQAMQAAGLVAPKDDVKVEGNVAGGAAPSVYQQMMCSGLRLRQQIPLVLGKKIPTRINDL

SEQ ID NO: 42126 - protein, 175 aa, Zea mays
  Coding DNA Sequence Number=SeqID_347
  Subcellular localization annotation: CTP_CleavageSite=55; ConfidenceScore=5.04e-01
MPISPSEPDSVNSPADALLPSSDWLPASIKIGTTLVACALAISPHPQRNRDLPPTASARFTGVWFAGSLGASPQGLPQVRGALPKFGGVWGWLNFSSESYPATELRLAVDRAAATLKSGADTKQVCGSMGLGLICPRGEPWGRVGSRWPWPPPRSCSRTAGLTVGVEETLCVVEI

SEQ ID NO: 42127 - protein, 120 aa, Zea mays
  Coding DNA Sequence Number=SeqID_348
MAMRLPESHQATKLHPNCMLQIQMQCNATQRICSRRNLCLCVPFIHAFWHDGVQSVRPSVSESLLTAEAEGRRGHDCAALRANLGGSTHCTSVANLNMPGAATGPYPPCPCHRSAASHCD

SEQ ID NO: 42128 - protein, 175 aa, Zea mays
  Coding DNA Sequence Number=SeqID_349
  Subcellular localization annotation: CTP_CleavageSite=55; ConfidenceScore=5.04e-01
MPISPSEPDSVNSPADALLPSSDWLPASIKIGTTLVACALAISPHPQRNRDLPPTASARFTGVWFAGSLGASPQGLPQVRGALPKFGGVWGWLNFSSESYPATELRLAVDRAAATLKSGADTKQVCGSMGLGLICPRGEPWGHVGSRWPWPPPRSCSRTAGLTVGVEETLCVVEI

SEQ ID NO: 42129 - protein, 638 aa, Zea mays
  Coding DNA Sequence Number=SeqID_350
  Gene Ontology: Mol. function=histone-lysine N-methyltransferase activity; Cellular component=nucleus; Biological process=chromatin modification
  Homolog annotation: Hit_ID=Q6K9F7; Match level="QueryCoverage=99%, HitCoverage=95%, E-value=2e-66, Identity=34%"; Hit description =Putative SET domain protein SUVR2
  Pfam annotation: Domain name=Pre-SET; Domain location=422-570; Score =34.7; E_value=2.8e-07; Accession=PF05033.6; Description=Pre-SET motif
MKPLGFSKKEVFAVLKNLLQLFDNSWEPIEDECYRALADAILEARDRPQMHCSNSTRGVRLPPEGEGCRPRPSTSRDIHDGLDGGTEALRIKRTRISASCSIDPQSPVSAAEALDEPIGVSSELSHPQMGTSTQCQRPTAYGGVPSHGNTAHKKRAIQMMDEDFQHTVFLREPKPEPDTDDLQCSAPASSCQNAQLGRIASHPLNASTLDALPVQAPLKISAPSSFVEPINSKTKQPQSLENGLDHATMMHNAGTGSAAGKTQEAPCLHTLVASSTMGEVEMSIKCCIDPSKFHMPDLEAVFKMVEEKCLRSHKSLPPDFSIAGLIKQICQCVARLGSDHAAEHNKQSDAFGKIRSSQDKPTTSSAPSLEPIDCMNSRSGEYKAVEESLIVEASENGPPNSTTHQQAHLVLPPNGCTHDLSDISKGKERLSISAVNEFGSENCLPSFYYIPRNLVSQDSYVNSVETIGDKDCCSDCSGNCLYASEPCACARKTGGEFAYTRDGLVRTKFLDECISMNRFPEKHNMFFCKSCPLESIRNEPSPELCRGHIIRNFIKECGSKCGCNAQCGNRVVQRGITCNLQFAFFTTKKVEAFEELTWDYGIDFDGDKHPVKSFECLCGSRYCRGRKHSRTRGKAASK

SEQ ID NO: 42130 - protein, 574 aa, Zea mays
  Coding DNA Sequence Number=SeqID_351
  Gene Ontology: Mol. function=oxidoreductase activity; Cellular component=integral to membrane; Biological process=electron transport
  Homolog annotation: Hit_ID=Q8LGN4; Match level="QueryCoverage=70%, HitCoverage=77%, E-value=0.0, Identity=91%"; Hit description =Cytochrome P450 monooxygenase CYP72A26
  Pfam annotation: Domain name=Kinesin; Domain location=428-574; Score=- 97.7; E_value=4.1e-08; Accession=PF00225.13; Description=Kinesin motor domain
  Pfam annotation: Domain name=p450; Domain location=1-421; Score =156.9; E_value=5.1e-44; Accession=PF00067.12; Description=Cytochrome P450
  Pfam module annotation: Pfam domain module=Kinesin::p450; Domain location=428-574::1-421
MSWFGPSPKVTIVDPDLAKDVLSNKFGHFEKLKVPALSKMLGSGVASHEGEKWVKHRRILNHAFHLEKLKRMLPAFSTCCEELVSRWAAESLGSDGSCELDVWPELQNLTGDIISRTVFSSSYSEGRRIFQLQVEQASLVMTNIRKIMIPGYMYLPTANNRKMRRNNREVESILREIIGKRIQAMEQGEGTKDDLVGLLLETNMRDDMGMTIEDVIEECKVFYFVGMETTLVLLMWTMVVLSMHPEWQDRAREEVTALFGRDDKPEYDGLSRLKVVTMVLYEVLRLYPPATSVVRQTYKEMEVGGVTYPAGVILELPVLLIHHDPDIWGGDAREFRPDRFSEGVSRASKDPGAFLPFGWSPRICIGQNFALLEAKMALCMILQRFEFGLAPSYAHAPHTMITLHPMHDCKNGTAKQAKISMAYSFIHRPLSDEARRVSTPLVVTCNDQRREVSVAQNIANKEIDRTVAFDKVLGPKSQQQDVFNHAVVPLVSEVLDGYNCTIFAYGQTGTGKTYIMEGGGGKALNADLPTDASVIPSAVKRIFDILEAQSAEYSMKVSFLELYNVELTDLLALQ

SEQ ID NO: 42131 - protein, 659 aa, Zea mays
  Coding DNA Sequence Number=SeqID_352
  Gene Ontology: Mol. function=RNA-directed DNA polymerase activity; Cellular component=nucleus; Biological process=RNA-dependent DNA replication
  Homolog annotation: Hit_ID=Q8S472; Match level="QueryCoverage=97%, HitCoverage=59%, E-value=0.0, Identity=85%"; Hit description =Putative gypsy-type retrotransposon RIRE2
  Pfam annotation: Domain name=Retrotrans_gag; Domain location=147-238; Score=61.4; E_value=3e-15; Accession=PF03732.7; Description =Retrotransposon gag protein
MPRSDGPKALPPEGRVPLRTSRRNFPIHAGSLGPHRAHAQHSACGPGSPRQRAPPPQPSGPPRREDAPRLPPHGGHYDSGEDRSPSLEPPGPQAFSRAIRRAPFPTQFRTPTTITKYSGETRPELWLTDYRLACHLGGTDDDNLIIRNLPLFLSDTSRAWLEHLPLGQISNWDDLVQAFAGNFQGTYVRLGNSWDLRSCRQQPGESLQDYIRQFSKQRTKLPNVTDSDVIGAFLAGTTCRDLVSKVGRKTPTRASELMDIATKFASGQEAVEAIFRKDKQPQGRPPEDVPEASTQRGAKKKGKKKSQAKHNAADVDLVAAAEYKNPRKPPEGANLFDKMLKEPCPYHQGPVKHTLEKCAMIWRHFHKAGPPAEGGRARDDDKKEDHKAGEFPEVHDCFMIYGGQVANASARHRKQERREVCSVKVAPPVYLDWSDKPITFDQDDHPDRVPSPGKYPLVVDPVIGNVRLTKVLMDGGSSLNIIYAETLGLLWIDLSSVRAGAAPFHGIIPRKRVQPLGQLDLPISFGTPSNFRRETLTFEVVGFRGTYHAVLARPCYAKFMVVPNYTYLKLKMSGPNGVITVGPTYRHAYECDVECVEYAKALAESEALIADLKSLSKEAPDVKRHAGNFEPAETVKSVPLDPSNDASKQIWIGSELDPK

SEQ ID NO: 42132 - protein, 122 aa, Zea mays
  Coding DNA Sequence Number=SeqID_353
  Subcellular localization annotation: CTP_CleavageSite=18; ConfidenceScore=5.26e-01
MKLWKETSRSSKITTSSRCGLAATPSRLPVKAVLSTFLFRTLIYCTGRNLCEIIFIPFTIDYIHDTNYHGSIYLFIFKSVQPFVLGMSLCRSSLKGSFGVISVLISEGVSSYRTFGYEADPQ

SEQ ID NO: 42133 - protein, 83 aa, Zea mays
  Coding DNA Sequence Number=SeqID_354
MERQSDIGGRQLRVRFTVTDPAQAIVVAQAHVFTQHRRLKAGAQLSARSFTERIGVHTTDRWGPPVGAKPCSWANWVTRMFEI

SEQ ID NO: 42134 - protein, 135 aa, Zea mays
  Coding DNA Sequence Number=SeqID_355
MNELETGCTELDQQQPNEPHVTRTEYEAPKILKAPPLANRKGETYRSECGEDDAGEEEDEAATAADTTATALPAAAAAKEEDEDEDAAAARSDRMWIHDEDGGEDAAVGEDEVLDRRSAFMSFSLLPTNPTAALR

SEQ ID NO: 42135 - protein, 194 aa, Zea mays
  Coding DNA Sequence Number=SeqID_356
MEEQGSKRDRYIKSEGNLLLNDSKQHAADALEPDAAGEEPWDFESSSTMPSRGGGGVRRGRILSGDQYSAVRSGSRGCAELGGSGSGRGSGLDQRVAGSAAAWVEAKMDRPLALSSEMDRPLAACFSLLLVAMDHRRKHLAKPDLHGGLNRKARVLRLLPPVTACARGFPAALGGPPLAANGVHQTLDRAAQGS

SEQ ID NO: 42136 - protein, 244 aa, Zea mays
  Coding DNA Sequence Number=SeqID_357
MGVVNDGVGEEDVDIVNSSAIVDERAYDGIGDGDGGMEMRHGTVEALGGRIEPGRESGADAGGVGNACNGGGRVVWDVCRGGGKLERKTVMAAPERPRSATIWATTSRVRVDVVAGDARAGTEAAGGGAKDAEGEAVQQFQQQQHVVKEESGSMIVFGRDQQSCSSWDSGCAHSQQQPQYGNGHGKELGFDGYLFGYNNGGSRMKHDNCRLISSCRCSPASPSAGVGGVQLQGDQAAAHEHSRR

SEQ ID NO: 42137 - protein, 162 aa, Zea mays
  Coding DNA Sequence Number=SeqID_358
MGSYLFLGDPAQDRTVTHDPDEVGVPRVVCCGAARKTGMTSWAHTPVAHGANDVHAWAAQREKEEMGQNGYSRPKYNNIFLREKAKAVQKARLNMKFALLTTNFRSDASHNNLAVVAGMMPHIPMPGDWSRHLQNISWFPASLDTKRSGKNFPSYFSHSGLV

SEQ ID NO: 42138 - protein, 127 aa, Zea mays
  Coding DNA Sequence Number=SeqID_359
  Gene Ontology: Mol. function=phospholipid transporter activity
  Homolog annotation: Hit_ID=O82106; Match level="QueryCoverage=72%, HitCoverage=85%, E-value=7e-23, Identity=60%"; Hit description =Anther-specific protein MZm3-3 precursor
  Pfam annotation: Domain name=Tryp_alpha_amyl; Domain location=45-107; Score=24.9; E_value=0.00028; Accession=PF00234.12; Description =Protease inhibitorseed storageLTP f
MTATTTTAAGGGKVQPRGLPAALSLLLLLVLAAGLGGGAEAQQTCAGQLRGLAPCLRYSVPPLPGQVPPAPGPECCSALGAVSRDCACGTFSIINSLPAKCGLPPSNELMIASAMHWAKGKGSKHAE

SEQ ID NO: 42139 - protein, 380 aa, Zea mays
  Coding DNA Sequence Number=SeqID_360
  Homolog annotation: Hit_ID=Q0ZPW5; Match level="QueryCoverage=24%, HitCoverage=31%, E-value=2e-13, Identity=39%"; Hit description=CXE carboxylesterase
MDLGQNSEGCCMPSPVAADAIFEIKSIGVLLRRPTTRIHAVRQGVRSTEYMAELITAPESSVTPHAARSLSVYTYTPSLLPASTVYYAYTGGYHAIARSRRLLSLEAAPSRPSGSCGPTVGAAHYAAQPTASVILFGSPKPPRWRAARRDVPTSSICLHDGAPHHDFNLPPPHDLNRSARVNTVQLRSPVHGGGGGTPSAGKGAKLEATRVQIRSPASIRGLEAPRPAGDVASQLSGFLSSIPEIVARGDLASQCPGEKQVRLLIIFVVLNPHAAIEPDSKLEFDMPDALRVYKIDCVERFDDTKSVPSSPNGNSTNGVASKDFATGISSRLYLPARVDPEKKLPIVVFFHDGAFMVHNASFPLYHIYIASVDVAVPASR

SEQ ID NO: 42140 - protein, 749 aa, Zea mays
  Coding DNA Sequence Number=SeqID_361
  Homolog annotation: Hit_ID=Q5ZDJ1; Match level="QueryCoverage=57%, HitCoverage=49%, E-value=1e-134, Identity=59%"; Hit description =Amino acid transporter-like
  Pfam annotation: Domain name=DUF860; Domain location=332-692; Score =337.0; E_value=3.2e-98; Accession=PF05898.4; Description=Plant specific of unknown function (DUF860)
MGGPPSGWRAGPVGCRAVRRCCPRLERLGSLFTWDEAVISGGGDRGVPALTTLPLREEEGNPDRAEQEPRHATALRVIRGRASADAESALSLGQVLASRRVTTPARSYAPDRPLTHARHSSVALPASHAHTPAVGTDPRRAVTGAPGAASMRGRVSAACGAYDVRSPAHDGLVASSALLAVGGRSLRASSWVDPCNAAMLPQHYDQWPAAPPCGTDGLSAVSLHCRLLPSFHTPPISHSVACLPPRKGKANWTSSDFSLLFTSSDGTQVSVANQATANRNHLAAGLGDNPTQVSMLRRIAALRPPSRAAAPLGAIAAPYSSKSTSIPQKQQRVRDHAFDGVMEVQKRVRRFHALHALILYAAAPTAPSRAGGSGAVSVPFTRLGALARRQLRLAPLDAGRFLLRHAHAFHLFLHPVHRMLHIRLTPRAAAVLDAEADAVAAALPGISVLRLRKLLLLAPPHRRLRLEHIHLLRRDLGFPDDFAQSIIQSNPSLFRLTPDGFVEFLPSPTDPPDLTVAAVERARERHYREHRAPGSAEEDARFAFPIRFPPGFKIGKYFRIAVWKWQRLPYASPYADVTGHDLRSLEAQRRMEKRAVAAVHEFLSLTVEKRTTLERLALFRDALGVPKKIKEFLLKYQGIFYISTRGNQGKLHTVFLREAYYKGELVDPNAIHDARRKLEELLMINPQRANLDRMFTSMGRGWDELGGSRRGGSELRDEFLGDGGGRKRNADADGAESGEDSGVESLYID

SEQ ID NO: 42141 - protein, 294 aa, Zea mays
  Coding DNA Sequence Number=SeqID_362
  Gene Ontology: Mol. function=rRNA binding; Cellular component =ribonucleoprotein complex; Biological process=rRNA processing
  Homolog annotation: Hit_ID=Q6ZJR6; Match level="QueryCoverage=44%, HitCoverage=45%, E-value=4e-64, Identity=89%"; Hit description =Putative U3 snoRNP protein IMP4
  Pfam annotation: Domain name=Brix; Domain location=183-294; Score =86.2; E_value=1e-22; Accession=PF04427.8; Description=Brix domain
MTEEKKIFSSYVKNKDSQDTIIFGDGNHGKDKSETQEPLNFVRRSLSNFGKVGLIRAIMLNSSITSPIYRDLHTLVNPRLLSVVASLHALPTTIDFLSQTLLRVIVELAKDMHWRVRLAIFEYIPLLALRVSERVFKLFDYLMPAPKDYPSTRFTPGGGGEEVPKSIVDNEYATATIREPKILLTTSRNPSAPLTQFVKELKVVFPNSQRMNRGGQVISEIVEACRSHDITDLILVHEHRGQPDGLIVSHLPHGPTAYFGLLNVVTRHDIKDRKTMGKMSEAYPHLILDNFSTQ

SEQ ID NO: 42142 - protein, 60 aa, Zea mays
  Coding DNA Sequence Number=SeqID_363
  Gene Ontology: Mol. function=oxidoreductase activity; Biological process=metabolic process
MARGKVRYCLNISEDEYRKTIKVNVIRPWFLMKIIGAEGGLYPGATTYGNSLGATKPVYT

SEQ ID NO: 42143 - protein, 101 aa, Zea mays
  Coding DNA Sequence Number=SeqID_364
MAAFSWLGSGCSKTTPDALLNNRMVLSPAFAIEPRGRDAAAFIREVEAKAVIIVGKYSAKIELLRSWDIRGSNVRLNCVFELNGLRYRPYPEEGSADAGDD

SEQ ID NO: 42144 - protein, 157 aa, Zea mays
  Coding DNA Sequence Number=SeqID_365
  Subcellular localization annotation: CTP_CleavageSite=44; ConfidenceScore=5.14e-01
MAPRILCDDGCSQPPYGSKRTSARTQQLRQLSLRQAPALLRRPRHHTSWVPKSLRLPRRHGPLREGGPRGDEDETGARLKPLAPSPAWTLVTPYCKRTRPGRGTNTKAAGFPPLSRLSPATSLPPFALGLASTHLGWGTRRHSLVGLGTPRSRNADK

SEQ ID NO: 42145 - protein, 73 aa, Zea mays
  Coding DNA Sequence Number=SeqID_366
MGSKTLSTECTFASLTRQRKKTLKDMLVFGNQESTVNERCKRGGMVVDTGGRAESKGASLGGDEPLWVEVRDR

SEQ ID NO: 42146 - protein, 119 aa, Zea mays
  Coding DNA Sequence Number=SeqID_367
MARCLEIGGGGGEGGIGGEMAGATVVDGDGAAGRMAGELRGRGQDWRGDVVAGRGGGEWGWLGAGWRSVGARARRGGGARGRRRRQGAGAGARRGGGARQGGVAPPRGRRRSGSISGMV

SEQ ID NO: 42147 - protein, 83 aa, Zea mays
  Coding DNA Sequence Number=SeqID_368
MARIVHYLMATSLVVLVMSTSNSIHCQAGLSSRGPPCFEPPTHRCKDGRSCVFVCQYNGIRTYRAFCKTPTNAQETYMCCCPP

SEQ ID NO: 42148 - protein, 109 aa, Zea mays
  Coding DNA Sequence Number=SeqID_369
MAAAVPREHEVVAASSRATDGRSQIQRRDDGDFPIQRRDGSPIRSHSDSGSLIRRHDGNNSLAARRRWFLDPKAQQRRLPDLVARSWQFLDPEAQHRWLPRGVLATSAP

SEQ ID NO: 42149 - protein, 120 aa, Zea mays
  Coding DNA Sequence Number=SeqID_370
MGDLMELKTLFANFSKDVLAKIDSIHMQIVDVKNNLSTIKKGHLQRDIAKELEHDKEILTTKLEMRTRYKMEKASRKFLISQVSGSGTQTIAEIATKIVEPKSEISPGGATPGAFNALNI

SEQ ID NO: 42150 - protein, 122 aa, Zea mays
  Coding DNA Sequence Number=SeqID_371
MSSYAYGDTEGALVWIEKELDEVKTIISAQSNYYTMIGSRGMASVLGIVVENIRKTDFGIVVEDIKAPSKSVLDATKRYVFELWDKGGRQLAAMEAEAYTKKRKEAKKKSRKLKSRKGPKLS

SEQ ID NO: 42151 - protein, 177 aa, Zea mays
  Coding DNA Sequence Number=SeqID_372
MEQMAHDEEVDDLGDLESIVSLVVDARAGIEEQPAPPTDVGEGPVEASAPTEPLAHRTLSGAHQTVRCPLVTIGSATHHARNPWPTIGPADRWLTGQSGAPPDSPVNYSRTSLITSRERRLVCERLTGQSGAPPDSPVIYSRTPPSKSREQQVRQSQPGAPDTVRCTQTEQTLAEQS

SEQ ID NO: 42152 - protein, 1100 aa, Zea mays
  Coding DNA Sequence Number=SeqID_373
  Gene Ontology: Biological process=base-excision repair
  Homolog annotation: Hit_ID=Q9I9F1; Match level="QueryCoverage=10%, HitCoverage=30%, E-value=1e-16, Identity=39%"; Hit description=5 -methylcytosine G/T mismatch-specific DNA glycosylase
  Pfam annotation: Domain name=HhH-GPD; Domain location=972-1089; Score= 7.3; E_value=0.093; Accession=PF00730.15; Description=HhH-GPD superfamily base excision DNA repair protein
MSIAWLPSTNPAAGPLAIAEAVPISISLVQFFSPECTMSALPPAEELDASHQKKRRRRKKHREQVEAIAASSEPPPPPASPESKPKSTIPVAPETLTSAAVRESPRPLGNPESKSESPLLVAPETLASAVMAAAAVRLVKERERKNQVVPPASPLMEEPVWKEEKQRKKRKHVGAALVVPSPPTPDAAQNLRMEAKMMAEGATVRKKQRRLKAGQEQSGEPPFSIDVHPQGGEEATDDGGVGVMVTQCVKRSKSKNSRVLKTQQTLPQGFFPPMANPNSIDQDPNYSSPFGAFFAQFAYKPANIADRPARLPPRGHPSSGSSLLTGKETSKAAWTATSNTKQPCPASESTSDSQEEARIEGKEKPEKKMTREMAVRESTRHLAILESMSASSVPVAPETPTSAAMTAATVMQDKECKRENQEALPAAPLIEDPVPKVEKRHKKRKVAQITQMENKVMTEGATVRKKHRRQKVKQEQSGQTPFLNDVYSKAGEEAAAGGVMGSQCVKRIDRSKNSKVLKKQQTLPQGFFPPIANPDFIDQDPNYCSPFGAFFAQFAYKPERRQDGNGSPLPSTTGRTARLPPRGHPLSGSSLLTAKEVSKAARTTTLNTKQPCPASESTSDSQEEARIEGKEKPEKKMTREMAARESPRHLAILESMSASSVPVAPETLTSAMTAATVMQDKERKRENQEALPAAPLIEDPVPKVEKRHKKRKDREAAMIIPSVPTAAVAQITQMEKKVMTEGATVRKKHRRRKVEQEQSGETPFLNDVYSRAGEEAAAGGVMGRQCVKRINRSKNSKVLKKQQTLPQGFFPPIANPDFIDQDPNYCSPFGAFFAQFAYKPERRQDGNGSPLPSTTGRTARLPPRGHPSSGSSLLTAKEVSKAARTTTLNTKQACPASASISSSQEGVRVKGKKKPEEKTTMEKKPRKPPILLSPAEKWSDKYRRLPLDQLVPPPRSPHKLLQEKYASDPWKVRKKVKGFFKRYPDAQTAYTADPEKMAEYLAPLGLQRVKTNRIQKFSKAYVGEEWTYITELCGVGKYAADAYAIFCAGRANEVVPKDHKLVDYWNYVCFELPSIQKSQEAGVTELGNLVAKVQEVAVSC

SEQ ID NO: 42153 - protein, 91 aa, Zea mays
  Coding DNA Sequence Number=SeqID_374
MAPPCSCPPSVVWTVGGGLKCGDCWMAFDRPRLEVNTPSSLFKSRPCILDWVTVSPRSNVLANWDLSLREFCELVPELSGNCVHSPEGSEN

SEQ ID NO: 42154 - protein, 65 aa, Zea mays
  Coding DNA Sequence Number=SeqID_375
MAINCTVIHNGVCTPPLISYGCIAPIPPPISPRAAATPFSPFLCHQQAKVSALRGQPTLVIGVEC

SEQ ID NO: 42155 - protein, 720 aa, Zea mays
  Coding DNA Sequence Number=SeqID_376
  Homolog annotation: Hit_ID=Q10L59; Match level="QueryCoverage=96%, HitCoverage=47%, E-value=0.0, Identity=54%"; Hit description=PWWP domain containing protein, expressed
MQIWMGLTCRFGPTASRSVRAICAFCNYADLEAFTEEKKRSLLAKRHGKGADFLRAVDEIIEVYDSLKDIGSNKVDLPAEEVKPGVEKFAENNSRMDTEDLVSSSYMHNDRKIEDHYVTTRSHDMVNSDRPSVDERCVVNSAPDEPIENVSILDEMRDISLRTNSFSNKQRDAQPQNCYTRTRVPSLRKSRSSLSLESRKAQGSGNFFDHTNLASINLVPGEHKEPSHHRHEDDKANSSSVSTSDNVWLHSGEGTSNQPVTLGASNGNRMLNTPAEVDSTSNREASENGTTETELKSNGTSDLPMNTAVNFKRKRKSDRKPGPHYRDCTTPNKDDQLCAEYSEILPDSPNSKNEVSKSDGDEHLPLVKRARVRMGRSQLEDSPVDEIDVSNKKPELATALDQCDRNGKPASPANDYSADQVSAVVSSAPNLSCKLDTTILSKEGHLPWKNKEYHPKILALDVEAALPPSKRLHRALEAMSANVAENTKNIPEVTGPNEMTLNGSLLTASSLSNKSADAVVTVSNRPVIVQSPEPSLDTQFVHNPSGKCTSESILQNNSIPDSASVPSKENDHIVLKGDICEETLMDTKTANGSWDCSELNNDSCGKTSALCMKLNRPALNVTQATSVPDRLSSSLEKASENVAASGVKETKTFGSAVCDVDRSAEPIDRSNNNVTSNTMRHSETIVADSVNNVGDTASNSSLATKSSSIQSDADTRTSEL

SEQ ID NO: 42156 - protein, 72 aa, Zea mays
  Coding DNA Sequence Number=SeqID_377
MPTTDLNLIGYRDEPFVLLRMYLVGLRYSYACAVEVRAREGCTNGWWGGKGRESDGIQLFKVRPRHVGLGWV

SEQ ID NO: 42157 - protein, 107 aa, Zea mays
  Coding DNA Sequence Number=SeqID_378
MDCDLQLQEHNIKGKLRHGNQHVVTPTNPNRHIYSEVLIYLVFPATGRAATNDVHKARPPTRPDTKEPPLSSTTHGRDNTGEGSKGHGAPVMDTTAMTNDATPSNKK

SEQ ID NO: 42158 - protein, 59 aa, Zea mays
  Coding DNA Sequence Number=SeqID_379
MAPAKRKRAAAAAAAAAAAKWKVGDLVLAKMKGFPAWPAMMLGSCRDPVLLLIYGMGAG

SEQ ID NO: 42159 - protein, 202 aa, Zea mays
  Coding DNA Sequence Number=SeqID_380
  Pfam annotation: Domain name=zf-CCHC; Domain location=127-144; Score =8.8; E_value=0.035; Accession=PF00098.13; Description=Zinc knuckle
MAEPKKRRSKGKSLTCVKTWDEYLSEDEPPRIRDHHSSSRSSRSSHKCLMARDFIGVNYKPCNQVHVNNVIVETCSDEIAMENGLLKQELARLGKALYDKKGKAKQTQSLQDKNTLGLNKHVEDEIVVCWLCHKEGHKSYQGKVKTEGDNKEKPTSKISNTCTNKVDKKMDTPYLVKKNKNGKVIAIKANKQANNGKGAKQI

SEQ ID NO: 42160 - protein, 42 aa, Zea mays
  Coding DNA Sequence Number=SeqID_381
MASRRNPTTTTAEIERVPTGDSTTDDSNRRHCSTQQLNKDTQ

SEQ ID NO: 42161 - protein, 106 aa, Zea mays
  Coding DNA Sequence Number=SeqID_382
MAPILASRPNPEFLIIATYGKITRFLDICVNPEGFNKEVKGIHGIRMMKIDLCLSHVTTEVASFGRENSKRDFGWNMQVQSFLAASLALLVEGHYDFLLNYLRIKT

SEQ ID NO: 42162 - protein, 71 aa, Zea mays
  Coding DNA Sequence Number=SeqID_383
MTEKEKLTEETKLFEEKKAVDPYIAGFIELMAKTNTEKITKEILEVEVLKIYQIFLHQITPEAIMRMGIFV

SEQ ID NO: 42163 - protein, 53 aa, Zea mays
  Coding DNA Sequence Number=SeqID_384
MEQGVGKPPFFDGTNYPYWKIPVSVLAIIESLNYETLTMDELFNKLKSIEIDH

SEQ ID NO: 42164 - protein, 148 aa, Zea mays
  Coding DNA Sequence Number=SeqID_385
MELGEDTVSSGDRDIGDDSTSQVLPFADDLTAEVDELTAALASQDKLLRLAARERKEYKNKYESTLRELESSRASIEVSDETECDECALHMLNIATLQTKYTTLLDEHNELRSRPSFWDGVLENTWLKNSRFSCHMTEALDGSPASTP

SEQ ID NO: 42165 - protein, 177 aa, Zea mays
  Coding DNA Sequence Number=SeqID_386
MASLTPTVEAHRRQGSGRVEGPGRREGLREFQGNVVNTGVGTTTTCTTTADGGGASLACAVRGECGSSAGARVREGESEWGCGPLEMAGGWVVAASTCVMGAESTVCAWVVGEDGTDKQGPGQRERVRKGEQATMLTGWTRHAEKGRGQACVGEGISTNRAEPPGRGSGGAGARGES

SEQ ID NO: 42166 - protein, 130 aa, Zea mays
  Coding DNA Sequence Number=SeqID_387
MTKTTARSSLERAGSSGRWGGAGRGGHGSKELGGGCGGHGDELEEERAWDMEQGLTDGYGWSSAWGRARSELRPGAMGDKGEGSREAAEGARTASSAVTGELQAGARDGAGAPAWPWEGEMRSARGRDLG

SEQ ID NO: 42167 - protein, 69 aa, Zea mays
  Coding DNA Sequence Number=SeqID_388
MERRTLSVLSPNRGGGTILLMSALCALNMQFRDFCTSLVQLIKGLIQLSVEHDDQVDHATQSRIALTNV

SEQ ID NO: 42168 - protein, 177 aa, Zea mays
  Coding DNA Sequence Number=SeqID_389
MKQGQASAGKSQPLYVNRGEVNHVEAEAEPGEPENQEEMPVEGLSYVTAVWGHPISLARLRAPLLSHCLVGPVLRHLNNLAEVAAALFGGSPGPSEAVEGVNREESRYSPGNCSSERVLRLRTAICVASLAVIFTIAWLDGPASVIAPPRASCTSVHYPCGEGRIRGTVDLWIEGSD

SEQ ID NO: 42169 - protein, 73 aa, Zea mays
  Coding DNA Sequence Number=SeqID_390
MARRITAQVFAEIDQTPAASPGCYGSAMGGTQCRPPAQRVKKKGADVGVSHEYGSSFTTTQSAWEGPTTYGAT

SEQ ID NO: 42170 - protein, 101 aa, Zea mays
  Coding DNA Sequence Number=SeqID_391
MGLVCEDPHEIRSNRRLKSGGLACCSLEDQKNLAGDKIATAVGDGSATMVKIIRDVALKRCGGTARLISGRRTIAVALPVRVNSPARLQLREPHPTSAIGL

SEQ ID NO: 42171 - protein, 245 aa, Zea mays
  Coding DNA Sequence Number=SeqID_392
  Homolog annotation: Hit_ID=Q6EP57; Match level="QueryCoverage=49%, HitCoverage=54%, E-value=2e-59, Identity=94%"; Hit description =Putative Oxygen-evolving enhancer protein 3-2, chloroplast
  Pfam annotation: Domain name=PsbQ; Domain location=38-245; Score =121.7; E_value=2.1e-33; Accession=PF05757.2; Description=Oxygen evolving enhancer protein 3 (PsbQ)
MEPVNLELHVGLMLCGKTYRTPFSFAMATLARHLILCSSSPSQRRRRPLPPDATAGTQQQQQQQAPPPQPSTTRRLAVAASAALAATAALSARRPAPPPPAMAAEAAVPPAPPTPASPGTVPRWGTRSYVRERFFEPELTAEEAAARIRQTAEGMRTLRPMLETMSWKYVLFYVRLKSKYLGLDLTTAMAGVPAGRRADYVRVANELVDNMTEFDRFVRTPKVYESYLFYEKTLKSLDDVAEFLV

SEQ ID NO: 42172 - protein, 161 aa, Zea mays
  Coding DNA Sequence Number=SeqID_393
  Homolog annotation: Hit_ID=Q8H4Y5; Match level="QueryCoverage=31%, HitCoverage=12%, E-value=6e-18, Identity=78%"; Hit description =Nuclear inhibitor of PP1-like
MERPAKEEAIWELAIETTGCRADGLRGGWLEAEPQIDALVARRISKVRKGTSSRVAGQDGDAPKHVGTQVGGGQSTWQPPDWAIEPRPGVYYLDVVKDGTSTTIHKRNSKKEDTAVYINNKQFFFSDCSIWFSVVFPCHLLIQGYALGCNHEASRSSGTQM

SEQ ID NO: 42173 - protein, 489 aa, Zea mays
  Coding DNA Sequence Number=SeqID_394
  Gene Ontology: Mol. function=transferase activity, transferring glycosyl groups; Cellular component=cytoplasm; Biological process =metabolic process
  Homolog annotation: Hit_ID=Q6EP59; Match level="QueryCoverage=95%, HitCoverage=97%, E-value=0.0, Identity=72%"; Hit description =Putative UDP-glycosyltransferase 85A8
  Pfam annotation: Domain name=UDPGT; Domain location=14-483; Score= -32.4; E_value=5.5e-09; Accession=PF00201.9; Description=UDP -glucoronosyl and UDP-glucosyl transferase
MSAATLPPGQEPHAVCVPFPAQGHITPMLKLAKILHARGFRVTFVNTEYNHRRLVRARGAAAVAGLTGFRFATIPDGLPESDADATQDPATISYATKHNCPPHLRNLLAGLDGVTCVVADNLMSFSLDAAREAGVPCALFWTASACGYMGYRNFRLLIDRGIIPLKDEEQLTNGFMDTPVDWAPGMSKHMRLKDFPTFLRTTDPNDVLMTFQLQEVERSEYASAVIVNSFDELERPALDAMRATIPAVYTIGPLASVTEQVVPRGPLNAVSCSLWQEDQSCLAWLDARKPQPWSVVYVNFGSVTVMSGQELAEFAWGLASSGHDFLWVVRPDVVKGDTSSAAALPPGFLEATKGRGLVASWCDQEAVLRHEAVGLFLTHSGWNSTQESLSSGVPMLSWPFFAEQQTNCRYKCVEWGVAMEVGDDVRREAVEATIREAMGGDKGKEMARRAAEWKEVAAGAAARSIANLDTLINDVLLSPARLGGSLKTT

SEQ ID NO: 42174 - protein, 220 aa, Zea mays
  Coding DNA Sequence Number=SeqID_395
  Gene Ontology: Mol. function=zinc ion binding
  Homolog annotation: Hit_ID=Q69JV9; Match level="QueryCoverage=99%, HitCoverage=86%, E-value=7e-79, Identity=69%"; Hit description=Zinc finger (C3HC4-type RING finger)-like protein
  Pfam annotation: Domain name=zf-C3HC4; Domain location=40-74; Score =4.1; E_value=0.059; Accession=PF00097.15; Description=Zinc finger, C3HC4 type (RING finger)
MGDHVAVDVGELVASRVGEAAGLVSGAKEETEALIGMVECRICQEEDLRKNLESPCACNGSLKLLFKRLNIVICKDVLGPTLYKPGYTAPTQVHHDETTIEISGGDWTISGNRLDLHDPRILAMAAAQHRLLEDDYDEYTATNNNAAAFCRSIFLILMALLLLRHTLTITNSDDEDDASAIFSLFLLRAAGFLLPCYIMAWAISIMQRQRQRQDGCNILV

SEQ ID NO: 42175 - protein, 556 aa, Zea mays
  Coding DNA Sequence Number=SeqID_396
  Homolog annotation: Hit_ID=Q10SE0; Match level="QueryCoverage=50%, HitCoverage=66%, E-value=1e-100, Identity=59%"; Hit description=CBS domain-containing protein, putative, expressed
MAHKWVIAGKATPLNEYMLGSGVAGVLVKRIEQPHVEHVMETIALWKLKTIAHAGKGGELTHDETTIITGALELTQKIAKDAMTAISETFSLDINAKLDLVADDLPLYDILNEFQKGHSHMAVVIKRTKEAGVSTEKQKSTTADYKINPKDARADGSSPSYGSTAVSRRINIEKHGDGRPYNKKSERKRENILDFNNDPLPSYSMDEEAVGIITMEDVMEELLQEEIYDETDEYVDVHNKIRINMLTPGKSLSPAISPGGGPLSQGFRRTPMASPFSPYHHGSSVLRSPASNHGQSPGTLPTILSPGRSPTAQTPGQSSPNGSQASSDRPAGLLWVPGMSPCPTTGAGPSERAQEIARRREEMLHDLPESEYELSLTDLVEKAAGGGDCGEAAPAPMAEGKDPGASRPAPGGQLPPAAARRASARRRDSGGSFRFRSSSDGVLLNFYMPRSLTRSFTAPRPARTPSSASGCRSPTIASDCSKRERDSDAETVKCWSLLWDRRWRKSSRRDPGAPPSESESAIRAASVVKAKRPSTPLRRPISEPTFFRPSPAPPAG

SEQ ID NO: 42176 - protein, 188 aa, Zea mays
  Coding DNA Sequence Number=SeqID_397
MGREDDATGGGIFCRGAVDLGADHIRLTEGQRRLRHSDCSATRQSESDRQSGLAKGATANSAPPDPRARTRAKTRKTANSAPPDPRARTRAKTRKTANSAPPDPRARTRAKTRKTANSAPPDPRARTRASTRKTTKLRFARPQGSDSALASAERLPPRPTPWLGLGHGNKRQTQPWLRRNPHVALPRA

SEQ ID NO: 42177 - protein, 598 aa, Zea mays
  Coding DNA Sequence Number=SeqID_398
  Gene Ontology: Mol. function=protein serine/threonine kinase activity; Cellular component=membrane; Biological process=protein amino acid phosphorylation
  Homolog annotation: Hit_ID=Q10SE3; Match level="QueryCoverage=71%, HitCoverage=82%, E-value=1e-169, Identity=71%"; Hit description =Protein kinase domain containing protein, expressed
  Pfam annotation: Domain name=Pkinase; Domain location=153-424; Score =133.8; E_value=4.6e-37; Accession=PF00069.15; Description=Protein kinase domain
  Pfam annotation: Domain name=Pkinase_Tyr; Domain location=153-424; Score=155.6; E_value=1.3e-43; Accession=PF07714.7; Description =Protein tyrosine kinase
  Pfam module annotation: Pfam domain module=Pkinase::Pkinase_Tyr; Domain location=153-424::153-424
VGAAIVLVLLFIFVCFSRRRRGRRLAGQPPYYPADTKLLKKHLQQQATPTPTPTKDIQEIVRRQQEPAVQLAKAVPQPQPQPQTPPPPPPPQHRPPARKTPGSGVSATTSGGSERDGATPRSTGSGAGLPEVSHLGWGHWFTLRELEEATGGLAEENVIGEGGYGIVYKGTLHDSTLVAVKNLLNNRGQAEKEFKVEVEAIGRVRHKNLVRLLGYCVEGAYRMLVYEYVDNGNLDQWLHGDVGEVSPLTWDIRMNIMLATAKGLAYLHEGLEPKVVHRDIKASNILLDQQWNAKVSDFGLAKLLCSERSYVTTRVMGTFGYVAPEYASTGMLNERSDVYSFGVLIMEIITGRCPVDYTRAAGEVQLVEWLKNMVAERKAEEVVDSKMAERPPPKTLKRALLVALRCVDPDANKRPKMGHVIHMLEMDDLQFRDDKRPGAGRDGRRPQGPDRLVVDVDVDVDGSKNKGLEDFAEKKTTGRGAHNNVAGGNQRVLSCQLDEVCGSSAGGSPGLKPRTKQPLSIPSDVLDILNCSQITSSKNMSSAADKRHNQSLFLSGPFMQLAHGPGKRPQQTATYVTEIDNQSAQAKFLVSVIIMTKP

SEQ ID NO: 42178 - protein, 103 aa, Zea mays
  Coding DNA Sequence Number=SeqID_399
MAAREESSGSSCCRSSEVRTRLADQCNICECITRDIHKGGARVFPCHKGEPSDCCILSLRETINFLQIKGIHPALLESSTKTNDPVLGNPAYRFQEDLSKQQV

SEQ ID NO: 42179 - protein, 170 aa, Zea mays
  Coding DNA Sequence Number=SeqID_400
  Subcellular localization annotation: CTP_CleavageSite=88; ConfidenceScore=5.12e-01
MAGGARVGVVAPVLPGRRVASDRTGAVADGGRACARTPETAWPLGPRARRRRICALLRSRRRGRLRTRVMRPRPRRGRTPAPWLHHAEAAAAPEPGRDSAPAPGPRCLWAVPHAAVTRAQSRCPRIAEGPRVRVGLTLSWPAPRPPARGAAPPHCVPSGPCLAEATLLKL

SEQ ID NO: 42180 - protein, 219 aa, Zea mays
  Coding DNA Sequence Number=SeqID_401
  Homolog annotation: Hit_ID=Q6ZLF9; Match level="QueryCoverage=15%, HitCoverage=9%, E-value=6e-07, Identity=68%"; Hit description =Putative seed specific protein
  Pfam annotation: Domain name=TPX2; Domain location=46-99; Score=29.1; E_value=1.6e-05; Accession=PF06886.2; Description=Targeting protein for Xklp2 (TPX2)
MQISRRDNRYGPIWAIWERPTQPVDSINKARAGKTKKTTIVVAPTFVCDNRAEKRGEFYTKLEEKRKALEEEKLQAEARKWTQQGKGESLLGVGAEHGIYGCSGVAEIPARHDLRDPHLVESEAGRWEWGRLLDAISDCRGVARELGEICAWRGSRGHGCALGVGRDPRLACWSWARLCAGSWARSALLVLVVGAAASWEWGRLLGVARLCGRGQGRLI

SEQ ID NO: 42181 - protein, 87 aa, Zea mays
  Coding DNA Sequence Number=SeqID_402
  Gene Ontology: Mol. function=nucleic acid binding; Biological process= DNA integration
  Homolog annotation: Hit_ID=O24587; Match level="QueryCoverage=65%, HitCoverage=5%, E-value=4e-25, Identity=87%"; Hit description=Pol
MADNPIEHSRTKHIDIRHHFLRDHQQKRDIEVYHISTKNQLADIFTKPLNEKTFCRLRRSPIHPLYVLSPSTKEYLVEPKTSAKHIS

SEQ ID NO: 42182 - protein, 188 aa, Zea mays
  Coding DNA Sequence Number=SeqID_403
  Subcellular localization annotation: CTP_CleavageSite=77; ConfidenceScore=5.06e-01
MDYMVFEVAELDGSAMICHTNNKMKGYLLVLNVSGTAQQRSKSTLSPSLPPPGEKRRTAFRRTGGREVKRSEGDVVVVEEEAKRAKTTCSWHGDFCSFVFTQASSNGVGISDQPARTSAYLLLSPRAVVSSARKSQVLAPPRITPLRKEHVKDMHIGSGTGGTEELNLNHHTDVERKPNKSIFNRLAK

SEQ ID NO: 42183 - protein, 136 aa, Zea mays
  Coding DNA Sequence Number=SeqID_404
  Pfam annotation: Domain name=Zim; Domain location=85-114; Score=19.8; E_value=0.0025; Accession=PF06200.4; Description=ZIM motif
  Subcellular localization annotation: CTP_CleavageSite=57; ConfidenceScore=5.25e-01
MWFLIGPCLNRLRPASTSVQASHPGPSCHPLAFHVLQCFPLTTGCLAPAVAMGLMPAAAAAAEATEERSTVLEFFPQQAGTLKDEQQNKAGGKVVVMDNFPADKADELMQLTGSGNAALAAAQSALGQPSLKGLIG

SEQ ID NO: 42184 - protein, 115 aa, Zea mays
  Coding DNA Sequence Number=SeqID_405
  Subcellular localization annotation: CTP_CleavageSite=55; ConfidenceScore=5.35e-01
MAPCSQHLFGMAPAGTAGLNSNHNGFPALGVTGALFSPAHVTGLPREETGRVPVVLEERNGPLVLFRGFLILLILTSFPVLFFLVEPDSPAATAASAALAAGRHRRRHRPLLALT

SEQ ID NO: 42185 - protein, 534 aa, Zea mays
  Coding DNA Sequence Number=SeqID_406
  Gene Ontology: Mol. function=dimethylaniline monooxygenase (N-oxide -forming) activity; Cellular component=intrinsic to endoplasmic reticulum membrane; Biological process=electron transport
  Homolog annotation: Hit_ID=Q9LMA1; Match level="QueryCoverage=95%, HitCoverage=96%, E-value=1e-164, Identity=55%"; Hit description =Probable flavin-containing monooxygenase 1
  Pfam annotation: Domain name=DAO; Domain location=22-354; Score= -57.3; E_value=0.038; Accession=PF01266.14; Description=FAD dependent oxidoreductase
  Pfam annotation: Domain name=FMO-like; Domain location=22-527; Score=- 343.3; E_value=5.3e-08; Accession=PF00743.9; Description=Flavin -binding monooxygenase-like
  Pfam module annotation: Pfam domain module=DAO::FMO-like; Domain location=22-354::22-527
MAAASRQDAHRSTRQAVPASSRVAIIGGGISGLAAAKQLAAHDPVVFEATASVGGVWKHCVYRSTRLQTPRRDYEFSDYSWRNRDDPTFPTHAEIVEYLEGYADAFGLWRYIVLSARVVDIKFLGGGGLTELWSGGAAGQPPLLRGKPLWEVGVATAGSDTVQYYQFEFVVMCAGKYGDVPRMPAFPPGRGPEVFRGQVMHSLDYCKLGEEETVELMRGKKVVVVGYKKSAIDLALECAQANQGEGGEACTMLVRTLHWVVPSYSIWGLPFFLFYSTRLAQFLYERPNQGLLRSMLCTLMAPLRAGVSKFIESYLAWKLPLDKYGLRPDHPFVEDYASCQMAILPDGFFDMADRDMIRFKRAGPGGWCFSRNGVLLDDGTEVEADLVFLATGFEGKDKVRAVLPEPFRGLVVDRSGMMPLYRGTIHPLIPNMAFVGYVESVSNLHTSELRCRWLAGLLGGRFALPSVEDMVRHVDGEAEAMRRTTRFYKRHCISTYSIHDSDAMCADLGSRVLRKGNCLAELFAPYNNKDYKED

SEQ ID NO: 42186 - protein, 202 aa, Zea mays
  Coding DNA Sequence Number=SeqID_407
  Gene Ontology: Mol. function=ATP-dependent helicase activity; Cellular component=nucleus; Biological process=mRNA catabolic process, nonsense-mediated decay
  Homolog annotation: Hit_ID=Q9LYJ9; Match level="QueryCoverage=30%, HitCoverage=9%, E-value=2e-21, Identity=80%"; Hit description =Probable DEAD-box ATP-dependent RNA helicase 46
  Pfam annotation: Domain name=DEAD; Domain location=80-197; Score=8.2; E_value=1.1e-06; Accession=PF00270.19; Description=DEADDEAH box helicase
MAVAKNILATGWEAHLNTVKADNKGSKNEIYTSRVHYMIHKGTPYLIVPENDMHNIVKLLILHLLMNIIIDERGSLAVFSLIRDRVASLLKPSKDEIEAARMAAINKEIKRVLTEVLSKAGQKCLYGGAPKGPQLRELERGVDILVATPRRLNDILEINRVSLHQVSYLVLDEADRMLNKYHLYKYIRPLQLPCRRMNEKTG

SEQ ID NO: 42187 - protein, 162 aa, Zea mays
  Coding DNA Sequence Number=SeqID_408
  Homolog annotation: Hit_ID=Q6R4Q7; Match level="QueryCoverage=20%, HitCoverage=7%, E-value=2e-08, Identity=70%"; Hit description =Splicing factor-like protein
  Pfam annotation: Domain name=RRM_1; Domain location=4-53; Score=7.3; E_value=0.03; Accession=PF00076.12; Description=RNA recognition motif. (a.k.a. RRM, RBD, or
MRPVFCGNFDHDTRQYDLERLFSKYGPISRIDMKLVVSQIWFMCTILDRVVTVEYAFRDDDGDRDDRYDIPKQGAYDRRGGSPYMRSPSPSPVDSEEPSKEVVSKEEVASNNMIFATPSIPGGAVVFQDNSRDNNMDPIPESPPEIPLLGDEGEGSLIHTEI

SEQ ID NO: 42188 - protein, 276 aa, Zea mays
  Coding DNA Sequence Number=SeqID_409
  Homolog annotation: Hit_ID=Q5N7G7; Match level="QueryCoverage=16%, HitCoverage=23%, E-value=1e-09, Identity=68%"; Hit description =Prolyl 4-hydroxylase alpha subunit-like
  Pfam annotation: Domain name=DUF584; Domain location=27-170; Score =94.6; E_value=2.9e-25; Accession=PF04520.4; Description=Protein of unknown function, DUF584
MAMPRAPGAGSLRFLGLLKQPESDAAAPFELDERDVLWPTGGGQQDGWAAPPARRRRAHAMPLYSFGLSSLLAEDCGGGVPVPVPGRAMAMAPSAAPRQSAPVRVPAPWPGGRRADEDEEDGEEVVPPHVVAARRHARSSSVLEGAGRTLKGRDLRSVRNAVLRQTGFLDLTNPTANIFLLCSAPTGGGGGVGGWRRDGIMRFRQRSEMGKRQAQIPMPCRDCPQAKASLHRQAVSRSMPSLELNSFMIWMFSSTLTLSVPSCVFTDSLFEDVDRA

SEQ ID NO: 42189 - protein, 650 aa, Zea mays
  Coding DNA Sequence Number=SeqID_410
  Homolog annotation: Hit_ID=Q10SS1; Match level="QueryCoverage=99%, HitCoverage=98%, E-value=0.0, Identity=59%"; Hit description =Expressed protein
  Pfam annotation: Domain name=DUF726; Domain location=295-636; Score =220.7; E_value=3.3e-63; Accession=PF05277.3; Description=Protein of unknown function (DUF726)
MATTLTPTQRYAAGTLLALALRQAQIHQSEPLGSGPDDEERASSASGSSSSTISSTGSDTTSGAGLWTHDSRGLLRPVFRFLEIEPKAWAGMEETAASPDAAKHHIGAYPIVSFHSLVSQFISILFEEDGESSSDRLEQEIALAKAVDVMVMSLGSDTAPDENIKDEFKYSTACTYATLESTEAGSSENLLGIVKLSLENVPVNEHRKMVLLYALLSACIADKPVSQEEEDRKSSHFRKGYDARHRVALRLIAAWLDVKWIKMEAMEVMVACSAMAAAKEQEQERENASPRSKWEKWKRGGIIGAAALTGGALLAITGGLAAPAIAAGFGALAPTLGTLVPFIGASGFAAMAAAAGSVAGSVAVAASFGAAGAGLTGTKMARRIGKVKEFEFKPIGDNHNQGRLAVGILVSGFAFDEEDFWKPWEGWKDNLEKYGMYILQWESKHIIAVSTAIQDWLTSRLAMELMKQGAMRTVLSGLLAAFAWPATLLAATDFIDSKWSVAIDSVPNSLFSELMNCILSDQIRQEKCLQKCFLRDCKETEGLVERVVLLGAPVSVKGERWEPARKMVAGRFVNVYSRDDWILGVTFRASLLTQGLAGIQAIDVPGVENVDVTGLVDGHSSYLSAAQQILEHLELNTYYPVFVPLPEVNK

SEQ ID NO: 42190 - protein, 2010 aa, Zea mays
  Coding DNA Sequence Number=SeqID_411
  Gene Ontology: Mol. function=zinc ion binding; Cellular component =nucleus; Biological process=homophilic cell adhesion
  Homolog annotation: Hit_ID=Q7XCX5; Match level="QueryCoverage=99%, HitCoverage=76%, E-value=0.0, Identity=39%"; Hit description=Plus-3 domain containing protein, expressed
  Pfam annotation: Domain name=GYF; Domain location=580-633; Score =34.6; E_value=3.3e-07; Accession=PF02213.6; Description=GYF domain
  Pfam annotation: Domain name=Plus-3; Domain location=292-398; Score =150.6; E_value=4e-42; Accession=PF03126.8; Description=Plus-3 domain
  Pfam annotation: Domain name=SWIB; Domain location=154-229; Score =83.0; E_value=9.1e-22; Accession=PF02201.9; Description=SWIBMDM2 domain
  Pfam module annotation: Pfam domain module=GYF::Plus-3::SWIB; Domain location=580-633::292-398::154-229
VDFDDILSWEYLFKLYWLDLKGKLSLTLEELTIAKTRWNVPSTSARKEKDESSDDLYDANNDDDAGTDCSSGKRRRTNSRKKGQKCRKVNKDCSVPAKKVELPITNTESVPTEVTNERVPLPVDTKVPNGWVPLPVDTKVPNESVPLPANTKWASPELLEFVGHMRDGDQSFISQFDVQTLLLDYIKKNNLRDPQRKSQIICDLRLHRLFRKARVAHFEMLKLLEMHFLMNETSTVTDSRQVTIDLNSAYVDTNGYNDMAAKFSPDKRRKIHRKMERDTQVNLEDYAAIDMHNINLIFMRRSLMEDLVDDAKFSDKIHGGFVRIKISDVYQKQDIYRLVKVTGTHKVPEKYSIGKKMTNFALEILNLNKKEIITMDTISNHDFTEEECKRLRQSMKCGVISRLKVGDILEKAKILQSVKVNDWFENEKQRLGHLRDRASETGRRKEYPIRPYYDVLLNDSEERTRRINEVLEVHVDSHMDPNYESAEETDEKRTVGKSVDRTRPDTTISRRISRYLSTMQNHPQKVSDCSHHPKNLSTESTICGSGARSLENSTANRTMYEAGSFSSSGVTMSNDTEPEKVWHYKDPSGNVQGPFTLLQLSKWTSYFPRDLRVWLTFESEERSLLLTEVLSKQQKDFTQAASHTSSKATLVGTGHTRNNPSVDQTNAFSPAGHSVVSSSGITVQYNKYSVPERESVYSPDDSLSLSTSSVPPKDACTVNSQTHCQNKHSVFIQSPGSAYGHTDLNHDGIQGGCSGESNHHHSSGALWSPTVVQVSCGHGNVESHQSQHVSWSQSQHESKNSSQRPVKDLNSRRDLSKNLPTQRIGKDVSSPLFACAWSPAESRTASSQHDGSCLSSTTNPNFLDELHYSIASAKPKSCAPATPIEDRGSSSPSGMLSHAERVPICSPQSTPLASAFDMCKMEEIMNQQRTLEPDTSNASINQSPESKIFPVSSPDNHDIDREFPSPVPRSENKDIAVDSSGLTPASPENITTNLPGSDTCKMEVMSQQQVTEAVVSNSSDNHSPQSKVSPVSSPNNEDMKHQYPSSTRRSENKIPAVDNLLSTSAARENLTTTSAHDSDTCKMVELVNQPKTPEVDASNAPLCQSPHSHTSQVPSDNQDIERECPGPTPRSDSKEPLVNNSATTSASASDTIKMEEFVNQQKTVEADASNAPLNQSHSHIFPVPSDSQDIEHECPGPTPRSDTKEPLLNNSVLTLAASEILTTTSAASDTCKMEDSVNQQKTLEADALNAPLNHHPHSHVLPVSFDNQDIQHEYPSPTPKSDSKEPLVDNSVLTSVGPEMLATTSVSDTCKTEEFVNQQKAVEADASNASLNQPHISAVPSDKQDIECECSSPTPRSDCKEPLMDNSVLTSAVPEILATSSASDKCKMEEFVNQQRPIEVDASNASLNQYSRCHIFNVSSDNQYVERECSSTTPRSDCEEPLMDNSILTSAVPEILATSSASASDKCKMEEFVNQQRPIEADASNASLNQPHRCHIFTVSSDNQDIECECPSPTSRSDSKESLVDNLVLTSAVPENLPTSFAVASDSCKMEILNKKRTLEADASNASLDQPSHSSVFTSSSNDNQGNACERPSPNPRPEGEQPLMDNSGLTSPVPQNLTSASDICKMGEILNENRTLEANPSNGSITQSHQSKVFLVPSIDILERECSSETPRPQFKEPVVDSSGLTSAAPESLTAKQHVHSPDAFIPPKHGAPTGELGDAKSDFKGEEIIQKEQYCEREPIVATRENLLIDLSCGAESIDVSDVLESLMEERSVTSYVPVSIEDFLAASAVEEPQYSSPIALSPWGEPSYYQGDAGDSALWGIQDSINDMWSLLSPRPMLQASSGIGTEGKETFDINEVAVTHVNSDFFQRGSMLGEENMNQANLSVAADRMLLPEQVPSIPNGMSTSSVDEGTRVIGSQASINQSLDWGTTWRTSQNLSVYSNEIAGPSSKSYWEESRKQEATNSGVSISGEAIRNKRLNPPDNAIRGSHHHRGSLYRLIKIKSTERK

SEQ ID NO: 42191 - protein, 149 aa, Zea mays
  Coding DNA Sequence Number=SeqID_412
  Homolog annotation: Hit_ID=Q7XCX5; Match level="QueryCoverage=28%, HitCoverage=2%, E-value=2e-17, Identity=83%"; Hit description=Plus-3 domain containing protein, expressed
  Pfam annotation: Domain name=PHD; Domain location=94-142; Score=17.8; E_value=0.00094; Accession=PF00628.19; Description=PHD-finger
MEAAAPDGAGKASPAPEEPDWPPELRLLAPPPAAGTDDPQFLSSIIGDAAAPPPPMPPLAQKRKRGRPPKRKDGAGAVVPARPARRREDEEEVVCFICFDGGNLVVCDRRGCPKVYHPACIKRDEAFFQSRSKWNCANMIFGGRRWTLM

SEQ ID NO: 42192 - protein, 51 aa, Zea mays
  Coding DNA Sequence Number=SeqID_413
MGMAAPALALVHLFRRFYDNNEAKNLEREVEREKRTLAEDVIMDLMHLELD

SEQ ID NO: 42193 - protein, 645 aa, Zea mays
  Coding DNA Sequence Number=SeqID_414
  Gene Ontology: Mol. function=structural molecule activity; Cellular component=clathrin coat of trans-Golgi network vesicle; Biological process=intracellular protein transport
  Homolog annotation: Hit_ID=Q10SS6; Match level="QueryCoverage=88%, HitCoverage=55%, E-value=0.0, Identity=78%"; Hit description=Adaptin N terminal region family protein, expressed
  Pfam annotation: Domain name=Alpha_adaptinC2; Domain location=377 -486; Score=8.2; E_value=0.00056; Accession=PF02883.10; Description =Adaptin C-terminal domain
  Pfam annotation: Domain name=Alpha_adaptin_C; Domain location=492 -614; Score=-0.3; E_value=1.3e-05; Accession=PF02296.7; Description =Alpha adaptin AP2, C-terminal domain
  Pfam module annotation: Pfam domain module=Alpha_adaptinC2::Alpha _adaptin_C; Domain location=377-486::492-614
MGREGACSCLGWHGGGRGAAAGEEGEGQRLGWYVDVILQLIDKAGDFVSDDIWYRVVQFVTNNEDLQSYAAAKAREYLDKPALHETMVKVSAYLLGEYGHLLARRPGCSPKEFFAIINDKLPTVSTSTVAILLSTYAKILIHTQPPDVGLQQQILTIFKKYESYIDVEIQQRAVEYFELSRKGPALADVLAEMPKFPERESALLKKAEDAEIDTAEQSAIKLRSQQQTSSALVVADHSPANGSAPPANHLTLVKMPSQIVSDTQESGVIHEEVPNPPVEAPKENGTPVEVESRDTNITGINNEVKTEPPSTSHSTSPADLLADLLGPLAIEGPPAVEQNPTQGLNSNQSPVGDLALATLDDQSNSVQPIVNVEEKFHILCTKDSGVLYEDPHIQIGMKAEWRAHHGRLVLFLGNKNTSALTSVRVLILPPSHLKMELSSVPDTIPPRAQVQVPLEVANLRASRDVAVLDLSYTFGTSLVDGKLRLPVVLNKFLQPITLTPEEFFLQWKALTVHLLKVQEVVKGVKPMPLSEMANLFMSLHLAVAPGLDNNPNNLVACTTFFSEATRAMLCLIRLETDPQDRTQLRLTVASGDQHLTFELKEFVKEHLIDIPRTQAAPPMAMVQPQLLTAAPATYNDPGAMLAGLL

SEQ ID NO: 42194 - protein, 801 aa, Zea mays
  Coding DNA Sequence Number=SeqID_415
  Homolog annotation: Hit_ID=Q10ST1; Match level="QueryCoverage=94%, HitCoverage=56%, E-value=0.0, Identity=68%"; Hit description =Expressed protein
  Pfam annotation: Domain name=WD40; Domain location=228-276; Score =19.8; E_value=0.01; Accession=PF00400.22; Description=WD domain, G -beta repeat
  Pfam annotation: Domain name=WD40; Domain location=478-527; Score =15.2; E_value=0.23; Accession=PF00400.22; Description=WD domain, G -beta repeat
  Pfam annotation: Domain name=WD40; Domain location=634-677; Score =14.7; E_value=0.33; Accession=PF00400.22; Description=WD domain, G -beta repeat
  Pfam annotation: Domain name=WD40; Domain location=704-740; Score =4.9; E_value=9.8; Accession=PF00400.22; Description=WD domain, G -beta repeat
  Pfam module annotation: Pfam domain module=WD40::WD40::WD40::WD40; Domain location=228-276::478-527::634-677::704-740
MAVAWKGKKLHPSGIERILTFFMTNKVLDKIAVAFKEFSHKTKNKILIAGDKKGNITAYPFPKILVLHDSGLMQQKMLPCCRFKGAHGISSVTSVHIEDSTSDHIEIHTTGGDGCICFFKYGRIAQKIEFFGMRQVKELGTIQSIYTNLASESQSSSTYAIGFTSADFIIWDLENETKMAQVSCGGWRRPYSYYLGTVPEYQNCFAFVKDHDIHIHRHWAPTHDKKLLAQVLHLQFHGREVHSLCFINPASHSDPENSSDLLIATGCEDGTVRLTGFLTGSSGKWHSSKLLGEHVGGSAVRATCFIPETYTVTYNSCNYSSNGISDGIAVEKDETFLLISVGSKQVLTTWILQPRNAENRQVYSSGLDIDSKQNSRNLENVDSAMSFQWLTTHMPPKLPRNRLKSGHIKQRVEEGNFSVVQPNMDVMDHMENDWRYLSVTAFHLKHPVLSRLTVCFVAVACSDATVVLRALLLPSRLWFDVAFLVPHASPVLVLRHIIINASHYKDDAGDRYLIASGSTDGSITFWNLTETIHGFMQLISETQPHMSIDYQKRPRTGRGSQGGRLRWRSLSYASKKRDGDMSSSDGSNPGSLNTAENSSEASGVENTQIVVHEASDSSKTEMPSSTQSCDIPELRPMHSLSGVHQSGVNCLHISFSTPDKSYCIISGGDDQSVQRFNFRVISSEDCLTTPARLNSHDNDTLKILYQHKVASAHSAAVKGIWTDGTWSFSTGLDQRVRCWKMGLAGQFTEYSHAIISVPEPETLDVFHDRGDACLARAKRKYHIAVAGRGMQMVEFSPPEDD

SEQ ID NO: 42195 - protein, 490 aa, Zea mays
  Coding DNA Sequence Number=SeqID_416
  Gene Ontology: Mol. function=tetrahydrofolylpolyglutamate synthase activity; Cellular component=extracellular space; Biological process= folic acid and derivative biosynthetic process
  Homolog annotation: Hit_ID=Q10SU1; Match level="QueryCoverage=95%, HitCoverage=89%, E-value=0.0, Identity=78%"; Hit description=FolC bifunctional protein, expressed
  Pfam annotation: Domain name=Mur_ligase_M; Domain location=69-257; Score=-30.8; E_value=0.00079; Accession=PF08245.2; Description=Mur ligase middle domain
MASAAAAQAQPGGAPPATAEYEEVLGRLSSLITQKVRANSANRGNQWDLMEHYVKILELEESIARMKVIHVAGTKGKLLSEGIRVNISEEKFLKYFWWCWNKLKEKTDDDIPMPAYFRFLALLAFKIFSAEQVDVAVLEVGLGGKFDATNVVKAPVVCGISSLGYDHMEILGNTLGEIAGEKAGIFKVLFNCFPKGVPAYTAPQPEEAMTALKQRASELGVSLQVVDPLEPHHLKDQHLGLHGEHQYINAGLAVALASTWLEKQGHKDTLPLNRTDPLPDHFIRGLSSASLQGRAQIVPDSQVNSEEDKDCSLVFYLDGAHSPESMEVCGKWFSHVTKDDTRLPSSLEQSHTSRSQKILLFNCMSVRDPMRLLPCLLDASTQNGVHFDLALFVPNQSQHTKLGSNTSAPAEPEQIDLSWQLSLQTVWEKLLQDKGINTTKSSDTSKVFDSLPVAIEWLRRNARENQSTSFQVLVTGSLHLVGDVLRIIKK

SEQ ID NO: 42196 - protein, 376 aa, Zea mays
  Coding DNA Sequence Number=SeqID_417
  Gene Ontology: Mol. function=RNA binding; Cellular component =ribonucleoprotein complex; Biological process=RNA processing
  Homolog annotation: Hit_ID=Q1T402; Match level="QueryCoverage=22%, HitCoverage=16%, E-value=8e-15, Identity=47%"; Hit description=RNA -binding protein Lupus La
  Pfam annotation: Domain name=GRP; Domain location=120-209; Score= -10.1; E_value=0.00076; Accession=PF07172.2; Description=Glycine rich protein family
  Pfam annotation: Domain name=La; Domain location=297-344; Score=51.5; E_value=2.8e-12; Accession=PF05383.7; Description=La domain
  Pfam module annotation: Pfam domain module=GRP::La; Domain location =120-209::297-344
MASNADQHAAVVSAAPSDSPVGAKKAGAAAAVWKLPAAAAVPVAEVVENPIMDAHSWPALPGLSSPPPPPPPHAGPTAKASPKAASPAPTGAATSPVSLGNPGAPDASHGNDARVRNPVARRALVMPAADGLEKSAPAPEPSPVYVPNARSNGADPHQNGRPGSHHHGRGGGYGGGNRRGNGGGGGRRGSEHHGGFDGQRRGGGRRDGHGPVHQLRGHQPTYIKAPVVAGAPPPPPPFVSPATPQTPPYGPPMGFHDMSAHVYYFPAPTSEGIQGLPFVPLPASPQAVLIDPSRKNLLEQIEYYFSDDNLCKDLYLRQHMDGQGWVPLSLIAGFRQGSVASRRIFFQGSLQAEFIPTNSSGTSIFSVFSYTFVQAV

SEQ ID NO: 42197 - protein, 108 aa, Zea mays
  Coding DNA Sequence Number=SeqID_418
MSPKRDELTWFAYLFHIIVKSIIKEIDGDVFCLLLDESSAKVKDRYCQVELNVHDLEKVGLAKDKGMKYFEGLRAKEKVKRTEVPEAKVKNKFLQGSRLIKPRKEIVH

SEQ ID NO: 42198 - protein, 388 aa, Zea mays
  Coding DNA Sequence Number=SeqID_419
  Gene Ontology: Mol. function=oxidoreductase activity; Cellular component=chloroplast; Biological process=electron transport
  Homolog annotation: Hit_ID=Q10RL6; Match level="QueryCoverage=82%, HitCoverage=78%, E-value=1e-144, Identity=79%"; Hit description=FAD binding domain containing protein, expressed
  Pfam annotation: Domain name=DAO; Domain location=7-315; Score=-58.3; E_value=0.045; Accession=PF01266.14; Description=FAD dependent oxidoreductase
  Pfam annotation: Domain name=FAD_binding_3; Domain location=7-333; Score=-57.4; E_value=3.4e-07; Accession=PF01494.9; Description=FAD binding domain
  Pfam annotation: Domain name=Lycopene_cycl; Domain location=7-387; Score=-199.4; E_value=0.032; Accession=PF05834.3; Description =Lycopene cyclase protein
  Pfam module annotation: Pfam domain module=DAO::FAD_binding _3::Lycopene_cycl; Domain location=7-315::7-333::7-387
MGDAVEDIVIAGAGLAGLATALGLHRQALPTYSPAQAQSAVAVLRADGRAAGLVSMIAFSAATGEAAAEVSLKIQSKSGPHEIRCVKRDFLLRTLADELPEGTIRYSAKVVAMEEDGVGGAKTLQLHLADGSTIKAKVVIGCDGVNSVVAQWLGLPKPILSGRSATRGLAEYPGGHGFGPEILQFIGHGFRSGVLPCSDTSVYWNYTWYPSPADGDAEESVAKMRSHVVAKLRGAKVPAEALEVVERSEMSDVASSPLRFRSPLALVRGSISRGGVCVAGDALHPMTPELGQGGCAALEDGVVLARCLGKAFALLGQERDEGRVVTAALEEYAAARRWRSIQLITAAYVVGFIQQSNNAVVRFVRDRFLSRLLSKTLVAMADYDCGAL

SEQ ID NO: 42199 - protein, 729 aa, Zea mays
  Coding DNA Sequence Number=SeqID_420
  Gene Ontology: Mol. function=cytochrome-c oxidase activity; Cellular component=membrane; Biological process=electron transport
  Homolog annotation: Hit_ID=Q33B99; Match level="QueryCoverage=90%, HitCoverage=89%, E-value=3e-65, Identity=27%"; Hit description =Expressed protein
  Pfam annotation: Domain name=DUF639; Domain location=46-729; Score =646.3; E_value=2.5e-191; Accession=PF04842.3; Description=Plant protein of unknown function (DUF639)
MDRADGPTQPGTIQCMRTRGPAMDMGFVESQPELTAAPAAGPGTGSRLPGGGGGRKRKHLSSIANHVLRQCSLTLDRSVDDLVADFELGLKTAAVDSYSRKLVEFCSLQALQIITSRDIGEKISEGSLGRFTFDMMLAWETPTPSDQQITMESVAKEREDRKETLGEGEAVMGDETSLFYSDIMPLLVNEEPTVGEEAYVWFGSVFPLACDVVNARFTFEALTATTANRLHYPAYDRFLKEMDKSFKFFQDLPTPTGVEFAEDEFILHMEGTAGTQRVVRHIGTTSWPGRVTLTNKALYFEASGKFSYESAIKVDLSDTGVEHQISTASTGPFGVPLFDKAIVFESLPEPVVLEFPEMTSSTRRNTWLALIREVLSIHRFISAYSIVSPVHRWEVHSRTILGVVRLHAAREMLRMSPPPASSFLVFSLYGDMPKGDFVLEQLASNLKRTSTITRLSASYVFKGLSRSSSVPPLSAEVAAEGRGADDDASGREHERPLASLEDKIGRVRDEAREVTAANAAVEGMKDEGISDSLLVLVGLVGPVGKLRPAIQRITSWERPLVTGSILAAASLIIYNEWFSYVLAASLVLAAGVMVWARQRKIGELCSEVIIDASSSSSSDKTTMDSIVEAQRSLQKVHRYIVTANVAILRLWSIALARSPKHTETVIWMLAVSAAVVAVVPFRYILIGLVAGSFALNTRVARAVMNPQGGRRWREWWESIPAVPVRTVHS

SEQ ID NO: 42200 - protein, 140 aa, Zea mays
  Coding DNA Sequence Number=SeqID_421
MGKGTKRKREPTPPSDEFGDSEYSEEEFSSESEGSPAPVSPPASSDDSDDSQGIAAEVWTYIRAVERAGLEGSNESEYSSDEEDSDGGDEGEDDDDDDDDDDGDDSGRGGGDGSRDSTKGGGGGRDSTKGGGGGRGRASG

SEQ ID NO: 42201 - protein, 37 aa, Zea mays
  Coding DNA Sequence Number=SeqID_422
MATTKAPDSDEISKRQAQFQNAKNGTDDTQQRQKGKF

SEQ ID NO: 42202 - protein, 76 aa, Zea mays
  Coding DNA Sequence Number=SeqID_423
  Subcellular localization annotation: CTP_CleavageSite=51; ConfidenceScore=5.71e-01
MHGTAALARQPPSLSSNQIKRQRLPRPGSVPFRGTEQCGRARAPARGAQVQASMLAASARRSNYSAAQGALPLVRA

SEQ ID NO: 42203 - protein, 134 aa, Zea mays
  Coding DNA Sequence Number=SeqID_424
  Gene Ontology: Mol. function=drug transporter activity; Cellular component=membrane; Biological process=multidrug transport
  Homolog annotation: Hit_ID=Q6K5E6; Match level="QueryCoverage=77%, HitCoverage=23%, E-value=5e-15, Identity=41%"; Hit description =Putative ripening regulated protein DDTFR18
MSLHDKFAVIFTSSPVVLDAVDDLSVLLAFTILLNSIHPVLSVSGVAVGSGWQSMVAYVNIGIPMGILLGRLFNVGVLGIWAEPSFIATLILAIMTVRCDWEKESYTRTVSCHAYRGVYCTTSCHSWRQSRTSK

SEQ ID NO: 42204 - protein, 211 aa, Zea mays
  Coding DNA Sequence Number=SeqID_425
  Gene Ontology: Mol. function=protein-tyrosine kinase activity; Biological process=protein amino acid phosphorylation
  Homolog annotation: Hit_ID=Q6ZL12; Match level="QueryCoverage=96%, HitCoverage=49%, E-value=4e-14, Identity=52%"; Hit description =Putative receptor-like kinase RHG1
MSLENKDNGALVSEGGDELRLDSLLKASAEVVGQGRVREHVQGGARGRRRGGRQAPQRAAVPRQRTANVKPSNILLGERGGAYVSECELMRYATNIQQSIAPQATRTRHPDAVPARAVPGVGRGHDVGARVERRERVARVRDPGAGFRRGRAGDAGIGRVQLRNGALEVMAGECSDETMGMVKIGMLCTTRGAAHDGAGARHDERVRVKLV

SEQ ID NO: 42205 - protein, 766 aa, Zea mays
  Coding DNA Sequence Number=SeqID_426
  Gene Ontology: Mol. function=ATP binding; Cellular component=nucleus; Biological process=apoptosis
  Homolog annotation: Hit_ID=Q8H7P5; Match level="QueryCoverage=77%, HitCoverage=100%, E-value=0.0, Identity=74%"; Hit description =Putative F-box containing protein TIR1
MKKSEHLNSLSERCMGDSDRKPYPAQLCPANAWHLRCARVANDKLLRQNMPCRRKSGPLRKAATFGASSRSAVRATAIAIFGSALLCSRDTVADPALLNLVLINKEQEQPPPLSLDRKEDGALRRSEIARDDCRHRMLIQAPSNSGLRNRCSPSLPPSSSACLSPRRAMSEEDEDQPPPKRPCASPPADQVLDNVLETVLQFLDAPRDRSAASLVCRSWHRAESATRDSVAVRNLLAASATRAARRFPNARSLLLKGRPRFADFNLLPHGWDASAFRPWAAAVAAGSFPALTSLYLKRIPVTDADLDLLSRPLPASFRDLTLHLCDGFTSRGLASIASHCRGLRVLDVVECDMAEEQEVVDWVAAFPPEPTNLESLSFECYEPPVAFATLEALVARSPRLSRLGVNLHVSLGQLRRLMAHAPRLSHLGTGSFRPAEGGEGEAEFGEVVSAFVSAGRARTLVSLSGFRDLAQEYLPIIDVVCSHLKSLDLSYAAVTPNQILMFIGQCYNLETLWVLDSVRDEGLDAVGIYCKKLQTLRVLPLDAHEDADELVSEVGLTAIARGCPALRSILYFCQTMTNAAVVDMSRHCPELKVFRLCIMGRHQPDHATEEPMDEGFGAIVKNCRKLTRLSTSGQLTDRAFEYIGRHGKSLRTLSVAFAGNSDVALQYILRGCSKLEKLEIRDCPFGDAGLLSGMHQFYNMRFVWMSGCNLTLRGCKEVARGLPRMVVELINGQPDESERKESVDILYMYRSLDGPREDVPPFVKIL

SEQ ID NO: 42206 - protein, 120 aa, Zea mays
  Coding DNA Sequence Number=SeqID_427
  Subcellular localization annotation: CTP_CleavageSite=31; ConfidenceScore=5.18e-01
MAAPLNLLARARATGQAHPQRGLGPGRHAAPASLVAGAQPRRAWARPQHPQSAAWRPGAGTATSVTRALGLQRGTAARRTSGPPARHRMGMGARPPPTWRVSGAGAPVTDDHDGSGVRLL

SEQ ID NO: 42207 - protein, 55 aa, Zea mays
  Coding DNA Sequence Number=SeqID_428
MAMAHATGEVSPKGCVPWEKTVSLMERKSKSRTKESHYKGVEASIKIKTSSRSVC

SEQ ID NO: 42208 - protein, 227 aa, Zea mays
  Coding DNA Sequence Number=SeqID_429
  Gene Ontology: Cellular component=nucleus
  Homolog annotation: Hit_ID=Q10QQ8; Match level="QueryCoverage=74%, HitCoverage=18%, E-value=3e-48, Identity=61%"; Hit description =Expressed protein
  Pfam annotation: Domain name=WD40; Domain location=102-142; Score =19.2; E_value=0.015; Accession=PF00400.22; Description=WD domain, G -beta repeat
  Pfam annotation: Domain name=WD40; Domain location=45-82; Score=12.3; E_value=1.4; Accession=PF00400.22; Description=WD domain, G-beta repeat
  Pfam module annotation: Pfam domain module=WD40::WD40; Domain location=102-142::45-82
MNGAEKLRWAFSDGSVTDLLDARSLHGSPDIKKKVQFHSSLVQKLALEKEMEGHVGCVNAIAWNSSGSLLVSGSDDTRDIVSWILSLKGGIVINIWNYNNRELVHDIDTGHSANIFCTKFVPETCDEVVVSGAGDAEVRVFNMSRLSGRRPREISMEPTAVYQCHSRRVKKLASMTKFVFNFDKKNLKEVSDCYGLQWDWGIREGVVVAGMPAGGLFSRPSKKKACF

SEQ ID NO: 42209 - protein, 1194 aa, Zea mays
  Coding DNA Sequence Number=SeqID_430
  Homolog annotation: Hit_ID=Q10QQ9; Match level="QueryCoverage=98%, HitCoverage=100%, E-value=0.0, Identity=60%"; Hit description =Expressed protein
  Pfam annotation: Domain name=Occludin_ELL; Domain location=1092-1189; Score=-13.7; E_value=0.0014; Accession=PF07303.3; Description =Occludin and RNA polymerase II elonga
  Subcellular localization annotation: CTP_CleavageSite=46; ConfidenceScore=5.35e-01
MYKLRGRGGGRGGSGVAKRPMPSNARGRGVASSIGGMAGPPRSRAAAAALKQPVGREEAFCLESSGLPAFAAIIRLTPDLVDEIRRTEEAGGGARIKFNPNMYNSSENVIDVSGKEFKFTWASERGELCDIYEERRSGEDGNGLLLECGSAWRKVNVQRILDESTKNLVKMRSEEAERLSKSRKSIVLDPANPSVKSQAKSMAAAAVEGNPRRMHWKQKSEFLKKNKAAVITPTKSVLKVKLSNNIPKGNISSSPAPSPEQPGESNPSFPVGSDANNEVITPFDFNKEENSKYEKSVRNKMSNKDINRRASSHAANVDDNTNEVRSYLISVLSKNPKGMGLKALEKAVADAFPNASKKIQSIIKNIANYQGPERYVLKSGLEVESSKSHVSEGVRSISKKIEESAPSLTIDDPDICERIDIVGSLVAPTDGKLSNDSEGKAGTSSDSGSDSDSDSSNSGSDSGSQSRSAAETGSGSSSNSDSDGSSSSKEGSDAAVDITSDDDKANIAHTKVVDDLNLSSSPRDLKRLDVDDEQIDIETNLDYRSTSPHIGLNKFNTGNDDAAAEGFSAGNLSKPSEMSGSKNMTSTRMDSIGVDTKYNEMSFLDNLFDDSMRIASENSPKGEAGQLTVQHVNKRKSTSKDESKFGPVSIAKPKLKRSSGSENSTAKPESAKKVKADIASSIGSLSEHKRSLPPEKYSNDRFNKGTWDVSRHASQDSSPAMKGRPLAPGNLQRIDQSPNLPVPTMHSERTKENTVKSSLKKKSDKSQKPWHGMDGDFGPGYSHGVDHHANFDGSDDFSTRKRSRHGNLLIDDKMFKRSKDANANVDSMNLTKSSRETVVPDEITAFPESNECNGEQSNSQRDNVERSPYGKKKLQREFSDLELAELRKTSLENDDGRIRKQFESSSSKSLDAKLNVINSYPSMNDRKVPVTVFNDTKRKPSPQEYGIGGHINQEGFPRKAAGYEFDDNRPQQNIPDSQHLPRIYNTDFENLIYPDSSGKTSKRETRMTHGGMLEYADIQKKKTTSRLPQNGTNNVRVSRMQKSISPSDNDERSRNDSLIETKTGRKRRGSSSDDDNLFFSKYDKDAPELKDPIKDFSQYKDYVQEYNEKYGVYSYLNSQIDKTMSEFLKIQDDLNVGKERGKEQYYNTLERLRDMYHESGTRHKLMKKVFVLLHEELQIIKERINDFTDAYSNE

SEQ ID NO: 42210 - protein, 97 aa, Zea mays
  Coding DNA Sequence Number=SeqID_431
MEARRASRYRVLRRRSWRTRNPIPGVKKTCKAKVDRVEKRHGNLSKRVGEVWPNLGQSGPRQFVYRLGYKALERGSEQTEEGVEIDSVQGVANSNKD

SEQ ID NO: 42211 - protein, 127 aa, Zea mays
  Coding DNA Sequence Number=SeqID_432
  Homolog annotation: Hit_ID=P93384; Match level="QueryCoverage=99%, HitCoverage=100%, E-value=5e-31, Identity=44%"; Hit description =Nicotiana tabacum ORF
  Pfam annotation: Domain name=HR_lesion; Domain location=1-108; Score =135.3; E_value=1.7e-37; Accession=PF05514.2; Description=HR-like lesion-inducing
MGFVSFVGRVLFVAAFLLSAYQEFNEFGADGGPAAKALQPKFNVFVKNISAHLGVAVPHIELLYLALITPIVHDFYNYDTEKEEFARLFAKFTQDVALVGALLVFLGMKNSIPKRQGKKKAHKAKTN

SEQ ID NO: 42212 - protein, 288 aa, Zea mays
  Coding DNA Sequence Number=SeqID_433
  Homolog annotation: Hit_ID=Q5UG13; Match level="QueryCoverage=79%, HitCoverage=99%, E-value=1e-76, Identity=64%"; Hit description =Adventitious rootless1
  Pfam annotation: Domain name=DUF260; Domain location=63-164; Score =213.8; E_value=4e-61; Accession=PF03195.5; Description=Protein of unknown function DUF260
MELVVHRADTPGLFNPLALIPQPCCRLLLLLISIAAPPPSSTAPQPQSAGQEHEMEMTGFGSPCGACKFLRRRCARGCVFAPYFCDEQGAAHFAAIHKVFGASNASKLLAHLPLADRPEAAATISYEAQARLRDPTYGCVAHIFALQQQVMALQTQLASLTVTAQGQQRVHDVDDAKGYVGTAAAGQLGCSSNGSVAPATYGNVGHESLTALLRSESDYLQQSPCHAFEHAGADDKDDDGRQGNTFDFEAAADSSSFGAEESGWRSLSGYRDCEDLQSVAYAYLNHLS

SEQ ID NO: 42213 - protein, 120 aa, Zea mays
  Coding DNA Sequence Number=SeqID_434
  Subcellular localization annotation: CTP_CleavageSite=88; ConfidenceScore=5.17e-01
MERTTLFLDDEASSGVVSVGRDPSSGEAHTFRCRMKTMNQCSSLTTGKSMRCGLSSAHGSAPTTKNGRWKCAVAWRTGQSGAPPDTVRCASHVSGPLGFDRWSSNLWGLWAVRWCTRQVL

SEQ ID NO: 42214 - protein, 80 aa, Zea mays
  Coding DNA Sequence Number=SeqID_435
MQEYWRQGQRADGVCCVRADNSEGGTRPGRAHSKDRRLGAEDAGDGRTLKLEPRAVPNTPISLAFKTFSLEIASTQNHWH

SEQ ID NO: 42215 - protein, 267 aa, Zea mays
  Coding DNA Sequence Number=SeqID_436
  Gene Ontology: Mol. function=RNA-directed DNA polymerase activity; Cellular component=mitochondrion; Biological process=RNA-dependent DNA replication
  Homolog annotation: Hit_ID=UPI00004C1731; Match level="QueryCoverage =92%, HitCoverage=17%, E-value=1e-130, Identity=86%"; Hit description= UPI00004C1731 related cluster
  Pfam annotation: Domain name=rve; Domain location=91-239; Score=98.7; E_value=1.7e-26; Accession=PF00665.16; Description=Integrase core domain
MGIDSHLSTCVDTQSPKYLEMAQGHISLSEIHSGACGHHAAPRALVGNTFRQGFYWPTAVVNATKIVRTCQGCQFYAKQTRLPAQALQTIPITWLFAVWGLDLVGPLQKAPGGFTHLLVAIDKFSKWIEAVAFFTNIIHRFGVPNSIITDNGTQFTGRKFLDFCEDHHIRVDWAAVAHPMTNGQVERANGMILQGLKPRIYNDLNKFGRRWTKELPSVVWSLRTTPSRATGFTPFFLVYGAEAILPTDLEHGSPRTRAYDARSNQTN

SEQ ID NO: 42216 - protein, 191 aa, Zea mays
  Coding DNA Sequence Number=SeqID_437
  Gene Ontology: Mol. function=nucleic acid binding
  Homolog annotation: Hit_ID=Q10RA9; Match level="QueryCoverage=64%, HitCoverage=24%, E-value=5e-21, Identity=52%"; Hit description =Expressed protein
  Pfam annotation: Domain name=Alba; Domain location=48-136; Score =14.3; E_value=0.00078; Accession=PF01918.11; Description=Alba
MDRYQRVEKPPPEPAAIGENEVRITTQGLVRNYVTYATSLVQSCLLVAGGVLVVRYVSVLRFASPYVLYRISFLRAFSNQEKQVKEIVLKAMGQAISKAVAIAEIIKTFVIRASTELQKRIPGIKLLYIRILSHKDISNLSNINSTSQDNIKFKRIHMDAAEAEAGAEEGAGVLGVGTAEAMVDMNMITTK

SEQ ID NO: 42217 - protein, 198 aa, Zea mays
  Coding DNA Sequence Number=SeqID_438
  Subcellular localization annotation: CTP_CleavageSite=49; ConfidenceScore=5.05e-01
MASSRRSLWTMVKPTLGKPCPPWAVGSSCCFAFFIADDATVWGLSTIIRATLTPSLCSLGFSAVCLVIPCKRYAHSDLVPIGHECDVISALQPEGLVGREWEVGLGSFSGSDASCAAARRCECDRVVALSHSVRRVREKQTVQCMCMRGSSAVAVDAWKVWSGRRARTREPETTESSERASVIVDLPGEQMEKRSIGR

SEQ ID NO: 42218 - protein, 322 aa, Zea mays
  Coding DNA Sequence Number=SeqID_439
  Gene Ontology: Mol. function=inorganic anion exchanger activity; Cellular component=integral to membrane; Biological process=anion transport
  Homolog annotation: Hit_ID=Q1ZYR6; Match level="QueryCoverage=86%, HitCoverage=43%, E-value=1e-110, Identity=70%"; Hit description =Boron transporter
MVQTAKEGMMNNATSSEVYVKMQDVFIKMDHGGDTVSAHKELKDLKDAIIPEGNGSRTVPEVFDPEKHVDAYLPVRVNEQRVSNLLQSLLITGCIGVTPLIQKIPTSVLWGYFAYMSIDSLPGNQFWERIQLLFITPQRRYKVLEGAHASFMESVPFNTICTFTLFQLIYLLIVFGMTWIPVAGILFPLLFFFLIIISHLRELDAAEYEELKGFTPDPSVCEDESVRSGDAQPGYASEILEEFTTHRGELKRRNSTFHDGRLLQLNSVKMTRELSRVPSWLTRILEEYAVSESELQLSMGVRSLIASLLTEYSLKQATHFRY

SEQ ID NO: 42219 - protein, 460 aa, Zea mays
  Coding DNA Sequence Number=SeqID_440
  Homolog annotation: Hit_ID=Q8LJJ6; Match level="QueryCoverage=39%, HitCoverage=36%, E-value=1e-48, Identity=59%"; Hit description =Clathrin assembly protein-like
  Pfam annotation: Domain name=ANTH; Domain location=199-458; Score =4.1; E_value=2.1e-08; Accession=PF07651.6; Description=ANTH domain
MQMQGMRKGSCSHAGELPVAGLGDWGGHDEPAVLLPSGGPPSPVRHTPAVLFLHAVGGLGCLHWTHWTLKHAPLSSLLSCIQACTRSVLPSRSAIAPRPAIPAAEHSRPQSCNSAARIHRATFTVPSRPHSPPCARSSRPAPQSTPPSTAAHRARSPLPAPAAHRAFSPPSPRRLPRPQSLLNLPPQGAGGSAAASGGGGRRAGAAAGARLRAGLPGDGSQIRPLSPLTERIQGTTRSCPRPFACFVVLSSPWGDPAYEQEVFLATRRGRRMLDLSRFRDRDRARCHDWCFAAFVHAYATYLDDRLKERMQARRAGGASPGKWHVDGDPVGMACQVAEAWELVPQGRSASATETTAAEDVIGKAQQLKHLLGRFIQCRPTGKAMTNPVVTAALYRLVKESAAMYCELTEVMVVLLDRFADLGTPACVRVHSIFTSTAWNLGMLSSRFTDRTAWNLGMLIF

SEQ ID NO: 42220 - protein, 215 aa, Zea mays
  Coding DNA Sequence Number=SeqID_441
  Homolog annotation: Hit_ID=Q9AVI1; Match level="QueryCoverage=29%, HitCoverage=28%, E-value=5e-09, Identity=50%"; Hit description =Putative senescence-associated protein
MAVAVPMKLWRVETRGKAAAAGPDDPLRVLVTVTVLGSAGPLRFIVLEGDTVAALIRGALRCYAREGRMPLLGTDPAGFVLSTANGGSGGMERHLFVGIGICLFISAYASVYSSVCHARAALGEDERISFNGCRNFLLWQKAAAQGAAANHAGSDALTATLSPGRKGSGGFKATDPSPGRKGGGGWKAGLNKFLLSFSIKTGVKARHKLLLELIW

SEQ ID NO: 42221 - protein, 336 aa, Zea mays
  Coding DNA Sequence Number=SeqID_442
  Homolog annotation: Hit_ID=Q10S98; Match level="QueryCoverage=36%, HitCoverage=31%, E-value=1e-48, Identity=78%"; Hit description=Myb -like DNA-binding domain, SHAQKYF class family protein, expressed
  Pfam annotation: Domain name=Myb_DNA-binding; Domain location=25-76; Score=47.4; E_value=4.8e-11; Accession=PF00249.21; Description=Myb -like DNA-binding domain
MVRTTVVGRERSGGVRQYNRSKVPRLRWTPDLHHCFVHAIHKLGGPDRATPKRVLQLMGVGGLTISHVKSHLQMYRNMRNDLGMQGTEDQEHVYVGGGGMHTNIQQQRDHGCGDAPCCICCRHSPNKPAKEEEEATLFQRQLKRSRTETRRGRGQREEIDDGSASPKRRLLLLRGGRGRPGICESDGSGSPSSGTLASGYDNYMRMMQAAMGVAAAAGAAAAAAPHHHHHHHAETVEPGRGPRIKQHLARPGADGGEHAPPSSRQLFTFLGFVVAPGPPPPPCCSRDHPFELASGAEDGWIGVVDRSLRLLLSPRESEGVFVTLSLASLTRSTGPG

SEQ ID NO: 42222 - protein, 102 aa, Zea mays
  Coding DNA Sequence Number=SeqID_443
MGAIFDHHKQRAKHDKETDGGSGGRPDKRKKKGRWCHDDMLVVAAGQKGRKPLTEEATDHFKQMLEAPCPNHRYPVRHAYKECRLLKKFLCMEVSSEKGPKP

SEQ ID NO: 42223 - protein, 912 aa, Zea mays
  Coding DNA Sequence Number=SeqID_444
  Gene Ontology: Mol. function=protein kinase activity; Cellular component=integral to membrane; Biological process=protein amino acid phosphorylation
  Homolog annotation: Hit_ID=Q8L4U4; Match level="QueryCoverage=92%, HitCoverage=92%, E-value=1e-170, Identity=44%"; Hit description =Putative receptor-like protein kinase
  Pfam annotation: Domain name=LRRNT_2; Domain location=36-76; Score =62.6; E_value=1.2e-15; Accession=PF08263.3; Description=Leucine rich repeat N-terminal domain
  Pfam annotation: Domain name=LRR_1; Domain location=105-127; Score =9.4; E_value=5; Accession=PF00560.23; Description=Leucine Rich Repeat
  Pfam annotation: Domain name=LRR_1; Domain location=130-152; Score =14.1; E_value=0.51; Accession=PF00560.23; Description=Leucine Rich Repeat
  Pfam annotation: Domain name=LRR_1; Domain location=154-177; Score =8.0; E_value=9; Accession=PF00560.23; Description=Leucine Rich Repeat
  Pfam annotation: Domain name=LRR_1; Domain location=179-201; Score =14.0; E_value=0.53; Accession=PF00560.23; Description=Leucine Rich Repeat
  Pfam annotation: Domain name=LRR_1; Domain location=203-226; Score =3.3; E_value=69; Accession=PF00560.23; Description=Leucine Rich Repeat
  Pfam annotation: Domain name=LRR_1; Domain location=227-249; Score =4.7; E_value=37; Accession=PF00560.23; Description=Leucine Rich Repeat
  Pfam annotation: Domain name=LRR_1; Domain location=251-271; Score =2.4; E_value=1e+02; Accession=PF00560.23; Description=Leucine Rich Repeat
  Pfam annotation: Domain name=LRR_1; Domain location=275-296; Score =4.2; E_value=46; Accession=PF00560.23; Description=Leucine Rich Repeat
  Pfam annotation: Domain name=LRR_1; Domain location=299-321; Score =9.9; E_value=4; Accession=PF00560.23; Description=Leucine Rich Repeat
  Pfam annotation: Domain name=LRR_1; Domain location=323-345; Score =8.8; E_value=6.4; Accession=PF00560.23; Description=Leucine Rich Repeat
  Pfam annotation: Domain name=LRR_1; Domain location=347-370; Score =13.9; E_value=0.58; Accession=PF00560.23; Description=Leucine Rich Repeat
  Pfam annotation: Domain name=LRR_1; Domain location=372-394; Score =7.9; E_value=9.6; Accession=PF00560.23; Description=Leucine Rich Repeat
  Pfam annotation: Domain name=LRR_1; Domain location=396-418; Score =12.0; E_value=1.6; Accession=PF00560.23; Description=Leucine Rich Repeat
  Pfam annotation: Domain name=LRR_1; Domain location=420-442; Score =14.1; E_value=0.52; Accession=PF00560.23; Description=Leucine Rich Repeat
  Pfam annotation: Domain name=LRR_1; Domain location=444-466; Score =19.1; E_value=0.016; Accession=PF00560.23; Description=Leucine Rich Repeat
  Pfam annotation: Domain name=LRR_1; Domain location=468-489; Score =9.9; E_value=4; Accession=PF00560.23; Description=Leucine Rich Repeat
  Pfam annotation: Domain name=LRR_1; Domain location=81-103; Score =1.4; E_value=1.6e+02; Accession=PF00560.23; Description=Leucine Rich Repeat
  Pfam annotation: Domain name=Pkinase; Domain location=611-871; Score =40.6; E_value=5.5e-11; Accession=PF00069.15; Description=Protein kinase domain
  Pfam annotation: Domain name=Pkinase_Tyr; Domain location=611-874; Score=23.4; E_value=6.6e-14; Accession=PF07714.7; Description =Protein tyrosine kinase
  Pfam module annotation: Pfam domain module=LRRNT_2::LRR_1::LRR_1::LRR_ 1::LRR_1::LRR_1::LRR_1::LRR_1::LRR_1::LRR_1::LRR_1::LRR_1::LRR_1: LRR_ 1::LRR_1::LRR_1::LRR_1::LRR_1::Pkinase::Pkinase_Tyr; Domain
  Pfam module annotation: Domain location=105-127::130-152::154 -177::179-201::203-226::227-249::251-271::275-296::299-321::323 -345::347-370::372-394::396-418::420-442::444-466::468-489::81 -103::611-871::611-874
MTRRPASSAPSAARLLLLLLLLLLLHCQCHRAGAATDAERRALLDFKAAVTADPGGVLASWTPTGDPCGFVGVTCDASTGAVKRLRVHGAGLAGALSPSLARLPALESVSLFGNALTGGVPPSLRLLAPTLRKLNLSRNALAGEIPPFLGAFPWLRLLDLSHNRFAGGIPAALFDPCPRLRYVSLAHNHLTGPVPPAIANCSRLAGFDFSYNRLSGEFPDRACAPPEMSYISVRGNALSGDIAAKLASCGSIDLFDVGSNSFTGAAPFALLASVNITYFNVSSNAFDGEIPSIATCGTRFSYLDASGNRLTGPVPESVVNCRGLRVLDLGANALAGAVPPVIGTLRSLSVLRLAGNPRISGSIPAELGGIEMLVTLDLAGLALTGEIPGSLSQCQFLLELNLSGNKLQGVIPGTLNNITYLKMLDLHGNQLQGGIPVTLGQLTNLVLLDLSENQLTGPIPQELGNLSNLTHFNVSFNNLSGMIPSEPALQKFDFTAYMDNPLLCGSPLPNNCGPGTGMKHRKRLRVPVIIAIVAAALILVGICIVCALNIKAYTRKGTDGDGKEEEEVLVSESTPPAASPGSNAIIGKLVLFSKSLPSRYEDWETGTKALLDKDCLIGGGSIGTVYKATFENGLSIAVKKLETAGRVRGQDEFEHQMSQLGNLSHPNLVAFQGYYWSSSMQLLLSEFMANGSLYDHLHGYRPPPRALSESSSSSRGGGGELFWERRFNIALGAARALAYLHHDCWPQILHLNIKSSNIMLDGRYEARLSDYGLGKLLPILGSIELSRIHTAIGYIAPELASPTLRYSDKSDVFSFGVVLLEIVTGRKPVDSPGIGATAVVLRDYVRGILEDGTASDCFDRSLRGFVEAELVQVLKLGLGLMKELFTIACSLAARLRPPGLLHMDVPNGAECT

SEQ ID NO: 42224 - protein, 172 aa, Zea mays
  Coding DNA Sequence Number=SeqID_445
  Subcellular localization annotation: CTP_CleavageSite=89; ConfidenceScore=5.80e-01
MYRVPPAYGLSPPPPPLRSGANQARTFFPARRRSGAEGTTGRGAMPTETVTPTVGVTMTRAGSMVGPPVSAGTLERTAASPRHDGPPTNAMTFAPPKAVEDGVEDAPSESEEEAIPSPNSIGCKAFLPFFCTRRRLWRPQEHGGGVRMRRHAQDQSSSLPHRKVVVASGTRR

SEQ ID NO: 42225 - protein, 88 aa, Zea mays
  Coding DNA Sequence Number=SeqID_446
  Subcellular localization annotation: CTP_CleavageSite=49; ConfidenceScore=5.04e-01
MTTGTGENGGGGGGRGPVRQGSFALSSPLSRKTVEEVSAEISQGPVDFQASAASQPVRDARRERAPKVTEITLSSQQLLRLMLRVKTN

SEQ ID NO: 42226 - protein, 152 aa, Zea mays
  Coding DNA Sequence Number=SeqID_447
MVEFSTSRIYSSRVHEMQHLCYFGNGVGWALGAEDVLESEDSSVDAECYGGVGESRGLSARNQGLRRKKTGRRVDSKETEGLFNKITERRGIGRSRSYDLRSTAENKSRGRARTNRRAKVINGLGVRAADQSVAVLGARATDEWDPGAGAPT

SEQ ID NO: 42227 - protein, 56 aa, Zea mays
  Coding DNA Sequence Number=SeqID_448
MGANQRVSSVAGKEAELTEATDAIGARRRTHNELKVTVDGDSAPWACAQCERELFA

SEQ ID NO: 42228 - protein, 68 aa, Zea mays
  Coding DNA Sequence Number=SeqID_449
MAAPAAPMVHPTPAAPVWTPPPSRGSGDIYIGQLQKLHRVYNSGVRVFDMLWPAPPWSFALEPCQTGP

SEQ ID NO: 42229 - protein, 43 aa, Zea mays
  Coding DNA Sequence Number=SeqID_450
MIPVSADIPVELRFLLECATGSNFDSIRLELCQPVVRALLRFL

SEQ ID NO: 42230 - protein, 93 aa, Zea mays
  Coding DNA Sequence Number=SeqID_451
MASGGTSASPEHGLGLDNIDERTPDATNSSAETSDNGMTTETTGLVTNTWQSSSRMESKLEPVAHSRRKRSSTGISALTGIISPAARGGGGER

SEQ ID NO: 42231 - protein, 937 aa, Zea mays
  Coding DNA Sequence Number=SeqID_452
  Gene Ontology: Cellular component=cytosol
  Homolog annotation: Hit_ID=Q108Z7; Match level="QueryCoverage=98%, HitCoverage=39%, E-value=0.0, Identity=58%"; Hit description =Transcriptional regulator, putative, expressed
MRGRWAWGPQLVDSGLDGCILVLRVCLNQMLLNAGEVKNLQLQQKLLSDVFRYCLHKTCFTTSFCEALATIALTDDFLESLTNLLELSVAEKIGVGLALSDSEDSEMKQKGSHFCMVIDIASSVPGQWFSIAQIEKLCTSHIQSLSNGQIHEIVMFLHQSDGLSKHMDTFNNIISLLKVTERPFFVPVTNGDFDSQANPSRHLEMYFGSTNDDFESLLSEIGKEISMADIVAELGYGFTVDSTHCKEILSIVEPLDDIAISKLLGAVVGTHIGLGEAHNTYATFVSAIRNSHTNDSPQPTKWNTDVLVDSINELAPSTNWVRVIEYLDHEGFNIPDEASFYLLMSIYECACKDPFPLHAVCGSLWENTEGQISFLKHAVCAPSDKFTFAHSSRHLAFQDLAGPSQGNHAWFCLDLLEVLCQLAEVGYTASVRSMLEYPLGHCPELLLVGVSHISTVYNLLQNEVLSCVFPALLKDPTKRNVVNYLWHTNSYLTLQGFVDAHNDPDCLLRIVDVCHDLKILSTVLDSTPFAFSIKLAAASLRKDYSNLEKWLTEKLSLYGKGFVEECVNFLKATMSNTDYVLEGTTQPQSIVRNIYWESSYAFIKVYMVLQSHSGQLLSDAILDEIRKLCVSFESRNPSSAVRELANSDGGSDDIEVEANAYFQHMFSGQISVDSMIQMLGRFKESTDKREVSIFNCMISNLFKEYTFFPKYPDKQLKIAAVLFACGGSSFEGTSSLPLSLQLESRATTEGSCETGEMFMFGTSALEQFMDRVIEWPRYCNYILQISHLRGTHLEMVSVIERALAKISSSQNEPNVGNLLSAEQHVSGSSSMEGIEASESSWLMGTIPSQLGRPLSSPLQHRQQGLLSERSEVSMNSLNKSNLSSQPPLASSSADLTINSKTTAPPSLLASPHQSISVSTSVHVGFLRSRSTPGGLLA

SEQ ID NO: 42232 - protein, 48 aa, Zea mays
  Coding DNA Sequence Number=SeqID_453
  Gene Ontology: Mol. function=branched-chain-amino-acid transaminase activity; Biological process=branched chain family amino acid metabolic process
  Homolog annotation: Hit_ID=Q8H7T7; Match level="QueryCoverage=81%, HitCoverage=9%, E-value=7e-12, Identity=82%"; Hit description =Putative aminotransferase
MPITLGVFRVEYGNQGVGVVSQQLYKSLTSLQMGNVEDWMGWTMQLNQ

SEQ ID NO: 42233 - protein, 156 aa, Zea mays
  Coding DNA Sequence Number=SeqID_454
  Gene Ontology: Mol. function=electron carrier activity; Biological process=electron transport
MGTSVQDLCPIADRKRRLKKETTDHVGGERSERRTCRTCGRYDTGVHELSAELGGDSSEEVGKGGKGIRLEAQRKGLKKRSPDYKRYQSDWRAGTSRQVQVIETTMPNGGGGGSSKSMGGGYVDGGSGWQVNRVEGTRAVTTSEHDTSGKVIRVSY

SEQ ID NO: 42234 - protein, 129 aa, Zea mays
  Coding DNA Sequence Number=SeqID_455
MGFAWGRFGEVWRGLANTVVVLDRVEVAGGGPTMNAGGWNVIDVTWRHVSMGASRGAHERLVLGISGVEQSSGGNDGRWRALWCGEKSVRCKSKQAVVAVNLADIKKSLSKVASNSIRLGSCSVTPGFG

SEQ ID NO: 42235 - protein, 148 aa, Zea mays
  Coding DNA Sequence Number=SeqID_456
MASGGTSASPEHGLGLDNIDERTPDATNSSAETSDNGMTTETTGLVTRYKLHRLRTDESKGGGTQRWQEAERVKQYRYLAELEPNGVEVGAGGAFEKEAQLHRDIGADRDHLAGGERRRRGALGQGGFGGRASSFDSVAKQILPNRLE

SEQ ID NO: 42236 - protein, 892 aa, Zea mays
  Coding DNA Sequence Number=SeqID_457
  Gene Ontology: Cellular component=cytosol
  Homolog annotation: Hit_ID=Q108Z7; Match level="QueryCoverage=92%, HitCoverage=36%, E-value=0.0, Identity=58%"; Hit description =Transcriptional regulator, putative, expressed
MRGRWAWGPQLVDSGLDGCILVLRVCLNQMLLNAGEVKNLQLQQKLLSDVFRYCLHKTCFTTSFCEALATIALTDDFLESLTNLLELSVAEKIGVGLALSDSEDSEMKQKGSHFCMVIDIASSVPGQWFSIAQIEKLCTSHIQSLSNGQIHEIVMFLHQSDGLSKHMDTFNNIISLLKVTERPFFVPVTNGDFDSQANPSRHLEMYFGSTNDDFESLLSEIGKEISMADIVAELGYGFTVDSTHCKEILSIVEPLDDIAISKLLGAVVGTHIGLGEAHNTYATFVSAIRNSHTNDSPQPTKWNTDVLVDSINELAPSTNWDPFPLHAVCGSLWENTEGQISFLKHAVCAPSDKFTFAHSSRHLDLAGPSQGNHAWFCLDLLEVLCQLAEVGYTASVRSMLEYPLGHCPELLLVGVSHISTVYNLLQNEVLSCVFPALLKDPTKRNVVNYLWHTNSYLTLQGFVDAHNDPDCLLRIVDVCHDLKILSTVLDSTPFAFSIKLAAASLRKDYSNLEKWLTEKLSLYGKGFVEECVNFLKATMSNTDYVLEGTTQPQSIVRNIYWESSYAFIKVYMVLQSHSGQLLSDAILDEIRKLCVSFESRNPSSAVRELANSDGGSDDIEVEANAYFQHMFSGQISVDSMIQMLGRFKESTDKREVSIFNCMISNLFKEYTFFPKYPDKQLKIAAVLFACGGSSFEGTSSLPLSLQLESRATTEGSCETGEMFMFGTSALEQFMDRVIEWPRYCNYILQISHLRGTHLEMVSVIERALAKISSSQNEPNVGNLLSAEQHVSGSSSMEGIEASESSWLMGTIPSQLGRPLSSPLQHRQQGLLSERSEVSMNSLNKSNLSSQPPLASSSADLTINSKLHCFIEYAGDLRINILRTKRSNVDQVQ

SEQ ID NO: 42237 - protein, 212 aa, Zea mays
  Coding DNA Sequence Number=SeqID_458
  Homolog annotation: Hit_ID=Q9FII8; Match level="QueryCoverage=48%, HitCoverage=25%, E-value=2e-07, Identity=32%"; Hit description =Similarity to ATP/GTP nucleotide-binding protein
EKSDGNSRTEKTVTDSENPGISVERKVEHQFKNGLAENRMDSTEDNKNFVKSKKSTLEKGRTSEGLSYAQNHETKVHDSARSQEKNPKDESDGHKDLDQQKNNATKKDKPAAEPIIVPIVLRMSDFDHKALLEEWIATRAFRDNCIPQGRIMVIRDPTLHGLLNEDVGDLSGVIEPQRTISMMHDPNVKYLIYNVPILQWVSSNPEEDLGRA

SEQ ID NO: 42238 - protein, 209 aa, Zea mays
  Coding DNA Sequence Number=SeqID_459
  Homolog annotation: Hit_ID=Q9FII8; Match level="QueryCoverage=85%, HitCoverage=34%, E-value=6e-57, Identity=65%"; Hit description =Similarity to ATP/GTP nucleotide-binding protein
MQQQQDPAPADPDPLPPPDLGDAAASSATQTIPSRNASSKYDFVKVKVWLGENADHYYVLSRFLLSRMLTVTKIPNHVAIKIALELKKLLVDNSLLDVSQSDLEANLFKVRYLPASLPCCMLLPQPITQTYNFPPSTAYGKTGEYGEEYINRYKMMTRFHHQRVPLVILVCGTACTGKSTIATQLAQRLNLPNVLQTDMVYELLRTSTE

SEQ ID NO: 42239 - protein, 244 aa, Zea mays
  Coding DNA Sequence Number=SeqID_460
  Homolog annotation: Hit_ID=Q10T37; Match level="QueryCoverage=93%, HitCoverage=12%, E-value=9e-85, Identity=70%"; Hit description=CCR4 -Not complex component, Not1 family protein
  Pfam annotation: Domain name=Not1; Domain location=47-242; Score= -27.3; E_value=2.9e-12; Accession=PF04054.5; Description=CCR4-Not complex component, Not1
YSSVEITPNKGSILSKIISVTVRTIQKDAEEKKASFNPRPYFRLFINWLYDLTTTDGHHDGSNFQVLTAFANAFHLLQPLRVPAWSFCDVIPSSCIQMRNVILSAFPRNMRLPDPSTPNLKIDLLAEISIAPRIMSDVDGTLKSKQLKTEFDEYLKRPEGSSFLSVLKQNLLLPQNEAAVAGTRYNVPLINSLVLYVGIQAVQQLQQNKANASASVQQIKHTPTMDSFQIANSYRDVHKSHNKF

SEQ ID NO: 42240 - protein, 234 aa, Zea mays
  Coding DNA Sequence Number=SeqID_461
  Homolog annotation: Hit_ID=Q9FII8; Match level="QueryCoverage=71%, HitCoverage=37%, E-value=6e-26, Identity=39%"; Hit description =Similarity to ATP/GTP nucleotide-binding protein
MVIPRTEKTVTDSENPGISVERKVEHQFKNGLAENRMDSTEDNKNFVKSKKSTLEKGRTSEGLSYAQNHETKVHDSARSQEKNPKDESDGHKDLDQQKNNATKKDKPAAEPIIVPIVLRMSDFDHKALLEEWIATRAFRDNCIPQDHRKLINNLKLIQDYLCSFESQGKFSLIDRLGLTIVDISANSFPQTLDWLHSYLLQKAAIKVNDTLGCNLSNHTSVGIICWQWTLRISL

SEQ ID NO: 42241 - protein, 81 aa, Zea mays
  Coding DNA Sequence Number=SeqID_462
  Homolog annotation: Hit_ID=Q9FII8; Match level="QueryCoverage=56%, HitCoverage=10%, E-value=5e-09, Identity=80%"; Hit description =Similarity to ATP/GTP nucleotide-binding protein
MQQQQDPAPADPDPLPPPDLGDAAASSATQTIPSRNASSKYDFVKVKVWARGERRPLLRPLQVPPQQDAHSHQGSIINGFH

SEQ ID NO: 42242 - protein, 486 aa, Zea mays
  Coding DNA Sequence Number=SeqID_463
  Gene Ontology: Mol. function=protein binding; Cellular component =cytoplasm; Biological process=steroid metabolic process
  Homolog annotation: Hit_ID=Q9AV10; Match level="QueryCoverage=81%, HitCoverage=62%, E-value=1e-149, Identity=59%"; Hit description =Putative oxysterol-binding protein
  Pfam annotation: Domain name=Oxysterol_BP; Domain location=144-486; Score=143.1; E_value=7.6e-40; Accession=PF01237.9; Description =Oxysterol-binding protein
MLTPWRSIATHGQRAVSPRAGPGLSYSLLNQLDIWRNSFKHTSIVMFTYFPSHQEVCSFGHVLIVEHALLTYQPIGNCLLRKSFLVCDTGPALRVCRVLSADDNANMIELHSHLMKPDYCSSGQGKCSGRVSSDSAGLSCLNMKCSNSGKDTFLYGDKFVKPKAGTGDSECLPPFFKRRTKLPDPVEKEKSVSLWSMIKDNVGRDLTQVCLPVYFNEPLSSLQKCFEDLEYSYLLDRAYECGLKGDNLMRILNVAAFAVSGYASSVGRPCKPFNPLLGETYEADYPENGIRFFSEKVSHHPMVMACHCEGKGWKFWGDSNVKSKFWGQTIQLDPVGVLSVEFDDGEIFQWSKVTTTINNVIIGQIYCNHYGTMSITGNRGYSCKLIFKRQSFVERNPRQVEGLVKDGDGSTVASLMGKWDERMYCSASGQNESLPPTDSRLRPDQRHVENGEYSKANAEKLRLERRQRMSRKMQDNGWKPRWFRRG

SEQ ID NO: 42243 - protein, 162 aa, Zea mays
  Coding DNA Sequence Number=SeqID_464
  Gene Ontology: Biological process=steroid metabolic process
  Homolog annotation: Hit_ID=Q9AV10; Match level="QueryCoverage=67%, HitCoverage=14%, E-value=3e-41, Identity=73%"; Hit description =Putative oxysterol-binding protein
MLHPLCCLPAADGRTPSASPCSCTAGRGWAALQVDQHRQGLAPALISSFRESKSDDRRFYLITPAKTLQLRTDSANERAAWIEALVSARAESSPDGGLLTNQNDASFSTERLRNRMHEEGLGEEIIKDCEQIVHSEFSQYHTQMKQRCERICKLSQQASTAV

SEQ ID NO: 42244 - protein, 256 aa, Zea mays
  Coding DNA Sequence Number=SeqID_465
  Homolog annotation: Hit_ID=Q5Z9H6; Match level="QueryCoverage=21%, HitCoverage=13%, E-value=9e-08, Identity=57%"; Hit description =Nodulin-like protein
  Subcellular localization annotation: CTP_CleavageSite=31; ConfidenceScore=5.07e-01
MDGGRILDPLLSGAMDSASLLRSHPARPPPRTASRMPSMADPPPHPHPNHLLLVASTIPFVGAASTAGPASLIIGPYLVPFLLPTSASASPATLADLSRARGSQPRLPILPSPVVPPLAIVVRHSRPRDAFAVATGAEVAVVEETTVGAPTDVAYSRKRYFVLEDAVLRFFKSMSSSKREDPGDCFYVSTKSVIVITFSCTVIGGLFIIADLYLVTWARYNEAQSTLVGSYPRLLLMEGGLPTATKTEGRSFKGLH

SEQ ID NO: 42245 - protein, 39 aa, Zea mays
  Coding DNA Sequence Number=SeqID_466
MATGYKHEKPVDNCYDIGGGTSRGQRGSLAVEVVKGYLV

SEQ ID NO: 42246 - protein, 167 aa, Zea mays
  Coding DNA Sequence Number=SeqID_467
MAKAWATILRYPKTYLISSRAIRDGAAFAPRPRPGENTKDEVNDIYKGKYQDLEGVNHSFEASGATPDGDYYRTPLHPRPLSGVTIASLRSKPALEQGMILRRILVLAEGTGAFNVHTYPHKELQVNRSNKTVVLSRFTNYDDACGHCSHTPSAQLPMERTYDKGAS

SEQ ID NO: 42247 - protein, 127 aa, Zea mays
  Coding DNA Sequence Number=SeqID_468
  Gene Ontology: Mol. function=kinase activity; Cellular component =ornithine carbamoyltransferase complex; Biological process=amino acid metabolic process
  Homolog annotation: Hit_ID=Q6QP54; Match level="QueryCoverage=63%, HitCoverage=35%, E-value=4e-19, Identity=57%"; Hit description =Putative kinase
MELFGPRQLALDEAARADDEGKLVLSLPMARTIDESSCRRFETGGSLSRRPESARGRVMIALPVDVAGLCPRLGDVEAPPKPGSSLSSMAEVESEPLGRARRKSSAEARAVSEPWVGRSGVRRLPGP

SEQ ID NO: 42248 - protein, 121 aa, Zea mays
  Coding DNA Sequence Number=SeqID_469
MVDKVQINTKGERLQVVEIPRKREKVCTLNAPVPCGLQLSPASGLSSLPETGSGEAKTSILGRGDLGQDENSPKNHTLFEGWLRAKRSYGDPREGPRVKWGLHSLVFGERVLMVVLGLIVS

SEQ ID NO: 42249 - protein, 558 aa, Zea mays
  Coding DNA Sequence Number=SeqID_470
  Homolog annotation: Hit_ID=UPI000065F62C; Match level="QueryCoverage =15%, HitCoverage=7%, E-value=4e-18, Identity=51%"; Hit description =Homolog of Homo sapiens "BRD1 protein
  Pfam annotation: Domain name=Bromodomain; Domain location=51-138; Score=91.0; E_value=3.7e-24; Accession=PF00439.15; Description =Bromodomain
MDLTHFDGFDLFYPTDGRGEELGEGEKDAAKATGKGDAASDGGPAGTPLPDKKLLLFILDRLQKKDTYGVFSEPVDAEELPDYFDIIDHPMDFSTIREKLLNDSYSKLEQFEDDVFLLTSNAMSYNSADTIYFRQARSIEALAKKDFENLRQPSDEEEPKPPARRGRPPKNPKMEGDASPDLSNMKTSKPEDSIDTFRKKSTGDITRNTNTTMKEPSSFHSMLGSFSAKRADKIGDYSGSSKWGKKPVGVDDDRRSTYDQHYSCNSSLFAALDDGRKLLVPVGVQQQHAYARSLARFASKLGPVGWDVTANRIRRALPPGTSFGPGWVVDGEPPQNSQRGPVASTDPSSESTDPPNMPSKNDVLHQKCGLSSNGYVTGEEHLTRTQTVASTSASSEISSKVNKLENGVTKSCGGMGNTGSAGPPMQQLCLRGPEIRSNINGFPAMSNATSQYAGQGLFGSGIPMTHAQVLGMFSGMNGKANGYVHRHPVAADSLKTAAQNGDVGKAAVNPVQGAGHDPKIANGNSSAHPGLNSGVQSSGSPPRRTLANPKHPDLALQL

SEQ ID NO: 42250 - protein, 88 aa, Zea mays
  Coding DNA Sequence Number=SeqID_471
  Subcellular localization annotation: CTP_CleavageSite=72; ConfidenceScore=5.33e-01
METHVYANTSTPMGINHFDSQYKINSLNPTRSQLKLITTRQNKSVGSTLRRRRSSREKLKRYKDASSFINVYCDDEGPGFLNQEVDLH

SEQ ID NO: 42251 - protein, 294 aa, Zea mays
  Coding DNA Sequence Number=SeqID_472
  Gene Ontology: Cellular component=extracellular region; Biological process=sexual reproduction
  Homolog annotation: Hit_ID=Q10S70; Match level="QueryCoverage=91%, HitCoverage=88%, E-value=1e-91, Identity=65%"; Hit description =Expansin-like A1 precursor
  Pfam annotation: Domain name=DPBB_1; Domain location=65-142; Score =76.3; E_value=9.8e-20; Accession=PF03330.8; Description=Rare lipoprotein A (RlpA)-like double
  Pfam annotation: Domain name=Pollen_allerg_1; Domain location=156 -262; Score=-0.9; E_value=0.0056; Accession=PF01357.11; Description =Pollen allergen
  Pfam module annotation: Pfam domain module=DPBB_1::Pollen_allerg_1; Domain location=65-142::156-262
MAVPVGRLAASTLLQLLVWLPLPASACDRCVRHSKAAYYYTSSLTLAGGSCGYGTEAASFSAGLLAAAGPALYRGGAGCGACFQVRCKDRKLCGAAGARVVVTDRARTNGTDLVLSSTAFAAMARPGMARRLAGLRAVDIEYKRVPCEYKHRNLSVRVQEKRRSPGGPGDLAIRFLYQGGQTDIVAVDVAQVGSRVIAETTELSEEEEKKEVGSSNWKSMTRHSGGPAWSTRQAPAGPLQLRVVVTGGYDGKWVWAEREVLPRRRRAGEVYDTGVQITDVALEGCFPCDTREWE

SEQ ID NO: 42252 - protein, 84 aa, Zea mays
  Coding DNA Sequence Number=SeqID_473
MRRTGAQPPGTQARQLIERRRRARASAAGWTDDRATTDEEDGRAATRDDAARTTTTRWTSRCSATVAGVDYAVNRSTFFAILSK

SEQ ID NO: 42253 - protein, 573 aa, Zea mays
  Coding DNA Sequence Number=SeqID_474
  Gene Ontology: Mol. function=calcium ion binding; Cellular component =cell cortex
  Homolog annotation: Hit_ID=Q10S92; Match level="QueryCoverage=92%, HitCoverage=50%, E-value=1e-174, Identity=63%"; Hit description=EF hand family protein, expressed
  Pfam annotation: Domain name=efhand; Domain location=40-68; Score =17.6; E_value=0.047; Accession=PF00036.22; Description=EF hand
  Pfam annotation: Domain name=efhand; Domain location=428-456; Score =15.3; E_value=0.23; Accession=PF00036.22; Description=EF hand
  Pfam annotation: Domain name=efhand; Domain location=462-490; Score =24.3; E_value=0.00044; Accession=PF00036.22; Description=EF hand
  Pfam annotation: Domain name=efhand; Domain location=6-34; Score =17.5; E_value=0.049; Accession=PF00036.22; Description=EF hand
  Pfam module annotation: Pfam domain module=efhand::efhand::efhand::efh and; Domain location=40-68::428-456::462-490::6-34
MAGTEAFEAYFRRADLDQDGRISGQEAVAFFQGANLPQQVLAQVWMHADRNKTGFLGRPEFFNALRLVTVAQSGRQLTPDIVQSALYGPAAARIPAPKIAAGAVPPQMGAAGAPRPQGSAAMTPTPGQVGAAQMNPAATPRPQGSGMVPTSTQVSVPQVNPGAAPRPQGINSTMPAASQGGALQATQFAGPRVMQPQPSNLGITQQQPSSTGFMHPPQVGAPAASLQAQAPGINQGLVSGGSMGGSVGWQGWQGGNAASVGGIPQAIPGAAPSQAAQGGFGPGLPRTIGVALVQQVQAMSPSPLPPQSNSAGLPQDSKALVMSGNGPAISSGSSTDIFSALTQQKPSISAPAPQTSSIPSSSSFMPTPTGSQNLTNLTQFGSLQGSSQRQQTQPVVKPSPAPAAPVVSAGISNPSPQWPKITQSDIQKYMKVFGDVDRDRDGKITGAEARTLFLSWRLPREVLKQVWDLSDQDNDGMLSLREFCVALYLMERHRAGTPLPPALPDSLRHDETLLRATGLPSTAYNGPSWQQNQVQGNKDDKSGVNQSVQEVADPKKVGSVVVKNSKCTQFMHL

SEQ ID NO: 42254 - protein, 72 aa, Zea mays
  Coding DNA Sequence Number=SeqID_475
MSSTIERLSRQVHTTLKRDDGIEGYLPGSCSPRLAVVEHEKDASSKLQAASPRGRPGMRRLRAAHGRDEGAR

SEQ ID NO: 42255 - protein, 290 aa, Zea mays
  Coding DNA Sequence Number=SeqID_476
MDALLRLLTRQPGTQAHASVKATERTGKGGYPERDPSPRRNRAPSPPLLIRGSKAGPPRVQQSPQIAWARHPLLVRGSKASPPKGSMAASGYSGSAPITDQGFEGWPPKEGQRRLRHSDCSATRQSESDRQSGLAKGATANSAPPDPRARTRAKTRKTANSAPPDPRARTRAKTRKTANSAPPDPRARTRAKTRKTANSAPPDPRARTRAKTRKTANSAPPDPRARTRAKTRKTANSAPPDPRARTRAKTRKTTKLRLARPQGSNSASPDPRARTPPRPTPGLGLRPGLG

SEQ ID NO: 42256 - protein, 218 aa, Zea mays
  Coding DNA Sequence Number=SeqID_477
  Gene Ontology: Cellular component=integral to membrane; Biological process=vesicle-mediated transport
  Homolog annotation: Hit_ID=Q10RB1; Match level="QueryCoverage=84%, HitCoverage=69%, E-value=5e-65, Identity=83%"; Hit description =Vesicle-associated membrane protein 724, putative, expressed
  Pfam annotation: Domain name=Synaptobrevin; Domain location=63-133; Score=36.3; E_value=1.1e-07; Accession=PF00957.11; Description =Synaptobrevin
YCVVATESAGRQLPVGFIERVKEDFSKKYSGGKAKNASANGLKREYGPKLKEHMRYCDQHPEEIDKLAKVKAQVTEVKGVMMQNIEKVLDRGEKIELLVDKTEDLRSQVPHIYDLMHVQSIGSIDLTITKLTALVSPVGTRFQATGNKDTTEDVVGKHEDEAHRFRHRGCADPPHCLDSLQGLELLVMWNYRAEISHVTTDVLYLCFSFSLMLFCSCR

SEQ ID NO: 42257 - protein, 232 aa, Zea mays
  Coding DNA Sequence Number=SeqID_478
  Gene Ontology: Mol. function=drug transporter activity; Cellular component=membrane; Biological process=multidrug transport
  Homolog annotation: Hit_ID=Q5GAV3; Match level="QueryCoverage=75%, HitCoverage=13%, E-value=2e-11, Identity=34%"; Hit description =Putative integral membrane protein
MPRQVNLRQRPEAKKREANSGIKDHRSSDLDSIHYTRRAKTLGAMDPQLKLALEAQTRSFISELDKKFADHDAKWESRVGELEKAAVSAADQFYDLKADIHTDVTAQLEFFVSSATEQANRVAAATTSRVSALESATAAFEAWRPAMESSVAEVKRGVAAVQAAVANIPQPGERRPLEPPHLQPGILGEFGSGPARPSTGLRIDGPDGHCSDHHRREAGFGRVYASTHLPPN

SEQ ID NO: 42258 - protein, 425 aa, Zea mays
  Coding DNA Sequence Number=SeqID_479
  Gene Ontology: Mol. function=nucleic acid binding; Cellular component= intracellular; Biological process=DNA integration
  Homolog annotation: Hit_ID=Q8S467; Match level="QueryCoverage=82%, HitCoverage=79%, E-value=1e-148, Identity=78%"; Hit description =Putative gag protein
  Pfam annotation: Domain name=zf-CCHC; Domain location=330-347; Score =30.3; E_value=6.6e-06; Accession=PF00098.13; Description=Zinc knuckle
MSGDHAKKEMETGDKPTTSQGSTSSEESRTKRKEKKKDFSKRKEKRSSSSHHKEKKEKSSSHKSHRKGDKHKRMRKVVYYETDTSSTSTSDSDAPSVTSKRQERDEDYDEDEVVQIEHFNSQATTILLASLSKEEYNKVQGLKNAKEIWDLLKTAHEGDELTKITKRETVEGELGRFRLRQGEEPQDMYNRLKTLVNQVRNLGSKKWDDHEVVKVILRSLIFLNPTQVQLIRGNPRYTQMTPEEVIGNFVSFECMIKGSKKINELDEPSTSEAQPVAFKATEEKKEESTPSRQPIDASKLDNEEMALIIKSFRQILKQRKGKDYKSRSKKVCYKCGKPGHFIAKCPLSSDSDRGDDKKGRRKEKKRYYKKKGGDAHVCREWDSDESSSDSSSDEDAANIAVTKGLLFPNVGHKCLMAKDGKRKKM

SEQ ID NO: 42259 - protein, 698 aa, Zea mays
  Coding DNA Sequence Number=SeqID_480
  Gene Ontology: Mol. function=nucleic acid binding; Cellular component= nucleus; Biological process=mRNA processing
  Homolog annotation: Hit_ID=Q10S20; Match level="QueryCoverage=98%, HitCoverage=72%, E-value=0.0, Identity=59%"; Hit description=RNA recognition motif family protein, expressed
  Pfam annotation: Domain name=RRM_1; Domain location=471-546; Score =24.9; E_value=0.00029; Accession=PF00076.12; Description=RNA recognition motif. (a.k.a. RRM, RBD, or
  Pfam annotation: Domain name=RRM_1; Domain location=580-649; Score =20.7; E_value=0.0017; Accession=PF00076.12; Description=RNA recognition motif. (a.k.a. RRM, RBD, or
  Pfam module annotation: Pfam domain module=RRM_1::RRM_1; Domain location=471-546::580-649
MSRKIYGENDSERIASDGTAARTRPLSIKDIMLRREKKAASESKKAKEGLENGKDKSTHLERGRDHKSRKDPRDMPVEGSRKEKNRDATREGAKKEKPRHIPREYSRKEDMRYAPKEVPKDNSRDRSNTDAKMDDLKDAPNVPEKESLRDAPRKASKKRRPSGDDNHSGSKDKGIHHSQKLSTSMSGRADESKTRTLSEIRERKGDVMRSEYQKEPGKRWNDEINDDDKLKFKSEKLRNETKRKDRSFDNERSLEVGPVLKRHDSARFQDSKHSDRNAGRNEYATPYHGESELKRRRSRSRDHDRERYSRSISPPLREQRYNYRGRDFGNPPYYSMEKSRGKYAEVDKQRSSGSGGYIGGLHQRYESRLGGYSPRKKKTSLQAEQATTKTPSKVIQSPEKKSATWDQPPVKANQSNFPTTFLPTVGQMAPTPFSFSVIKDPSTTAVTMLAGNSLTADSVQLTQATRPLRRLHIENLPDSATEDKLIDCLNDFLLSTGSKLQRSKPCLSCTINREKRQAFVEFLTPEDATAAISFDGRSLNGSVLRIRRPKEYVETVNVTPKKAEETALISDVVADSPYKIFIAGIAGVISSKMLMEIVSAFGPLAAYRFLFNNELGGPCAFLEYADRSVTSKACAGLNGMMLGGRVLTAVHVFPNPHVEAANEASPFYGIPDNAKLLLKEPTKVLQLKNVVSRVQIDR

SEQ ID NO: 42260 - protein, 125 aa, Zea mays
  Coding DNA Sequence Number=SeqID_481
MVKRKPEKWKEEEPFPPQIWPHSSLNSKTTTKKDPAKSQALPPKLGAKARRRQPGGHGHRTCGAGSAGRVRAVGGTGWGGLEEGSGPPALPRCYCYSLQTAISPFEFQVLELELYACHFVPAYLI

SEQ ID NO: 42261 - protein, 508 aa, Zea mays
  Coding DNA Sequence Number=SeqID_482
  Gene Ontology: Mol. function=sugar porter activity
  Homolog annotation: Hit_ID=Q8S7U2; Match level="QueryCoverage=53%, HitCoverage=60%, E-value=1e-121, Identity=80%"; Hit description =Putative sugar transport protein
MQVANLGLYGIALGVFGAIKAKEYSDIVTQYRWIAYLSIFIGCCFLVVFHAGTKEPTLKSEPSCKKAARISWGYWFKKTLYYQVALLYMLARLITNSLIAFYVTRDLRMNEYSKAIIPAIIFCCSFFVSIVLQEIKWTSRRLKSLLTVGATLWVISGVAVFVLPSQMNSLMYPLAMVIGAANALVMVTTIGLEGALVGEDLNGCAFVYGSLSFLDKISCGIALFALESYEDTMVSYGETRGLNTVSRYGTGLIPSCFAVLSLVVTSTLRLQDDTPRAAALDAPLLACGRGPCYATTAVSSHFAAPLTGLTEGQRRLRRSDCCATRQSEADRQPCPASDTIGNSASPDPGLGLGLSPGRRRTPLRPTQGSDSGSAPEDDELRSARPRARTRAQPQKTANSAPPDPGLGLGLSPGRRRPGRRRTPLRPTQGSDSGSAPEDGELRSARPRARTRAQPRKTTNSVSPDPRARTQPWPQLTASASPDPGAWTRPRPRKTDSTSTSEEPPHRPT

SEQ ID NO: 42262 - protein, 624 aa, Zea mays
  Coding DNA Sequence Number=SeqID_483
  Gene Ontology: Mol. function=calcium ion binding; Cellular component =cell cortex
  Homolog annotation: Hit_ID=Q10S92; Match level="QueryCoverage=96%, HitCoverage=57%, E-value=0.0, Identity=60%"; Hit description=EF hand family protein, expressed
  Pfam annotation: Domain name=efhand; Domain location=40-68; Score =17.6; E_value=0.047; Accession=PF00036.22; Description=EF hand
  Pfam annotation: Domain name=efhand; Domain location=428-456; Score =15.3; E_value=0.23; Accession=PF00036.22; Description=EF hand
  Pfam annotation: Domain name=efhand; Domain location=462-490; Score =24.3; E_value=0.00044; Accession=PF00036.22; Description=EF hand
  Pfam annotation: Domain name=efhand; Domain location=6-34; Score =17.5; E_value=0.049; Accession=PF00036.22; Description=EF hand
  Pfam module annotation: Pfam domain module=efhand::efhand::efhand::efh and; Domain location=40-68::428-456::462-490::6-34
MAGTEAFEAYFRRADLDQDGRISGQEAVAFFQGANLPQQVLAQVWMHADRNKTGFLGRPEFFNALRLVTVAQSGRQLTPDIVQSALYGPAAARIPAPKIAAGAVPPQMGAAGAPRPQGSAAMTPTPGQVGAAQMNPAATPRPQGSGMVPTSTQVSVPQVNPGAAPRPQGINSTMPAASQGGALQATQFAGPRVMQPQPSNLGITQQQPSSTGFMHPPQVGAPAASLQAQAPGINQGLVSGGSMGGSVGWQGWQGGNAASVGGIPQAIPGAAPSQAAQGGFGPGLPRTIGVALVQQVQAMSPSPLPPQSNSAGLPQDSKALVMSGNGPAISSGSSTDIFSALTQQKPSISAPAPQTSSIPSSSSFMPTPTGSQNLTNLTQFGSLQGSSQRQQTQPVVKPSPAPAAPVVSAGISNPSPQWPKITQSDIQKYMKVFGDVDRDRDGKITGAEARTLFLSWRLPREVLKQVWDLSDQDNDGMLSLREFCVALYLMERHRAGTPLPPALPDSLRHDETLLRATGLPSTAYNGPSWQQNQGGLSQRGPGAPGVPAGGVRPPLPPHLHSQTDGASRPGQPRSYMSGMDNHVVVQGNKDDKSGVNQSVQEVADPKKVGSVVVKNSKCTQFMHL

SEQ ID NO: 42263 - protein, 75 aa, Zea mays
  Coding DNA Sequence Number=SeqID_484
MDLRTASTGHDRGRRGVEEAVASALWRPPGAWERASSSRTPSATPNVEPGSYGRTIFTQSPVATAMLFLKDLTLE

SEQ ID NO: 42264 - protein, 387 aa, Zea mays
  Coding DNA Sequence Number=SeqID_485
  Homolog annotation: Hit_ID=Q10S07; Match level="QueryCoverage=98%, HitCoverage=93%, E-value=1e-100, Identity=52%"; Hit description=CCT motif family protein, expressed
  Pfam annotation: Domain name=CCT; Domain location=295-333; Score =77.8; E_value=3.3e-20; Accession=PF06203.4; Description=CCT motif
MAIPDALCIEEISSPIAAHILDFYYGDGLGDDLFAAVTATSGPFPATDDDVSSSTATTPPICGYSEDTAAAGGATAYTPLTSFDTTLTALLEEEQHHGLDAGFLPQIDGLSEVAAYYPTATDEASIGQFDQMGLPETLDEQVPPPVQMSSSASALMPLATDYDECFMAAVAAGGFMGLDGAMYQQTGAVLPGCSADASQQEFFSSAGSNSMVMIGEYQKMMEGEGLTTTYDDTDSMQGTFNTNAEMQVGGNNQHLINGCNGNPATLPPTELSVLEDSTFKVVRLSPEERKEKIHRYIKKRNERNFRKKIKYACRKTLADSRPRVRGRFAKNDELCEAAQSGSQSHEHYEQTDHMKEEDMLDTSDILAQLNGLNPYNYKYKSTIESWI

SEQ ID NO: 42265 - protein, 1306 aa, Zea mays
  Coding DNA Sequence Number=SeqID_486
  Gene Ontology: Mol. function=glutamate-tRNA ligase activity; Cellular component=cytoplasm; Biological process=tRNA aminoacylation for protein translation
  Homolog annotation: Hit_ID=Q8S5M6; Match level="QueryCoverage=52%, HitCoverage=96%, E-value=0.0, Identity=87%"; Hit description =Putative glutamyl-tRNA synthetase
  Pfam annotation: Domain name=RPE65; Domain location=43-553; Score =826.5; E_value=1.4e-245; Accession=PF03055.6; Description=Retinal pigment epithelial membrane protein
  Pfam annotation: Domain name=tRNA-synt_1c; Domain location=826-1131; Score=442.2; E_value=7.1e-130; Accession=PF00749.11; Description =tRNA synthetases class I (E and Q), catalytic domain
  Pfam annotation: Domain name=tRNA-synt_1c_C; Domain location=1133 -1306; Score=177.4; E_value=3.6e-50; Accession=PF03950.8; Description= tRNA synthetases class I (E and Q), anti-codon binding domain
  Pfam module annotation: Pfam domain module=RPE65::tRNA-synt_1c::tRNA -synt_1c_C; Domain location=43-553::826-1131::1133-1306
MGTEAEQPDMDSHRNDGVVVVPAPRPRKGLASWALDLLESLAVRLGHDKTKPLHWLSGNFAPVVEETPPAPNLSVRGHLPECLNGEFVRVGPNPKFAPVAGYHWFDGDGMIHAMRIKDGKATYVSRYVKTARLKQEEYFGGAKFMKIGDLKGFFGLFMVQMQQLRKKFKVLDFTYGFGTANTALIYHHGKLMALSEADKPWDALFRLCHAAIEDVVKVLEDGDLQTLGLLDYDKRLKHSFTAHPKVDPFTDEMFTFGYSHEPPYCTYRVINKEGAMLDPVPITIPESVMMHDFAITENYSIFMDLPLLFRPKEMVKNGEFIYKFDPTKKGRFGILPRYAKDDKLIRWFQLPNCFIFHNANAWEEGDEVVLITCRLENPDLDKVNGYQSDKLENFGNELYEMRFNMKTGAASQKQLSVSAVDFPRVNESYTGRKQRYVYCTILDSIAKVTGIIKFDLHAEPESGVKELEVGGNVQGIYDLGPGRFGSEAIFVPKHPGVSGEEDDGYLIFFVHDENTGKSEVNVIDAKTMSADPVAVVELPNRVPYGFHAFFVTEHLWTNWLDRRRGSEDTAPADSAHAATTGRPSLLACCPTPGAQVFFGLVVVGDDHHQVPVVFKKNKTMEATLAFSQDSPPISIICAAKFVGLPLTIDPSLASGLAPTLRFASGESLHGVNPILLYIASGATIPCFSGKNDIEFGHVVEWLEYVPIFLSGSEFENACLFVDGFLASRTFLVGHGLTIADIVVWSNLAGIGQRWESLRKSKKYQNLVRWFNSIDSEYSDTLNEVLAAYVGKRGIGKSPAPSLKEKVHVSKDPSAPEVDLPGAKVGKVCVRFAPEPSGYLHIGHAKAGLLNKYFAERYQGRLIVRFDDTNPSKESNEFVENVLKDIETLGIKYDAVTYTSDYFPKLMEMAGSLIKQGKAYIDDTPKEQMRKERMDGIESRCRNSTVEENLSLWNEMVNGTERGMQCCVRGKLDMQDPNKSLRDPVYYRCNIDPHHRVGSKYKVYPTYDFACPFVDALEGVTHALRSSEYHDRNAQYYRILQDMGLRRVEIYEFSRLNMVYTLLSKRKLLWFVQNKKVEDWTDPRFPTVQGIVRRGLKIEALIQFILQQGASKNLNLMEWDKLWTINKKIIDPLCARHTAVLKDQRVIFTLTNGPEKPFVRILPRHKKFVGAGKKATTFANRIWLDYADAAAISKGEEVTLMDWGNAIVKEIKVESGVITELVGELHLEGSVKTTKLKITWLADIEELVPLSLVEFDYLISKKKLEEDDDFLENLNPCTRRENPALGDANMMNLKRGEIIQLERKGYY

SEQ ID NO: 42266 - protein, 76 aa, Zea mays
  Coding DNA Sequence Number=SeqID_487
  Gene Ontology: Mol. function=DNA binding; Biological process =regulation of transcription
  Homolog annotation: Hit_ID=Q6Z156; Match level="QueryCoverage=66%, HitCoverage=11%, E-value=8e-13, Identity=68%"; Hit description =Putative CDPK substrate protein 1
MMLEQQCIPGAEKAQDASTAADELRSPSEIPESSTVKEVPENSQNGSTKQTSLNQVVFVLPWEQMNAIVNFLAKPG

SEQ ID NO: 42267 - protein, 236 aa, Zea mays
  Coding DNA Sequence Number=SeqID_488
  Gene Ontology: Mol. function=sulfate adenylyltransferase (ATP) activity; Cellular component=intracellular; Biological process =sulfate assimilation
  Homolog annotation: Hit_ID=O48888; Match level="QueryCoverage=57%, HitCoverage=28%, E-value=1e-74, Identity=98%"; Hit description=ATP sulfurylase
  Pfam annotation: Domain name=ATP-sulfurylase; Domain location=1-236; Score=113.7; E_value=5.3e-31; Accession=PF01747.8; Description=ATP -sulfurylase
  Pfam annotation: Domain name=RRF; Domain location=3-114; Score=-74.4; E_value=0.039; Accession=PF01765.9; Description=Ribosome recycling factor
  Pfam module annotation: Pfam domain module=ATP-sulfurylase::RRF; Domain location=1-236::3-114
MEVLRKQISIYATICEQLVEMHRILTEHEGTIAEEDEAKGVFEKNLIFAGELSKTVAKLAEDGKVAIRNIRRDAIKAYDKLEKEKKLSEDNVKDLSADLQVLEEGVLNPESTVVAIFPSPMHYAGPTEVQWHAKARINAGANFYIVGRDPAGMSHPTEKRDLYDADHGKKVLSMAPGLERLNILPFKVAAYDTKQKKMDFFDPSRKDDFLFISGTKMCTLAKNRESPPDGFMCPGG

SEQ ID NO: 42268 - protein, 230 aa, Zea mays
  Coding DNA Sequence Number=SeqID_489
  Gene Ontology: Mol. function=structural constituent of ribosome; Cellular component=intracellular; Biological process=translation
  Homolog annotation: Hit_ID=Q10RZ3; Match level="QueryCoverage=67%, HitCoverage=95%, E-value=5e-83, Identity=94%"; Hit description=60S ribosomal protein L21, putative, expressed
  Pfam annotation: Domain name=Ribosomal_L21e; Domain location=2-100; Score=188.5; E_value=1.7e-53; Accession=PF01157.8; Description =Ribosomal protein L21e
MPAGHGLRSRTRDLFARPFRKKGYIPLTTYLRTYKIGDYVDVKVNGAVHKGMPHKFYHGRTGSVWNVTKRAIGVEINKQVNGRIIRKRIHVRVEHVQPSRCTEEFRLRKAKNDQLKADAKARGEVISTKRQPVGPKPGFMVEGATLETVTPIPYDVILLRSVCIFIYRCRGSIQDGFDQCIGGFLSAVVKRMRLGIECVDNGSHRLPQTCLLHRLRLLRLEILESRRRIL

SEQ ID NO: 42269 - protein, 51 aa, Zea mays
  Coding DNA Sequence Number=SeqID_490
  Subcellular localization annotation: CTP_CleavageSite=39; ConfidenceScore=5.19e-01
MATGNVLAVAGRRSQPSSFRRLQKPKPSKSFITALRQYSQEAAGERNVMET

SEQ ID NO: 42270 - protein, 319 aa, Zea mays
  Coding DNA Sequence Number=SeqID_491
  Gene Ontology: Mol. function=protein serine/threonine kinase activity; Cellular component=integral to membrane; Biological process=protein amino acid phosphorylation
  Homolog annotation: Hit_ID=Q6Z8Y3; Match level="QueryCoverage=99%, HitCoverage=30%, E-value=1e-108, Identity=61%"; Hit description =Putative CLAVATA1 receptor kinase
  Pfam annotation: Domain name=Pkinase; Domain location=2-284; Score =104.6; E_value=2.9e-28; Accession=PF00069.15; Description=Protein kinase domain
  Pfam annotation: Domain name=Pkinase_Tyr; Domain location=5-284; Score=71.0; E_value=3.7e-18; Accession=PF07714.7; Description =Protein tyrosine kinase
  Pfam module annotation: Pfam domain module=Pkinase::Pkinase_Tyr; Domain location=2-284::5-284
MGGTGVVYRADMPRHHAVVAVKKLWRAAGCPDPEEAATADGRQDVEPGGEFAAEVKLLGRLRHRNVVRMLGYVSNNLDTMVLYEYMVNGSLWEALHGRGKGKMLVDWVSRYNVAVGVAAGLAYLHHDCRPPVIHRDIKSSNVLLDINMDAKIADFGLARVMARAEEPVPVSMVAGSYGYIAPECGCRLKVDQKSDIYSFGVVLMELLTGRRPVEPEYGESQDIVGWIRERLRSNSGVEELLDSGVGGRVDHVREEMLLVLRIAVLCTAKSPKDRPTMRDVVIMLGEAKPRRKSSSATVAATVVNKDRPVFTTSPDSSYL

SEQ ID NO: 42271 - protein, 579 aa, Zea mays
  Coding DNA Sequence Number=SeqID_492
  Gene Ontology: Mol. function=transferase activity, transferring glycosyl groups; Cellular component=integral to membrane
  Homolog annotation: Hit_ID=Q8H038; Match level="QueryCoverage=97%, HitCoverage=99%, E-value=0.0, Identity=74%"; Hit description =Xyloglucan galactosyltransferase KATAMARI1 homolog
  Pfam annotation: Domain name=Exostosin; Domain location=124-472; Score=514.8; E_value=9.8e-152; Accession=PF03016.6; Description =Exostosin family
MRRRPVLPSHHDDTDKGGGKPAPARLCFLATLCAMFWVLIFYFHFAVLSDEPAAEARIARAHTRVPEQDGAGAGASRVDLPRAEEPEDERAAGVRREVAPASYPFERALRTAENKSDPCGGRYIYVHHLPPRFNEDMLRECEKLSVWTNMCRFITNDGLGPPLGNDEGVFSETGWYGTNQFSVDVVFGNRMKQYECLTEDSSVAAAVFVPFYAGFDVARYLWGYNITTRDAASLDLVEWLMKKPEWSVMGGRDHFLVAGRITWDFRRLTEEESDWGSKLLFLPAARNMSMLVVESSPWNSNDFGIPYPTYFHPGKDAEVFLWQDRMRSLERPWLFSFAGAPRPGDPMSIRGQLIDQCRVSSVCKLLECDLGESKCHSPSTVMKMFQSSLFCLQPQGDSYTRRSAFDSMLAGCIPVFFHPGSAYVQYTWHLPKNYTRYSLFIPEDDIRSRNASIEERLKSVHPDVVKQMREDVINLIPKVIYADPRSKLETLKDAFDVSIEAIINKVTKLRRDIIAGQEDKGFVEENSWKYSLLEDGQRTIGPHEWDPFFSKPKDKGGDSGGPSAEAAKNSWKSEQRGHN

SEQ ID NO: 42272 - protein, 211 aa, Zea mays
  Coding DNA Sequence Number=SeqID_493
  Homolog annotation: Hit_ID=Q84J54; Match level="QueryCoverage=27%, HitCoverage=23%, E-value=8e-30, Identity=91%"; Hit description =Putative PHD-finger protein
  Pfam annotation: Domain name=PHD; Domain location=157-204; Score =49.7; E_value=1e-11; Accession=PF00628.19; Description=PHD-finger
  Subcellular localization annotation: CTP_CleavageSite=59; ConfidenceScore=5.11e-01
MAAGGQPATGKKRGVGAWALAVAGKERGAAAAGNSGRSSGRRGESPSVEKRENRRTPVVDAHIQQLDQFMRKLEEIRQGKEAAAAVTAGTAVATTATPTVNAGATTADANPKSGRSGERGRGGRKKAKVPTEQSVPVPVPLPPIDLELPVDPNEPTYCLCNQVSYGEMVACDNPNCKIEWYHYGCVGVKEQPKGKWYCPNCIGFQKKRKGK

SEQ ID NO: 42273 - protein, 74 aa, Zea mays
  Coding DNA Sequence Number=SeqID_494
MERNKGNALHPAPTSSGCGLWLLVIYFHLAVLRATAHTRPNILLILSDRLFDMDHKLFLVSFMVEMDEKGTVHE

SEQ ID NO: 42274 - protein, 117 aa, Zea mays
  Coding DNA Sequence Number=SeqID_495
  Subcellular localization annotation: CTP_CleavageSite=32; ConfidenceScore=5.52e-01
MMVIASVTATSFAVLLLFSLPSCIRLRTTPFLAEGVGSGASSPYSSNTSFDTDPRSGYCTSTRMFHGMRTPLFSPSSDVPFIFPAFVLFFLPNLLPLPTVAATSRPMLFDAYGASQS

SEQ ID NO: 42275 - protein, 226 aa, Zea mays
  Coding DNA Sequence Number=SeqID_496
  Pfam annotation: Domain name=DUF567; Domain location=8-215; Score =105.5; E_value=1.6e-28; Accession=PF04525.3; Description=Protein of unknown function (DUF567)
  Subcellular localization annotation: CTP_CleavageSite=46; ConfidenceScore=5.46e-01
MGAHTAIAPVVSKIFCSSSQAVLMVRRRPPTVNGGGLVVTDRNQTAAFRVDGCGTIGASGQLIVRDGDGSAILFIHKKVKVWSPATASSRLTDETLVSQGGVVQALSVNNWWRGYLTDYGEPSKLVFSLQDPKPVLCTNTKGDVRVTVEPSGRTKRHWDYEVTGSFAQRSCAIKNRAGQLVAQIGGKGMMAGRDLYQVVVQPGYDQAFVVGIIAILDNTHGESTSC

SEQ ID NO: 42276 - protein, 121 aa, Zea mays
  Coding DNA Sequence Number=SeqID_497
MASRYRCAQPKRRDATVCQRAETSFNGSRETPPPLDLACTVPRQSCYSGNVTYALNCLPLFDLVAIGLKRYFELNATVENHDEENVHTDAPDVHAAQPYEEQDFVSKKFGFRYRNRFSPYT

SEQ ID NO: 42277 - protein, 497 aa, Zea mays
  Coding DNA Sequence Number=SeqID_498
  Gene Ontology: Mol. function=tubulin-tyrosine ligase activity; Cellular component=nucleus; Biological process=protein modification process
  Homolog annotation: Hit_ID=Q10QY4; Match level="QueryCoverage=99%, HitCoverage=52%, E-value=0.0, Identity=70%"; Hit description=Tubulin- tyrosine ligase family protein, expressed
  Pfam annotation: Domain name=LRR_1; Domain location=224-242; Score =5.3; E_value=29; Accession=PF00560.23; Description=Leucine Rich Repeat
  Pfam annotation: Domain name=LRR_1; Domain location=250-274; Score =5.7; E_value=24; Accession=PF00560.23; Description=Leucine Rich Repeat
  Pfam annotation: Domain name=LRR_1; Domain location=341-363; Score =12.5; E_value=1.3; Accession=PF00560.23; Description=Leucine Rich Repeat
  Pfam module annotation: Pfam domain module=LRR_1::LRR_1::LRR_1; Domain location=224-242::250-274::341-363
MSPAVASASSGDRIRTYEDFVRVHAYLLAAAGIPPSLHRRLYRKLADEVFDGGEVFAVEPCEDGRQRRLVLTADQSLGKESDVFLVDHAWSFRLPDALKQLREVPGLAERMAALMCVDLDRKIEADEQDDDESGSLEHVSQVVEKERARVQERSDSTAWLELEELGIDDDMLVALDLSANFPSEVDLGFKTCGTKLVDVKPINTIISKFMKRAKRILVKAMGQNLVALNLWGNKLRDPEKVMQEIRKCTKLKALWLNENPVLGKSIDKAVFDGLSGLEIYNSHFTSKAGEWALGFCADIVGADNPCSSVESTLFGSIGTIDLSDRCIHKLPEVFSPSKLPSLSKLNIRGNPLDQISGDDLLKLFGGFTQLQELEVDIPGPLGNSAISILESLPNLSLLNGVDSSSIIESGKHIVDSALEPRLPEWSPEEPLAERVIGAMWLYLMTYRLADDEKIDETPVWYVMDELGSAMRHSDNANFRIAPFLFMPEGKLHTAIRH

SEQ ID NO: 42278 - protein, 190 aa, Zea mays
  Coding DNA Sequence Number=SeqID_499
  Gene Ontology: Mol. function=small conjugating protein ligase activity; Cellular component=cytoplasm; Biological process=protein modification process
  Homolog annotation: Hit_ID=Q337R4; Match level="QueryCoverage=99%, HitCoverage=100%, E-value=6e-56, Identity=61%"; Hit description =Ubiquitin-conjugating enzyme E2-23 kDa, putative, expressed
  Pfam annotation: Domain name=UQ_con; Domain location=7-135; Score =53.9; E_value=5.5e-13; Accession=PF00179.16; Description=Ubiquitin -conjugating enzyme
MSSPSKRREMDLMKLMMSDYKVEMVNDGMQEFFVEFRGPNEIKASALSCTSDLGGLAALSEGYFAEFNRHLSRRSGSVCLDVINQTWSPMFDLVNVFEVFLPQLLLYPNPSDPLNGDAAALMMRDRPAYEQKVKVLESSVFLSRLSLEYCEKYAKPGDAGVTPEEQSSDEELSEDEDDSGDEEIMGKPDP

SEQ ID NO: 42279 - protein, 551 aa, Zea mays
  Coding DNA Sequence Number=SeqID_500
  Gene Ontology: Mol. function=nucleic acid binding; Cellular component= intracellular; Biological process=chromatin modification
  Homolog annotation: Hit_ID=Q10RP4; Match level="QueryCoverage=36%, HitCoverage=28%, E-value=1e-46, Identity=44%"; Hit description=Zinc finger, C2H2 type family protein, expressed
  Pfam annotation: Domain name=zf-C2H2; Domain location=440-465; Score =24.4; E_value=0.00039; Accession=PF00096.16; Description=Zinc finger, C2H2 type
  Pfam annotation: Domain name=zf-C2H2; Domain location=468-487; Score =4.3; E_value=3.6; Accession=PF00096.16; Description=Zinc finger, C2H2 type
  Pfam annotation: Domain name=zf-C2H2; Domain location=493-517; Score =20.1; E_value=0.008; Accession=PF00096.16; Description=Zinc finger, C2H2 type
  Pfam annotation: Domain name=zf-C2H2; Domain location=523-547; Score =21.7; E_value=0.0026; Accession=PF00096.16; Description=Zinc finger, C2H2 type
  Pfam module annotation: Pfam domain module=zf-C2H2::zf-C2H2::zf -C2H2::zf-C2H2; Domain location=440-465::468-487::493-517::523-547
MRIRRYAARLLSATTAAPSSPPRPPAASWLHTDDDDDCCAFCELSRPAPQEGQDAVKHKGHIAGRVPESDVRADERVGLHQRPPAPEVKKCKIDHVPPVDKSSVGLQVVKCASEVSGAVAKPEGGTPASEAAAGPAAKAGAFVVNDAASEQGVQCIASPLGGASKLEEVTAGNSFANGPTTELGVFKGASLANELADVPGVTSIMPEVIGKPSTDPGAITTVVEVSDIGSVVHETTELESAGEDYIASEAAAEPEDAGRASCNTDDTAALDEPLPPSCDPNIGNAQVGNAMDTVASTVRPSRCDAAEEGASVNSTANGPVRARGPTVKGGVPKDKSVAPSVLRVLDVVTRSIGKSGRTDVICYARRTGKRKPELQEVKTENIDLEDGVLCEKEEALLRTDCCESVLSTAGSIDVKLADIKKDLMDNSAASKVTKMKRNIFECKIDYCHMTFKTKAELAAHKKNMCTVNSCSKHFRSHSYLRRHESAHNDDMPYKCPWDGCNMAFKWSWDRAEHFKVHAGAKPYKCMTPGCSKMFKFVSDFTRHRRRCKPQR

SEQ ID NO: 42280 - protein, 114 aa, Zea mays
  Coding DNA Sequence Number=SeqID_501
MPSGSKLRRQEYLGFRVSKTSVRVFGKPLTSWLQIGEPLSMRLQIEELPPSCNRIKEPPSLHLRIEKPSPSAPSGTYRCRATGSGSDCRCASGSESRRHRAFESGSRRAQRLRI

SEQ ID NO: 42281 - protein, 678 aa, Zea mays
  Coding DNA Sequence Number=SeqID_502
  Gene Ontology: Mol. function=RNA-directed DNA polymerase activity; Cellular component=intracellular; Biological process=RNA-dependent DNA replication
  Homolog annotation: Hit_ID=UPI00004C1733; Match level="QueryCoverage =91%, HitCoverage=45%, E-value=0.0, Identity=93%"; Hit description =UPI00004C1733 related cluster
  Pfam annotation: Domain name=RVT_1; Domain location=56-225; Score =144.8; E_value=2.3e-40; Accession=PF00078.17; Description=Reverse transcriptase (RNA-dependent
  Pfam annotation: Domain name=RnaseH; Domain location=455-582; Score =5.9; E_value=1.6e-05; Accession=PF00075.14; Description=RNase H
  Pfam module annotation: Pfam domain module=RVT_1::RnaseH; Domain location=56-225::455-582
MPGIPRDVAEHSLDIRAGARPVKQPLRRFDEEKRRAIGEEIHKLTAAGFIKEVFHPEWLANPVLVRKKGGKWRMCVDYTGLNKACPKVPYPLPRIDQIVDSTAGCETLSFLDAYSGYHQIRMKESDQLATSFITPFGMYCYVTMSFGLRNAGATYQRCMNRVFGEHIGRTVEAYVDDIVVKTRKASDLLSDLEVTFRCLKAKGVKLNPEKCVFGVPRGMLLGFIVSERGIEANPEKIAVITSMGPIKDLKGVQRVMGCLVALSRFISRLDERGLPLYRLLRKAECFAWTPEAEEALGNLKALLTKAPILVPPTDGEALLIYVAATTQVVSTAIVVERQEEGHALPVQRSVYFVSEVLSETKIRYPQVQKLLYAVILTRRKLRHYFESHPVTVVSSFPLGEIIQCREASGRIAKWAVEIMGETISFAPRKAIKSQVLADFVAEWVDTQLPTAPIQPKLWIMFFDGSLMKTGAGAGLLFISPLGKHLRYVLRLHFPVSNNVVEYEALVNGLRIAIELGVRRLDARGDSQLVIDQVMKNSHCRDPKMEAYCDEVRRLEDKFYGLELNHIARRYNETADELAKIASGRTTVPLDVFSRDLHQPSVKIDDTPKPEAPSVQPEVTSASVGEALCIEEERSGATPDRNWQTPYLQYLRQGELPLDRAEARRVARRAKSFVLLGDE

SEQ ID NO: 42282 - protein, 375 aa, Zea mays
  Coding DNA Sequence Number=SeqID_503
  Gene Ontology: Cellular component=integral to membrane; Biological process=transport
  Homolog annotation: Hit_ID=Q337A9; Match level="QueryCoverage=94%, HitCoverage=69%, E-value=1e-161, Identity=81%"; Hit description =Major Facilitator Superfamily protein, expressed
  Pfam annotation: Domain name=DUF791; Domain location=4-374; Score =790.2; E_value=1.2e-234; Accession=PF05631.4; Description=Protein of unknown function (DUF791)
  Pfam annotation: Domain name=MFS_1; Domain location=84-348; Score= -6.2; E_value=0.00061; Accession=PF07690.6; Description=Major Facilitator Superfamily
  Pfam module annotation: Pfam domain module=DUF791::MFS_1; Domain location=4-374::84-348
MEVFYYVVFGALAAVVAGLELGKSGKDRVATTSAFNSFKNNYVLVYSLMMCTPPVPPLPFFSLDLRTPLWLVLMVSPVACPPASNGDGFVRAAEDWLQGPYVYYLYSQYGFDKGDIGRLFIAGFGSSMLFGTIVGSLADKQGRKRACVTYCISYILSCITKHSPEYRVLMIGRILGGIATSLLFSAFESWLVAEHNKRGFDPQWLSITFSKAIFLGNGLIAIVSGLFANLLAENLGFGPVAPFDAAACFLAIGMAIIMSSWSENYGDPSESKDLMAQFKVAAKAIASDEKIALLGAIQSLFEGSMYTFVFLWTPALSPNEEDIPHGFIFATFMLSSMLGSSIASRLLARKLKVEGYMQIVFSISAVTLVLPVATN

SEQ ID NO: 42283 - protein, 92 aa, Zea mays
  Coding DNA Sequence Number=SeqID_504
  Homolog annotation: Hit_ID=Q9FWD5; Match level="QueryCoverage=34%, HitCoverage=16%, E-value=4e-10, Identity=93%"; Hit description =Putaive mitochondrial inner membrane protein
MVAARDRDDWINSVVAGLGTGALFRAANGPRSAVVAGAVGGVLAGAAAAAKQFEKPIGGGIELWGAVAYEPFPQVFASMFMASTEFIEPVFH

SEQ ID NO: 42284 - protein, 299 aa, Zea mays
  Coding DNA Sequence Number=SeqID_505
  Gene Ontology: Mol. function=nucleic acid binding; Cellular component= nucleus; Biological process=mRNA processing
  Homolog annotation: Hit_ID=P92964; Match level="QueryCoverage=62%, HitCoverage=61%, E-value=3e-56, Identity=58%"; Hit description =Arginine/serine-rich-splicing factor RSP31
  Pfam annotation: Domain name=RRM_1; Domain location=4-69; Score=67.7; E_value=3.6e-17; Accession=PF00076.12; Description=RNA recognition motif. (a.k.a. RRM, RBD, or
  Pfam annotation: Domain name=RRM_1; Domain location=95-160; Score =38.5; E_value=2.3e-08; Accession=PF00076.12; Description=RNA recognition motif. (a.k.a. RRM, RBD, or
  Pfam module annotation: Pfam domain module=RRM_1::RRM_1; Domain location=4-69::95-160
MRPVFCGNFDHDTRQYDLERLFSKYGPISRIDMKLGYAFIYFEDERDAEDAIRRLDNVSFGYNRRRLSVEWSRQVEPVPKSRDRPTGDVKPTRTLFVINFDPIRTKVQDIEKHFEPYGKIANIRIRRNFAFVQYETQEEASAAVKNTDKRCHIKLCTLTLMVSYLVVSQIWFMCTILDRVVTVEYAFRDDDGDRDDRYDIPKQGAYDRRGGSPYMRSPSPRYRRDYVPDYGRRGRYPGYGRRDGAIPVDSEEPSKEVVSKEEVASNNMIFATPSIPGGAVVFQVCLSAVMVTRCWFPGC

SEQ ID NO: 42285 - protein, 107 aa, Zea mays
  Coding DNA Sequence Number=SeqID_506
  Subcellular localization annotation: CTP_CleavageSite=24; ConfidenceScore=5.07e-01
MHVDTNEPMLSSTATGATPSPMLVLSLKRSPTGARCLRVIDSPFPVDTLEDLDAHTDYKENGPRPFISIGFEAPRYNSPDCPVYTGQCSVLQGDATLNSSASGILNG

SEQ ID NO: 42286 - protein, 55 aa, Zea mays
  Coding DNA Sequence Number=SeqID_507
MAGVLVFAQAMWARSWDDGDSDRIGEAGNGYMSGSRYPTGNSNATPILGVGTAWF

SEQ ID NO: 42287 - protein, 672 aa, Zea mays
  Coding DNA Sequence Number=SeqID_508
  Homolog annotation: Hit_ID=Q10CW7; Match level="QueryCoverage=48%, HitCoverage=47%, E-value=6e-58, Identity=41%"; Hit description=YT521- B-like family protein, expressed
  Pfam annotation: Domain name=YTH; Domain location=516-606; Score =140.6; E_value=4.1e-39; Accession=PF04146.6; Description=YT521-B -like family
MPPQPLHCLYLACTRGGSDVTAFDKDQEGFRDVPMPSIQTAGSVPHLRVEKLPMQEVSDPPETVRKAETKNITSIGKDVIFEQDPCSSYQLWGSMKFEEDGHLLSQAKRDLSHLDYRAQSADTKYVTELGSHACLKDPLPMGRDYHRQKLQFSTSDCSFEKASALEAASSSPDALGTMRTKIKSSTLSASPDYLSSYPTAAPCMRKCPGAVELDHGLGHSEHSNRRSDQFTLFSSRNGRSVEKCKEMVQYARGFHHADEINHVPFQWCFEDEGPSVSRGLQYGDEIPSLSRKKYNVAPSRSSQWHYGPQTALSSRRPDYGDEIPSLSLHYGYRDRTHLRSGNWCHDAEARIPSRYQQGTSHGNGHSRNCFSRINTNEQAKVITSKHTFAKPRMINRNCSDQHRINMKGNRWRNSEDLMDQVRGPRANKLNNASVSSTVKDITSPLIRRNQYNRSDFSVQYNQAKFFMIKSYSEDDIHKGIKYNVWASTPNGNNKLDAAYHEAQNLMDSGERCPVFLFFSVNTSGQFVGLAEMLGPVDFKKTMDFWEEDKWSGFFPIKWHIIKDIPNRLFKHIILENNDNRIVTFSRDTQEQRPTTDAAVLPTGHFLQATRLIPTILPLSLVCCLVGQLVHPGPGAQLKELDPPKGLSEQVRKLILGVDAACLDVPFCQAVMD

SEQ ID NO: 42288 - protein, 536 aa, Zea mays
  Coding DNA Sequence Number=SeqID_509
  Homolog annotation: Hit_ID=Q10SE0; Match level="QueryCoverage=52%, HitCoverage=66%, E-value=1e-100, Identity=59%"; Hit description=CBS domain-containing protein, putative, expressed
SGVAGVLVKRIEQPHVEHVMETIALWKLKTIAHAGKGGELTHDETTIITGALELTQKIAKDAMTAISETFSLDINAKLDLVADDLPLYDILNEFQKGHSHMAVVIKRTKEAGVSTEKQKSTTADYKINPKDARADGSSPSYGSTAVSRRINIEKHGDGRPYNKKSERKRENILDFNNDPLPSYSMDEEAVGIITMEDVMEELLQEEIYDETDEYVDVHNKIRINMLTPGKSLSPAISPGGGPLSQGFRRTPMASPFSPYHHGSSVLRSPASNHGQSPGTLPTILSPGRSPTAQTPGQSSPNGSQASSDRPAGLLWVPGMSPCPTTGAGPSERAQEIARRREEMLHDLPESEYELSLTDLVEKAAGGGDCGEAAPAPMAEGKDPGASRPAPGGQLPPAAARRASARRRDSGGSFRFRSSSDGVLLNFYMPRSLTRSFTAPRPARTPSSASGCRSPTIASDCSKRERDSDAETVKCWSLLWDRRWRKSSRRDPGAPPSESESAIRAASVVKAKRPSTPLRRPISEPTFFRPSPAPPAG

SEQ ID NO: 42289 - protein, 144 aa, Zea mays
  Coding DNA Sequence Number=SeqID_510
  Gene Ontology: Mol. function=transferase activity, transferring glycosyl groups; Cellular component=chloroplast; Biological process =tryptophan biosynthetic process
  Homolog annotation: Hit_ID=Q10SD6; Match level="QueryCoverage=72%, HitCoverage=26%, E-value=2e-40, Identity=80%"; Hit description =Anthranilate phosphoribosyltransferase, chloroplast, putative, expressed
  Pfam annotation: Domain name=Glycos_transf_3; Domain location=2-122; Score=-82.8; E_value=0.00013; Accession=PF00591.11; Description =Glycosyl transferase family, ab domain
MASDGAGTAARETIGATDGLVAGGGCCPGPGYILDVTPEKIEKMFFDPLDFGIPRCTLEDLKGGDPAFNAKVLQDVLAGQRGAIADALVLNAAASLLVSGKVKNLHDGVALAQETQRSGKAINTLESWIKKSNKNLRRYSKLFG

SEQ ID NO: 42290 - protein, 308 aa, Zea mays
  Coding DNA Sequence Number=SeqID_511
  Gene Ontology: Mol. function=transferase activity, transferring glycosyl groups; Cellular component=chloroplast; Biological process =tryptophan biosynthetic process
  Homolog annotation: Hit_ID=Q10SD6; Match level="QueryCoverage=73%, HitCoverage=57%, E-value=1e-100, Identity=82%"; Hit description =Anthranilate phosphoribosyltransferase, chloroplast, putative, expressed
  Pfam annotation: Domain name=Glycos_trans_3N; Domain location=58-122; Score=58.7; E_value=1.9e-14; Accession=PF02885.7; Description =Glycosyl transferase family, helical bundle domain
  Pfam annotation: Domain name=Glycos_transf_3; Domain location=127 -308; Score=195.0; E_value=1.8e-55; Accession=PF00591.11; Description= Glycosyl transferase family, ab domain
  Pfam module annotation: Pfam domain module=Glycos_trans_3N::Glycos _transf_3; Domain location=58-122::127-308
  Subcellular localization annotation: CTP_CleavageSite=48; ConfidenceScore=5.67e-01
MAAASLKFASPKPLASAPSALLCGRRAQARPLPASRLPPPTRVAVQPPAAPVATRIGSFDKVLEALIGGTDFSEEDAEATLKLLLDEKDEARISAFLVLLRAKGETFEEIVGLAKAMLSCCIRVDGLDDAVDIVGTGGDGADTVNISTGSTILAAAAGAKVAKQGSRASSSACGSAYVLEALGVNIELGPEGIKRCVNEVGVGFMMSANYHPAMKIVRPVRKKLKIKTVFNILGPLLNPARVPHAVIGVYHENIVTKMAKAAQKFGMKRALVVHSKGLDEISPLGCRVGNWGLGARRAAALGRRRDPG

SEQ ID NO: 42291 - protein, 337 aa, Zea mays
  Coding DNA Sequence Number=SeqID_512
  Gene Ontology: Mol. function=protein dimerization activity; Cellular component=nucleus; Biological process=regulation of transcription, DNA-dependent
  Homolog annotation: Hit_ID=Q8S5V5; Match level="QueryCoverage=99%, HitCoverage=85%, E-value=1e-101, Identity=61%"; Hit description =Putative bZIP transcription factor
  Pfam annotation: Domain name=bZIP_1; Domain location=194-258; Score =32.3; E_value=1.7e-06; Accession=PF00170.11; Description=bZIP transcription factor
  Pfam annotation: Domain name=bZIP_2; Domain location=194-248; Score =27.6; E_value=4.5e-05; Accession=PF07716.5; Description=Basic region leucine zipper
  Pfam module annotation: Pfam domain module=bZIP_1::bZIP_2; Domain location=194-258::194-248
MEAFAAQHQGDVCMEAVGVDTAAQQGPRPRTAHRRSRSDVPSGYYFGGEGHQLPPPKVEAGWGGHLHGGGGDDDLFNAYLNLEGLDGLNSSDDRRQYYDGDSRGSSVRTNGADSSENDSEECAAAGPPVAHHVRSLSMDSSLIGKLNFSAGAAAANGGVIPGPNRFSLEFGSGEFTPVEMNKIMADEKLAEMALADPKRAKRVLANRQSAARSKERKMRYIAELEQKVQILQTEATALSAHLTLLQRDSAGIATQNNELQFRLQAMAQQAQLRDALNEALTAEVQRLKLATAELGDSCSSNSLAQQMQIQLSAHDQTFELHQQQAMPIAFYQLRQAQ

SEQ ID NO: 42292 - protein, 156 aa, Zea mays
  Coding DNA Sequence Number=SeqID_513
  Gene Ontology: Mol. function=zinc ion binding
  Homolog annotation: Hit_ID=Q10R22; Match level="QueryCoverage=82%, HitCoverage=52%, E-value=1e-46, Identity=63%"; Hit description=Zinc finger, C3HC4 type family protein, expressed
MTSSRQMELHYINTGFPYTITESFMDFFEGLTYAHADFALMDGFQDQGNPYWTMMHTNSYKYGYSGSGNYYSYAHAYDIDDYMHRTDGGRRTWDNTTPVNNVDSANVVLQGGEAPRTTANTTSEDCLDSEELILWISYPMMSTEYGITLHILSPGN

SEQ ID NO: 42293 - protein, 104 aa, Zea mays
  Coding DNA Sequence Number=SeqID_514
MERTQRGAGSPGGGEQCGEDWLRGGGTGGRGNSQETRARNGRAARGESANRDVVRLYTGREGQKRATEICGTDWPVAAAVLRGSTAVRSKSNHFRCAGKSVDWD

SEQ ID NO: 42294 - protein, 102 aa, Zea mays
  Coding DNA Sequence Number=SeqID_515
MALCGSASLVVPSPEPERASAPSGHLAEKDSCVAVAPDVQGTEILQPGCATRRHHARLDVTVGRSVDPDLSGGRVWSGAAGTGKAFLDRFDNEQLIVPAHHL

SEQ ID NO: 42295 - protein, 87 aa, Zea mays
  Coding DNA Sequence Number=SeqID_516
  Gene Ontology: Mol. function=transferase activity; Cellular component= membrane
  Homolog annotation: Hit_ID=Q10SX7; Match level="QueryCoverage=69%, HitCoverage=14%, E-value=3e-22, Identity=83%"; Hit description =Exostosin family protein, putative, expressed
MVLDHVVATNLTVIQKNLWDPVKQRALVFNRPMEAGAATWQVLRELEVLLDQSRRRSVGSYSWRSSQHAALADNINIESRPEPEIHL

SEQ ID NO: 42296 - protein, 163 aa, Zea mays
  Coding DNA Sequence Number=SeqID_517
  Subcellular localization annotation: CTP_CleavageSite=29; ConfidenceScore=5.02e-01
MAPPVTWSVRALGRARRRLLRGRGQGRVRALGSGEAEFVVFRGRGRVRALGSGEAEFVVFRGRGRVRALGSGEAEFPMAPEAGLGCCRPHSVEWHSSRSGAGGAVLLSGRIRCQAILALNAPAIRSVVVAIWPRLLLGEDWASGEPKPGCSVEFQVLGLVIVA

SEQ ID NO: 42297 - protein, 114 aa, Zea mays
  Coding DNA Sequence Number=SeqID_518
  Homolog annotation: Hit_ID=Q9ZQY1; Match level="QueryCoverage=36%, HitCoverage=11%, E-value=2e-15, Identity=97%"; Hit description =Pyruvate dehydrogenase E1 beta subunit isoform 3
SFKEIYATLCDCRMDPDIAVERLISQENEVLAIDHIINSAAKSNYMSAGQISVPIVLRGPNGAAAGVGAQHSQVINDINKGPNCAYGMFHSSVITAARKALVYVIPSIAISLNW

SEQ ID NO: 42298 - protein, 136 aa, Zea mays
  Coding DNA Sequence Number=SeqID_519
  Pfam annotation: Domain name=GRP; Domain location=31-126; Score= -20.1; E_value=0.0084; Accession=PF07172.2; Description=Glycine rich protein family
MYFVFEAEFVICPYLARWCNLFDLRLIGRSMDVPWLVFMSLLSIRLAVERSGLEGLDESEYYSDEEDSSDSSEEGGGGDGGDDDDDGGDGDDGDDSGGGGDGGSKGGNGGSKGGNGGISRGSNGGGSSKDSNKASG

SEQ ID NO: 42299 - protein, 535 aa, Zea mays
  Coding DNA Sequence Number=SeqID_520
  Gene Ontology: Mol. function=protein binding; Cellular component =integral to membrane; Biological process=protein amino acid phosphorylation
  Homolog annotation: Hit_ID=Q10QT0; Match level="QueryCoverage=86%, HitCoverage=93%, E-value=0.0, Identity=70%"; Hit description=Leucine- rich repeat family protein, putative, expressed
  Pfam annotation: Domain name=LRRNT_2; Domain location=372-411; Score =13.8; E_value=0.031; Accession=PF08263.3; Description=Leucine rich repeat N-terminal domain
  Pfam annotation: Domain name=LRR_1; Domain location=417-438; Score =14.1; E_value=0.51; Accession=PF00560.23; Description=Leucine Rich Repeat
  Pfam annotation: Domain name=LRR_1; Domain location=440-462; Score =6.6; E_value=16; Accession=PF00560.23; Description=Leucine Rich Repeat
  Pfam annotation: Domain name=LRR_1; Domain location=464-486; Score =17.7; E_value=0.042; Accession=PF00560.23; Description=Leucine Rich Repeat
  Pfam module annotation: Pfam domain module=LRRNT_2::LRR_1::LRR_1::LRR_ 1; Domain location=372-411::417-438::440-462::464-486
  Subcellular localization annotation: CTP_CleavageSite=45; ConfidenceScore=5.39e-01
MASRIASFPSFLAFVVVTVATLFPSSSSQQQPAAAVPQPRGFYISCGSDKDVQVGSIKWAKDEGFTAVGNASAINKPHLLPLLAALRYFPDATARKYCYQLPVVKGTRYLVRTTYFYGGFDGGKEPPVFDQIVDGTLWSAVNTTDNYRRGMSTYFEMVAQGQGKTMSVCLARRPDTASSPFISALEVIDLADSMYNTTDFSRFTMTTVVRSRFGSKGDIVSYPDDPYNRYWAPFADANPMVESHSSISPDDFWNQPPAKALKAGITTSRGKKLAVQWPTTELPAATYYVALYFQDPRTASPFSWRVFDVAVNGNDFFRGLNASAAGVMVYSSMMQLSGKTEILLTPNETSPVGPLINAGEIYQIVPLGGRTATRDVVAMEDLASSLKNLPPDWAGDPCLPQQHSWTGVECSQGSPVRVLSLYLSGNNLSGPIPDLSSMHALTAVRLDSNQFSGTINPSMEKLANLKELHLNNNNLTGKIPDGLKNKAGLDLRCKEQLRGTNLNEADKEEIMSTMLHPCTQFNDEGRGLKTSKFVR

SEQ ID NO: 42300 - protein, 252 aa, Zea mays
  Coding DNA Sequence Number=SeqID_521
  Gene Ontology: Mol. function=DNA binding; Biological process =regulation of transcription, DNA-dependent
  Homolog annotation: Hit_ID=Q69V36; Match level="QueryCoverage=96%, HitCoverage=97%, E-value=1e-43, Identity=44%"; Hit description =Transcriptional factor B3-like
  Pfam annotation: Domain name=B3; Domain location=138-227; Score=67.3; E_value=4.9e-17; Accession=PF02362.12; Description=B3 DNA binding domain
MVAAAAETQWMSPYEVARERNVEENKRKMEALNLRHLSAVIKEAPKTPSPMKPKRRRPIEDAVVVPSPPRRSRRLANLPELKYAEIAPHTADRMTRSPRKPACRIYFANRGSISMKARLEATRKAEELESELDHEIPSFVKAMLHSHVVRGFWLQLPSHFCDTYMPKQDSIITLVDEKDEEFDTKYLAYKKGLSGGWAGFALCHGMQDGDSAVFQLIKPTTFKNVQCSSNNAFVFQVYIIRAASDDVSEVDE

SEQ ID NO: 42301 - protein, 232 aa, Zea mays
  Coding DNA Sequence Number=SeqID_522
  Gene Ontology: Mol. function=drug transporter activity; Cellular component=membrane; Biological process=multidrug transport
  Homolog annotation: Hit_ID=Q5GAV3; Match level="QueryCoverage=75%, HitCoverage=13%, E-value=2e-11, Identity=34%"; Hit description =Putative integral membrane protein
MPRQVNLRQRPEAKKREANSGIKDHRSSDLDSIHYTRRAKTLGAMDPQLKLALEAQTRSFISELDKKFADHDAKWESRVGELEKAAVSAADQFYDLKADIHTDVTAQLEFFVSSATEQANRVAAATTSRVSALESATAAFEAWRPAMESSVAEVKRGVAAVQAAVANIPQPGERRPLEPPHLQPGILGEFGSGPARPSTGLRIDGPDGHCSDHHRREAGFGRVYASTPPPAQ

SEQ ID NO: 42302 - protein, 155 aa, Zea mays
  Coding DNA Sequence Number=SeqID_523
  Pfam annotation: Domain name=DUF819; Domain location=1-155; Score= -201.0; E_value=0.049; Accession=PF05684.3; Description=Protein of unknown function (DUF819)
MAGLAATAVGLVTPGAPAHDAVMEYLLPAAVPLLLLGADLRHVVRTTGDLLKTFLLGSGLTPSVLAADVAADNLISALYFMALFSLASNIPAEPKTATASPQKDGERLSVLNGGAAIALSFIICKAARLGLQGGTLPCITALAVFLALRPTDQPF

SEQ ID NO: 42303 - protein, 196 aa, Zea mays
  Coding DNA Sequence Number=SeqID_524
MEPDEEIRSKIDEYDMHHEDQRGPIFSNKLALENIQSKSPLDWWCAYGGQAFELQRFVMRVVSLCASSSGCEWIWSTFEFTFGKAKSDKEIADGYCAVALSDGVQDKAAAVQIFLPFLAGGKGERLRAKEQANKYLRPDIFSCPSHVEKRRHVGVKLPSSPGPGRLGCRSFFNPSPATGSLSPSAPPTVPQSPSQI

SEQ ID NO: 42304 - protein, 315 aa, Zea mays
  Coding DNA Sequence Number=SeqID_525
  Homolog annotation: Hit_ID=Q7X989; Match level="QueryCoverage=46%, HitCoverage=13%, E-value=1e-59, Identity=77%"; Hit description =Putative MSP1(Mitochondrial sorting of proteins) protein
  Subcellular localization annotation: CTP_CleavageSite=86; ConfidenceScore=5.27e-01
MGAESEEAPSPSSKLPCDSSIGARIPAVRSMALFVSSLAAALSHLSLPSTSTPKPHSASFLRLLHLPPHCLIQWTDDTCWAPPLSEAQMRTAVRRIRPETQDGYRKMAIARFVLQEGTDKVFINFRDAKMAEAAECEDEWDLFADANDDVGIVGSEVTDREGEVRLTFVENGSSKVGVRFDKQILGAIDLGGSCELDHGLFCSVDSLYLDGPGWEDRAKHSFDVVFEFASEESQQVPVILFLKDVEKICGNNYTYHGLKNKLESFPAGVFIVRSQIQTDARKDKSNNGSPWLKFSYNQAAILDLAFQVQLIVDST

SEQ ID NO: 42305 - protein, 113 aa, Zea mays
  Coding DNA Sequence Number=SeqID_526
  Homolog annotation: Hit_ID=Q10RE6; Match level="QueryCoverage=98%, HitCoverage=95%, E-value=1e-31, Identity=58%"; Hit description =Allergen, putative, expressed
MGQRRRNLSAAVLLLVLHLLLLFSAPGTCTPARGRGGVAPTKGEEDGYSWFWATAARRALVGPGSSPPTCRSSCRGCHPCRPVHVAIQPGRSFPLEYYPEAWRCKCGNKLFMP

SEQ ID NO: 42306 - protein, 744 aa, Zea mays
  Coding DNA Sequence Number=SeqID_527
  Homolog annotation: Hit_ID=Q7XEN2; Match level="QueryCoverage=98%, HitCoverage=100%, E-value=3e-69, Identity=36%"; Hit description =Expressed protein
  Pfam annotation: Domain name=DUF593; Domain location=425-518; Score =163.4; E_value=5.7e-46; Accession=PF04576.6; Description=Protein of unknown function, DUF593
MAVQAHSRPQNVSRQLWPVLHHAVSECCLIIMLVTTAVLSYMATRIEISRLSYCQSHNKLERSDDMCDKCMLSCMTSSGKTYNLTNMHGRDKFKKKRDSHMLPDITNSWFPGDDMSKLKQRNIVMSSVGYSSNDDYDHLPYEGYRKLKLGHESEYDIHISNSDNDERNAVSHEARERANHMPSHDALLQPMISNASGLLMPSFDNTIMTKATQPLNNVRDTDTHSSDTKDANSLDHAIGLVLDDISWSQINTSDKNIDVQSKAIPEEVLAELPKEKNFLIGTEEVGDSFEDISGSPGVEAAKDFNASANAGTRSSVDTHISWNNSPKIASACRGYYKSPRLSEIISARDTNSKTNEEVKTFLSQLSTARGFDSSLNEMTPRSSTHIDDYRQHDATGMTPFLDRNNSNLDSFDANTTSEDEGESSLEHLKKQAKFNKKKMGMLYKELEAERSASAVAVSEAMAMINRLQEEKASMHMEALQYLRMMEEQADHDQEAIEKLNDLLTEREKELLDLEAELEGYRSKLHDQPFDVGKFGATDGAMAFRVLVGSDFMRHTIFDFEDEKAKILESLHRLEEILGMPSIDMGDANDSLQNSLLSDQSMHISQDIENSELESLSLPREDMISESISSQCYDEQESVKYMHKHMHNHEQDDNESVDKQQKNVTSCSHSDDGNIHTMKSVKHEISLLNARFKALEADQDFLKQILRSLNVSSDGVECIQEITSHLRELRRIMADQRDMTVFMRS

SEQ ID NO: 42307 - protein, 85 aa, Zea mays
  Coding DNA Sequence Number=SeqID_528
MQVKCALCPFVLLLLLVSALDALPAAEPSFSQKSVSGRTGPALEMFPSANPTGPIIIEGTVAVRTVGPSMCYSVKRLDSSHIFFV

SEQ ID NO: 42308 - protein, 311 aa, Zea mays
  Coding DNA Sequence Number=SeqID_529
  Gene Ontology: Mol. function=dimethylaniline monooxygenase (N-oxide -forming) activity; Cellular component=intrinsic to endoplasmic reticulum membrane; Biological process=electron transport
  Homolog annotation: Hit_ID=Q9LMA1; Match level="QueryCoverage=99%, HitCoverage=63%, E-value=1e-102, Identity=60%"; Hit description =Probable flavin-containing monooxygenase 1
MPAFPPGRGPEVFRGQVMHSLDYCKLGEEETVELMRGKKVVVVGYKKSAIDLALECAQANQGEGGEACTMLVRTLHWVVPSYSIWGLPFFLFYSTRLAQFLYERPNQGLLRSMLCTLMAPLRAGVSKFIESYLAWKLPLDKYGLRPDHPFVEDYASCQMAILPDGFFDMADRDMIRFKRAGPGGWCFSRNGVLLDDGTEVEADLVFLATGFEGKDKVRAVLPEPFRGLVVDRSGMMPLYRGTIHPLIPNMAFVGYVESVSNLHTSELRCRWLAGLLGGRFALPSVEDMHPRQRRHVRRPWLQGSPQGQLPS

SEQ ID NO: 42309 - protein, 163 aa, Zea mays
  Coding DNA Sequence Number=SeqID_530
  Gene Ontology: Mol. function=dimethylaniline monooxygenase (N-oxide -forming) activity; Cellular component=intrinsic to endoplasmic reticulum membrane; Biological process=electron transport
  Homolog annotation: Hit_ID=Q9LMA1; Match level="QueryCoverage=88%, HitCoverage=26%, E-value=3e-26, Identity=42%"; Hit description =Probable flavin-containing monooxygenase 1
MAAASRQDAHRSTRQAVPASSRVAIIGGGISGLAAAKQLAAHDPVVFEATASVGGVWKHCVYRSTRLQTPRRDYEFSDYSWRNRDDPTFPTHAEIVEYLEGYADAFGLWRYIVLSARVVDIKFLGGGGLTELWSGGAAGQPPLLRGKPLWEVGVATAGSDTVQ

SEQ ID NO: 42310 - protein, 114 aa, Zea mays
  Coding DNA Sequence Number=SeqID_531
  Gene Ontology: Mol. function=acyltransferase activity; Cellular component=integral to membrane
  Homolog annotation: Hit_ID=Q10QW0; Match level="QueryCoverage=83%, HitCoverage=19%, E-value=2e-39, Identity=80%"; Hit description =Fiddlehead, putative, expressed
  Subcellular localization annotation: CTP_CleavageSite=16; ConfidenceScore=5.09e-01
ATCWRWVGTGHALKTNITTRGPLVLPFSEQLLFFAGVLFRHLFPSKASTPAPTTAPGDASAAAPYIPDFKRAFENFCMHAASGDVLEHLQSNLSLRNADLKALHKFSLEKEKKI

SEQ ID NO: 42311 - protein, 156 aa, Zea mays
  Coding DNA Sequence Number=SeqID_532
  Pfam annotation: Domain name=Zim; Domain location=85-114; Score=19.8; E_value=0.0025; Accession=PF06200.4; Description=ZIM motif
  Subcellular localization annotation: CTP_CleavageSite=57; ConfidenceScore=5.25e-01
MWFLIGPCLNRLRPASTSVQASHPGPSCHPLAFHVLQCFPLTTGCLAPAVAMGLMPAAAAAAEATEERSTVLEFFPQQAGTLKDEQQNKAGGKVVVMDNFPADKADELMQLTGSGNAALAAAQSALGQPSLKGRNELDARVCLRCPPSEFTGTIDI

SEQ ID NO: 42312 - protein, 426 aa, Zea mays
  Coding DNA Sequence Number=SeqID_533
  Gene Ontology: Mol. function=transferase activity; Cellular component= endoplasmic reticulum; Biological process=biosynthetic process
  Homolog annotation: Hit_ID=Q10QW6; Match level="QueryCoverage=99%, HitCoverage=83%, E-value=0.0, Identity=79%"; Hit description =Glycosyl transferase, group 1 family protein, expressed
MATERRRASVVVLGDIGRSPRMQYHSLSLANQASMEVDIVANGGSDPHLSLRENPSIHIHEMKTVQLTGISKISGALSLLLKAAVQFILLVWFLCFKIPRPDVFFVQNPPSVPTLAAVKLASWLRGAKFIVDWHNFGYTLLGLSHGRSHIIVKIYFWFEKYFGQMADGAFCVTKAMQHELAQNWGIRATVLYDQSPDFFHPASLMEKHGVSIYFEFLFPPSCTTCDLKTQEVGEDMNTTAFTSKIDGQVFLKPNRPALVVSSTSWSALLNLAVIDIAFFMFIACDYRVDSSNMRKTPDEDFSILLEAALMYDRRVAAALGEDDSMDEGQLWIDIKNGKQFVYPRLLFIITGKGPDRKKYEDQIKRLKLRRVALRTMWLASEDYPLLLGSADLGVSLHTSSSGLDLPMKVVDMFGCGLPVCAASFSW

SEQ ID NO: 42313 - protein, 1246 aa, Zea mays
  Coding DNA Sequence Number=SeqID_534
  Gene Ontology: Mol. function=protein serine/threonine kinase activity; Cellular component=integral to membrane; Biological process=protein amino acid phosphorylation
  Homolog annotation: Hit_ID=Q2R2D7; Match level="QueryCoverage=86%, HitCoverage=93%, E-value=0.0, Identity=42%"; Hit description =Receptor kinase, putative, expressed
  Pfam annotation: Domain name=LRRNT_2; Domain location=56-97; Score =41.5; E_value=2.8e-09; Accession=PF08263.3; Description=Leucine rich repeat N-terminal domain
  Pfam annotation: Domain name=LRR_1; Domain location=105-127; Score =1.1; E_value=1.8e+02; Accession=PF00560.23; Description=Leucine Rich Repeat
  Pfam annotation: Domain name=LRR_1; Domain location=129-151; Score =12.5; E_value=1.3; Accession=PF00560.23; Description=Leucine Rich Repeat
  Pfam annotation: Domain name=LRR_1; Domain location=153-175; Score =18.0; E_value=0.034; Accession=PF00560.23; Description=Leucine Rich Repeat
  Pfam annotation: Domain name=LRR_1; Domain location=177-199; Score =7.7; E_value=10; Accession=PF00560.23; Description=Leucine Rich Repeat
  Pfam annotation: Domain name=LRR_1; Domain location=225-247; Score =13.7; E_value=0.66; Accession=PF00560.23; Description=Leucine Rich Repeat
  Pfam annotation: Domain name=LRR_1; Domain location=249-271; Score =15.8; E_value=0.15; Accession=PF00560.23; Description=Leucine Rich Repeat
  Pfam annotation: Domain name=LRR_1; Domain location=273-294; Score =5.4; E_value=27; Accession=PF00560.23; Description=Leucine Rich Repeat
  Pfam annotation: Domain name=LRR_1; Domain location=296-318; Score =13.0; E_value=1; Accession=PF00560.23; Description=Leucine Rich Repeat
  Pfam annotation: Domain name=LRR_1; Domain location=320-342; Score =13.6; E_value=0.74; Accession=PF00560.23; Description=Leucine Rich Repeat
  Pfam annotation: Domain name=LRR_1; Domain location=344-366; Score =13.9; E_value=0.6; Accession=PF00560.23; Description=Leucine Rich Repeat
  Pfam annotation: Domain name=LRR_1; Domain location=368-391; Score =16.3; E_value=0.11; Accession=PF00560.23; Description=Leucine Rich Repeat
  Pfam annotation: Domain name=LRR_1; Domain location=393-415; Score =7.4; E_value=12; Accession=PF00560.23; Description=Leucine Rich Repeat
  Pfam annotation: Domain name=LRR_1; Domain location=418-440; Score =9.3; E_value=5.1; Accession=PF00560.23; Description=Leucine Rich Repeat
  Pfam annotation: Domain name=LRR_1; Domain location=467-495; Score =0.2; E_value=2.6e+02; Accession=PF00560.23; Description=Leucine Rich Repeat
  Pfam annotation: Domain name=LRR_1; Domain location=497-519; Score =15.8; E_value=0.16; Accession=PF00560.23; Description=Leucine Rich Repeat
  Pfam annotation: Domain name=LRR_1; Domain location=546-568; Score =12.8; E_value=1.2; Accession=PF00560.23; Description=Leucine Rich Repeat
  Pfam annotation: Domain name=LRR_1; Domain location=570-592; Score =11.9; E_value=1.7; Accession=PF00560.23; Description=Leucine Rich Repeat
  Pfam annotation: Domain name=LRR_1; Domain location=594-616; Score =11.1; E_value=2.4; Accession=PF00560.23; Description=Leucine Rich Repeat
  Pfam annotation: Domain name=LRR_1; Domain location=617-639; Score =13.0; E_value=1.1; Accession=PF00560.23; Description=Leucine Rich Repeat
  Pfam annotation: Domain name=LRR_1; Domain location=642-664; Score =3.6; E_value=61; Accession=PF00560.23; Description=Leucine Rich Repeat
  Pfam annotation: Domain name=LRR_1; Domain location=666-688; Score =16.0; E_value=0.14; Accession=PF00560.23; Description=Leucine Rich Repeat
  Pfam annotation: Domain name=LRR_1; Domain location=690-712; Score =19.1; E_value=0.016; Accession=PF00560.23; Description=Leucine Rich Repeat
  Pfam annotation: Domain name=LRR_1; Domain location=714-736; Score =15.5; E_value=0.2; Accession=PF00560.23; Description=Leucine Rich Repeat
  Pfam annotation: Domain name=LRR_1; Domain location=738-760; Score =7.5; E_value=11; Accession=PF00560.23; Description=Leucine Rich Repeat
  Pfam annotation: Domain name=LRR_1; Domain location=761-785; Score =2.6; E_value=93; Accession=PF00560.23; Description=Leucine Rich Repeat
  Pfam annotation: Domain name=Pkinase; Domain location=857-1137; Score= 107.1; E_value=5e-29; Accession=PF00069.15; Description=Protein kinase domain
  Pfam annotation: Domain name=Pkinase_Tyr; Domain location=857-1100; Score=60.6; E_value=3.4e-16; Accession=PF07714.7; Description =Protein tyrosine kinase
  Pfam module annotation: Pfam domain module=LRRNT_2::LRR_1::LRR_1::LRR_ 1::LRR_1::LRR_1::LRR_1::LRR_1::LRR_1::LRR_1::LRR_1::LRR_1::LRR_1: LRR_
  Pfam module annotation: Pfam domain module=LRR_1::Pkinase::Pkinase _Tyr; Domain location=56-97::105-127::129-151::153-175::177-199::225 -247::249-271::273-294::296-318::320-342::344-366::368-391::393
  Pfam module annotation: Domain location=:497-519::546-568::570 -592::594-616::617-639::642-664::666-688::690-712::714-736::738 -760::761-785::857-1137::857-1100
MATPSDPEYNKHHALSAKKHIISITMMMLIFHMLAFSLICLAKNAAHGDASAHALHSSDELALMSFKSLVGSDHTRALASWGNMSIPMCRWRGVACGLRGHRRGHVVALDLPELNLLGTITPALGNLTYLRRLDLSSNGFHGILPPELGNIHDLETLQLHHNSISGQIPPSLSNCSHLIEIMLDDNSLHGGVPSEIGSLQYLQLLSLGGKRLTWRIPSTIAGLVNLKELVLRFNSMTGEIPREIGSLANLNLLDLGANHFSGTIPSSLGNLSALTVLYAFQNSFQGSILPLQRLSSLSVLEFGANKLQGTIPSWLGNLSSLVLLDLEENALVGQIPESLGNLELLQYLSVPGNNLSGSIPSSLGNLYSLTLLEMSYNELEGPLPPLLFNNLSSLWGLDIEYNNLNGTLPPNIGSSLPNLNYFHVSDNELQGVLPRSLCNASMLQSIMTVENFLSGTIPGCLGAQQTSLSEVSIAANQFEATNDADWSFVASLTNCSNLTVLDVSSNNLHGVLPNSIGNLSTQMAYLSTAYNNITGTITEGIGNLINLQALYMPHNILIGSIPASLGNLNKLSQLYLYNNALCGPLPVTLGNLTQLTRLLLGTNGISGPIPSSLSHCPLETLDLSHNNLSGPAPKELFSISTLSSFVNISHNSLSGSLPSQVGSLENLDGLDLSYNMISGEIPPSIGGCQSLEFLNLSGNNLQATIPPSLGNLKGIARLDLSHNNLSGTIPETLAGLNGLSVLNLAFNKLQGGVPSDGVFLNVAVILITGNDGLCGGIPQLGLPPCPTQTTKKPHHRKLVIMTVSICSALACVTLVFALLALQQRSRHRTKSHLQKSGLSEQYVRVSYAELVNATNGFAPENLVGAGSFGSVYKATMRSNDQQIVVAVKVLNLMQRGASQSFVAECETLRCARHRNLVKILTICSSIDFQGHDFKALVYEFLPNGNLDQWLHRHITEDDEQKTLDLNARLNVGIDVASSLDYLHQHKPTPIIHCDLKPSNVLLDSSMVARVGDFGLARFLHQDVGTSSGWASMRGSIGYAAPEYGLGNEVSTHGDVYSYGILLLEMFTGKRPTDNEFGGAMGLRNYVLMALSGRALNQSFLLTASRNNSDIDKAEYAAERIFQLEHNNTGCYVVLSSMYADAGRGEDVGRIRSPIKEKGLRKTEARSLVDLNAVLPDKHCVRLAASFGLISSEARTTVLVQKNVCLCNQSHHAQKLISKYLRQTIVVGDTKIYRIFSDGSGCCGDYW

SEQ ID NO: 42314 - protein, 102 aa, Zea mays
  Coding DNA Sequence Number=SeqID_535
MSASNLYDCYKVRDWSWCVHDVILGSQRQPVVLNSHACECKSSVLGVDDDSDLELELEPDPNLTKETLCEASALAKEREAPACVAFALPFFNTLFYHDQRIQ

SEQ ID NO: 42315 - protein, 315 aa, Zea mays
  Coding DNA Sequence Number=SeqID_536
  Gene Ontology: Mol. function=protein phosphatase type 2C activity; Cellular component=protein serine/threonine phosphatase complex; Biological process=protein amino acid dephosphorylation
  Homolog annotation: Hit_ID=Q10S32; Match level="QueryCoverage=99%, HitCoverage=98%, E-value=1e-113, Identity=78%"; Hit description =Protein phosphatase 2C, putative, expressed
  Pfam annotation: Domain name=PP2C; Domain location=41-285; Score= -43.3; E_value=0.002; Accession=PF00481.12; Description=Protein phosphatase 2C
MDYFSTCWGPRSRAGHRGKGSDAAGRQDGLLWYKDAGQLVTGGFSMAVVQANQLLEDQSQVESGSLSLADYGPQGTFVGVYDGHGGPETSRFINDHLFNHLRRFATEHKSMSADVIRKAFQETEEGFLSLVIKEWSFKPQIASVGSCCLVGVICAGTLYVANLGDSRAVLGRLVKATGEVLATQLSAEHNACYEEVRQELQSSHPDDPRIVVLKHNVWRVKGLIQGIARRLVKAAMQEAAKKREMRYSDLKKIDRGVRRHFHDDITVVVVFLDSDAMSKASWSKSPSVSLRGGGVTLPAKSLAPFSAPAQLNGTH

SEQ ID NO: 42316 - protein, 276 aa, Zea mays
  Coding DNA Sequence Number=SeqID_537
  Homolog annotation: Hit_ID=Q10S29; Match level="QueryCoverage=79%, HitCoverage=87%, E-value=2e-58, Identity=54%"; Hit description =Expressed protein
  Subcellular localization annotation: CTP_CleavageSite=44; ConfidenceScore=5.61e-01
MATATTLSFSGGGGGTTLLRGHVALTSGRCCTFPSSRWRPPRLSASRADDSSPAPFEMTVEDALKLLGVAEGASFDEILRAKNAVLASCKDDQDAVAQVEAAYDMLLMQSLSQRRAGKVANNRIRFADVKPVKSAGAGTVPQWMQATMKNAPITFETPSSSSLGIQSCVYGALMVFTYASGSSTSLPSAYSSPDVPGKAALVTVGGLAAGATVGSALENFLQVDLVPFLGIHSPAVVVSEFILFSQLLGQGNACFPHKVEAAAVYSKTIRGHLCPL

SEQ ID NO: 42317 - protein, 245 aa, Zea mays
  Coding DNA Sequence Number=SeqID_538
  Gene Ontology: Mol. function=RNA-directed DNA polymerase activity; Cellular component=mitochondrion; Biological process=RNA-dependent DNA replication
  Homolog annotation: Hit_ID=UPI00004C1731; Match level="QueryCoverage =71%, HitCoverage=12%, E-value=7e-97, Identity=95%"; Hit description =UPI00004C1731 related cluster
  Pfam annotation: Domain name=rve; Domain location=60-211; Score=90.0; E_value=7.5e-24; Accession=PF00665.16; Description=Integrase core domain
MRFGAWKIKFYGLELNHIARRYNETADELAKIASGRTMVPPDVFSRGLRQPSVKIDDMPEPEAPSAQPEKAPGGYTHLLVAIDKFSKWIEVQPLNNIRSEQAVVFFTNIIHRFGVPNSIITDNGTQFTGGKFLDFCEDHHIRVDWAAVAHPMTNGQVERANGMILQGLKPQIYNDLNKFGKRWMKELPSVVWSLRTTPSRATGFTPFFLVYGAEAVLPTDLEYGSPRTRAYADQSNQASREDSLD

SEQ ID NO: 42318 - protein, 46 aa, Zea mays
  Coding DNA Sequence Number=SeqID_539
MVTSGIKSAEKSRIPVPAERPLTRMKKQEINMTICQTPDKGFDRCS

SEQ ID NO: 42319 - protein, 101 aa, Zea mays
  Coding DNA Sequence Number=SeqID_540
  Homolog annotation: Hit_ID=Q69K57; Match level="QueryCoverage=72%, HitCoverage=15%, E-value=4e-14, Identity=51%"; Hit description=Smr domain-containing protein-like
  Pfam annotation: Domain name=Smr; Domain location=28-101; Score=12.0; E_value=0.0011; Accession=PF01713.11; Description=Smr domain
MKANILPVPNRLQTPQLQGLIQEQNPPIDLCGLHISEAIHVLNYELNNRRKIVRSTGRRLQVMIISSARTPARLTAAVEQYLMEHGLLYTQVQPGLLRILL

SEQ ID NO: 42320 - protein, 179 aa, Zea mays
  Coding DNA Sequence Number=SeqID_541
  Gene Ontology: Mol. function=threonine endopeptidase activity; Cellular component=proteasome core complex (sensu Eukaryota); Biological process=ubiquitin-dependent protein catabolic process
  Homolog annotation: Hit_ID=Q9LSU3; Match level="QueryCoverage=93%, HitCoverage=68%, E-value=1e-89, Identity=96%"; Hit description =Proteasome subunit alpha type 6
  Pfam annotation: Domain name=Proteasome; Domain location=32-178; Score=92.3; E_value=1.5e-24; Accession=PF00227.16; Description =Proteasome A-type and B-type
MSRGTGAGYDRHITIFSPEGRLYQVEYAFKAVKSAGVTSIGVRGADSVCVVTQKKVPDKLLDQTSVTHLFPITKYVGLLATGLTADARSLVSQARNEAAEFRFKWGYEMPVDVLAKWIADKAQVYTQHAYMRPLGVVAMVLGYDEEKNAQLFKCDPAGHFFGHKAQSSTCLQCYTTAQG

SEQ ID NO: 42321 - protein, 134 aa, Zea mays
  Coding DNA Sequence Number=SeqID_542
MADLLMHVHVRKQKHQMSLNHWVPMQDHVRTNSNQHKRKFEIEEIEEGINDVDGDVALWLARQHRLVMGHTHTGGTWIAVKHIKKCHKFGVKRKTLDTTNHIGTAFASLFEARNWSLEHEGHRSIMRVNEGPKS

SEQ ID NO: 42322 - protein, 130 aa, Zea mays
  Coding DNA Sequence Number=SeqID_543
  Pfam annotation: Domain name=DUF1677; Domain location=23-130; Score =135.3; E_value=1.7e-37; Accession=PF07911.4; Description=Protein of unknown function (DUF1677)
MSAAATAGGQEVAPATVAVAEAEEWEVCACCGLREECTPAYAAGVRARYGGRWLCGLCGDAVGDEVAAGAGSALEVEAAIAGHAAFCRALGGRRTPDAAERLIAAVRRLLRNAGGREDKSLVLVEFQEAS

SEQ ID NO: 42323 - protein, 115 aa, Zea mays
  Coding DNA Sequence Number=SeqID_544
MEKEVVDRAALLRLVELVALRLIKIYKSHWRLALPSPLMIKARNGGYKRAREGGEALKSLIEVEVELRPREGSASGGFPRKGPSSKGSPGSLVFLMVDNVSSVGPERHHLGYANL

SEQ ID NO: 42324 - protein, 213 aa, Zea mays
  Coding DNA Sequence Number=SeqID_545
MAELQDDHRPELIGLGKMAAEDSLSSLVSSEDEPDLDPVHSKETQLNPGSVSASTVSYRRQTSKERAIGLAPEFAFFKADKDEHSEDDDEEPCPDSQDWPGSFVTAVRMYEAIEAKLRARELNSSKLNKSAKRHLSECSWLSEDDFEKTFGKCSIESLQDLHLDRDESVKQVVDVPSVDDGSTESNLLEVGEHSSAAPREYSGVWEAPEAEVE

SEQ ID NO: 42325 - protein, 140 aa, Zea mays
  Coding DNA Sequence Number=SeqID_546
MAHPWPLIVDPVAMRAYLFGIRSDLILTIEIGSHDSSARTPSVVPICKRVPWVPSAPLGLCYRATHVTKPGADMWVPLVSSLITCTRSLASGPHWSDSSSTLELHGHENCLAEVVRWLKRSSSDSLVPMHKTNARPPGLT

SEQ ID NO: 42326 - protein, 84 aa, Zea mays
  Coding DNA Sequence Number=SeqID_547
  Subcellular localization annotation: CTP_CleavageSite=39; ConfidenceScore=5.24e-01
MAMAMGVPPPAHLVGWRRLGGRTRIRIHRPSRRGSFSCSCTFIDSHTMRPHRSALSLVDLLYRLFGPHDPHKASQTVRTDRVTD

SEQ ID NO: 42327 - protein, 120 aa, Zea mays
  Coding DNA Sequence Number=SeqID_548
  Subcellular localization annotation: CTP_CleavageSite=17; ConfidenceScore=5.30e-01
MAPCRPAAGPARRHGPSAALVRPSPARTLGAWLGAVARRSADWPNPPPPREFVPCPVVTTQEEESLFPKKPLSFSVHAPIPTGDGWDQTVAPVPVDGTVPPVVAPTGWESAAQPTAQGWE

SEQ ID NO: 42328 - protein, 249 aa, Zea mays
  Coding DNA Sequence Number=SeqID_549
  Homolog annotation: Hit_ID=Q94HF1; Match level="QueryCoverage=38%, HitCoverage=42%, E-value=1e-40, Identity=85%"; Hit description =Eukaryotic translation initiation factor 3 subunit 12
  Pfam annotation: Domain name=SAC3_GANP; Domain location=114-249; Score=11.0; E_value=0.00011; Accession=PF03399.6; Description =SAC3GANP family
  Subcellular localization annotation: CTP_CleavageSite=67; ConfidenceScore=5.45e-01
MDSLPFELLLSLASNPSLQGPTQAPARLDLPPSPFPFIAFVGSIVATAFPSGFTVLATFPARSAVLLAESLSSWLDSSLSWPSRPDPSTPFYSVASAATLTSAGVATLAVLLDHQAQKEIIRLQPVAARYVGSVNDEGRTHSRRGGVEGEPPPVSSQTYNLDANLSLLRLYQFEPERMSIQIVAHILIKALMAMPAPDFSLCLFLIPEHVQMGEQFKALIVLSHYLETARFSQFWDEAANNRHILEAVP

SEQ ID NO: 42329 - protein, 162 aa, Zea mays
  Coding DNA Sequence Number=SeqID_550
  Gene Ontology: Mol. function=structural constituent of ribosome; Cellular component=small ribosomal subunit; Biological process =translation
  Homolog annotation: Hit_ID=Q10QU8; Match level="QueryCoverage=69%, HitCoverage=42%, E-value=2e-38, Identity=71%"; Hit description=40S ribosomal protein SA, putative, expressed
  Pfam annotation: Domain name=Ribosomal_S2; Domain location=1-81; Score=-49.7; E_value=0.00089; Accession=PF00318.10; Description =Ribosomal protein S2
MAAPGGSDTLDLGSTREEMSRGLEAASPIKESALGNIPTIAFCDTDSPMRYVDIGIPANNKGRNNIGCLFWLLARMVLQMRGTILSGHKWEVMVDLFFYRDPEEAKEQEEEAVAAPEFATVTDYQGDDQWGGDQWTSDVAACKGEEVEAYLQEFHDFDEFED

SEQ ID NO: 42330 - protein, 79 aa, Zea mays
  Coding DNA Sequence Number=SeqID_551
  Subcellular localization annotation: CTP_CleavageSite=17; ConfidenceScore=5.15e-01
MAHCRPGAGPARRHGPSAALVRPSLARTLGARLGAVARWSADWPNPPPPREFVPCPVVTIQGGREPISEKAPIFFCACY

SEQ ID NO: 42331 - protein, 54 aa, Zea mays
  Coding DNA Sequence Number=SeqID_552
MSHLCEGYGPPVPTGDGWDQTVALFLWMALFLQWSLLLVGNQQPSPLPTTQGWE

SEQ ID NO: 42332 - protein, 285 aa, Zea mays
  Coding DNA Sequence Number=SeqID_553
  Homolog annotation: Hit_ID=UPI00006725B9; Match level="QueryCoverage =37%, HitCoverage=81%, E-value=6e-11, Identity=33%"; Hit description =Uncharacterized membrane protein
MRCSSWQLTNDSIGSLTPWRDATQTQGLRDLESTSTSCEPTPTPASSEEEEEKEREHVLQTARTITTRNGKPHPRPRALPTITHQATTTTNQGPDSRDNPAMPPPSTAAAVSSIIRPTPPPAVSFHPVPLPQIRRRSSAGAAAASRLAVARAAASGARGGGDAETVFFDGGAHYGDLAANLLLGLTLLWLPLTLAAVSRAFILRYRFTSRRVTVVSGLSGADRTDFPYSSVTSVVVVPRFVGEWGDIVITLRDGTKVDLRSVPRFREVADYCRSMAAAEGSLVVS

SEQ ID NO: 42333 - protein, 423 aa, Zea mays
  Coding DNA Sequence Number=SeqID_554
  Gene Ontology: Mol. function=3-dehydroquinate synthase activity
  Homolog annotation: Hit_ID=Q9LH99; Match level="QueryCoverage=85%, HitCoverage=80%, E-value=1e-101, Identity=56%"; Hit description =Arabidopsis thaliana genomic DNA, chromosome 3, BAC clone: T19N8
  Pfam annotation: Domain name=DHQS; Domain location=95-423; Score =605.9; E_value=3.7e-179; Accession=PF01959.7; Description=3 -dehydroquinate synthase (EC 4.6.1.3)
  Subcellular localization annotation: CTP_CleavageSite=44; ConfidenceScore=5.64e-01
MASSSSLASAKALARSHASLLAPQTQRTGFSRPVPQSGPCLAAPCDRAGQFKLLPFDDPSSAVTLPMASALQRLGRASAVALAPRLRQDARLCCRAGGAEEDRLGVDREPAATARINALFIDGPGIFDEENQKVAVISQVSSPGELDLVQPDNAEAENIVIDFRGGWQVIRAENIVAAFQGCKGNVLAVSTNTTEAQVFLEALEQGLDGVVLKVDDMDDIIKLKDYFDRRNEAKSQLPLTKATVTKVEVVGMGDRVCVDLCSIMRPGEGLLVGSYARGMFLVHSECLETNYIASRPFRVNAGPVHAYVTVPGGKTSYLSELGSGKEVIVINQSGLWRTAIVGRVKIESRPLILVEAKDNSGDETYSIFLQNAETVALITPNTGSSGRTAIPVTSLKVGDEVLVRKQGAARHTGIEIQEFIVER

SEQ ID NO: 42334 - protein, 446 aa, Zea mays
  Coding DNA Sequence Number=SeqID_555
  Gene Ontology: Mol. function=nucleotide binding
  Homolog annotation: Hit_ID=Q8S7V6; Match level="QueryCoverage=99%, HitCoverage=98%, E-value=0.0, Identity=81%"; Hit description =Putative auxin independent growth-related protein
  Pfam annotation: Domain name=DUF246; Domain location=64-400; Score =642.2; E_value=4.2e-190; Accession=PF03138.5; Description=Plant protein family
MVRSRPRVWLVAGCAAVLLWASVAQLVAVGRLLLLFGLAGDAVSSPPPTALPPPRIYKSNGYLKISCNGGLNQMRSEICDMVAVARLLNLTMVVPELDKRSFWADQSNFGDIFDVKHFIDSLRDEVHIIEQLPEKLGPRDSDIIILEMSPILPLFSKYSVIHFNKTDARLANNGISTEIQLLRCRVNFHALKFTPQIEGLGNELVHKLRAKGSFVALHLRYEMDMLAFSGCNHGLSPEEAEELKKMRYAYPWWRDKEIDSQAKRLQGLCPLTPEEASLVLKALGFQKDALIYIAAGEIYGGDRRLEPLRAAFPNLVRKVMLLNSEVLRQFQNHSSQMAALDFIVSTASDVFIPTFDGNMAKLVEGHRRFLGFRRSVVLDRRKLVELLDLYTNKTMSWDNFASSVQEAHKNCVAQPSCRRELKNRPKEEDYFYANPHECLANSTLCS

SEQ ID NO: 42335 - protein, 128 aa, Zea mays
  Coding DNA Sequence Number=SeqID_556
MDEAAKITRGWCSGGRCGPAACLGRGLKAHRQRQRRPLGALEWTSRSWSGRPPKREGEGRAGLGCRRRDLDLESRHRGGGLERVSAGRIRRGEARQRDGQQDDYGQALATNGEAAAAASDEDVGVIMR

SEQ ID NO: 42336 - protein, 530 aa, Zea mays
  Coding DNA Sequence Number=SeqID_557
  Gene Ontology: Mol. function=transferase activity; Cellular component= integral to membrane; Biological process=protein metabolic process
  Homolog annotation: Hit_ID=Q10R71; Match level="QueryCoverage=91%, HitCoverage=90%, E-value=0.0, Identity=74%"; Hit description =Glycosyl transferase family 2 protein, putative, expressed
  Pfam annotation: Domain name=Glycos_transf_2; Domain location=120 -307; Score=26.4; E_value=7.6e-06; Accession=PF00535.16; Description =Glycosyl transferase
MELEGPWARVLHLHDACEWGRAVRARAVAPALEAAAWACLAMSVMLVLEVCYMSVSSFVAVNLLRRTPQRRYSWEPMPSGTARGDDEEAAVGDGGGEAYPMVLVQIPMYNEREFVHCVGPAVLASQNADQTVFVVYSSAMSQVYKISIGAACALTWPPDRIIIQVLDDSTDPFIKELVEFECKDWASKKINIKYEIRESRKGYKAGALKKGMEHSYAQECDFVAIFDADFQPDPDFLLRTIPFLVHNPKIALVQTRWEFVNYNICLLTRIQKMSLDYHFKVEQESGSSVHAFFGFNGTAGVWRVSAIGEAGGWKDRTTVEDMDLAVRASLKGWQFLYVGDIRGATVWKKLHLLYSFFFVRRVIAPILTFLFYCVVIPLSVMVPEVSIPAWGMFYIPTAITIMTAIRNPWSIHLVPIWILFENVMSMHRMRAALTGLLETTYVDEWVVTEKVGDHVKDKLEVPLLTPVKPTECVERIYLPELLVAFYLLLCASYDVVLGAGHYYPYIFLQAFAFLVLGFGFAGTVTPCSCS

SEQ ID NO: 42337 - protein, 100 aa, Zea mays
  Coding DNA Sequence Number=SeqID_558
  Gene Ontology: Mol. function=ATP-dependent helicase activity
  Homolog annotation: Hit_ID=Q7Y183; Match level="QueryCoverage=68%, HitCoverage=15%, E-value=8e-13, Identity=56%"; Hit description =Putative RNA helicase
METTRSYGWQVVVTREAPFAECIHSFAGDRAGKKIDHRKVDRDEVMILKGPISDAKRIALTKLKESGGHKKRGKVGDDDEEVENHSHSKRPKSFKKSNRR

SEQ ID NO: 42338 - protein, 241 aa, Zea mays
  Coding DNA Sequence Number=SeqID_559
MGWANWPARAPFQLGEIGPPRAQQTPLDDRAAPSEWYAPEPKGEGSSAAASVSRQRSNIVSAVHGAPVPKEAQAQAQQPASDSESAGRLLASSAVLVRKQVNPEARALVFLARTHEKEKEKGAEKVSTSGGVDSEARRQVINGGHMRKQALLDTTHMDMGDTRTYSTELYAESHRQRSAIGPAPVSCHAHARVPAAAFNNERPALRSVSRLVSPTRRHREQHPTSESDEAKPVRPPVVLIP

SEQ ID NO: 42339 - protein, 288 aa, Zea mays
  Coding DNA Sequence Number=SeqID_560
  Gene Ontology: Mol. function=transcription regulator activity; Cellular component=nucleus; Biological process=regulation of transcription
  Homolog annotation: Hit_ID=Q1S3P1; Match level="QueryCoverage=56%, HitCoverage=53%, E-value=3e-17, Identity=35%"; Hit description=Helix- loop-helix DNA-binding
  Pfam annotation: Domain name=HLH; Domain location=102-153; Score =61.2; E_value=3.4e-15; Accession=PF00010.16; Description=Helix-loop -helix DNA-binding domain
MAAQMPFLALLQGAGVVVEGAETEQQQYEHEHDGRKRQALARAVSKLDLLESCLTQAAAPAAAACAPVASRTTERRMKRPRTRARAAPPPEKRRKPEEAESQRMTHIAVERNRRRLMNDHLASLRSLIPSSYIPRGDQATVVGGAIDYVKQLEQQLVALQAAAGARRGSSVVSDDGVFLVSPQYASYSGSRGGGGLGVDVEATGAVGGHVRVRVAGRRWWPGRLVRAVAALEGLRLAVLHLAVTSVGRDAVVCCFNLKMEEGCEVATADEVATVVHQIFAYSAAGACC

SEQ ID NO: 42340 - protein, 93 aa, Zea mays
  Coding DNA Sequence Number=SeqID_561
  Subcellular localization annotation: CTP_CleavageSite=23; ConfidenceScore=5.16e-01
MAKRVVWPNMGPVKPGPFFGSTRCGPKQTRTYGPTYTLHANLNVLSPSFEIETYLPDPDPNPNPDRSHGQPGPPPARTVSEESPSRADLPAAG

SEQ ID NO: 42341 - protein, 182 aa, Zea mays
  Coding DNA Sequence Number=SeqID_562
  Homolog annotation: Hit_ID=Q10SJ5; Match level="QueryCoverage=88%, HitCoverage=50%, E-value=3e-49, Identity=69%"; Hit description =Tobamovirus multiplication protein 3, putative, expressed
  Pfam annotation: Domain name=DUF1084; Domain location=2-182; Score =163.7; E_value=4.8e-46; Accession=PF06454.2; Description=Protein of unknown function (DUF1084)
MHHAGEADCSRLWSGRRGTCLCGEDTTVAAHVVETSSSRGNFVKDVLCRLQHYVLLCKSNEYLQHEICYFSATSLFAAFGFLLYGGRLFLMLQRFPVESKGRRKKLNEVGYVTTICFGCFLIRCIMMCLSAFNKDADLDVLNHPILNFFYYLLAEIAPSSLVLFILRKLPPRRGIAQYHPIH

SEQ ID NO: 42342 - protein, 612 aa, Zea mays
  Coding DNA Sequence Number=SeqID_563
  Homolog annotation: Hit_ID=Q10SJ8; Match level="QueryCoverage=66%, HitCoverage=96%, E-value=1e-122, Identity=59%"; Hit description =Remorin, C-terminal region family protein, expressed
  Pfam annotation: Domain name=Remorin_C; Domain location=375-486; Score=135.5; E_value=1.4e-37; Accession=PF03763.4; Description =Remorin, C-terminal region
GCLQSSALPLQRGSPLMEYERIHGPLPRHQVPALPRSPPQFGGLSVQFAFCFTIPILPPPHFTLSLALAVSLTEPFLLPPCSAPQSGGFSPAKLRAMLRGIEKRQRNNGEDSSPEANDSGELDDRRSLECSTSTEMSSNSGHRSRNRAPDDDSFDSESSSSGPPTVKRSAAVAALLPPFSRPTPSKWDDAEKWISSPTSNRTGRTGPTAGAVPKKSALAFPDYGGRPPAVAKVVADVPTNAGPDGLAHPDLLKPGHNASVVVDGTAPAVRSVCMRDMGTEMTPIASQEPSRTATPIIASSPTSSRTPTPQRTAEFSVSNIDPKKIEMPEEEEVQMSTRQEIMDLGERLGKTTIAAWASKEEKSAARFTDTTAYKAADIGRENRAADWQETEKAKYLARFQREEAKIQAWENLQKAKIEAEMKGIEAKIERKRAREQDRLASKLAAVSHRAEAKRETAEARRNQEAARTEEQAARIRYTGHTPSSFSCWCWVAPPVLVHLPPLSPGAINDTPAGSNHPMESSAAMTMDHHRAAPSLSTEEKRRIERVARCVARDRDGGDLTEKLLLRLLGLTRNARRWGFLAPDHPLHPYYLQHKVSERCRILRPRHAAADRR

SEQ ID NO: 42343 - protein, 477 aa, Zea mays
  Coding DNA Sequence Number=SeqID_564
  Homolog annotation: Hit_ID=Q2HT37; Match level="QueryCoverage=21%, HitCoverage=53%, E-value=7e-09, Identity=37%"; Hit description=IQ calmodulin-binding region; Apoptosis regulator Bcl-2 protein, BAG
  Pfam annotation: Domain name=BAG; Domain location=125-201; Score =47.5; E_value=4.5e-11; Accession=PF02179.6; Description=BAG domain
MKKEVGFRNETVEAAFVEHLQEEEAPTSKDGQKVQAASTTVGDQENAALKSIGEDHVQEDAGAGSLNGCDKRKNEDGTVIESETAKDDARTYGVNLSESDVAVGIQSAYRGYDVRKWQPLDKLWKIKHVHEQMQVVRKQIQCLLDSCSKPTQKEQVAIGETIMNLLLKLDAIQGLHPSVREARKSVARELICLQEKLDTLCKAASGDLNHTDSNDDESEGTKNIIQTAAPTVITEASDRKRTIELGKVQEPCSVDSMEPCNAVPSGVSWEVRPDVDASEEKNENKSHVAPQWMKHTKNLDNLSSTLSTKTTGVARPHQGCCDVAGWGCTGRGGAHCGISSSTWRASRTRVWHQYAAVPFGLVLTGEARGAMGEHGVENGWNRTEGALGTESRGAAGLRASSASTKGEVEASSAMAEGELTVKVEQSQGAGRSRGEGAMGGMGKTTWRPALEEDGEDDLRSACSGARVEVGNGEQAAP

SEQ ID NO: 42344 - protein, 85 aa, Zea mays
  Coding DNA Sequence Number=SeqID_565
MKPSRYAIKNPASHYGFKLYHLIVYAKKLAHDLTYMKKVSTSHRGRDKAADAASNASKWTTREADASQPVQYKQAVENLFSNAIS

SEQ ID NO: 42345 - protein, 209 aa, Zea mays
  Coding DNA Sequence Number=SeqID_566
MANGNHGDGYKHRHMRWKTSGSDLKARVTTVNIIVNSGMKLHFKLQTTDVVWPSPATLCRRPVTDDCSKLHCSSHLRLVQAPVTCAAAASPVHRTNSSDPQSRWARHLKFDGGCGHANNVEVIFPESNVVGSASGSAFVPPPQRTYVRTRKRSINAEAQDIGEDDSDAQEDGAAAVQAEVEQQQTQETAGDTDEDGVAADAFCLDADLL

SEQ ID NO: 42346 - protein, 268 aa, Zea mays
  Coding DNA Sequence Number=SeqID_567
MASTTAGRRPAPVPRWGRMVTPATREATMLRLEKGRGGIGRHEGQRRRIWAGCWTRVRVAVAGAAVGEPWPSAGGRRAGGCAGEQEEGADVVERVLGRARAGVGEGGRRHHRGRWGGRDRCARGTAVRGGQRRRLGARHTNAPAPRAGKAGRPGLPQPEADGGGWERGVEERGPAARMWPPLVRRRESRWRLDLGRDGVAAVGLGGRKLYVGNSNLIPCGNCSAQCIAQRRSYNIDLTLILMGRQPNSGAGPHTQSNKSSYRFMDICI

SEQ ID NO: 42347 - protein, 392 aa, Zea mays
  Coding DNA Sequence Number=SeqID_568
  Homolog annotation: Hit_ID=Q6L4C3; Match level="QueryCoverage=61%, HitCoverage=98%, E-value=4e-76, Identity=56%"; Hit description=RIKEN cDNA 1500006O09, related
  Pfam annotation: Domain name=DUF783; Domain location=175-379; Score =258.7; E_value=1.2e-74; Accession=PF05615.3; Description=Protein of unknown function (DUF783)
MAEKEETKGRCPACRTRYDKDMIVKMAATCDRVIQRNLVYIIGLPAHLCNESVLERREYFGQYGEVLKVLVSRLTGPPSQQASANSSISVFSLKDRPGAVVRGLSTEPKGLGLTQPLRKNVGLRIASVITSPDPTHAGAVSTGYRIPHRGMLAKGRKVAGRREEMSANYAFGPQDDDAIIKHRLLTRTTTTRGEPPLKKLQKKFMSFATEIEKDADNISDCERLYKAFLHEINTFELPLLKSKAVVDANIREKESFNELQVEIERQILHAKTDIEDLKKQLEQSKIERQHKEECEAIRKLISLQPPRSETEKLIADLEKEITDLKAENVACIRTLELRKKQFALLLHVVEELQISIEDEQKSIADELRAIAGEQKMSMEEGSVGASDSMVVD

SEQ ID NO: 42348 - protein, 194 aa, Zea mays
  Coding DNA Sequence Number=SeqID_569
MERTLVRNVGIPGWGFLSPGLFLSKGSPDHLPISLCILRASDARCHPLARIYPVHLTRNARGGGTLDIPAAVASPGSASRTTNCAAVSTVPLPAPSDPSSPDVAGLSLAESGAFVKAPGDTPTNVACAIPMLGRCSASVVKVSKIEGRLKNGYYARHGFHTINARPRALLPPRGTPPSRIPLDPASDGGDLHPG

SEQ ID NO: 42349 - protein, 183 aa, Zea mays
  Coding DNA Sequence Number=SeqID_570
MRAVSQRLVAHRTLVSGVHRTVRLCILRASDPRCHPLARIYPVHLTRNARGGGTLDIPAAVASPGSASRTTNCAAVSTVPLPAPSDPSSPDVAGLSLAESGAFVKAPGDTPTNVVCAIPMLGRCSASVVKVSKIEGRLKNGYYARHGFHTINARPRALLPPRGTPPSRIPLDPASDGGDLHPG

SEQ ID NO: 42350 - protein, 254 aa, Zea mays
  Coding DNA Sequence Number=SeqID_571
  Gene Ontology: Mol. function=carbonate dehydratase activity; Cellular component=extracellular region; Biological process=one-carbon compound metabolic process
  Homolog annotation: Hit_ID=Q6EPY7; Match level="QueryCoverage=78%, HitCoverage=74%, E-value=1e-66, Identity=58%"; Hit description =Putative nectarin III
  Pfam annotation: Domain name=Carb_anhydrase; Domain location=56-254; Score=-12.5; E_value=1.5e-10; Accession=PF00194.11; Description =Eukaryotic-type carbonic anhydrase
MAQESITASQSQKMKQRSGCRKTGGGVDRVGARDRVRARPICLQCTQQQTKDGAKFGYTGSVGPDHWGALSPSFRQCATGTKQSPIDISTAQAVSNPALQPLHRDYTVANATLVDNVVNVALRFDGDGGAGSVSVGGKLYTLKQVHWHSPSEHTVDGRRFPVELHMVHASDDGNVTVVAMLYRFGRPDPLLWQIQDKLAALHAEGCRADKGAPVAAGDVSLWSLRLYSHTYYRYVGSFTTPPCTENVIWSVLAQ

SEQ ID NO: 42351 - protein, 269 aa, Zea mays
  Coding DNA Sequence Number=SeqID_572
MSKAACECETATVLPDAGAVQLCARGGAGSASPRADDAGAPAESVLLRVPDGVGLGHLFGAALRRDASTKGSSNPKAAAEAAARKGAPSADSRRLLPATTAAASSKTAVVIGVLPASKVKVAVAKERRAPGRAVVARAWRRPAAGARVFASEAVGPEPVSPKVSCFGAVLSERSAAARREGGEEGEESGAGGCWASLGAALLGLCCSGDGREGRHLCRASEPNPKATALEPHRRQCVAVTSPPRPVAGLGDVKRLASRRWPETMARETV

SEQ ID NO: 42352 - protein, 125 aa, Zea mays
  Coding DNA Sequence Number=SeqID_573
MSHDSLEAPLSGRSKLRLARACPRARAAPGEILISPEGMVSPLGGNSASPRVDLSLGENSTTPELGFDQLPRQQANNSPRIPQKATLTTVLTPPCTTACPEAGSAKASGGASASPEPSLGLDNIA

SEQ ID NO: 42353 - protein, 118 aa, Zea mays
  Coding DNA Sequence Number=SeqID_574
  Gene Ontology: Mol. function=RNA binding
  Homolog annotation: Hit_ID=Q9FMZ7; Match level="QueryCoverage=82%, HitCoverage=30%, E-value=2e-09, Identity=33%"; Hit description =Arabidopsis thaliana genomic DNA, chromosome 5, P1 clone:MJB21
MAVSQVHNMRVNDSGYLECYLEYIDYDGEDLDWVAVFQENPASSSQNSKGSTEVMIRPSFPQWYYGHEPDQLPVSDVTAVVDEAWKIGDMVDWLKDGCYWSGTITKLLKKDMVKLKII

SEQ ID NO: 42354 - protein, 247 aa, Zea mays
  Coding DNA Sequence Number=SeqID_575
  Homolog annotation: Hit_ID=Q9FI69; Match level="QueryCoverage=68%, HitCoverage=55%, E-value=3e-22, Identity=40%"; Hit description =Arabidopsis thaliana genomic DNA, chromosome 5, TAC clone:K19E20
  Pfam annotation: Domain name=Sld5; Domain location=14-247; Score =128.1; E_value=2.5e-35; Accession=PF05916.2; Description=Synthetic lethal mutants of dpb11-1 fi
MSSWDADDSAAASAAEAATTDVELLKRAWRNEKAAPEILRFDSPLVSRVREQTQLLVRPPSRRPPPPSCYFSGSDADSLPRCRQEETLDDFPDSGGDDLGDSLYQMDLDRTLFLLRSYLRLRLQKIEKYTMHISRSEDLLSRLSQQERRFAKSCAEIMEKHLEQSVLSKLPYGYDSVSRQSLSSTEDDMVPEPQLDTFVFCKTKGDVGAFQLDDIGEEVVDLVADDLYVLRYKSVKGLIEGGRIDLI

SEQ ID NO: 42355 - protein, 622 aa, Zea mays
  Coding DNA Sequence Number=SeqID_576
  Gene Ontology: Mol. function=protein binding; Cellular component =cytoplasm; Biological process=ubiquitin cycle
  Homolog annotation: Hit_ID=Q10S47; Match level="QueryCoverage=99%, HitCoverage=97%, E-value=0.0, Identity=78%"; Hit description=Leucine Rich Repeat family protein, expressed
  Pfam annotation: Domain name=LRR_1; Domain location=239-262; Score =4.4; E_value=43; Accession=PF00560.23; Description=Leucine Rich Repeat
  Pfam annotation: Domain name=LRR_1; Domain location=358-381; Score =3.0; E_value=77; Accession=PF00560.23; Description=Leucine Rich Repeat
  Pfam annotation: Domain name=LRR_1; Domain location=383-412; Score =8.7; E_value=6.7; Accession=PF00560.23; Description=Leucine Rich Repeat
  Pfam annotation: Domain name=LRR_1; Domain location=423-445; Score =6.5; E_value=17; Accession=PF00560.23; Description=Leucine Rich Repeat
  Pfam annotation: Domain name=LRR_1; Domain location=461-484; Score =1.7; E_value=1.4e+02; Accession=PF00560.23; Description=Leucine Rich Repeat
  Pfam annotation: Domain name=LRR_1; Domain location=520-543; Score =8.2; E_value=8.5; Accession=PF00560.23; Description=Leucine Rich Repeat
  Pfam annotation: Domain name=LRR_1; Domain location=67-94; Score=5.2; E_value=31; Accession=PF00560.23; Description=Leucine Rich Repeat
  Pfam module annotation: Pfam domain module=LRR_1::LRR_1::LRR_1::LRR _1::LRR_1::LRR_1::LRR_1; Domain location=239-262::358-381::383 -412::423-445::461-484::520-543::67-94
MDVALPAAVVATILSRLDVRSLLLAAAACRGLRACASHALVFLPSFHLLEVALTHELLRPLLPPNPSLRSLRLDCARLEDAAIACLARAGLHELLLLNCDNISGRLLCELGTTCRDLRVLSLNSLGARRGLVVNFSDLQELLNGCSQLENLRLALDFSTFDDPNFGRVWASASERLSSLEIGYIPMTMLLELLVAVTEGQQCMDYVKTPVFFPSLQKLCLAVDFITDHLIGSISVALPSLTHLDLQDAPIVEPNSSSDLTNAGLQQINPHGKLKHISLMRSQEFLVTSFRRVNDLGILLMADRCSNLESVCLGGFSRVTDTGFRAIIHSCSGLHKLRVSHGSHLTDLVFHDIIATSLCLTHVSLRWCKLLTNVGIERLSCNKDLNVLDLRDCRSLGDEAVRALSCLPKLQTLTLDATDISDQSLKYLGLGTCPLTSLSLRGCRKLTNDCITLLFAGHVKQSLQMLDLSRIPSITDDGIMLLARSRTPLIELRMRENPKIGDASVMALASMQIDGGTYGSTLQLLDLFDCGGITPLAARWFKKPYFPRLRWLGITGSLNRVMVDALSRSRPFLHMACRGEELGTMLWDTSSDWYRHNDDDLDELEQWLLEGEPVSDDDTIMEE

SEQ ID NO: 42356 - protein, 1246 aa, Zea mays
  Coding DNA Sequence Number=SeqID_577
  Gene Ontology: Mol. function=protein serine/threonine kinase activity; Cellular component=integral to membrane; Biological process=protein amino acid phosphorylation
  Homolog annotation: Hit_ID=Q2R2D7; Match level="QueryCoverage=86%, HitCoverage=93%, E-value=0.0, Identity=42%"; Hit description =Receptor kinase, putative, expressed
  Pfam annotation: Domain name=LRRNT_2; Domain location=56-97; Score =41.5; E_value=2.8e-09; Accession=PF08263.3; Description=Leucine rich repeat N-terminal domain
  Pfam annotation: Domain name=LRR_1; Domain location=105-127; Score =1.1; E_value=1.8e+02; Accession=PF00560.23; Description=Leucine Rich Repeat
  Pfam annotation: Domain name=LRR_1; Domain location=129-151; Score =12.5; E_value=1.3; Accession=PF00560.23; Description=Leucine Rich Repeat
  Pfam annotation: Domain name=LRR_1; Domain location=153-175; Score =18.0; E_value=0.034; Accession=PF00560.23; Description=Leucine Rich Repeat
  Pfam annotation: Domain name=LRR_1; Domain location=177-199; Score =7.7; E_value=10; Accession=PF00560.23; Description=Leucine Rich Repeat
  Pfam annotation: Domain name=LRR_1; Domain location=201-223; Score =5.3; E_value=29; Accession=PF00560.23; Description=Leucine Rich Repeat
  Pfam annotation: Domain name=LRR_1; Domain location=225-247; Score =13.7; E_value=0.66; Accession=PF00560.23; Description=Leucine Rich Repeat
  Pfam annotation: Domain name=LRR_1; Domain location=249-271; Score =15.8; E_value=0.15; Accession=PF00560.23; Description=Leucine Rich Repeat
  Pfam annotation: Domain name=LRR_1; Domain location=273-294; Score =5.4; E_value=27; Accession=PF00560.23; Description=Leucine Rich Repeat
  Pfam annotation: Domain name=LRR_1; Domain location=296-318; Score =13.0; E_value=1; Accession=PF00560.23; Description=Leucine Rich Repeat
  Pfam annotation: Domain name=LRR_1; Domain location=320-342; Score =13.6; E_value=0.74; Accession=PF00560.23; Description=Leucine Rich Repeat
  Pfam annotation: Domain name=LRR_1; Domain location=344-366; Score =13.9; E_value=0.6; Accession=PF00560.23; Description=Leucine Rich Repeat
  Pfam annotation: Domain name=LRR_1; Domain location=368-391; Score =16.3; E_value=0.11; Accession=PF00560.23; Description=Leucine Rich Repeat
  Pfam annotation: Domain name=LRR_1; Domain location=393-415; Score =7.4; E_value=12; Accession=PF00560.23; Description=Leucine Rich Repeat
  Pfam annotation: Domain name=LRR_1; Domain location=418-440; Score =9.3; E_value=5.1; Accession=PF00560.23; Description=Leucine Rich Repeat
  Pfam annotation: Domain name=LRR_1; Domain location=467-495; Score =0.2; E_value=2.6e+02; Accession=PF00560.23; Description=Leucine Rich Repeat
  Pfam annotation: Domain name=LRR_1; Domain location=497-519; Score =15.8; E_value=0.16; Accession=PF00560.23; Description=Leucine Rich Repeat
  Pfam annotation: Domain name=LRR_1; Domain location=546-568; Score =12.8; E_value=1.2; Accession=PF00560.23; Description=Leucine Rich Repeat
  Pfam annotation: Domain name=LRR_1; Domain location=570-592; Score =11.9; E_value=1.7; Accession=PF00560.23; Description=Leucine Rich Repeat
  Pfam annotation: Domain name=LRR_1; Domain location=594-616; Score =11.1; E_value=2.4; Accession=PF00560.23; Description=Leucine Rich Repeat
  Pfam annotation: Domain name=LRR_1; Domain location=617-639; Score =13.0; E_value=1.1; Accession=PF00560.23; Description=Leucine Rich Repeat
  Pfam annotation: Domain name=LRR_1; Domain location=642-664; Score =3.6; E_value=61; Accession=PF00560.23; Description=Leucine Rich Repeat
  Pfam annotation: Domain name=LRR_1; Domain location=666-688; Score =16.0; E_value=0.14; Accession=PF00560.23; Description=Leucine Rich Repeat
  Pfam annotation: Domain name=LRR_1; Domain location=690-712; Score =19.1; E_value=0.016; Accession=PF00560.23; Description=Leucine Rich Repeat
  Pfam annotation: Domain name=LRR_1; Domain location=714-736; Score =15.5; E_value=0.2; Accession=PF00560.23; Description=Leucine Rich Repeat
  Pfam annotation: Domain name=LRR_1; Domain location=738-760; Score =7.5; E_value=11; Accession=PF00560.23; Description=Leucine Rich Repeat
  Pfam annotation: Domain name=LRR_1; Domain location=761-785; Score =2.6; E_value=93; Accession=PF00560.23; Description=Leucine Rich Repeat
  Pfam annotation: Domain name=Pkinase; Domain location=857-1137; Score= 107.1; E_value=5e-29; Accession=PF00069.15; Description=Protein kinase domain
  Pfam annotation: Domain name=Pkinase_Tyr; Domain location=857-1100; Score=60.6; E_value=3.4e-16; Accession=PF07714.7; Description =Protein tyrosine kinase
  Pfam module annotation: Pfam domain module=LRRNT_2::LRR_1::LRR_1::LRR_ 1::LRR_1::LRR_1::LRR_1::LRR_1::LRR_1::LRR_1::LRR_1::LRR_1::LRR_1: LRR_
  Pfam module annotation: Pfam domain module=LRR_1::LRR_1::Pkinase::Pkin ase_Tyr; Domain location=56-97::105-127::129-151::153-175::177 -199::201-223::225-247::249-271::273-294::296-318::320-342::344
  Pfam module annotation: Domain location=418-440::467-495::497 -519::546-568::570-592::594-616::617-639::642-664::666-688::690 -712::714-736::738-760::761-785::857-1137::857-1100
MATPSDPEYNKHHALSAKKHIISITMMMLIFHMLAFSLICLAKNAAHGDASAHALHSSDELALMSFKSLVGSDHTRALASWGNMSIPMCRWRGVACGLRGHRRGHVVALDLPELNLLGTITPALGNLTYLRRLDLSSNGFHGILPPELGNIHDLETLQLHHNSISGQIPPSLSNCSHLIEIMLDDNSLHGGVPSEIGSLQYLQLLSLGGKRLTGRIPSTIAGLVNLKELVLRFNSMTGEIPREIGSLANLNLLDLGANHFSGTIPSSLGNLSALTVLYAFQNSFQGSILPLQRLSSLSVLEFGANKLQGTIPSWLGNLSSLVLLDLEENALVGQIPESLGNLELLQYLSVPGNNLSGSIPSSLGNLYSLTLLEMSYNELEGPLPPLLFNNLSSLWGLDIEYNNLNGTLPPNIGSSLPNLNYFHVSDNELQGVLPRSLCNASMLQSIMTVENFLSGTIPGCLGAQQTSLSEVSIAANQFEATNDADWSFVASLTNCSNLTVLDVSSNNLHGVLPNSIGNLSTQMAYLSTAYNNITGTITEGIGNLINLQALYMPHNILIGSIPASLGNLNKLSQLYLYNNALCGPLPVTLGNLTQLTRLLLGTNGISGPIPSSLSHCPLETLDLSHNNLSGPAPKELFSISTLSSFVNISHNSLSGSLPSQVGSLENLDGLDLSYNMISGEIPPSIGGCQSLEFLNLSGNNLQATIPPSLGNLKGIARLDLSHNNLSGTIPETLAGLNGLSVLNLAFNKLQGGVPSDGVFLNVAVILITGNDGLCGGIPQLGLPPCPTQTTKKPHHRKLVIMTVSICSALACVTLVFALLALQQRSRHRTKSHLQKSGLSEQYVRVSYAELVNATNGFAPENLVGAGSFGSVYKATMRSNDQQIVVAVKVLNLMQRGASQSFVAECETLRCARHRNLVKILTICSSIDFQGHDFKALVYEFLPNGNLDQWLHRHITEDDEQKTLDLNARLNVGIDVASSLDYLHQHKPTPIIHCDLKPSNVLLDSSMVARVGDFGLARFLHQDVGTSSGWASMRGSIGYAAPEYGLGNEVSTHGDVYSYGILLLEMFTGKRPTDNEFGGAMGLRNYVLMALSGRALNQSFLLTASRNNSDIDKAEYAAERIFQLEHNNTGCYVVLSSMYADAGRGEDVGRIRSPIKEKGLRKTEARSLVDLNAVLPDKHCVRLAASFGLISSEARTTVLVQKNVCLCNQSHHAQKLISKYLRQTIVVGDTKIYRIFSDGSGCCGDYW

SEQ ID NO: 42357 - protein, 504 aa, Zea mays
  Coding DNA Sequence Number=SeqID_578
  Gene Ontology: Mol. function=24-methylenesterol C-methyltransferase activity; Cellular component=integral to membrane; Biological process=steroid biosynthetic process
  Homolog annotation: Hit_ID=O82427; Match level="QueryCoverage=71%, HitCoverage=98%, E-value=0.0, Identity=92%"; Hit description=24 -methylenesterol C-methyltransferase 2
  Pfam annotation: Domain name=CMAS; Domain location=72-320; Score= -137.1; E_value=6.6e-06; Accession=PF02353.10; Description =Cyclopropane-fatty-acyl-phospholipid synthase
  Pfam annotation: Domain name=MTS; Domain location=116-233; Score= -92.2; E_value=0.072; Accession=PF05175.4; Description=Methyltransfera se small domain
  Pfam annotation: Domain name=Methyltransf_11; Domain location=133 -232; Score=114.3; E_value=3.5e-31; Accession=PF08241.2; Description =Methyltransferase domain
  Pfam annotation: Domain name=Methyltransf_12; Domain location=133 -230; Score=66.9; E_value=6.4e-17; Accession=PF08242.2; Description =Methyltransferase domain
  Pfam annotation: Domain name=Sterol_MT_C; Domain location=241-360; Score=221.6; E_value=1.7e-63; Accession=PF08498.1; Description =Sterol methyltransferase C-terminal
  Pfam annotation: Domain name=TPMT; Domain location=107-268; Score= -82.1; E_value=0.069; Accession=PF05724.2; Description=Thiopurine S -methyltransferase (TPMT)
  Pfam annotation: Domain name=Ubie_methyltran; Domain location=112 -294; Score=-103.3; E_value=7.9e-05; Accession=PF01209.9; Description= ubiECOQ5 methyltransferase family
  Pfam annotation: Domain name=zf-CCHC; Domain location=419-436; Score =31.1; E_value=3.9e-06; Accession=PF00098.13; Description=Zinc knuckle
  Pfam module annotation: Pfam domain module=CMAS::MTS::Methyltransf _11::Methyltransf_12::Sterol_MT_C::TPMT::Ubie_methyltran::zf-CCHC Domain location=72-320::116-233::133-232::133-230::241-360::107
MEAATMVWTAAVVGAGLVYWFVWVMGAAEVKGKRAVDLKMGSITRDKVQDKYTQYWSFFRRPKETATTAASAEKVPAFVDTFYNLVTDIYEWGWGQSFHFSPSLPGRSHRDATRVHEERVADLLGARPGHRLLDVGCGVGGPMRAIAAHSGSNVVGITINEYQVNRARAHNRKAGLDSPRCEVVCGNFLSMPFPDASFDGAYSIEATCHAPRLQDVYGEVYRVLKPGGLYVSYEWVTTPLYRAEDPDHVECIHGIERGDALPGLRRQDEIASIAKEVGFEVLKEQDLALPPALPWWTRLKMGRIAYWRNSLVVRVLTMLRVAPKGVSEVHEMLYETAQHLTRGGETGIFTPMHMVLLRKPAAAASTEEANYKEMLPSKVAQVEADGLNKDEMALIIKRFKTALKGCKEYPNKNKTREKRSCFKCGKTGHFIANCPDNANDQEQEKSGKKEKKKNYRKAKGEAHLRKEWDSDCSSSDSDDEGLAASAFNKSSLFPNERHTCLMAK

SEQ ID NO: 42358 - protein, 75 aa, Zea mays
  Coding DNA Sequence Number=SeqID_579
MAKKRLTGRATTENRSTMRREAKTKWSANEPSQDTNIIFKTSCRVDTYTNRSHFSQTNDDRQQLGIEAVSQSKRS

SEQ ID NO: 42359 - protein, 317 aa, Zea mays
  Coding DNA Sequence Number=SeqID_580
  Gene Ontology: Mol. function=DNA binding; Cellular component=nucleus; Biological process=regulation of transcription
  Homolog annotation: Hit_ID=Q10S65; Match level="QueryCoverage=99%, HitCoverage=98%, E-value=1e-94, Identity=60%"; Hit description=No apical meristem protein, expressed
  Pfam annotation: Domain name=NAM; Domain location=15-144; Score =259.8; E_value=5.5e-75; Accession=PF02365.6; Description=No apical meristem (NAM) protein
MAMTAGAPSMEVEQDLPGFRFHPTEEELLGFYLSRVVHGKQLHFDIIGTLNIYRHDPWDLPAMAKIGEREWYFFVPRDRKAGSGGRPNRTTERGFWKATGSDRAIRSSADAKRVIGLRKTLVFYQGRAPRGTKTDWVMNEYRLPDHAAAAAPPPKEDMVLCKIYRKATPLKELEQRASTMEEMQRRSDAAEAASASLVQAVGSADDNYLSSGDTHDISVLQIPASSSPAPSGDSYGGPALREAQTEAADATTVTVASASLVHAACMAGPAARHGDLPTPQVPTHLGVADWTQMQDPFMLRSLWQDQLFFSPLAHLLY

SEQ ID NO: 42360 - protein, 506 aa, Zea mays
  Coding DNA Sequence Number=SeqID_581
  Gene Ontology: Mol. function=protein kinase activity; Cellular component=chloroplast; Biological process=protein amino acid phosphorylation
  Homolog annotation: Hit_ID=Q10S67; Match level="QueryCoverage=99%, HitCoverage=96%, E-value=0.0, Identity=81%"; Hit description=Protein kinase family protein, putative, expressed
  Pfam annotation: Domain name=Pkinase; Domain location=85-323; Score =11.6; E_value=3e-09; Accession=PF00069.15; Description=Protein kinase domain
  Pfam annotation: Domain name=Pkinase_Tyr; Domain location=85-323; Score=-44.0; E_value=9e-10; Accession=PF07714.7; Description=Protein tyrosine kinase
  Pfam module annotation: Pfam domain module=Pkinase::Pkinase_Tyr; Domain location=85-323::85-323
  Subcellular localization annotation: CTP_CleavageSite=62; ConfidenceScore=5.31e-01
MGCCGSSLRAGTQPEKKPAAGALPPRRPSYSLSQNQNQAPPAARAGAHQVPPLREFSLAELRAATAGFAPDNIVSESGDKAPNFVYRGRLEPSRRAIAVKKFAKMAWPDPKQFAEEAKGVGKLRHRRLANLIGYCCDGEERLLVAEFMPNDTLAKHLFHWENQTIEWAMRLRVAYYIAEALEYCSTEGRPLYHDLNAYRVLFDENGDPRLSCFGLMKNSRDGKSYSTNLAYTPPEYLRNGRVTSESVIFSFGTILLDLLSGKRIPPSRALDMIKGNNIQVLMDSHLEGNYSTEEATTLVDLASQCLQYEPRDRPNTKKLVSVLEPLQIKSEVPSYEMLGIPKHEEEAPPPPQPQHPLSPMGEACSRMDLTAIHQILVNTHYRDDEGSNEEWTQQMRDMLEARKRGDFAFRDKDFKAAIDCYTQFVDVGTMVSPTVYARRSLCHLMCDQPDAALRDAMQAQCAYPDWPTAFYMQAVALSKLNMQSDATDMLNEASQLEEKRQKNTKP

SEQ ID NO: 42361 - protein, 275 aa, Zea mays
  Coding DNA Sequence Number=SeqID_582
  Homolog annotation: Hit_ID=Q9M3A6; Match level="QueryCoverage=39%, HitCoverage=21%, E-value=3e-16, Identity=45%"; Hit description=SF16 -like protein
  Pfam annotation: Domain name=IQ; Domain location=199-219; Score=29.6; E_value=1.1e-05; Accession=PF00612.17; Description=IQ calmodulin -binding motif
  Pfam annotation: Domain name=IQ; Domain location=221-241; Score=11.4; E_value=2.5; Accession=PF00612.17; Description=IQ calmodulin-binding motif
  Pfam module annotation: Pfam domain module=IQ::IQ; Domain location =199-219::221-241
MVRARGLFCLVSPVRGDPADRRSSAACICCVGPHHKPSSGAPDADLSARLPLTGCCGADVRGRSSAARTPRTPCTPTARRLCGVRPRTPRRGQVCCFPAATVEPAGPEAAAAVARTPRTPTTQAQQGPGWRRRWLFRSARQAAAQMTPRFRGAGRDSAHAGNNNTSAYDARLPEAEAETETCSNDEYALLCREGFSREDVAAVTIQAYFRGHLARRAFMALKSLVRLQAVARGAFVRRQAEVAMQCMQAMARLHGRVRARRMLTTKPEAEQLLQS

SEQ ID NO: 42362 - protein, 395 aa, Zea mays
  Coding DNA Sequence Number=SeqID_583
MAGVFGSLRCSCVRVDDYDRFWRWPARRRARWWHKWQWARRRSDVRACVHSVVVLPRDRDRPPHPPRHQRSVDTAPPPINARGSSTLLPTAAAINAVLPTRIRGPSPPPPCNRSAGPQPPWKVVRAVDPNLKSSQIRAPHAAACTRRTPASTAPAVLSPEPRMSAREWISPDAPATHAVTSAAPSPPPQPCSEPPRWDHPSASHPLLHQPSGVSRAPRSRSGTSPAHTTRAPICSLARPKSRPVPLPSPHRASTFADQPSHGTALSSARPHRSTTSSLASARTCASSRYLRADQRGTTGAGGGVRAEVQVGVQGGRAALARNATRATAEATGNGLEPSTSVPWRGHRGQATPRTSSPRRQQNLLPPSAEGVEDLGRAGEGEREMCLWAISKYFGD

SEQ ID NO: 42363 - protein, 215 aa, Zea mays
  Coding DNA Sequence Number=SeqID_584
  Homolog annotation: Hit_ID=Q64HC0; Match level="QueryCoverage=25%, HitCoverage=20%, E-value=2e-13, Identity=66%"; Hit description =ASF/SF2-like pre-mRNA splicing factor SRP30
MDIEMYQQVPQPSPIDVEMCDYRSQPWPLRVVASVPVTHKDGGTAAECKAFEDPHDVDDAIYGRDGYNFDGYRLRVDLAHGARGQSYSYDRSSSYSSACHGGESDLLLLDEVLTLAIDPTPSCFVLLAELLVFVSVQLKMGDCILVLGPSNPFRLSSSTREQPSTFSLPKKGDIVVVDISDLCQVAMLANDLFRSKSVNDLSFPIVPQPRGQRQQ

SEQ ID NO: 42364 - protein, 450 aa, Zea mays
  Coding DNA Sequence Number=SeqID_585
  Gene Ontology: Mol. function=translation elongation factor activity
  Homolog annotation: Hit_ID=Q00WW9; Match level="QueryCoverage=55%, HitCoverage=77%, E-value=8e-66, Identity=49%"; Hit description =Homology to unknown gene
  Subcellular localization annotation: CTP_CleavageSite=48; ConfidenceScore=5.17e-01
MAACSRGLAWPPFDLTTARGAASWPRRRATIRCCCAGTDPEPRRRLSRAAAAAPERAEEWRVDGNKPSAAAPARRRASLTAMPPLPFPAPRIVLEDSSSNRTSTHGARRGARLLNPVIPHPREISDLLRKCMCLFGTCLIDTGIASEKEWGINLLDEAVKESGINEDGSTWYRESGEDTGENGYRCRWARMGGQNHDGSTEWKETWWEKSDWTGYKELGAEKSGKNAEGDSWWEKWKEVLYQDEWSNLARIEKSAEKQAKSGAENAGWYEKWWEKYDAKGWTEKGAHKYGRLNEQSWWERWGEHYDGRGFVLKWTDKWAETDLGTKWGDKWEEKFFAGIGSRQGETWHVSPGRERWSRTWGEEHFGNGKVHKYGKSTTGESWDLVVDEETYYEAEPHYGWADVVGDSTQLLSIQPVERPPGVFPAIDFSSAPPPKDAPPGMPPSPLDGGN

SEQ ID NO: 42365 - protein, 67 aa, Zea mays
  Coding DNA Sequence Number=SeqID_586
MERQGAKREVWQWLIPWIAKVKRQETRVQRDVDRDDNGSDSDRILQISVCNPYPRLLPISARDLTRG

SEQ ID NO: 42366 - protein, 501 aa, Zea mays
  Coding DNA Sequence Number=SeqID_587
  Homolog annotation: Hit_ID=Q5DJU1; Match level="QueryCoverage=98%, HitCoverage=98%, E-value=5e-59, Identity=47%"; Hit description=Fas -associated factor 1-like protein
  Pfam annotation: Domain name=UBX; Domain location=418-499; Score =92.9; E_value=9.7e-25; Accession=PF00789.11; Description=UBX domain
  Pfam annotation: Domain name=Vicilin_N; Domain location=292-385; Score=-69.0; E_value=0.038; Accession=PF04702.3; Description=Vicilin N terminal region
  Pfam module annotation: Pfam domain module=UBX::Vicilin_N; Domain location=418-499::292-385
MAETVDDKISYFQAVTGISDTDLCTEILAAHNWDLQLAVSSITANPSSPSAPVSTSSRDPAPSAPLADAEFVAPPPPIPPPPQQQPGIAWKLVTLPFYVVSGGASLVAGSFRLGAWVAGGVLSRSLSLLGLAGQAGSGDRLLELPPSAAEAADFVAEFERECGAGRGPRFVAEGFADALQRAQREFKLLFVYLHSPDHPDTPAFCGGCLCAEPVAAFIDENFVAWGGSIRRTEGFKMSTQPECVEIPVLCCGHGFYKPENRAIAAELFCIGYIQCLAFKNVRIANKLYIHVPKVEGPKSPEEMITILQRVVEECATSLVAARIEAEERLNNQRLREEQDAAYRAALEADQLRKLYLQARERERIEEQERREREAVEAEKKRKEEEEAVARAAQEAAEKEAALARRRQEKAMALGAEPEKGPGVTRVLIRFPTGERKERRFHSSATVTSLYDYVDSLDCMKAENYSLVSNFPRVTYGPEKHSLTLEEAGLHPQASLFIEIEQ

SEQ ID NO: 42367 - protein, 420 aa, Zea mays
  Coding DNA Sequence Number=SeqID_588
  Gene Ontology: Mol. function=nucleoside-triphosphatase activity; Cellular component=nucleus; Biological process=protein transport
  Homolog annotation: Hit_ID=UPI0000660D48; Match level="QueryCoverage =58%, HitCoverage=94%, E-value=4e-80, Identity=54%"; Hit description =Homolog of Brachydanio rerio "Valosin containing protein.
  Pfam annotation: Domain name=AAA; Domain location=200-321; Score =144.5; E_value=2.8e-40; Accession=PF00004.19; Description=ATPase family associated with various cellular activities (AAA)
  Pfam annotation: Domain name=CDC48_N; Domain location=28-112; Score =92.0; E_value=1.7e-24; Accession=PF02359.8; Description=Cell division protein 48 (CDC48), N-t
  Pfam annotation: Domain name=NACHT; Domain location=199-318; Score= -39.7; E_value=0.072; Accession=PF05729.3; Description=NACHT domain
  Pfam module annotation: Pfam domain module=AAA::CDC48_N::NACHT; Domain location=200-321::28-112::199-318
MASQGEPSSSDPKGKKDYSTAILERKKSPNRLVVDEATNDDNSVVALHPDTMERLQLFRGDTVLIKGKKRKDTVCIVLADETCEEPKVRMNKIVRKNLRLFKSIGVKPPKGILLFGPPGSGKTLIARAVANETDEVGRLEVLRIHTKNMKLAEDVVEVPNVSWEDIGGLENVKRELQETVQYPVEHPDKFEKFGMSPSKGVLFYGPPGCGKTLLAKAIANECQANFISVKGPELLTMWFGESEANVREIFDKARQSAPCVLFFDELDSIATQSRLQIFKACLRKSPVAKDVDLHALAKYTQGFSGADITEICQRACKYAIRENIEKDIERERRRKDNPEAMEEDEVDDIAEIMAAHFEESMKYARRSVSDADIRKYQAFAQTLQQSRGFGSEFRFSDQPTAAAGAADPFASAADDDDLYS

SEQ ID NO: 42368 - protein, 247 aa, Zea mays
  Coding DNA Sequence Number=SeqID_589
  Gene Ontology: Mol. function=RNA-directed DNA polymerase activity; Cellular component=mitochondrion; Biological process=RNA-dependent DNA replication
  Homolog annotation: Hit_ID=UPI00004C1731; Match level="QueryCoverage =99%, HitCoverage=17%, E-value=1e-130, Identity=86%"; Hit description= UPI00004C1731 related cluster
  Pfam annotation: Domain name=rve; Domain location=71-219; Score=98.7; E_value=1.7e-26; Accession=PF00665.16; Description=Integrase core domain
MAQGHISLSEIHSGACGHHAAPRALVGNTFRQGFYWPTAVVNATKIVRTCQGCQFYAKQTRLPAQALQTIPITWLFAVWGLDLVGPLQKAPGGFTHLLVAIDKFSKWIEAVAFFTNIIHRFGVPNSIITDNGTQFTGRKFLDFCEDHHIRVDWAAVAHPMTNGQVERANGMILQGLKPRIYNDLNKFGRRWTKELPSVVWSLRTTPSRATGFTPFFLVYGAEAILPTDLEHGSPRTRAYDARSNQTN

SEQ ID NO: 42369 - protein, 158 aa, Zea mays
  Coding DNA Sequence Number=SeqID_590
MSIMLSEILIHYQESENECDDNKNVKKKVLASITINHKPSLLDSPSCFVAKGPKVHFNENDSEDEEEPCKEELIKLLQEAHLFLNKNIVEYKESPGDLVPPSSWSSIVVLHVVRHRCRTTATAPPGTTSSADIVPPPPPRVGTIATEVPPDECLAIVF

SEQ ID NO: 42370 - protein, 324 aa, Zea mays
  Coding DNA Sequence Number=SeqID_591
  Gene Ontology: Mol. function=metal ion binding; Biological process =metal ion transport
  Homolog annotation: Hit_ID=Q10RN8; Match level="QueryCoverage=56%, HitCoverage=52%, E-value=3e-52, Identity=60%"; Hit description=Heavy metal-associated domain containing protein, expressed
  Pfam annotation: Domain name=HMA; Domain location=132-197; Score =27.3; E_value=5.4e-05; Accession=PF00403.16; Description=Heavy-metal- associated domain
  Pfam annotation: Domain name=HMA; Domain location=16-78; Score=41.1; E_value=3.8e-09; Accession=PF00403.16; Description=Heavy-metal -associated domain
  Pfam module annotation: Pfam domain module=HMA::HMA; Domain location =132-197::16-78
MGAGKGGDGEEAAQPVVLKLDLHCAGCAHKVKKAIRRVPGVGSIVTDVAANRVVVAGTADAGALKARLEAKTNKPVEVVSAGGVPPKPPAAEPQQDAGAGEKKGDKGANPKEEAKEQQAAEEEKKKPKEETVLLKIRLHCDGCGDRIRRRIYKFKGVKDVVLEGNAKDEVKVTGTMDVPDMLSYLKEKLNRDVEAVAPAKKDGDGKDEDKKDGGGGSGGGEDKNKGAGAAGGDDKKDKGKGADDVPRSSVTDAMNKLVGKCDCVVTDAEPMRRSEALSERETGGLGAPFDLRCVRSFSHAFFMPNQAAPPTTTDPVLHSLCACF

SEQ ID NO: 42371 - protein, 197 aa, Zea mays
  Coding DNA Sequence Number=SeqID_592
  Gene Ontology: Mol. function=nucleotide binding; Cellular component =membrane; Biological process=small GTPase mediated signal transduction
  Homolog annotation: Hit_ID=Q9FPK1; Match level="QueryCoverage=44%, HitCoverage=43%, E-value=5e-36, Identity=90%"; Hit description=Small GTP-binding protein RAB5B
  Pfam annotation: Domain name=Miro; Domain location=104-196; Score= -6.0; E_value=0.021; Accession=PF08477.3; Description=Miro-like protein
  Pfam annotation: Domain name=Ras; Domain location=104-195; Score =37.6; E_value=4.4e-12; Accession=PF00071.12; Description=Ras family
  Pfam module annotation: Pfam domain module=Miro::Ras; Domain location= 104-196::104-195
MTPECSTPPNDLDSLFPEPQQQQRVARASQRDSEPEPEPQPQTNDEKGQTAADLPEVGGRAKGPIPPSPPVAALVPRCARNTGGLNTISNDSSPDASSKDLRAKLVLLGDSGVGKSCIVLRFVRGQFDPTSKVTVGASFLSQTLALEDSTIVKFEIWDTAGQERIAQDYAEKNNMFFIETSAKTADNINQLFEKRSS

SEQ ID NO: 42372 - protein, 745 aa, Zea mays
  Coding DNA Sequence Number=SeqID_593
  Gene Ontology: Mol. function=sequence-specific DNA binding; Cellular component=nucleus; Biological process=regulation of transcription, DNA-dependent
  Homolog annotation: Hit_ID=Q6RF30; Match level="QueryCoverage=99%, HitCoverage=100%, E-value=0.0, Identity=85%"; Hit description=Rolled leaf1
  Pfam annotation: Domain name=Homeobox; Domain location=28-88; Score =64.6; E_value=3.2e-16; Accession=PF00046.19; Description=Homeobox domain
  Pfam annotation: Domain name=MEKHLA; Domain location=598-745; Score =296.7; E_value=4.4e-86; Accession=PF08670.1; Description=MEKHLA domain
  Pfam annotation: Domain name=bZIP_1; Domain location=69-129; Score =7.0; E_value=0.027; Accession=PF00170.11; Description=bZIP transcription factor
  Pfam module annotation: Pfam domain module=Homeobox::MEKHLA::bZIP_1; Domain location=28-88::598-745::69-129
MGTMVAAVALRGGSSDSGGFDKVPGMDSGKYVRYTPEQVEVLERLYIDCPKPSSSRRQQLLRECPILSNIEPKQIKVWFQNRRCRDKQRKESSRLQAVNRKLTAMNKLLMEENERLQKQVSQLVHENAHMRQQLQNTSLANDTSCESNVTTPPNPIRDASNPSGLLAIAEETFTEFLSKATGTAIDWVQMPGMKNQQKGIEMLERSSLVGVRDLPKAGSGYKMYAPTTLVPARDFWTLRYTTTMEDGSLVAWSVPEVLRPLYESSRVVAQKMTTVALRHLRQIAQETSGEVVYALGRQPAVLRTFSQRLSRGFNDAISGFNDDGWSVMGGDGIEDVVIACNSTKKIRNTSNAGITFGAPGGIICAKASMLLQSVPPAVLVRFLREHRSEWADYNIDAYLASSLKTSACSLPGLRPMRFSEGQMIMPLAHTVENEEILEVVRLEGQPLTHDEALLSRDIHLLQLCTGIDEKSVGSSFQLVFAPIDEHFPDDAPLISSGFRVIPLDDGVSSGRTLDLASSLDVGSAAPQASGESPDDCSLRSVLTIAFQFPYEMHLQDSVAAMARQYVRSVISAVQRVSMAISPSQSGLNAGHRMLSGFPEAATLARWVCQSYHYHLGMELLNQSDGAGEALLKMLWHHPDAVLCCSFKEKPMFTFANKAGLDMLETSLVALQDLTLDKIFDESGRKALFSDISKLMEQGYAYLPSGVCMSGMGRHVSFDQAVAWKVLGEDSNIHCLAFCFVNWSFV

SEQ ID NO: 42373 - protein, 338 aa, Zea mays
  Coding DNA Sequence Number=SeqID_594
  Gene Ontology: Mol. function=kinase activity
  Homolog annotation: Hit_ID=Q60D21; Match level="QueryCoverage=63%, HitCoverage=60%, E-value=1e-19, Identity=31%"; Hit description =Putative kinase interacting protein, identical
  Pfam annotation: Domain name=KIP1; Domain location=35-82; Score=7.6; E_value=0.028; Accession=PF07765.3; Description=KIP1-like protein
MQEAAAGAYPSYMEPEPEPEQTGASATTSISGCARWRWTMPRRPTEHSFAERAEEYYQKRPQLLALLADLHRRYLCLADRYCHHQHKREQPSLPASASSDCGSSDVDDRCSDAGSSLSFQAQHAPPRAGLPADEEEELLVAELVAAWVERDVLADEAARRAAESARRIQLQGSLVEVLESERLVLLGENARLGFRATAAEDEAAAAAADLGYARRRAAEMARLVLRLREDHRACVLGRRAEALQARVYALELRNRECCEATAAWEAEVQRLSAENRRLADQAMMARRKRKGGGGGWWARVRMAAAGWTPCAPAVTVAEQTKGKEDGKYHHYGGGCFCV

SEQ ID NO: 42374 - protein, 225 aa, Zea mays
  Coding DNA Sequence Number=SeqID_595
  Homolog annotation: Hit_ID=Q67TZ8; Match level="QueryCoverage=72%, HitCoverage=20%, E-value=3e-09, Identity=26%"; Hit description =Paramyosin-like protein
  Pfam annotation: Domain name=DUF827; Domain location=1-126; Score= -106.7; E_value=0.017; Accession=PF05701.2; Description=Plant protein of unknown function (DUF827)
MAERVGQARREAEEAKAKAQSAREKVARAREDAGVAKAALAAMEARLEAVTREILAADTSEVTLTVDDYNELRRRAQETEEADSMRVVEAVKLVEEAKDAEARKLEKVARLAKRTEQRRQALEAATLEADEAEFEKLSAERELRQWRAEHEQQRAPGETGSPRPDLAEISVLDDPAAGDGRGNPHIVSPRGGYMSAADAEDEDARQRKTFFPRIVMFLARKRAQT

SEQ ID NO: 42375 - protein, 359 aa, Zea mays
  Coding DNA Sequence Number=SeqID_596
  Homolog annotation: Hit_ID=Q9FMN1; Match level="QueryCoverage=32%, HitCoverage=16%, E-value=8e-10, Identity=37%"; Hit description =Arabidopsis thaliana genomic DNA, chromosome 5, P1 clone:MBD2
  Pfam annotation: Domain name=DUF827; Domain location=51-351; Score =34.7; E_value=4.2e-13; Accession=PF05701.2; Description=Plant protein of unknown function (DUF827)
MEEANVHGTSGRPSTAPSDASPDSAVPSTSHQGSRSCEAQLDEMQEPDVDSVKGAVGKFGVGGVLDWREKRKNVQNELDKVQDEVTEYQKRVQEAESGRAQALEELGTAAQARQQAELAELQLEELRRGVAAQAKAELGAAMDRSAAALADLRAARAEVESLEKEHARAAAEAGAAVARAREAAAASREAGKAVEDLAAELAALKGELESSRAAHVEAEEKTRSLAVAWEDDKTRWQIELEEAEREDKRLREVEMKAEAASQLMASLKTELFACAVEGTPGQEEKPAASTQSMQEKTEKELDDVKASIEWAKDEVKCLRVAAASMRDELEKEKAELTALRRRERGRALASVHSLTPRRS

SEQ ID NO: 42376 - protein, 53 aa, Zea mays
  Coding DNA Sequence Number=SeqID_597
MSSGRDAIGPFPARFSGESTGSQPLLGLAPYCLPPPASARHLAVPSSPCALKL

SEQ ID NO: 42377 - protein, 136 aa, Zea mays
  Coding DNA Sequence Number=SeqID_598
MFPAPLDSDAATSEEEASDDIISYMPLSVTFDETPEDWACKHHVSYESLSAMLTRFAIGGRSITSHATDPAHEVTFLGYVALFGSRTSIPLDLGRHDEHLVVQWYWWSGEEACMAFLSKRRREEDTGYNLGTDSES

SEQ ID NO: 42378 - protein, 134 aa, Zea mays
  Coding DNA Sequence Number=SeqID_599
MGQRTDYSEMVVKQFLATAKINIEGQLIVWMTGFKRYVATFAEFATANSLDHVVISTGIDLYTEEQFEDYVQYYEHVRLAICRCLGPDRTPGVTPREINAWLTAYALEINILSLGVEDSLGAPEVHPMGVAPEL

SEQ ID NO: 42379 - protein, 434 aa, Zea mays
  Coding DNA Sequence Number=SeqID_600
MESSTGSCAVVPLVWRHVVSAFRGIPVAAPSLDVAVLGGVQLIQLMAWFRDVFSTTSSFVVPLASPFIMRRRMTSTTYCLIPSGVGRQSRLAGLLGGVRGRPFPAMVRHTLGCKGRTLSCDGLSRTERESIGLSDARDRISQMFVGNRSSSGLRVDLLDYRALASDAQAMSSCLLHLSAFALVPRSLQWGHDGSSPHGAESQRSRLVNGEARYTPEVGIGFPGGSHYVSHDTWQRRASPEPQRRTQASYRGPADAVYIHTYCADRQVKGIDREVLLPKDGHQEVAEVALQLGKYCIDDPVKSPPGGRRMVIRTAKRMGGCVLLGANLAGRALPDALGRLVFKTDEMVQAVEAPDVVRNKVSFSVFGLEGAVSLKGKLNVLDSKWIQVVFEAPELKVGSLGFQYGGESEVKLEKGRRWEKTTARGRRIVIRSLND

SEQ ID NO: 42380 - protein, 249 aa, Zea mays
  Coding DNA Sequence Number=SeqID_601
  Homolog annotation: Hit_ID=Q10T49; Match level="QueryCoverage=98%, HitCoverage=91%, E-value=1e-82, Identity=63%"; Hit description =Phosphoglycerate mutase family protein, expressed
  Pfam annotation: Domain name=PGAM; Domain location=3-190; Score=52.1; E_value=1.8e-12; Accession=PF00300.12; Description=Phosphoglycerate mutase family
MQRVVVMRHGDRLDHSEPMWPANKPRPWDPPLDDAGLLRAWTVGKCIRAAAAKQGWALHRVLVSPFLRCRQTAARAVAALCAVPDDDALLAVSIEYGLSEMMNTQAMGITVSKLAPNVSKWFPDLPELEADFPAGTIDHSAEPIYPELPKWEESIMEARSRYASIIKALADKYPHENLLLVTHGEGVGASISYFEMGLEIYDVEYCAYSVLERQVTAEPGDEHGGFTFTADSFKVMTKSGSTGIRYAPV

SEQ ID NO: 42381 - protein, 85 aa, Zea mays
  Coding DNA Sequence Number=SeqID_602
MAPKKVNTRANSFPDEAAKAALDAKKGKVTFADNIPPPQSRTPPTGNMIPPPHSGVRPLGTTNSSQHHEDDILLDGEDFGINIED

SEQ ID NO: 42382 - protein, 319 aa, Zea mays
  Coding DNA Sequence Number=SeqID_603
  Gene Ontology: Mol. function=oxidoreductase activity; Cellular component=proton-transporting two-sector ATPase complex; Biological process=flavonoid biosynthetic process
  Homolog annotation: Hit_ID=Q8S208; Match level="QueryCoverage=98%, HitCoverage=99%, E-value=1e-81, Identity=49%"; Hit description =Putative iron/ascorbate-dependent oxidoreductase
  Pfam annotation: Domain name=2OG-FeII_Oxy; Domain location=179-268; Score=67.2; E_value=5.2e-17; Accession=PF03171.10; Description=2OG -Fe(II) oxygenase superfamily
MTGSLPVPSVQAMVAAGRHAPVPPRYLRPDLAADVVVADDATTIPIIDFQRLLLVDPEESARLHAACQDWGFFQKKMCTQLINHGVPDDVMEAMKASIQSFFALPAEAKQQYRQQAGQLEGRPSTRNLSFWPAGESFRQTLDTYSAAVKHVADRLLGAMYMNLGLQLSIMDMDPERGAGIQSVRMNYYPPCAEAADKVNQLQGLQIKRPPDGGGAWAWLPVTPLQGAFVVNVGDVLEIFTNGRYRSVEHRALVNAHTERLSIAAFHSPSIHATIGPLPELLGDQEVPKYKTLDHQSFITLFFSAKLQGKSFLERMKKLS

SEQ ID NO: 42383 - protein, 57 aa, Zea mays
  Coding DNA Sequence Number=SeqID_604
MGANQRVSSVAGKEAELTEATDAIGARRRTHNELKVTVDGDSAAMGGARQCERELFA

SEQ ID NO: 42384 - protein, 42 aa, Zea mays
  Coding DNA Sequence Number=SeqID_605
MAIIALLISNVADYLIEKQEVGLIDRKENLVLGIVLPAILLS

SEQ ID NO: 42385 - protein, 236 aa, Zea mays
  Coding DNA Sequence Number=SeqID_606
  Gene Ontology: Cellular component=integral to membrane; Biological process=autophagy
  Homolog annotation: Hit_ID=Q1S3N8; Match level="QueryCoverage=72%, HitCoverage=64%, E-value=1e-38, Identity=44%"; Hit description =CD9/CD37/CD63 antigen
  Pfam annotation: Domain name=Tetraspannin; Domain location=10-208; Score=24.8; E_value=3.1e-07; Accession=PF00335.10; Description =Tetraspanin family
  Subcellular localization annotation: CTP_CleavageSite=10; ConfidenceScore=5.04e-01
RQRLRPDPPVASDRRSASPSLAVGARGLRGRLAARLPWLLLAYLVAISVLVVALACLAVFVFAVTTGSSGHRVPSRDFLEYDLDDYSGWLRARLDAPGRWDRIKACLAATPTCTDFNATPSSRPLSNRMSPLQSGCCKRLTKCGYTLVTPTYWISAISATGDADCAAGATRRPKFCYSCASCKAGLLQNLRGEWRRADLILAVATAALLAVYAMGCYAFRTAKTDELFRRYRQGYT

SEQ ID NO: 42386 - protein, 211 aa, Zea mays
  Coding DNA Sequence Number=SeqID_607
MDEGAHYLVLVIMCVFVVRQTLMYLAPTEIGPLEMRVMGSYKEICSRNFTKSRRWLDFVKLAFYTDTSLACIELVTTVIGKVGKLDKVHTHTASSGSHTLNRLTQYIRFFFLAQWLLLCVLRAILLFQTTKQTRLRKGQRTLGNTQSTTIVLDLTWGEARFNLGHQERDAEDLMAIDVGELSSYWGGAATIEELRRGRGCELPLDRLEGGR

SEQ ID NO: 42387 - protein, 108 aa, Zea mays
  Coding DNA Sequence Number=SeqID_608
MAQTSLVAAAKAHETSLGYRRTQIAPHSFNEWLAKGGIWIPQGTASTASGDGDPDGDLSPWRTWTGKKCLPQGLLRIPAGKFFRHEDDDGELKPDEEFSIPSDDNHPN

SEQ ID NO: 42388 - protein, 63 aa, Zea mays
  Coding DNA Sequence Number=SeqID_609
  Homolog annotation: Hit_ID=Q8GSF4; Match level="QueryCoverage=99%, HitCoverage=8%, E-value=2e-23, Identity=72%"; Hit description=SNF2P
VMQYVGGKLHRRDLRRTIYEDELPFDVLMTTYDIALMDQDFLSQIPWHYAVIDEAQRLKNPSS

SEQ ID NO: 42389 - protein, 368 aa, Zea mays
  Coding DNA Sequence Number=SeqID_610
  Gene Ontology: Mol. function=nucleic acid binding; Cellular component= chromatin; Biological process=chromatin assembly or disassembly
  Homolog annotation: Hit_ID=Q8GSF4; Match level="QueryCoverage=96%, HitCoverage=45%, E-value=1e-121, Identity=60%"; Hit description=SNF2P
  Pfam annotation: Domain name=Helicase_C; Domain location=104-193; Score=76.9; E_value=6.3e-20; Accession=PF00271.21; Description =Helicase conserved C-terminal domain
MGDEANKAKGQFKIIKHVLKAFMLRRTKFLLIESGILALPPLTELTVYGSLLQDGAVDTVTKEALHASGKLIVLDLILKKLHECGHRVLLFAQMTQTLDILQDFLELRNYTYERLDGSVRAEERFAAIRNFSSQSTKGLIRDDNRSEAFVFMISTRAGGVGLNLIGADTVIFYEQDWNPQADKQALQRAHRIGQLNHVLSINLVSQRTIEEVIMRRADRKLKLSHNIIGEEDGTDGKGGDPGIEASDMRSIIFGLHLFDPADTATETIDEDITAETFSVEKLAKLKTMSEKVVMMRSHESSEKDERAFEINPNMTDDSGTVIRRASDSIRIDPGLNEAAYLSWVKKFKEASISSEDATAWIWKAKSSA

SEQ ID NO: 42390 - protein, 204 aa, Zea mays
  Coding DNA Sequence Number=SeqID_611
  Pfam annotation: Domain name=PLAC8; Domain location=56-186; Score =0.8; E_value=0.0039; Accession=PF04749.7; Description=PLAC8 family
MAEDATSSHPSRYVKLTKDQDAPAEDIRPGELNQPVHGRVCIPRPLSPMDLDLIPTPLPDSSSKAGGVASAVRSCPRATSRPPTSPGPPGSSDAPMTQRPERITLAILTAIFHGVDPRTSFLIGEGLVFSWWLCATYTGIFRQGLQRKYHLKEHRERTGRLAENNAVPMTVVNPPPVQEMSMLEEVEEKGAEKSEHDDVEVIPL

SEQ ID NO: 42391 - protein, 284 aa, Zea mays
  Coding DNA Sequence Number=SeqID_612
  Gene Ontology: Mol. function=hydroxymethyl-, formyl- and related transferase activity; Cellular component=cytoplasm; Biological process='de novo' IMP biosynthetic process
  Homolog annotation: Hit_ID=Q10T42; Match level="QueryCoverage=99%, HitCoverage=100%, E-value=1e-134, Identity=79%"; Hit description =Formyl transferase family protein, expressed
  Pfam annotation: Domain name=Formyl_trans_N; Domain location=87-265; Score=103.1; E_value=8.5e-28; Accession=PF00551.9; Description =Formyl transferase
  Subcellular localization annotation: CTP_CleavageSite=25; ConfidenceScore=5.32e-01
MVSLARRPLSAAVPAGNLLGIHLFRCPVRTSPSLCGSACLLVTQGSEFTYNPRLWPRHELHKDFLNLSRCFNAQTSTVRVPDLDPKYNISILASKQDHCLFDLLYRWQEGRLPVHINCVISNHDRPQDNHVRRFLQRHGIPYHYLPTAPANKREKEILELIQGTDFVVLARYMQILSENLLKAYGKDIINIHHGLLPSFKGGNPSRQAFSAGVKLIGATSHFVTPELDAGPIIEQMVERVSHRDTLQSFVVKSENLEKQCLAEAIKSYCELRVLPYELRKTVVF

SEQ ID NO: 42392 - protein, 159 aa, Zea mays
  Coding DNA Sequence Number=SeqID_613
MGMGMVDVGGSKAEVDGGRAARLSVITSSINTFWFPLEIYPHGASLILLVYSKEGWQIIRFCIRVGYKMKVDHDHISRSDKIFAMFILLEFLCRQAFLLVVTVESMGSEPILYLRKLRKWFEGRNAVYLRRWSNYDPNLSNRELGHVPRSGNVGTISFQ

SEQ ID NO: 42393 - protein, 93 aa, Zea mays
  Coding DNA Sequence Number=SeqID_614
  Subcellular localization annotation: CTP_CleavageSite=62; ConfidenceScore=5.02e-01
MPQMTTLLPQLSTLLNLHAQAVVVPIIRALVSLFLDVNSTFYARWCPMTEQQSQRRGIERTTQSALGGREAGRGGAHRKRRGIQEGLVSKRRD

SEQ ID NO: 42394 - protein, 68 aa, Zea mays
  Coding DNA Sequence Number=SeqID_615
MAATKEADHCIKYLDCSVLQGQVIIVEKCISIFTDETTISVFNESVELNCKNRNCSILFECTNRTQRN

SEQ ID NO: 42395 - protein, 104 aa, Zea mays
  Coding DNA Sequence Number=SeqID_616
  Gene Ontology: Mol. function=DNA binding; Cellular component =nucleosome; Biological process=chromosome organization and biogenesis (sensu Eukaryota)
  Homolog annotation: Hit_ID=Q6WS85; Match level="QueryCoverage=51%, HitCoverage=18%, E-value=2e-18, Identity=94%"; Hit description =Single myb histone 1
  Subcellular localization annotation: CTP_CleavageSite=30; ConfidenceScore=5.21e-01
MAEPNNSTSKPKVQNCTKSTPSGRIGTKVSSAEGMKSENNNAKRLTKHQVIAELEKMKGMTKEEAAAFAAKAVAEVEVAIAEAKEAARVAEAAENDAEAAKAFS

SEQ ID NO: 42396 - protein, 1377 aa, Zea mays
  Coding DNA Sequence Number=SeqID_617
  Gene Ontology: Mol. function=DNA-directed RNA polymerase activity; Cellular component=membrane; Biological process=signal transduction
  Homolog annotation: Hit_ID=Q8H7Q9; Match level="QueryCoverage=98%, HitCoverage=98%, E-value=0.0, Identity=70%"; Hit description =Putative kinesin-related protein
  Pfam annotation: Domain name=Filament; Domain location=1010-1307; Score=-184.2; E_value=0.094; Accession=PF00038.11; Description =Intermediate filament protein
  Pfam annotation: Domain name=M; Domain location=1019-1039; Score=1.2; E_value=89; Accession=PF02370.7; Description=M protein repeat
  Pfam annotation: Domain name=M; Domain location=1290-1310; Score=3.3; E_value=46; Accession=PF02370.7; Description=M protein repeat
  Pfam annotation: Domain name=M; Domain location=408-428; Score=5.1; E_ value=27; Accession=PF02370.7; Description=M protein repeat
  Pfam annotation: Domain name=M; Domain location=524-544; Score=7.9; E_ value=11; Accession=PF02370.7; Description=M protein repeat
  Pfam annotation: Domain name=M; Domain location=765-785; Score=1.7; E_ value=74; Accession=PF02370.7; Description=M protein repeat
  Pfam module annotation: Pfam domain module=Filament::M::M::M::M::M; Domain location=1010-1307::1019-1039::1290-1310::408-428::524 -544::765-785
  Subcellular localization annotation: CTP_CleavageSite=34; ConfidenceScore=5.42e-01
MVTTTSRAGCSSFTATAPPTGVGERFDFRFSNFRAVQVPAISDRLFLSIVSVDNGKTIAKSTKVASRSGICQWPDTILEPIWFSKDQVSKEFQECQYRIIVSLGSAKSGILGEILLNLSNFLNLADPTAISLPLKRCNSGTVLQLKVQCLGTKSKLSGVRSLRDMAPRLDDRSPTPTNDELDNRSDCSDGMFNKGVHSSSENHLGGTYQDESGNMETGFSASGSHRSSNSGDSTADRTNFSPRVNSNGGLFVGRQDSASSYASYVSAGGGDDGLRSNNSSFSSRTSGPNLLQGSTPKTFSNDLSQLSMGASDSSKDFLEAAEETIEELRDEAKMWERHSRKLKADLEMLKKECSEKSKQHAELAVELSAAQAERDSYRHEIEELKSSLQDVNTRQTITGTPKRSDWIDLQKELEGEVKFLKESNTDLTIQLNRTQESNIELLSILQELEETIEEQRVEISKISKVKQTAYPENGLLVKKDREWAKKLSMKEDEITIPREKSDRALNIGNADGAASNAIYLDLEKENEILRAKIQELEKDCSELTDENLELIYKLKENGLTKGQVPHIANNNELQFKKLTSRIHQLEEDLRNKEMLRDDSFSESSMSNADEIQRKCADLELKVLNFRSQTCELEEKFRKCQEELEQRNLELSALRRKINGLHSNELEVCESGATWKYQARIADLEDTEPETDTLKARFELQLQENDDLRRSKVEMQNFISEFQAEKSQLEERLSASLKESSITSKCLDEVRKDILVLSSSIDSHVSTNKLLERNLVELESCKAELELHVSELEQENIELSERISGLETQLTYVTNEKESSELQLHDSRSLIINLKDKVECQQSEMETQRLQFKQKQQESQRRLCEAQDDSEVLRRSNCKLQSTVESLIEECSSLQNLIADLKRQKLELHGHLTQKEQELDESKKKNFEFSKTVEFLEAKLLSLQKDISSKEQSLLSELENIFQEHMEQEERINRAHFMLNKIEKEKTLEVENLEREVVSLAAQVSSTHEERESATLNAIQEVSVLRADNAKLEANLQDVSEQLRCYESQLEDLRKESKSKIKGLVDSLNASKQSEEMLTSDAEHMKKLMEAAKSNEDALRKTSNELELKLKSSDYVKQQMLEEISGLKLQVQKIMNLQDEVSKLQSSLDEAKFEKGKLEEFVRSVTEECQELKAQKAMLTDKVSYMQETLRNGEEENRNRIAMHAKLMRLESDLTALEASHVHEAELKNELSRIKRSNSEYQRKIQSLGQENEDLTRRVQIMEKGFERMSHAKENLGKQEIGGDNQEAIQSTIQLLEIKLAEALEENKIYRAQQKSSMSEGQPAGGDGKEGNTDRILQLEGELRDMKERLLNMSLQYAEVEAQRERWASSSRAMLQHQ

SEQ ID NO: 42397 - protein, 107 aa, Zea mays
  Coding DNA Sequence Number=SeqID_618
MQAEEPELRHQGQHLVLLIAQHVSLVLLLLAQQVALLRVLGRLGCRWQVAQQEALQLCQFCGEGVGTREAQRDATASEGGEAGGSGVTEAVVPKRGGNGEAAVVHRW

SEQ ID NO: 42398 - protein, 395 aa, Zea mays
  Coding DNA Sequence Number=SeqID_619
  Gene Ontology: Mol. function=branched-chain-amino-acid transaminase activity; Cellular component=chloroplast; Biological process =branched chain family amino acid metabolic process
  Homolog annotation: Hit_ID=Q8H7T7; Match level="QueryCoverage=99%, HitCoverage=90%, E-value=1e-156, Identity=73%"; Hit description =Putative aminotransferase
  Pfam annotation: Domain name=Aminotran_4; Domain location=97-395; Score=263.4; E_value=4.7e-76; Accession=PF01063.9; Description =Aminotransferase class IV
MEPGLASRVARSAAQPLSGCLSRHSLSPWLKIQNHIYPMPSLCHKVPSTGKCHASMTTSYMETSDVTDLDWENLGFGLIETDFMYVAKCGTDGIFSKGEVLPFGPIALSPSAGVLNYGQGLFEGLKAYRKTDGSILLFRPEENAIRMLSGAERMCMPAPTVEQFVDAVKQTVLANKRWVPPTGKGSLYIRPLLIGSGAVLGLAPAPEYSFIIFVSPVGNYFKWTVIQDSLMVIVYNMNSSLHASKIVCFNNAGKVYLPINLIVEDKFHRASPGGTGGVKTIGNYASVLKAQKIAKGKGYSDVLYLDAVHDKYLEEVSSCNIFVVKDNVISTPAIKGTILPGITRKSIIEVAQSKGFKVEERLVCVDELINADEVFCTGTAVVVSPVGSVTYMGKR

SEQ ID NO: 42399 - protein, 199 aa, Zea mays
  Coding DNA Sequence Number=SeqID_620
  Subcellular localization annotation: CTP_CleavageSite=76; ConfidenceScore=5.14e-01
MNYELITVYHFDLAGTAFGAMAYSDPSLPVASLTGSCLTPQKISPALSPISPPPRLRLRLLRRRSTRLPRVSGRVCFAALQGFRACDRLPNKSAASSVLQNPSSRRCPRAMPFFLDQRRDPRLLSVPPPQSHSRCSNWCSALPLSLELSCPRKCSQLLPAAPHRSTPATAARKKQLQLKLSAGDDRRFFFMKLRNYKPT

SEQ ID NO: 42400 - protein, 217 aa, Zea mays
  Coding DNA Sequence Number=SeqID_621
MGEDASATNSSTEAVERVVASTGLPHQKPRGHSDGRTQAPTTIQPRRSGEQRHLLVLPPPKTKQNEVPVDQAPRFEQRKANSPTNAVAACGASDRDLRHHHPVKKAGVGYEPASHLNLQPSLIHVRTEKMLHRMNSPKMRTEAPLSSTSRSTRQDSTRQRPNSLTTPPFKVQPKRRNEKRFSSIVGTNDMILRGEEDQERVGRSTLELEHISFKAKP

SEQ ID NO: 42401 - protein, 69 aa, Zea mays
  Coding DNA Sequence Number=SeqID_622
MTPEASVISPWMASVALSTNELLRRVKGTVRKADYSVVVPMRPEQGLHVPGPSCDPAVDHHGICMWRTA

SEQ ID NO: 42402 - protein, 127 aa, Zea mays
  Coding DNA Sequence Number=SeqID_623
MVVVVDFGDVVVVAVGVGLLGVAGTYGFAGGDGVGDNSLVVSRLISGHPIFGGLGFRAIPGGMCRVFAMEKIVKPSLLRDSAIASASSVAVAALLRGVLMATSSVSSLLLIGDGVHLGLVTVWPTKV

SEQ ID NO: 42403 - protein, 67 aa, Zea mays
  Coding DNA Sequence Number=SeqID_624
MAAIAAHPRISRVVRARPPGYLQTRVKSIYDVKSKIVTKAGIALKLRAGELRLKVGKRNRLKGKKAI

SEQ ID NO: 42404 - protein, 168 aa, Zea mays
  Coding DNA Sequence Number=SeqID_625
  Pfam annotation: Domain name=TF_Otx; Domain location=68-138; Score= -26.1; E_value=0.1; Accession=PF03529.4; Description=Otx1 transcription factor
  Pfam annotation: Domain name=zf-CCHC; Domain location=87-104; Score =17.9; E_value=0.0011; Accession=PF00098.13; Description=Zinc knuckle
  Pfam module annotation: Pfam domain module=TF_Otx::zf-CCHC; Domain location=68-138::87-104
MKRIRSYFRKRLLDKVIALENKKVEFGEKRSVANQGQARSSSPPRYATTQSTPVGGSSGQQTQQTQTAPPQASTPAGPVAPNTSTSRSCFKCGQSGHYTNYYPNKDAYTTLAPMKHGQASGGKSQPLFVNRGQVNHVKVEAKPGEPENQEEMSVEGEEAGEEVNGQQD

SEQ ID NO: 42405 - protein, 132 aa, Zea mays
  Coding DNA Sequence Number=SeqID_626
MAGQRMDASIAATPTTSSSVAPKKGKQEDASRDHHSSQCKGKREYSYDKYKSKGGFEKEALKKYLQKAKIKKCAFLASLIDLDHDSNDVVSSSSDEETDRQAEDKLNGLCFNVDTAGSLCTMALGDDVVGGD

SEQ ID NO: 42406 - protein, 603 aa, Zea mays
  Coding DNA Sequence Number=SeqID_627
  Gene Ontology: Mol. function=amino-acid N-acetyltransferase activity; Cellular component=cytoplasm; Biological process=amino acid biosynthetic process
  Homolog annotation: Hit_ID=Q84JF4; Match level="QueryCoverage=52%, HitCoverage=54%, E-value=1e-112, Identity=63%"; Hit description =Putative amino acid acetyltransferase
MVLMAVGMKSLIMLQVANFLGAKRRGVVGGIDYGFTGEVKKIDVSRIRERLDRDSIVVVSNMGYSSAGEVLNCNTYEVATACALSIEADKLICIVDGQIFDEHGRVNRFMSIEEADMLIRTRAKQSEIAANYVKVVDEEDINHVRCLPMKHGTEHGMNGRDHINGYTASFRNGVGFNDGNGLSGEQGFAIGGEERLSRSNGYLSELAAAAYVCHGGVQRVHIIDGTVGGALLLELFTRDGVGTMIARDMYEGTRMAREEDLSGIRKIIRPLEESGVLLLEALTSFIVVERDGSIIACAALFPFLEDKSGEVAAIAVSEECRGQGQGDKLLVTTGAPQTMRLEQKPTVGIPPQSQRRESASVVSLGSPVRETDGNARVCAGQGGHTRGRVEEVKTDPARKATTTTNPEVATTVNPAGKAATAPNPMKVTKKGERRWGGSSRTGACVEPGRGFDGEDKRCLKSLGKEGARQGIPGRARASSLLRRSEGGDGAALEDGASGPGDTPEETGDPRTAACQCGGGGVDTEEGAVAPPFAGERAASRPGRKGGGASVKDDRGRLRWPEVGGGVGRVVLEERCREARGSSGGRKTPWETPHELKGARAPSV

SEQ ID NO: 42407 - protein, 147 aa, Zea mays
  Coding DNA Sequence Number=SeqID_628
MGKKNKRKREPTPPSEEFGDSEYSEEEFSSESEGSPAPIPLRESSDDSQGLAVEVWTYIRAVERSRLEGSDESEYSSDEEDSDSGSEDEDEDDDDDDEDGGGGDGDGNGRGGGSGNKDGDGGGSRGGSGGGGSSRGSTRGGSNRASG

SEQ ID NO: 42408 - protein, 122 aa, Zea mays
  Coding DNA Sequence Number=SeqID_629
  Homolog annotation: Hit_ID=Q10T60; Match level="QueryCoverage=39%, HitCoverage=14%, E-value=1e-18, Identity=83%"; Hit description =Expressed protein
MTSSDLQQQQQHVTLRAIHSLNQQSPVRYSRQIANKCWLKKQKDVMAPAVIAKGEDVMWTSGLIFGKGEGIVGLETNLGTLHIQSKYATVVFHDNPNRIGNISGANQTLGANRALVEVRGCI

SEQ ID NO: 42409 - protein, 141 aa, Zea mays
  Coding DNA Sequence Number=SeqID_630
  Homolog annotation: Hit_ID=Q8RZA2; Match level="QueryCoverage=45%, HitCoverage=16%, E-value=2e-09, Identity=52%"; Hit description=Zinc finger protein-like
MAQTSLVAAAKAHETSLGYRRTQIAPHSFNEWLAKGGIWIPRDSVNGKVKQVVNARLHNVQRGQLDLPLFVMARDGNVTGIRSPICGEILPLEDVDREVPSPTRKNYSLTGKRGQDGEAFSIPVPCGNPLNIYMTSFSCNI

SEQ ID NO: 42410 - protein, 269 aa, Zea mays
  Coding DNA Sequence Number=SeqID_631
  Gene Ontology: Mol. function=glutathione transferase activity; Cellular component=cytoplasm; Biological process=auxin mediated signaling pathway
  Homolog annotation: Hit_ID=Q9FQB4; Match level="QueryCoverage=83%, HitCoverage=100%, E-value=1e-97, Identity=80%"; Hit description =Glutathione S-transferase GST 25
  Pfam annotation: Domain name=GST_C; Domain location=101-200; Score =29.2; E_value=1.5e-05; Accession=PF00043.15; Description=Glutathione S-transferase, C-terminal domain
  Pfam annotation: Domain name=GST_N; Domain location=5-78; Score=59.4; E_value=1.1e-14; Accession=PF02798.10; Description=Glutathione S -transferase, N-terminal domain
  Pfam module annotation: Pfam domain module=GST_C::GST_N; Domain location=101-200::5-78
MAGADDLKVLGLWTSPFVIRVRIVLNLKGLAYEYVEDDLSNKSALLLSSNPVHKTVPVLLHAGRPVNESQIILQYIDEVWAGTGPAVLPRDPYERAAARFWAAYIDDKVKSAWLGMLFECRDEGERAEAVARAGEALGTLEGALRGKPFFGGDGVGFVDAVLGGYLGWFGAVGRIIGRRLIDPAKTPLLAAWEDRFRAADVAKGVVPDDVDKMLAFLETLLANYYSKKTTRWQCWVSACGTFYIEEGAGGAHPQAAGEMGGTLAPTLSL

SEQ ID NO: 42411 - protein, 145 aa, Zea mays
  Coding DNA Sequence Number=SeqID_632
  Gene Ontology: Mol. function=RNA-directed DNA polymerase activity; Biological process=RNA-dependent DNA replication
  Homolog annotation: Hit_ID=Q1SLU4; Match level="QueryCoverage=99%, HitCoverage=33%, E-value=2e-19, Identity=40%"; Hit description=RNA -directed DNA polymerase
MARIRERKTRDINQIKCIKDEADRLLVKDKEIKDKWREYFDKLFNGENESSTLVLDDSFNDTNRRFVRRIQKAEIVEALKRMKGGKAIDGIPMEQLMERYREQKDLHMVFIDLKKAYDKVPRNVMLWALEKHKVPTKCITLIKDM

SEQ ID NO: 42412 - protein, 262 aa, Zea mays
  Coding DNA Sequence Number=SeqID_633
  Gene Ontology: Cellular component=integral to membrane
  Homolog annotation: Hit_ID=Q9FIQ5; Match level="QueryCoverage=79%, HitCoverage=92%, E-value=4e-31, Identity=32%"; Hit description =Senescence-associated protein 5-like protein
  Pfam annotation: Domain name=Tetraspannin; Domain location=24-221; Score=120.5; E_value=4.8e-33; Accession=PF00335.10; Description =Tetraspanin family
  Subcellular localization annotation: CTP_CleavageSite=35; ConfidenceScore=5.05e-01
MKLLTIVVVIPSSVAARSTSPWRSTTWPVAAINLVAALLSVPVIAAGIWLSTQADNACVQILQWPVIALGVALLAVGLAGFVAAFCRLPWLLLAYLVAISVLVVALACLAVFVFAVTTGSSGHRVPQPGLPRDLFTAAPNRMSPLQSGCCKPPTKCGYTLVTPTYWISPISATADPDCAAWSNEEAKFCYSCASCKAGLLQNLRGEWRRADLILAVATAALLAVYAMGCYAFRTAKTDEPLSPLQAGLYMIDHDDDDMYCIN

SEQ ID NO: 42413 - protein, 122 aa, Zea mays
  Coding DNA Sequence Number=SeqID_634
MDEGAHYLVLVIMCVFVVRQTLMYLAPTEIGPLEMRVMGSYKEICSRNFTKSRRWLDFVKLAFYTDTSLACIELVTTVIGRFTHTKQVDTIHKILFPCSVAALMCVAAILLFQTTKQTRLRK

SEQ ID NO: 42414 - protein, 71 aa, Zea mays
  Coding DNA Sequence Number=SeqID_635
MVQSQRSRLGNAQATMCPMYFGRSAHLRSGQVYVSSAVNVEAYHTPEVDTDFPRWSSLCVTEHAAAPGLAL

SEQ ID NO: 42415 - protein, 220 aa, Zea mays
  Coding DNA Sequence Number=SeqID_636
  Homolog annotation: Hit_ID=Q6K3A8; Match level="QueryCoverage=14%, HitCoverage=5%, E-value=2e-07, Identity=84%"; Hit description =Pentatricopeptide (PPR) repeat-containing protein-like
MAVTFPSPTPRSPRRPDAIVAPDPSSADMSPSLDFGDPTSFTALRVLTDGGAATRLLHECVAYQRALDARLDALLARRADLDRAAASLLRSAPPLLSLAASDAAALKESSSSTAALADALSSRVRHLDAAHSRADAALARAEAALDRSRALEATRRALAADDLAAAATAAHEFLAIDARFPTDDDLRRDLIDIKRRLEGLARRRLAAVVDAQDHPAVLRL

SEQ ID NO: 42416 - protein, 321 aa, Zea mays
  Coding DNA Sequence Number=SeqID_637
  Homolog annotation: Hit_ID=Q10R85; Match level="QueryCoverage=69%, HitCoverage=80%, E-value=3e-96, Identity=77%"; Hit description =Expressed protein
MAGTTLLARATWKKNLFLARMPNPPPPCRQESLWGRNATDSGKLPLHLQQVRHVVVVVVNATPSSMPSRSPSRGAGSSGGSSSTHPLRSSSRSRPSSLTAACALKTPSNGGSRGKVNPRDLFTFSHKFSTDIPMSETQGASIDEYLRNSPRIVGAVFPDQRKRRKINDEEWSVQLLPIRFLFLSASPVIVMRFVSKSGGKEYPPNVPVHATSLLLMEVTDYKLNGLDSNAMPSHLALTVRGLMYPQRQREGRKSLKGHVEMTVGFDLPPVLALVPASIIRGVGETVLRQMAEQMKQDMDTGLAADFNKYRREKLTERRSSP

SEQ ID NO: 42417 - protein, 432 aa, Zea mays
  Coding DNA Sequence Number=SeqID_638
  Gene Ontology: Mol. function=3-dehydroquinate synthase activity
  Homolog annotation: Hit_ID=Q9LH99; Match level="QueryCoverage=76%, HitCoverage=74%, E-value=5e-81, Identity=51%"; Hit description =Arabidopsis thaliana genomic DNA, chromosome 3, BAC clone: T19N8
  Pfam annotation: Domain name=DHQS; Domain location=95-427; Score =420.1; E_value=3.2e-123; Accession=PF01959.7; Description=3 -dehydroquinate synthase (EC 4.6.1.3)
  Subcellular localization annotation: CTP_CleavageSite=44; ConfidenceScore=5.64e-01
MASSSSLASAKALARSHASLLAPQTQRTGFSRPVPQSGPCLAAPCDRAGQFKLLPFDDPSSAVTLPMASALQRLGRASAVALAPRLRQDARLCCRAGGAEEDRLGVDREPAATARINALFIDGPGIFDEENQKVAVISQVSSPGELDLVQPDNAEAENIVIDFRGGWQVIRAENIVAAFQGCKGNVLAVSTNTTEAQVFLEALEQGLDGVVLKVDDMDDIIKLKDYFDRRNEAKSQLPLTKATVTKVEVVGMGDRVCVDLCSIMRPGEGLLVGSYARGMFLVHSECLETNYIASRPFRVNAGPVHAYVTVPGGKTSYLSELGSGKEVIVINQSGLWRTAIVGRVKIESRPLILVEAKDNSGDETYSIFLQTQKQLHLLPLTQSLYNSGLFGGPNRPNRNSGLFGGPNRPNRNSYNCEIPLQRTIIDQDIDAK

SEQ ID NO: 42418 - protein, 231 aa, Zea mays
  Coding DNA Sequence Number=SeqID_639
  Gene Ontology: Mol. function=sugar porter activity; Cellular component=integral to membrane; Biological process=transport
  Homolog annotation: Hit_ID=Q10SL9; Match level="QueryCoverage=92%, HitCoverage=66%, E-value=1e-108, Identity=84%"; Hit description=UDP -galactose transporter, putative, expressed
  Pfam annotation: Domain name=UAA; Domain location=26-225; Score=87.6; E_value=3.9e-23; Accession=PF08449.2; Description=UAA transporter family
MTGGGEEQGRSLFGVSLTNRPRWQQFMICSSGFFFGYLVNGICEGFVYLALIRLQGFTVKQMVNPWRTYVRLSAVLMGSNGLTKGSLAFLNYPAQIMFKSTKVLPVMVMGAFIPGLRRKYAFQEYVSAVMLVVGLILFTLADAQTSPNFSMAGVAMVSGALVMDAFLGNLQEAIFKMNPDTTQMEMLFCSTVVGLPFLAVPMVLTGELVTAWTSCSQLVAEKGQTIDQADR

SEQ ID NO: 42419 - protein, 529 aa, Zea mays
  Coding DNA Sequence Number=SeqID_640
  Gene Ontology: Mol. function=hydroxymethylglutaryl-CoA synthase activity; Cellular component=soluble fraction; Biological process =acetyl-CoA metabolic process
  Homolog annotation: Hit_ID=Q8H051; Match level="QueryCoverage=87%, HitCoverage=100%, E-value=0.0, Identity=88%"; Hit description =Putative hydroxymethylglutaryl coenzyme A synthase
  Pfam annotation: Domain name=ACP_syn_III_C; Domain location=355-436; Score=-28.1; E_value=0.012; Accession=PF08541.1; Description=3 -Oxoacyl-[acyl-carrier-protein (ACP)
  Pfam annotation: Domain name=HMG_CoA_synt_C; Domain location=243-517; Score=569.1; E_value=4.4e-168; Accession=PF08540.1; Description =Hydroxymethylglutaryl-coenzyme A synt
  Pfam annotation: Domain name=HMG_CoA_synt_N; Domain location=69-242; Score=347.7; E_value=1.9e-101; Accession=PF01154.8; Description =Hydroxymethylglutaryl-coenzyme A synt
  Pfam module annotation: Pfam domain module=ACP_syn_III_C::HMG_CoA _synt_C::HMG_CoA_synt_N; Domain location=355-436::243-517::69-242
MGRKKDAEEEESSVYNDNRGCREHGLPPTTWLSTCLHPWRYYRGPREKDSEPGQPSVNVSGGAGEMASEAKDVGILAMDIYFPPNCVLQEELETHDGVSKGKYTIGLGQESMAFCTEVEDVISMSLTVVKSLLKNYNIDPMCIGRLEVGSETVIDKSKSIKTWLMQIFEESGNTDIEGVDSSNACYGGTAALFNCVNWVESKSWDGRYGLVVCTDSAVYAEGPARPTGGAAAIAMLIGPNAPICFESKYRGSHMAHVYDFYKPDLASEYPVVDGKLSQTCYLMALDSCYNVFCKKYEKHEGKQFSISDADYVVFHSPYNKLVQKSFARLYYNDFLRNCSTVDGESREKLAPYAGLSSEESYQSRDLEKASQQVAKNLYETKVQPTTLIPKQVGNMYTASLYAALASVVHSRHETLAGQRIVMFSYGSGLTSTMFSFMINEGHHPFSLLNIANILDISKKLKARHVVPPEKFVEALKLMEHRYGARDFVTNQDTSLLSAGTYYLTHVDSKYRRFYDVKGDGVATAMSNGH

SEQ ID NO: 42420 - protein, 84 aa, Zea mays
  Coding DNA Sequence Number=SeqID_641
  Gene Ontology: Mol. function=oxidoreductase activity, acting on CH-OH group of donors; Biological process=alcohol metabolic process
  Homolog annotation: Hit_ID=Q8H052; Match level="QueryCoverage=89%, HitCoverage=12%, E-value=1e-33, Identity=92%"; Hit description =Putative mandelonitrile lyase
MSAGHMRFVSEDGVVNARARVLGGGSCLNAGFYTRASGGYVRAAGWDHRLVNASYRWVERALVFRPAVPQWQRALREGLLQAFI

SEQ ID NO: 42421 - protein, 442 aa, Zea mays
  Coding DNA Sequence Number=SeqID_642
MANGNHGDGYKHRHMRWKTSGSDLKARVTTVNIIVNSGMKLHFKLQTTDVVWPSPATLCRRPVTDDCSKLHCSSHLRLVQAPVTCAAAASPVHRTNSSDPQSRWARHLKFDGGCGHANNVEVIFPESNVVGSASGSAFVPPPQRTYVRTRKRSINAEAQDIGEDDSDAQEDGAAAPHSCHPISAQVQPPPTFAPPHQGRPHPSRWPPLLYSPLPTSAIGLWLGQPWPPRLPRSRRGRVRVPCPQPPPLAAAHGGPPCAPIPPAPPPAMVAAPSLPNAGAGTAQHPLHHVGSLLLLAGAAPGAPTAGRWPWLPHGGASHGNAHAGPAAGPDPPPLALMAADAAPPLLKPQHCRLPSRGRDHPSPSRHGRGSPPRRRARHGLPPPLRRPSPARRSWRGGPSSGSFYPRASPRWLPPLSPPAPPLHAAIFPGAALKPLGPRSGSP

SEQ ID NO: 42422 - protein, 318 aa, Zea mays
  Coding DNA Sequence Number=SeqID_643
  Gene Ontology: Mol. function=DNA binding; Cellular component=nucleus; Biological process=regulation of transcription
  Homolog annotation: Hit_ID=Q9FFI5; Match level="QueryCoverage=58%, HitCoverage=39%, E-value=2e-68, Identity=68%"; Hit description=NAM (No apical meristem)-like protein
  Pfam annotation: Domain name=NAM; Domain location=6-134; Score=317.5; E_value=2.3e-92; Accession=PF02365.6; Description=No apical meristem (NAM) protein
MAPVSLPPGFRFHPTDEELIICYLKRKINGRQIELEIIPEVDLYKCEPWDLPEKSFLPSKDLEWYFFSPRDRKYPNGSRTNRATKSGYWKATGKDRKVNSHRRAVGMKKTLVYYRGRAPHGSRTDWVMHEYRLDERECETDTGLQVDVALECARLQHRLSLPPLEVEDFPHDVSLDTKASVLRSSNPNNEVDILQEFLSVASASQELINGTSSSYAAEMWAGAGTSSTSDTHYVNELSSLFEFGVKAKEEADNFYHMDCIGTSSGFSPKPVRVDEPVRLVEIADMEEFKEEKRRVENLRGVRLHNNDDLGEVISYSTS

SEQ ID NO: 42423 - protein, 99 aa, Zea mays
  Coding DNA Sequence Number=SeqID_644
MRRIDCNCDGHGDEPTIVGSSHKEMCRSMGYRVIARVEGTDLMVAKELFLDSNLGLVSSIVTIVDDVLQLDYDCAKDLEEYIVHPCKDGIVRRTTSMRT

SEQ ID NO: 42424 - protein, 79 aa, Zea mays
  Coding DNA Sequence Number=SeqID_645
  Gene Ontology: Mol. function=small conjugating protein ligase activity; Cellular component=synaptonemal complex; Biological process=protein modification process
  Homolog annotation: Hit_ID=Q0PMR8; Match level="QueryCoverage=62%, HitCoverage=31%, E-value=1e-22, Identity=94%"; Hit description =Putative E2 SUMO conjugating enzyme
MSGGIARGRLAEERKAWRKNHPHGFVAKPESLPDGTVNLMIWHCTIPGKQGPYKTVHTKGTYTVFTVLYRFYDDVIVKC

SEQ ID NO: 42425 - protein, 152 aa, Zea mays
  Coding DNA Sequence Number=SeqID_646
MGKSKKGESSSHHSGDKRKREPTPPSEDFGDSEYSEEEFSSGFEGSSFPASPSASSDDLDDSQGIITEVWTYIRAVERAGLEGSDESKVSSDEENSSDSSEESGGGGDGEGDDDGGGDGNGDGGEGDDKGDGGDGSGKGDGGSGKGSNKASG

SEQ ID NO: 42426 - protein, 224 aa, Zea mays
  Coding DNA Sequence Number=SeqID_647
  Subcellular localization annotation: CTP_CleavageSite=54; ConfidenceScore=5.07e-01
MDGGRILDPLLSGAMDSASLLRSHPARPPPRTASRMPSMADPPPHPHPNHLLLVASTIPFVGSRIHGRASLPHHRPLLSTVPPPHFRLRLAGHARGSQPRSRISATPTNLAQPRRAPARDCRSTFSPARCVVPPLTQARHGDTELDGRCCEVVLGERVGAGRSVFDGGASAVATGAEYSRKRYFVLEDAVLRFFKSMSSSKREYLMAKPRNNLRTPLDTLLAAL

SEQ ID NO: 42427 - protein, 90 aa, Zea mays
  Coding DNA Sequence Number=SeqID_648
MALVWDEAEVGDEVGLAAVVGAADGKAAVDAADELEEFDRRDRDTRLSRALVSRVGGPRLRRSTLHRVVAIGKERYSPCIYEHILPTQSS

SEQ ID NO: 42428 - protein, 264 aa, Zea mays
  Coding DNA Sequence Number=SeqID_649
  Homolog annotation: Hit_ID=Q5DJU1; Match level="QueryCoverage=78%, HitCoverage=42%, E-value=2e-30, Identity=65%"; Hit description=Fas -associated factor 1-like protein
  Pfam annotation: Domain name=UBX; Domain location=181-262; Score =92.9; E_value=9.7e-25; Accession=PF00789.11; Description=UBX domain
  Pfam annotation: Domain name=Vicilin_N; Domain location=55-148; Score= -69.0; E_value=0.038; Accession=PF04702.3; Description=Vicilin N terminal region
  Pfam module annotation: Pfam domain module=UBX::Vicilin_N; Domain location=181-262::55-148
MRIVLLQQLVLVIIRKENAVASGKIANVRLSYKVINANVYIAKLRIANKLYIHVPKVEGPKSPEEMITILQRVVEECATSLVAARIEAEERLNNQRLREEQDAAYRAALEADQLRKLYLQARERERIEEQERREREAVEAEKKRKEEEEAVARAAQEAAEKEAALARRRQEKAMALGAEPEKGPGVTRVLIRFPTGERKERRFHSSATVTSLYDYVDSLDCMKAENYSLVSNFPRVTYGPEKHSLTLEEAGLHPQASLFIEIEQ

SEQ ID NO: 42429 - protein, 159 aa, Zea mays
  Coding DNA Sequence Number=SeqID_650
  Subcellular localization annotation: CTP_CleavageSite=32; ConfidenceScore=5.32e-01
MSPHFQGDQLLRRMRSTVSKLLSARSKAASIRCHSSASISFPSEPSRMKGEVPEGSFGSGQRGHHDPRGGGAIAVGNSAASDYPTVVAVPGDSEGQGRQQRRGSHRVRRGGPTRGDIHDRLDHLLDVRGPVRGMSATDAPDTSLAIKEDDTLVSGETDM

SEQ ID NO: 42430 - protein, 113 aa, Zea mays
  Coding DNA Sequence Number=SeqID_651
MEKSAIDDDERKGEIRKQKAAAPRQSCLLLRLSHSSESLGDFIIPLLRNEVFEFGGVWGPGRQALWLLAGIDRLLSEAALRRRKHGEHFEMGWELGMDRNVQRDGQSRICFFF

SEQ ID NO: 42431 - protein, 252 aa, Zea mays
  Coding DNA Sequence Number=SeqID_652
  Gene Ontology: Mol. function=hydrolase activity; Cellular component =cellulose and pectin-containing cell wall
  Homolog annotation: Hit_ID=Q9FWB6; Match level="QueryCoverage=92%, HitCoverage=65%, E-value=1e-106, Identity=74%"; Hit description =Putative alpha/beta hydrolase
  Pfam annotation: Domain name=Abhydrolase_1; Domain location=2-242; Score=29.6; E_value=1.1e-05; Accession=PF00561.10; Description =alphabeta hydrolase fold
MVGFDRAGYGESDPNPCRSVRSAALDMEELADALGLGDRFYAVGVSLGCHAMWSALRYIPHRLAGAAMLAPVVNYWWPGLPAGPAAEAYARQARGDQWALRVAHHAPGLLHWWMAQRWLPTSTVVDNTTHLPNGRDAEVRRALAADGTLRRKREAATQQGVHESYHRDMAVMFGRWEFDPMDLPEPPCPVHLWQGDEDGLVPVVLQRHVAGTLAWVNYHELPGTGHFLSAVPGPRGHRCYGHCFGSSAALVA

SEQ ID NO: 42432 - protein, 73 aa, Zea mays
  Coding DNA Sequence Number=SeqID_653
MAGSCGQSPVETPPIAPTSVCTRLRGGLAPESGGLDPRRWRRRGPADEQATVESEVQQVEIAEQELIEGKLCP

SEQ ID NO: 42433 - protein, 118 aa, Zea mays
  Coding DNA Sequence Number=SeqID_654
MTCNCAKATSKIGNWRVETLIEVFLIRCLFKREVFLQKRIVLGTISTWFLVCWRLPPSFWFDFFFGGSVVNATPRAGDKSPTELSFRVMGFVVEHDFKAFSAVGKNKTAPVEEVVDPN

SEQ ID NO: 42434 - protein, 224 aa, Zea mays
  Coding DNA Sequence Number=SeqID_655
  Homolog annotation: Hit_ID=Q6QP51; Match level="QueryCoverage=80%, HitCoverage=99%, E-value=1e-44, Identity=59%"; Hit description =Putative growth-regulating factor 1
MQEACNRTTVVHPFGSIASGGDRERGYFERDPSPRRKQAPSPPTDQGFEGWPLGRVRQPPQSTWAPRPLLIRGSKAGPLEGFDSRPREHRVRDDSGYVRYMTEARATLPSAAHPAPTAVPATRARLTTASSASGTTGSSASPDLRPRPRKKVSASPDPGARPQPRPRKVVSASPDPRAQPQPRPREESRPRPTPASASGEVSASLDLGLGPTAPRGIHHYPTPN

SEQ ID NO: 42435 - protein, 313 aa, Zea mays
  Coding DNA Sequence Number=SeqID_656
MNFCELTLAITSPIGEDQVPPKEDYDDEFDELDDDVADLRALVGRLASPASVKAVARLGRVLVSLSGLLHQPQAQDPLRRLGPSPFAERTTSSASSTRTAASATLWSRSPRSRLRPASRCARRSRPASRRPRALRWSARDLPRVASSARAVAARPPPTPPADLRRVGLGGGLLRCLLALRRRRHGARRGRRHAVLHVLPREVKRAVRHAQTRGRHHRVLLLDLHAMDLVGRRPHAVDVACEASIGQEAARRHVCRGAQMEAAADPEERERKAAFERLDNLGRCIADVESSGEKVFRALVNTRVSLLNILSPAF

SEQ ID NO: 42436 - protein, 77 aa, Zea mays
  Coding DNA Sequence Number=SeqID_657
  Subcellular localization annotation: CTP_CleavageSite=23; ConfidenceScore=5.03e-01
MARACRWRRNHSAATSSPAALVMATTFEDTVVSTPQKLNIFKKTYKKPGRLSQSGLLQLHLHSTQESRYLTVAASDL

SEQ ID NO: 42437 - protein, 220 aa, Zea mays
  Coding DNA Sequence Number=SeqID_658
MSYGTEGVKLRTNAGGRETRCTQQKRGNNFRERWGRRNVVVKLELELPKTNEPKLYENDSEKWQAAEAIKVGSIGEHAETSKAGQSPHSRGKQEAKEGKQAPTPGLRRAVLARVRRGAVVTPWLIVEWGECRRARRGWGKVTALKAETETWNSGTSNSKLAQSRLATQARRETVDTAVQSSGTVLAGKHCGAEADGLRIYHRSDSERRTEERETMAAPCR

SEQ ID NO: 42438 - protein, 737 aa, Zea mays
  Coding DNA Sequence Number=SeqID_659
  Gene Ontology: Mol. function=sequence-specific DNA binding; Cellular component=nucleus; Biological process=regulation of transcription, DNA-dependent
  Homolog annotation: Hit_ID=Q6RF30; Match level="QueryCoverage=99%, HitCoverage=97%, E-value=0.0, Identity=85%"; Hit description=Rolled leaf1
  Pfam annotation: Domain name=Homeobox; Domain location=3-63; Score =64.6; E_value=3.2e-16; Accession=PF00046.19; Description=Homeobox domain
  Pfam annotation: Domain name=MEKHLA; Domain location=593-737; Score =153.4; E_value=5.9e-43; Accession=PF08670.1; Description=MEKHLA domain
  Pfam annotation: Domain name=START; Domain location=158-316; Score =62.1; E_value=1.8e-15; Accession=PF01852.10; Description=START domain
  Pfam annotation: Domain name=bZIP_1; Domain location=44-104; Score =7.0; E_value=0.027; Accession=PF00170.11; Description=bZIP transcription factor
  Pfam module annotation: Pfam domain module=Homeobox::MEKHLA::START::bZ IP_1; Domain location=3-63::593-737::158-316::44-104
MDSGKYVRYTPEQVEVLERLYIDCPKPSSSRRQQLLRECPILSNIEPKQIKVWFQNRRCRDKQRKESSRLQAVNRKLTAMNKLLMEENERLQKQVSQLVHENAHMRQQLQNSIVPGCQQINADEMLRLHWPNDTSCESNVTTPPNPIRDASNPSGLLAIAEETFTEFLSKATGTAIDWVQMPGMKPGPDSVGIVAISHGCRGVAARACGLVNLEPTKGIEILKDRPSWFRDCRSLEVFTRFPAGNGGTIELIYMQMYAPTTLVPARDFWTLRYTTTMEDGSLVAWSVPEVLRPLYESSRVVAQKMTTVALRHLRQIAQETSGEVVYALGRQPAVLRTFSQRLSRGFNDAISGFNDDGWSVMGGDGIEDVVIACNSTKKIRNTSNAGITFGAPGGIICAKASMLLQSVPPAVLVRFLREHRSEWADYNIDAYLASSLKTSACSLPGLRPMRFSEGQMIMPLAHTVENEEILEVVRLEGQPLTHDEALLSRDIHLLQLCTGIDEKSVGSSFQLVFAPIDEHFPDDAPLISSGFRVIPLDDGVSSGRTLDLASSLDVGSAAPQASGESPDDCSLRSVLTIAFQFPYEMHLQDSVAAMARQYVRSVISAVQRVSMAISPSQSGLNAGHRMLSGFPEAATLARWEKPMFTFANKAGLDMLETSLVALQDLTLDKIFDESGRKALFSDISKLMEQGYAYLPSGVCMSGMGRHVSFDQAVAWKVLGEDSNIHCLAFCFVNWSFV

SEQ ID NO: 42439 - protein, 77 aa, Zea mays
  Coding DNA Sequence Number=SeqID_660
  Subcellular localization annotation: CTP_CleavageSite=50; ConfidenceScore=5.06e-01
MALLDIDPLALGHPSPLGPLRHKGLSGPSGVLGCVALSKALNEALSKGVRVVGPSKADVATVELSVTMRYGWASFAT

SEQ ID NO: 42440 - protein, 91 aa, Zea mays
  Coding DNA Sequence Number=SeqID_661
MLDEAARWDDLVTGLCSATRGTKGARIAAIITTPSRAKYRYATHLSFTLELDKSTNNIVEYKVVILGLYKQRPQRKDLCSKDGLQNYHRAK

SEQ ID NO: 42441 - protein, 136 aa, Zea mays
  Coding DNA Sequence Number=SeqID_662
  Gene Ontology: Mol. function=nucleotide binding; Cellular component =intracellular; Biological process=signal transduction
  Homolog annotation: Hit_ID=Q5W796; Match level="QueryCoverage=81%, HitCoverage=31%, E-value=1e-41, Identity=86%"; Hit description =Putative GTP binding protein
MSLGGGLNMYVSVSSAILCCFLSYGIYFKRKKTGGISFNTTVPLTHIDEKLCYQILHEYKIHNAEVGGLAFGRVLFREDATVDDLIDVIEGNRKYIKCVYVYNKIDVVAELGQTTCENVGGDGPSEGVYKATGPAA

SEQ ID NO: 42442 - protein, 101 aa, Zea mays
  Coding DNA Sequence Number=SeqID_663
MDSKGKRKVTDDKENIPIDDIPKGGEKPIESGSNKKKDGKKKERIRKIIYYEINASSSSHKDNDDSSSSKKKTVKRKMEEYNKVNGFGQCQRNLGHIEKRS

SEQ ID NO: 42443 - protein, 191 aa, Zea mays
  Coding DNA Sequence Number=SeqID_664
  Gene Ontology: Mol. function=receptor activity
  Homolog annotation: Hit_ID=Q8H7Q9; Match level="QueryCoverage=99%, HitCoverage=13%, E-value=2e-72, Identity=75%"; Hit description =Putative kinesin-related protein
VPAISDRLFLSIVSVDNGKTIAKSTKVASRSGICQWPDTILEPIWFSKDQVSKEFQECQYRIIVSLGSAKSGILGEILLNLSNFLNLADPTAISLPLKRCNSGTVLQLKVQCLGTKSKLSGVRSLRDMAPRLDDRSPTPTNDELDNRSDCSDGMFNKGVHSSSENHLGGTYQDESGNIGNRFLSIRVPSEF

SEQ ID NO: 42444 - protein, 421 aa, Zea mays
  Coding DNA Sequence Number=SeqID_665
  Gene Ontology: Mol. function=transferase activity; Cellular component= membrane
  Homolog annotation: Hit_ID=Q10SX7; Match level="QueryCoverage=99%, HitCoverage=98%, E-value=1e-150, Identity=65%"; Hit description =Exostosin family protein, putative, expressed
  Pfam annotation: Domain name=Exostosin; Domain location=76-375; Score= 250.0; E_value=4.8e-72; Accession=PF03016.6; Description=Exostosin family
  Subcellular localization annotation: CTP_CleavageSite=63; ConfidenceScore=5.35e-01
MGDPRPRRSPAAPTLADKLRKHSTWLLLLLWFAVSLALFLSATPPAAAPLRRSSFLRSKPRALAATGAAAAPPVRIYVYDLPARFNRDWAVADARCARHLFAAEVAVHEALLAYTGRAARPEDADLFFVPVYVSCNFSTPNGFPSLSHARGMLADAVDLVQAGMPYWNRSAGADHVFVASHDFGACFHPMVSVSGEKLPTFSGLSLLRAHHTCQEVEHVVIPPHVPPEVEHELPEPEKAQRDIFAFFRGKMEVHPKNISGRFYSKKVRTELLQHYGRNRKFYLKRKRFDNYRSEMARSLFCLCPLGWAPWSPRLVESVLLGCIPVIIADNIRMPFPSVLQWPEISLQVAEKDVANLEVVLDHVVATNLSVIQKNLWDPVKRKALVFNRPMEVGDATWQVLRELEVLLDQSQRRRYGGSWRA

SEQ ID NO: 42445 - protein, 638 aa, Zea mays
  Coding DNA Sequence Number=SeqID_666
  Gene Ontology: Mol. function=ATP-dependent helicase activity; Cellular component=nucleus; Biological process=rRNA processing
  Homolog annotation: Hit_ID=Q8H7P8; Match level="QueryCoverage=99%, HitCoverage=91%, E-value=0.0, Identity=72%"; Hit description =Putative DEAD/DEAH box RNA helicase protein
  Pfam annotation: Domain name=DEAD; Domain location=277-455; Score =138.1; E_value=2.3e-38; Accession=PF00270.19; Description=DEADDEAH box helicase
  Pfam annotation: Domain name=Helicase_C; Domain location=522-601; Score=81.5; E_value=2.6e-21; Accession=PF00271.21; Description =Helicase conserved C-terminal domain
  Pfam module annotation: Pfam domain module=DEAD::Helicase_C; Domain location=277-455::522-601
  Subcellular localization annotation: CTP_CleavageSite=38; ConfidenceScore=5.20e-01
MEVAGAQARAVPLLLRNTASLRTSVSVSCTGSRRSWVAAATAEGDETRGFDKVPMDTPGAYRLVDRDTGRSVIVWGGTDDSDEASMPSPAVLSRTTDRRHSQGVGGGTGIGNFGRFKAQKIKSLVTRSAHRKRESSNRSSTAWSDESSFNGSDDEEESYFERRKHVSDSERHPKMSSGSRDGRTRSAHSLSSVLSQYRGDDDTDFPGSEATSGSKRWGNVADVTYGRQNQKQREPLNFPQRKGPLDGGFFSRRSFKEIGCSDEMLGALRNFDFPRPSHIQAMAYGPILEGRSCVVADQSGSGKTLAYLCPIIQNLRNEEVQGLHKSSPRNPRVIVLTPTAELASQVLNNCRLISKSGVPFRSMVATGGFRQKTQLESLDQELDVIIATPGRFLYLLQEGFVQLANLRCVVLDEVDILFGEEGFEQVLHQLITVAPVTTQYLFVTATLPLDIYNKVVETFPDCEILVDCSGDDNEEKNPETAFSNKKTALLKIIEESPVRKTIVFCNKIETCRKVENALRRVDRKASQIKVLPFHAALDQAQRIANIKEFLNKQTADSMFLVCTDRASRGIDFANVNHVVLFDYPRDPSEYVRRVGRTARGASGNGKAFVFAVGKQVSLARRVMERNMKGHPLHDVPCV

SEQ ID NO: 42446 - protein, 889 aa, Zea mays
  Coding DNA Sequence Number=SeqID_667
  Gene Ontology: Mol. function=structural constituent of muscle; Cellular component=smooth muscle contractile fiber; Biological process=smooth muscle fiber development
  Homolog annotation: Hit_ID=Q8H7Q9; Match level="QueryCoverage=99%, HitCoverage=64%, E-value=0.0, Identity=73%"; Hit description =Putative kinesin-related protein
  Pfam annotation: Domain name=Filament; Domain location=522-819; Score= -184.2; E_value=0.094; Accession=PF00038.11; Description=Intermediate filament protein
MKEDEITIPREKSDRALNIGNADGAASNAIYLDLEKENEILRAKIQELEKDCSELTDENLELIYKLKENGLTKGQVPHIANNNELQFKKLTSRIHQLEEDLRNKEMLRDDSFSESSMSNADEIQRKCADLELKVLNFRSQTCELEEKFRKCQEELEQRNLELSALRRKINGLHSNELEVCESGATWKYQARIADLEDTEPETDTLKARFELQLQENDDLRRSKVEMQNFISEFQAEKSQLEERLSASLKESSITSKCLDEVRKDILVLSSSIDSHVSTNKLLERNLVELESCKAELELHVSELEQENIELSERISGLETQLTYVTNEKESSELQLHDSRSLIINLKDKVECQQSEMETQRLQFKQKQQESQRRLCEAQDDSEVLRRSNCKLQSTVESLIEECSSLQNLIADLKRQKLELHGHLTQKEQELDESKKKNFEFSKTVEFLEAKLLSLQKDISSKEQSLLSELENIFQEHMEQEERINRAHFMLNKIEKEKTLEVENLEREVVSLAAQVSSTHEERESATLNAIQEVSVLRADNAKLEANLQDVSEQLRCYESQLEDLRKESKSKIKGLVDSLNASKQSEEMLTSDAEHMKKLMEAAKSNEDALRKTSNELELKLKSSDYVKQQMLEEISGLKLQVQKIMNLQDEVSKLQSSLDEAKFEKGKLEEFVRSVTEECQELKAQKAMLTDKVSYMQETLRNGEEENRNRIAMHAKLMRLESDLTALEASHVHEAELKNELSRIKRSNSEYQRKIQSLGQENEDLTRRVQIMEKGFERMSHAKENLGKQEIGGDNQEAIQSTIQLLEIKLAEALEENKIYRAQQKSSMSEGQPAGGDGKEGNTDRILQLEGELRDMKERLLNMSLQYAEVEAQRERWASSSRAMLQHQ

SEQ ID NO: 42447 - protein, 187 aa, Zea mays
  Coding DNA Sequence Number=SeqID_668
  Homolog annotation: Hit_ID=P93406; Match level="QueryCoverage=52%, HitCoverage=83%, E-value=1e-08, Identity=45%"; Hit description=EL2 protein
MSASPELYRPAEAPAFSPSCATQPLVFAGDDYCCRTPTGSGICYLREPTTCPPAPRKPPPPPPMCRKRLFQAADQQLAEAGPVPVISIRLDELERLFRPCPPPTTTTTDKRRRSGSGPSPRSATKHGQSSPHLEELASYPAGTASSTKFQPLFTLANHFFALFSQSSKTLDIEAEGEQVGEAPWGKV

SEQ ID NO: 42448 - protein, 160 aa, Zea mays
  Coding DNA Sequence Number=SeqID_669
  Homolog annotation: Hit_ID=Q6QP51; Match level="QueryCoverage=21%, HitCoverage=15%, E-value=5e-08, Identity=76%"; Hit description =Putative growth-regulating factor 1
MEAQAHASCNRRAECFVHATAPPLAPLPRLLDCGTNTAGRSSGPVVSRAHVPSGGNERTLSHGVKTTRPGTGGTSGRRSGRRFAFAIITASKKAGPSEGFDSRLRSRGLYTHYWSEVRRPAPRKGSTAASGYSGSAPITDQGFEGWPPKGSQPPQTPSEG

SEQ ID NO: 42449 - protein, 138 aa, Zea mays
  Coding DNA Sequence Number=SeqID_670
MVAFFHGATHGGGPGHDAALVAAQTAALGTLVAGAGHGEALAAAQAAAPGTPMAVAGHRPPMDNELPAWFQGETTTFGADWMSGDSSHVAATPSTTIGEQRTFEVVPTQRKGGRVPRPPLVATRSLDVNLTDNSMSYK

SEQ ID NO: 42450 - protein, 237 aa, Zea mays
  Coding DNA Sequence Number=SeqID_671
  Homolog annotation: Hit_ID=Q10RH2; Match level="QueryCoverage=92%, HitCoverage=46%, E-value=1e-105, Identity=83%"; Hit description=XS domain containing protein, expressed
  Pfam annotation: Domain name=XS; Domain location=82-190; Score=68.1; E_value=2.9e-17; Accession=PF03468.5; Description=XS domain
MYIIVLDSIPSYMAANPTSSKDFADVHGLVMHAYNPPNADSLVDHLGLHKALCVLMGWDYTKVPENFKGYQSLPSDLVQASREDLIVWPPTVIIHNTSTGRKKDGRLEGLGNKEMDKKMTELGFSGGKSKSLYGKEGHMGLTLIKFANNSSGLKEAERLAEYLERQDRGRIGWSRAHASRSVDSDQNPLLVETDTRTAEKKRILYGYLAIASDLDELDSDSRKRASLQSRREFDPNE

SEQ ID NO: 42451 - protein, 102 aa, Zea mays
  Coding DNA Sequence Number=SeqID_672
  Gene Ontology: Mol. function=structural molecule activity; Cellular component=protein complex; Biological process=microtubule-based movement
  Homolog annotation: Hit_ID=P14641; Match level="QueryCoverage=88%, HitCoverage=26%, E-value=8e-18, Identity=58%"; Hit description =Tubulin alpha-2 chain
MAVAWSKALALVQPLLWSFPPTPSGSTHTDVSIMLDNEAIYDIYRHSLDIERFNGALNEFQINLVPYPKDPLHALLLCTSDLFGEGLARAIVVYGRDHQQHV

SEQ ID NO: 42452 - protein, 535 aa, Zea mays
  Coding DNA Sequence Number=SeqID_673
  Gene Ontology: Mol. function=protein serine/threonine kinase activity; Cellular component=membrane; Biological process=protein amino acid phosphorylation
  Homolog annotation: Hit_ID=Q9FPR5; Match level="QueryCoverage=94%, HitCoverage=57%, E-value=0.0, Identity=74%"; Hit description=EDR1
MALSASSNSDCAGGLDGEQIRKAKLMSLDRFAAHRDETHTAEFLSRRYWDYNFLDYHEKVIDGFYDIFGSSIESSRQGKMPSLADLQTGIGDLGFEVIVVNRAIDSTLQEMEQVAQCILLDFPVANIALLVQRIAELVTDNMGGPVKDANDMLTRWLEKSTELRTSLQTSLLPIGCIKIGLSRHRALLFKILADSVGIPCKLVKGSNYTGGDDDDAINIIKMDNEREFLVDLMAAPGALIPADILSWKGNSLNSNRKLGLNRTAGSSSTVDANVDPTVLPLEPKGGQLPLFSSGDWMSDIDSGYEAAEIAASTQTSSGVTPSVSAGSVFGSSWMLVNHDQSDGPSTSAGTSSQQKVVPQSEHQRNLNRLPDLQEIPESKYLFADLVPSGDNKSKKTSVPFKGPDHRNNELQKRRENIVPNAGRPQQRLVMKNWSPYNDVSNNKQYNYVEDSFARRNVGNNAASSSSQMPRPAVRSNLNSGLHNDASYHNYDSIMAGTSAMKITSTAETGKVPERVLRGDLDKGQDIIIDWRINMS

SEQ ID NO: 42453 - protein, 50 aa, Zea mays
  Coding DNA Sequence Number=SeqID_674
MAAVRMLWIVDLQYWTDENYLYSCFTHIGEEILHFINVSFHGFIVVVFLC

SEQ ID NO: 42454 - protein, 141 aa, Zea mays
  Coding DNA Sequence Number=SeqID_675
MATSHATADVLAVCQQWSARIQMRVSKMLLERKEKKKPRPKPQKWPAQSRTDFFYIVIKTTTASRSFHSAEDVPKLSRDFPRDGQITVIVEVNYPGTKLLSSFLCNASGQHMASCHATRSRSSSLASKNHLELPTVGDIYQ

SEQ ID NO: 42455 - protein, 665 aa, Zea mays
  Coding DNA Sequence Number=SeqID_676
  Gene Ontology: Cellular component=membrane
  Homolog annotation: Hit_ID=Q10R19; Match level="QueryCoverage=56%, HitCoverage=90%, E-value=1e-167, Identity=70%"; Hit description =Exostosin family protein, putative, expressed
  Pfam annotation: Domain name=Exostosin; Domain location=229-516; Score=60.4; E_value=5.8e-15; Accession=PF03016.6; Description =Exostosin family
MFAIRSTKCPVAFVGVAGTLVVLITAVHVFMVPILPASFYYFGSRSSISHPKNVLPAVEVVDSRLKGCFPSDSYGAVAFRGAPWKAEIGRWLAGCHANSSSVDVTEVSLLRQAMGAKRCVKDCSARAHCDKTRAMCFCGPGTKYPDRPVAEACGFKTISVRHVLNAAASTSALDMGIAVVVSVNIPSAYSLAYDWPSWLQTPVNLPDLKTLNSTTIGVKAVVQKKRPLIYVYDLPAEFDSHLLEGRHYRFQCVNRIYDDMNRTIWTQQLYGAQIALHESILASPHRTLNGDEADYFYVPVLDSCLITRSDDAPHLLLPRDLRRRSYHALEYYRMAHGHIAQQYPYWNRTSGRDHIWFFSWDEGACYAPKEIWKSMMLVHWGNTNTKHKNSTTAYWADNWDDIPLDKRGNHPCFDPRKDLVLPAWKEPNPGAIWLKLWARYSMGIRQKLAAEFGSTPNKQGRLGRQHAADDGIFLPYENVLNYNSFAVRIQEDDIPGLISTLRGINDTQVEFMLGNVRQMWQRFFYRDSILLEAQRQKKLFSEEAPWSVEVSKLPDDDDVFATFIQAGLDQEAELVVTSRLDRKRGTHWSAPSSSLSPNRNKLESWANCELAPHPSVTKSLANRGSLVVVGPPSGSSFVGAVEGSKEGLGVPPGSLDEVRSLIWRE

SEQ ID NO: 42456 - protein, 310 aa, Zea mays
  Coding DNA Sequence Number=SeqID_677
  Gene Ontology: Mol. function=hydrolase activity, acting on carbon -nitrogen (but not peptide) bonds; Cellular component=cellular _component; Biological process=nitrogen compound metabolic process
  Homolog annotation: Hit_ID=Q10R10; Match level="QueryCoverage=90%, HitCoverage=91%, E-value=1e-140, Identity=86%"; Hit description =Hydrolase, carbon-nitrogen family protein, expressed
  Pfam annotation: Domain name=CN_hydrolase; Domain location=31-209; Score=193.3; E_value=5.8e-55; Accession=PF00795.12; Description =Carbon-nitrogen hydrolase
MASAPNSSFRPEEARYPPALELPIPRLSKFKVALCQLSVTADKSRNIAHARAAIEKAASDGAKLVVLPEIWNGPYSNDSFPEYAEDIEAGGDAAPSFSMLSEVARSLQITLVGGSIAERSGNNLYNTCCVFGSDGQLKGKHRKIHLFDIDIPGKITFKESKTLTAGQSPTVVDTDVGRIGIGICYDIRFQELAMLYAARGAHLLCYPGAFNMTTGPLHWELLQRARAADNQLFVATCAPARDTSAGYVAWGHSTLVGPFGEVIATTEHEEATIIADIDYSLIEQRRLARTTSALQACSYYFVHEMHVYGF

SEQ ID NO: 42457 - protein, 363 aa, Zea mays
  Coding DNA Sequence Number=SeqID_678
  Gene Ontology: Mol. function=binding; Cellular component =mitochondrial inner membrane; Biological process=transport
  Homolog annotation: Hit_ID=Q10R11; Match level="QueryCoverage=89%, HitCoverage=75%, E-value=1e-120, Identity=71%"; Hit description =Mitochondrial carrier, putative, expressed
  Pfam annotation: Domain name=Mito_carr; Domain location=168-259; Score=82.8; E_value=1.1e-21; Accession=PF00153.17; Description =Mitochondrial carrier protein
  Pfam annotation: Domain name=Mito_carr; Domain location=270-360; Score=80.4; E_value=5.6e-21; Accession=PF00153.17; Description =Mitochondrial carrier protein
  Pfam annotation: Domain name=Mito_carr; Domain location=73-157; Score= 37.3; E_value=5.3e-08; Accession=PF00153.17; Description =Mitochondrial carrier protein
  Pfam module annotation: Pfam domain module=Mito_carr::Mito_carr::Mito_ carr; Domain location=168-259::270-360::73-157
MDDAHSFHRQSPVAPAPSRNEELNWKEAVLEETMSFGTVGMEEESGAAAAAAAAEEIRRLPAEVNWEMLDKSRFFVLGAALFSGVSAALYPAVVVKTHLQVAPPPQAARATAAAILRRDGLRGFYRGFGASLGGTVPARALYMAALEATKSSVGPAAVRLGVSEPAASAAASAAAGVSAAVAAQVVWTPVDVISQRLMVQTPACCRYRGGVDACRKILLADGVRGLYRGFGLSILTYAPSNAVWWSTYAVAQRCLWRAVGPERSESCASLMAVQGASAAVAGGAAALVTMPLDTVKTRLQVMEADAARPTLASTVRGLLREGGWAACYRGLVPRWGSMSLSAATMVTTYEFLKRLSAKDGSLG

SEQ ID NO: 42458 - protein, 189 aa, Zea mays
  Coding DNA Sequence Number=SeqID_679
  Gene Ontology: Mol. function=nucleic acid binding; Cellular component= mitochondrion
  Homolog annotation: Hit_ID=Q6K456; Match level="QueryCoverage=66%, HitCoverage=31%, E-value=4e-65, Identity=90%"; Hit description =Putative plastid protein
  Subcellular localization annotation: CTP_CleavageSite=52; ConfidenceScore=5.56e-01
MASASRALLLSRALQAGASRRVPALLRPVAAAASLLPAVAGPAGAALGARVRCFATQPATSSLRDSSPNWSNRPPKETILLDGCDFEHWLVIMEPPPGDASNPDITRDEIIDSYIKTLAQVVGSEEEARQKIYSVSTRHYFGFGALVSEELSYKLKEIPKVRWVLPDSYLDVKNKDYGGLRCKDITVPG

SEQ ID NO: 42459 - protein, 104 aa, Zea mays
  Coding DNA Sequence Number=SeqID_680
  Gene Ontology: Mol. function=transferase activity
  Homolog annotation: Hit_ID=Q7XXN5; Match level="QueryCoverage=88%, HitCoverage=21%, E-value=6e-40, Identity=87%"; Hit description =Putative anthranilate N-benzoyltransferase
MTLHPFVVTYKMQMAIIYAFPPPAPSTAAIENGLAAVLAEYRAFAGELGEAPDGTPAVLLNDRGARLVEATADADLVDMAPAKPTPELLRLHPDIERELRSKRC

SEQ ID NO: 42460 - protein, 445 aa, Zea mays
  Coding DNA Sequence Number=SeqID_681
  Gene Ontology: Mol. function=transferase activity; Cellular component= nucleus; Biological process=flavonoid biosynthetic process
  Homolog annotation: Hit_ID=Q7XXN4; Match level="QueryCoverage=99%, HitCoverage=100%, E-value=0.0, Identity=77%"; Hit description =Putative anthranilate N-benzoyltransferase
  Pfam annotation: Domain name=Transferase; Domain location=1-444; Score=174.1; E_value=3.6e-49; Accession=PF02458.6; Description =Transferase family
MEVKVLSSKLVKPSYPAGAPRPDTTEHVPSSVFDKATYHMQMAIIYAFSPPVPSPDAIERGLAAVLGAYRLFAGQVRPGPDGAPGVLLNDHGARLVEASVDARLADIAPTKPSPAVLRLHPDLDGSDIEEPVVQVQLTRFACGSLAVGFTANHAVADGHATSDFLVAWGRAARGLPVGPSPPVHRPGLFPPRHDPPRAGFEHRGVEYYKPAPSSAHVHVHGHGDTTTQHSIVIHKAHFTKDFVAGLRARASEGRGRPFSRFETILAHVWRTMTRARGLGSNPLQTSTIRISVDGRPRLAAAPADYFGNLVLWAFPRATVGSLLGRPLKHAAQVIHDAVARVDGAYFQSFVDFAGSGAVEKEGLETTALLKDVLCPDLEVDSWLTFPFYELDLGAGNPSYFMPSYFPTEGMLFLVPSYLGDGSVDAFVPMFEQNLEAFKQCCYSME

SEQ ID NO: 42461 - protein, 54 aa, Zea mays
  Coding DNA Sequence Number=SeqID_682
  Subcellular localization annotation: CTP_CleavageSite=48; ConfidenceScore=5.08e-01
MTISTSLFGFKPCDPFQSGFFSRANTCNAFSNTTDDTEPLSQFECPLKVSNDSG

SEQ ID NO: 42462 - protein, 137 aa, Zea mays
  Coding DNA Sequence Number=SeqID_683
  Homolog annotation: Hit_ID=Q10QZ1; Match level="QueryCoverage=51%, HitCoverage=27%, E-value=1e-07, Identity=52%"; Hit description=YGGT family protein, expressed
  Subcellular localization annotation: CTP_CleavageSite=80; ConfidenceScore=5.17e-01
MAMQCSTILAFLVLNAFTSTAAALPAELPSCSATAQHHQRTAVSPCSAPHEATLSQRKWMRRMRSQKPQGDDERHCNSARSARGRSKLRRGVDIRKAMSRGKVATCPRPGVRGSGGHVGFAAAFEEGGPEGAPGGGV

SEQ ID NO: 42463 - protein, 381 aa, Zea mays
  Coding DNA Sequence Number=SeqID_684
  Homolog annotation: Hit_ID=Q10R09; Match level="QueryCoverage=72%, HitCoverage=90%, E-value=7e-36, Identity=42%"; Hit description =Expressed protein
MERPWRDKDKGAAAPAAGRARRYGDQPSFSSTLLDAIYRSMDEPDDGVTSSSSTAAKKQNQDLRHSCYYYKASLAAGSYRGSSRAAAPRGPQAATTSSSSDQCSSYGGFSSSEAESSQHRRLRPIRTSLATTAVAVAAPALAPEKKKAGVSIRARLRDLRRKPASPGPGARLAGFLNAIFSGRRAPPSASSCSRSCLSETPSTRGQPKRTVRFLDSDGGGERRRTVPVGVAPELEQMLLHRMEVDSGDDDDDESSDASSDLFDLENFAAVDPDGGAAYSDELPVYETTRLVLGHRAIGHGARTTCAKRDVQIRGSLWCGTIGEASHRFDTRAVSCRRCASALQRESPGQESFPVPQQGLSLGGVVTSKNQNHSGFFFNYKD

SEQ ID NO: 42464 - protein, 346 aa, Zea mays
  Coding DNA Sequence Number=SeqID_685
  Gene Ontology: Mol. function=N-acetyltransferase activity; Biological process=metabolic process
  Homolog annotation: Hit_ID=Q10R02; Match level="QueryCoverage=68%, HitCoverage=84%, E-value=1e-75, Identity=56%"; Hit description=GCN5 -related N-acetyltransferase, putative, expressed
MEEGNGDNEINERRKEPWDFRASFRHWVSLVQLHLHAIDFVTGKTTQSVQCRITLSPFPFFAQNLAELASSITSCLDRMLIVPQFHAQSFFSPRKDESVISTDGGNEETDTDSLHVARGLSHPGLSSSLSNKASVVPTPLLPSGQSDLRFNRLRPSIDESDCKYKRLFGCYVAREAVIDEEYWIAAWLRAEDQYENESGNRYVESFKRKFASKEFHALKKRCNTQHREKYICLVAVKNDDIRRTVLNSVVGTLDVCVRHPLYGEKFPEKLYLEVIHRSLENRLFTVEFISLISQNLGAENIYIHVHKDNLPAWRLYDQIGFKYKCTFGLAEGKKYECDAKAKSRFA

SEQ ID NO: 42465 - protein, 489 aa, Zea mays
  Coding DNA Sequence Number=SeqID_686
  Gene Ontology: Mol. function=pepsin A activity; Cellular component =endoplasmic reticulum; Biological process=proteolysis
  Homolog annotation: Hit_ID=Q5Z4D7; Match level="QueryCoverage=99%, HitCoverage=100%, E-value=4e-78, Identity=40%"; Hit description =Putative nucleoid DNA-binding protein cnd41
  Pfam annotation: Domain name=Asp; Domain location=146-487; Score= -200.5; E_value=0.092; Accession=PF00026.14; Description=Eukaryotic aspartyl protease
  Subcellular localization annotation: CTP_CleavageSite=19; ConfidenceScore=5.21e-01
MTPSSVAFLFFCVLIILLPAQHGHAASSHASYKLGSRQIFFKTPSKSPANSKQASTATTCSSFANGLANNKLPVVHRQSPCSPLHGLPSLTAADVLRRDTSLIRRRFALQSSAVSAPASAPAPSPAPTIIPVNGSSDGRTLTGALDYSVLVSYGTPEQQFPVFLDTFLDVSLLRCKPCASGSNSCDPAFDTSRSTTFTNVPCGSPDCPTTNCSGGSVCPYDNPIFSIEGAFAQDVLTVAPSAAVHDFTFVCVDVDHPSDDMPEAGILDLSRDRNSLPSRLPGPATFSYCLPHSPSSPGFLSLGGDATVGEDNRTSHAPLVSNGHPELANMYFIDLVGMSLGGDDLPIPTGTFGNASTLLNVGTTFTMLAPDAYTPLRDAFQEEMAQYNRSSPGFAGFDTCYNFTGLDVIQVPLVEFKFGNGESFLIDGDQMLYFDDPAVGPFGMTCLAFSALKDGGGVLSAVIGSYTQVSTEVVYDVAAGKVGFIPGSC

SEQ ID NO: 42466 - protein, 230 aa, Zea mays
  Coding DNA Sequence Number=SeqID_687
  Gene Ontology: Mol. function=pepsin A activity; Biological process =proteolysis
  Homolog annotation: Hit_ID=Q5Z4D8; Match level="QueryCoverage=94%, HitCoverage=42%, E-value=2e-36, Identity=42%"; Hit description =Putative nucleoid DNA-binding protein cnd41
MPEAGILDLSRDRNSLPSRLAGPATFSYCLPHSPSSPGFLSLGGDATVGEDNRTSHAPLVSNGHPELANMYFIDLVGMSLGGDDLPIPTGTFGNASTLLNVGTTFTMLAPDAYTPLRDAFQEEMAQYNRSSPGFAGFDTCYNFTGLDVIQVPLVEFKFGNGESFLIDGDQMLYFDDPAVGPFGMTCLAFSALKDGGGVLSAVIGSYTQVSTEVVYDVAAGKIRKDSSEAP

SEQ ID NO: 42467 - protein, 108 aa, Zea mays
  Coding DNA Sequence Number=SeqID_688
  Homolog annotation: Hit_ID=Q1RTN3; Match level="QueryCoverage=48%, HitCoverage=14%, E-value=1e-07, Identity=58%"; Hit description=ATP -requiring DNA helicase RecQ
MPNRELYLDQYGVAWPRRVVIQLGARACRVGVRGYCSSRSRRLWPFGWGCGVPVFVGSWEQMARLIRLHERDLFCLMPTGGGKSMCYQISALVKTCIVLVISSMIGHM

SEQ ID NO: 42468 - protein, 61 aa, Zea mays
  Coding DNA Sequence Number=SeqID_689
MGWSWEYFIFIYTFTADPERQWAADPLLSMGAALLLLTADEGWYATEHFGLDVIFHSRMRQ

SEQ ID NO: 42469 - protein, 579 aa, Zea mays; identical to SEQ ID NO: 42271
  Coding DNA Sequence Number=SeqID_690
  Gene Ontology: Mol. function=transferase activity, transferring glycosyl groups; Cellular component=integral to membrane
  Homolog annotation: Hit_ID=Q8H038; Match level="QueryCoverage=97%, HitCoverage=99%, E-value=0.0, Identity=74%"; Hit description =Xyloglucan galactosyltransferase KATAMARI1 homolog
  Pfam annotation: Domain name=Exostosin; Domain location=124-472; Score=514.8; E_value=9.8e-152; Accession=PF03016.6; Description =Exostosin family

SEQ ID NO: 42470 - protein, 1065 aa, Zea mays
  Coding DNA Sequence Number=SeqID_691
  Gene Ontology: Mol. function=protein serine/threonine kinase activity; Cellular component=integral to membrane; Biological process=protein amino acid phosphorylation
  Homolog annotation: Hit_ID=Q6Z8Y3; Match level="QueryCoverage=94%, HitCoverage=97%, E-value=0.0, Identity=57%"; Hit description =Putative CLAVATA1 receptor kinase
  Pfam annotation: Domain name=LRRNT_2; Domain location=56-97; Score =57.2; E_value=5.4e-14; Accession=PF08263.3; Description=Leucine rich repeat N-terminal domain
  Pfam annotation: Domain name=LRR_1; Domain location=101-123; Score =4.4; E_value=44; Accession=PF00560.23; Description=Leucine Rich Repeat
  Pfam annotation: Domain name=LRR_1; Domain location=125-144; Score =1.4; E_value=1.5e+02; Accession=PF00560.23; Description=Leucine Rich Repeat
  Pfam annotation: Domain name=LRR_1; Domain location=149-171; Score =13.0; E_value=1.1; Accession=PF00560.23; Description=Leucine Rich Repeat
  Pfam annotation: Domain name=LRR_1; Domain location=173-195; Score =14.0; E_value=0.54; Accession=PF00560.23; Description=Leucine Rich Repeat
  Pfam annotation: Domain name=LRR_1; Domain location=197-219; Score =7.2; E_value=13; Accession=PF00560.23; Description=Leucine Rich Repeat
  Pfam annotation: Domain name=LRR_1; Domain location=221-243; Score =11.2; E_value=2.3; Accession=PF00560.23; Description=Leucine Rich Repeat
  Pfam annotation: Domain name=LRR_1; Domain location=245-267; Score =8.9; E_value=6.2; Accession=PF00560.23; Description=Leucine Rich Repeat
  Pfam annotation: Domain name=LRR_1; Domain location=269-291; Score =12.9; E_value=1.1; Accession=PF00560.23; Description=Leucine Rich Repeat
  Pfam annotation: Domain name=LRR_1; Domain location=293-315; Score =6.4; E_value=19; Accession=PF00560.23; Description=Leucine Rich Repeat
  Pfam annotation: Domain name=LRR_1; Domain location=317-339; Score =16.6; E_value=0.091; Accession=PF00560.23; Description=Leucine Rich Repeat
  Pfam annotation: Domain name=LRR_1; Domain location=341-363; Score =11.0; E_value=2.5; Accession=PF00560.23; Description=Leucine Rich Repeat
  Pfam annotation: Domain name=LRR_1; Domain location=365-387; Score =15.5; E_value=0.2; Accession=PF00560.23; Description=Leucine Rich Repeat
  Pfam annotation: Domain name=LRR_1; Domain location=389-411; Score =6.8; E_value=15; Accession=PF00560.23; Description=Leucine Rich Repeat
  Pfam annotation: Domain name=LRR_1; Domain location=413-435; Score =12.8; E_value=1.2; Accession=PF00560.23; Description=Leucine Rich Repeat
  Pfam annotation: Domain name=LRR_1; Domain location=437-459; Score =7.2; E_value=13; Accession=PF00560.23; Description=Leucine Rich Repeat
  Pfam annotation: Domain name=LRR_1; Domain location=461-483; Score =14.0; E_value=0.55; Accession=PF00560.23; Description=Leucine Rich Repeat
  Pfam annotation: Domain name=LRR_1; Domain location=485-507; Score =10.8; E_value=2.8; Accession=PF00560.23; Description=Leucine Rich Repeat
  Pfam annotation: Domain name=LRR_1; Domain location=509-531; Score =2.8; E_value=86; Accession=PF00560.23; Description=Leucine Rich Repeat
  Pfam annotation: Domain name=LRR_1; Domain location=533-555; Score =15.5; E_value=0.2; Accession=PF00560.23; Description=Leucine Rich Repeat
  Pfam annotation: Domain name=LRR_1; Domain location=557-579; Score =11.9; E_value=1.7; Accession=PF00560.23; Description=Leucine Rich Repeat
  Pfam annotation: Domain name=LRR_1; Domain location=581-603; Score =15.7; E_value=0.17; Accession=PF00560.23; Description=Leucine Rich Repeat
  Pfam annotation: Domain name=LRR_1; Domain location=605-628; Score =9.6; E_value=4.5; Accession=PF00560.23; Description=Leucine Rich Repeat
  Pfam annotation: Domain name=Pkinase; Domain location=739-1030; Score= 121.2; E_value=2.9e-33; Accession=PF00069.15; Description=Protein kinase domain
  Pfam annotation: Domain name=Pkinase_Tyr; Domain location=739-1030; Score=90.9; E_value=3.8e-24; Accession=PF07714.7; Description =Protein tyrosine kinase
  Pfam module annotation: Pfam domain module=LRRNT_2::LRR_1::LRR_1::LRR_ 1::LRR_1::LRR_1::LRR_1::LRR_1::LRR_1::LRR_1::LRR_1::LRR_1::LRR_1: LRR_
  Pfam module annotation: Pfam domain module=Pkinase_Tyr; Domain location=56-97::101-123::125-144::149-171::173-195::197-219::221 -243::245-267::269-291::293-315::317-339::341-363::365-387::389 -411::413-435::437-459::...
  Pfam module annotation: Domain location=461-483::485-507::509 -531::533-555::557-579::581-603::605-628::739-1030::739-1030
EEGGGKGAKEKGRAEEPSMASATPMLGSTARLLFPLSFSLALLLLCCSAVCNAAGNDDESTALLAIKASLVDPLGKLAGWNPASASSHCTWDGVRCNARGAVAGLNLAGMNLSGTIPDAILGLTGLTSVVLQSNAFGHELPLALVSVPTLRELDVSDNSFDGHFPAGLGALASLAHLNASGNNFSGPLPPDIGNATALETLDFRGGYFSGTIPKSYGKLRKLRFLGLSGNNLGGALPAELFEMSALEQLIIGYNEFVGAIPAAIGNLANLQYLDLAIAKLEGPIPPELGGLSYLNTVFLYKNNIGGPIPKEIGNLTSLVMLDLSDNALTGTIPLELGQLANLQLLNLMCNRLKGGIPAAIGDLPKLEVLELWNNSLTGALPPSLGGAQPLQWLDVSTNALSGPVPAGLCDSGNLTKLILFNNVFTGPIPAGLTTCATLVRVRAHNNRLNGTVPAGLGRLPRLQRLELAGNELSGEIPDDLALSTSLSFIDLSHNQLRSALPSSILSIRTLQTFAAADNELTGGVPDEIGDCPSLSALDLSRNRLSGAIPASLASCQRLVSLNLRSNRFTGQIPGAIAMMSTLSVLDLSSNSFTGVIPSNFGGSPALEMLNLAYNNLTGPVPTTGLLRTINPDDLAGNPGLCGGVLPPCGASALRASSSESYGLRRSHVKHIAAGWAIGISVSIVACVVVFLGKQVYQRWYVNGRCCDEAVGEDGSGAWPWRLTAFQRLSFTSAEVLACIKEDNIVGMGGTGVVYRADMPRHHAVVAVKKLWRAAGCPDPEEAATADGRQDVEPGGEFAAEVKLLGRLRHRNVVRMLGYVSNNLDTMVLYEYMVNGSLWEALHGRGKGKMLVDWVSRYNVAVGVAAGLAYLHHDCRPPVIHRDIKSSNVLLDINMDAKIADFGLARVMARAEEPVPVSMVAGSYGYIAPECGCRLKVDQKSDIYSFGVVLMELLTGRRPVEPEYGESQDIVGWIRERLRSNSGVEELLDSGVGGRVDHVREEMLLVLRIAVLCTAKSPKDRPTMRDVVIMLGEAKPRRKSSSATVAATVVNKDRPVFTTSPDSSYL

SEQ ID NO: 42471 - protein, 71 aa, Zea mays
  Coding DNA Sequence Number=SeqID_692
  Subcellular localization annotation: CTP_CleavageSite=47; ConfidenceScore=5.19e-01
MAASRPHEFKKSIIDAKDLTIFTVMKLLRKKTSSNGSFLARQNPSLCLMSIRQLFFINTSFMGWLSQQLLS

SEQ ID NO: 42472 - protein, 106 aa, Zea mays
  Coding DNA Sequence Number=SeqID_693
MTGDKQRQKLKQKPSSKISNTYIKKVDKKTATPYLIKKKKNGKVIAIKANKQANKGKGAKRIWVPKEIISTMKSTKKVWIPKEKRQRSAATGANGRLTWRAPDTAQ

SEQ ID NO: 42473 - protein, 282 aa, Zea mays
  Coding DNA Sequence Number=SeqID_694
MALALTLVVTGLKGREVGEGEEEMAAAVSSAGTRVAEERKGHGWLDRLGASKARRRRPKVEEEPRGRGGPTPVQKVNVSNSVMFADDDDELPFSHDAEDKSQSCWNDFNVLSKLASRECKDWKCVPLLWYLTMVQLEPSKLPVAFSKAVLWGLSHISVLEPGLATELSMPVNTWLSSQTGEVSSAFTWQVPNGADDGGGGDCINVVKVSQLCTLLLRIFKRKINGKHHTTLGEGVMVARSVRDWRGVSMGRNVGWGLLPTAEQEESFSLLILAYFISHPLIT

SEQ ID NO: 42474 - protein, 268 aa, Zea mays
  Coding DNA Sequence Number=SeqID_695
MAAARRIDLADRWRRMQEDEDADDGGESSAAKHRRLIRAKEEWFSHCYTFLINLPKEDHIWCGYADIMSPFMETFHGFFDDEDENSSLRIMWTRVSREMGICTQCVCEHHQAQGFFNTEYQSDTVDPLLKVLRLLDEERITGHLIHINTKLQLKEYDPSCHGAEVVSIMFEVLMYPVLLDDQSLANQFQMFIEKIDETYEVSLSTNQQYPGVYALLFFKSCKARAIGLRLARSMGKLSSTLELELEAIPNAPLVVPQLLSQKLRESLA

SEQ ID NO: 42475 - protein, 162 aa, Zea mays
  Coding DNA Sequence Number=SeqID_696
MALFSQSQLSLGAPDCPVVHRTVRWCTGQCPVCQAGSGELAALGNKLPAYGYNSPDCLVCTGQSGEPTVGQANGRLRDPRETRGRANGREGAPDSVRCANGSKAANGRLRQIRKEIRTGQCPVVHRTVRGFRIKTIVRENTNKTGQKRPRGSGAQKVSQKHP

SEQ ID NO: 42476 - protein, 120 aa, Zea mays
  Coding DNA Sequence Number=SeqID_697
  Gene Ontology: Mol. function=DNA binding; Biological process=DNA integration
  Homolog annotation: Hit_ID=O24587; Match level="QueryCoverage=75%, HitCoverage=8%, E-value=2e-36, Identity=80%"; Hit description=Pol
MGKRNLFTFCAKNKDSHDTIIFGDGNQGKVKGIGKIAIPTEHSISNVFLVESFGYNLLYVSQLCHMGYNCLFTNVDVTVFRRSDGSLAFKGVSGRCWSSWIAIQIKSRRLEGLEFNPNLK

SEQ ID NO: 42477 - protein, 189 aa, Zea mays
  Coding DNA Sequence Number=SeqID_698
MDPYEDEEIVYCDNHITLTVILRSVLPNMLASLRKRRTETTMWRVQRVCEAYQLHCQVWSLEFRETVEAKTQQKGANGFRRSKELLTQQVNIVIFDAPSNVSSVTVDCAILLSVKEMQIEKQETLSKREKSDWRSLVKFSQTCTSLWGIGLFGVHQTVSGAQAGALSKLAALGKNSGSRGYNSPDCPMC

SEQ ID NO: 42478 - protein, 196 aa, Zea mays
  Coding DNA Sequence Number=SeqID_699
MKMKTINQLEARAARIILLNKLTRHKSDPIYLFSRRGKQEPQRRRQAPAGLILACLRVIDRVAWRCAWWWCLGAANGGVQFASLNGAAQLCALQWDGRGEASGKSGGPGRTSKPYMPLSTPKAEAVCRFNNLHTQKESQMDDRRMEEVVSVGVHRRSGEAETRASAAASSLLIQGKGKPPPTSGDGLRTIIATIGF

SEQ ID NO: 42479 - protein, 219 aa, Zea mays
  Coding DNA Sequence Number=SeqID_700
  Subcellular localization annotation: CTP_CleavageSite=51; ConfidenceScore=5.11e-01
MEEDAWRTNDTGAKKSGTGKNPRRFRRDRDAVDRNSPVSSPSRLPLRHSVSQQLAGAAMQGLGHCTLRHRRDLQRGAISGASAAPARHAGFSGLAGEKGREEKKAAGRERVAATLTESTWGTEIPEATQALFPPSLSPADLRLPLRLWTWIRSAQAGGRAIPYIRRHWLGAGTCASGGWASGTRKIPKVSGTSWAPAPARAAAGRLALEKGVWQLGVWH

SEQ ID NO: 42480 - protein, 186 aa, Zea mays
  Coding DNA Sequence Number=SeqID_701
  Gene Ontology: Mol. function=calcium ion binding; Cellular component =oxygen evolving complex; Biological process=photosynthesis
  Homolog annotation: Hit_ID=P12301; Match level="QueryCoverage=61%, HitCoverage=47%, E-value=4e-15, Identity=37%"; Hit description =Oxygen-evolving enhancer protein 3, chloroplast precursor
  Pfam annotation: Domain name=PsbQ; Domain location=16-186; Score =34.2; E_value=1.4e-07; Accession=PF05757.2; Description=Oxygen evolving enhancer protein 3 (PsbQ)
  Subcellular localization annotation: CTP_CleavageSite=63; ConfidenceScore=5.76e-01
MASRLAVQALSASLLSLAETTSPKPPKQQSQRPRAASSSSSSRRRLAATAGAIILASQLLPPVASSAAGTFDLQLMLPEKSSEEAEAVVRIHARNLLGVKRFIDAGAWRELQAALRSNASNLKQDLYAIIQARPTGQRSELRRLYSDLFNSVTSLDYAARDKDALQVQEHYGNIVSALDEIFSKIT

SEQ ID NO: 42481 - protein, 121 aa, Zea mays
  Coding DNA Sequence Number=SeqID_702
MTKQQTVRTLQLAQADIGMVMKIFRAKRDWKTGWKNEDCIEDIAVCVGSDDEEGSTEEEQQNAAELEEKQNMKRKILGYNERKEPPQYRSMNVFASGVVRRENGLHQELARDVRMLMARMI

SEQ ID NO: 42482 - protein, 422 aa, Zea mays
  Coding DNA Sequence Number=SeqID_703
  Gene Ontology: Mol. function=cytokinin dehydrogenase activity; Cellular component=vacuole; Biological process=electron transport
  Homolog annotation: Hit_ID=Q8LNV6; Match level="QueryCoverage=99%, HitCoverage=82%, E-value=1e-116, Identity=52%"; Hit description =Putative cytokinin oxidase
  Pfam annotation: Domain name=Cytokin-bind; Domain location=237-418; Score=142.8; E_value=8.9e-40; Accession=PF09265.1; Description =Cytokinin dehydrogenase 1, FAD and cy
  Pfam annotation: Domain name=FAD_binding_4; Domain location=55-205; Score=98.2; E_value=2.5e-26; Accession=PF01565.13; Description=FAD binding domain
  Pfam module annotation: Pfam domain module=Cytokin-bind::FAD_binding _4; Domain location=237-418::55-205
MEGKVLCTYAGIVALLLCSSVNFIQSPSDVFGPVALLEPTASAARDFGGVVSEAAIAVMQPGSPADIARLLGALSSTGPGPGPKAAVAARGAGHSLHGQAQARGGIVVETRALPRLVEVVRRGDGDGGGAAYADVGGGALWVEVLEECLRAGLAPRSWTDYLYLTVGGTLSNGGISGQAFKHGPQISNVLQLEVVTGTGEVVTCSPTQSPELFFAVLGGLGQFGIITRARIPLQVAPPKVRWVRAFYDSFETFTKDQELLVSMPELVDYVEGFMVLNEQSLRSSSVAFPAQVNFRPDFGSDDGTNKKVVDLVSGKLSYLRPHAYSVEVAYWDFLNRVRMEEESLRRRGLWDVPHPWLNLFVPRHGVARFMDLLMATIAQGDFEGPVLVYPLLTHRKEKKLYVAISSRKLCTAVYAAAIVVHN

SEQ ID NO: 42483 - protein, 290 aa, Zea mays
  Coding DNA Sequence Number=SeqID_704
MTKDEWRTGLKALRADSISKLKKAFPELVQECNLADHFHMFINPGFKAIQFPGFLHICISLLPHRHRGARLRTSRSTEEESTDLANGEAPAATHAPSLAGVTPSQSHRPDRPRRSSQITAPRTPDSRRPSSRADTGALPLAAASQPRSASRSGAVSQSSSTRSAGRAQPTRRHALSLAVVAPSRAERRRAPAPSVADPAARAARRVVLLPHTHARRRDDLRGDGRVVLSSHCGPTPTRGDGRVVLSSHCGPTPTPTNSQTGPLYRTHASLPKRMESRETLCAQRSRVTFN

SEQ ID NO: 42484 - protein, 356 aa, Zea mays
  Coding DNA Sequence Number=SeqID_705
  Gene Ontology: Mol. function=isomerase activity; Biological process =protein folding
  Homolog annotation: Hit_ID=Q6K5Q1; Match level="QueryCoverage=65%, HitCoverage=13%, E-value=2e-23, Identity=60%"; Hit description =Putative peptidylprolyl isomerase
MLSRVPPSIIGSAHKNMDTKLIGSWSYGREGVNQGPHRKGTCYGQRHRRAQRRYKAIQFPGFLHICISLLPHSCARDAKLYGNMISKLSKLEDTEDNGQMSQTVNKKRGLLWPLSEMVRRFFSADGSKGSTLWPALRLLIPVIALVAVCVGYYMHNSVEEIDCTNCECLSLYRSDEYYTYLLAVWVEDLRAKYSRYKAIQFPGFLHICISLLPHSCARDAKLYGNMISKLSKLEDTEDNGQMSQTVNKKRGLLWPLSEMVRRFFTADGSKGSTLWPALRLLIPVIALVAVCVGYYMHNSVEEIDCTNCLLSRVSVLTFCPFSGECLSLYRSDEYYTYLLAVWVEDLRAKYSRVLYC

SEQ ID NO: 42485 - protein, 279 aa, Zea mays
  Coding DNA Sequence Number=SeqID_706
  Gene Ontology: Mol. function=transferase activity, transferring glycosyl groups; Cellular component=integral to membrane; Biological process=metabolic process
  Homolog annotation: Hit_ID=Q8LJZ7; Match level="QueryCoverage=59%, HitCoverage=32%, E-value=2e-48, Identity=61%"; Hit description =Putative glucosyl transferase
MVRASCLVTFSLRIEPCARKIYPQHLLHSLCLVVEFLFVPIYCIGGGGGGAPQGGAGLADDELFDVPALPPPFRLRLSRRLLPPHFMPTTSVDGKALPGIRDFDVAADGFLVHTFDYLESGSTALLAEATGKKVIAVGPVSLCCAPSLDPPLVSNDDATRCMEWLDARAPKSVVYVSFGSYRRMPPAQLMQLGMALAPCPSPVLWLVKGANSLLHDVQDWLRETTDPDCDPGNNCLEVRGWAPQVAILAHPGPCRLREQLSIGAPSWKAGWPPECPWQP

SEQ ID NO: 42486 - protein, 69 aa, Zea mays
  Coding DNA Sequence Number=SeqID_707
  Subcellular localization annotation: CTP_CleavageSite=48; ConfidenceScore=5.35e-01
MKLWKETSRSSKITTSSRRGLAATPSRLPVKATFIYVSFPHFDLLCASAMQFSSVLPLGGNSGRLQRSP

SEQ ID NO: 42487 - protein, 197 aa, Zea mays
  Coding DNA Sequence Number=SeqID_708
  Gene Ontology: Mol. function=two-component response regulator activity; Cellular component=voltage-gated potassium channel complex; Biological process=two-component signal transduction system (phosphorelay)
  Homolog annotation: Hit_ID=Q9FXQ7; Match level="QueryCoverage=68%, HitCoverage=100%, E-value=7e-70, Identity=100%"; Hit description =Response regulator
  Pfam annotation: Domain name=Response_reg; Domain location=16-134; Score=99.9; E_value=7.6e-27; Accession=PF00072.14; Description =Response regulator receiver domain
MASRKCLGGEGSAPAPHVLAVDDSSVDRAVIAGILRSSQFRVTAVDSGKRALELLGTEPNVSMIITDYWMPEMTGYELLKKIKESSRLKEIPVVIMSSENVPTRINRCLEEGAEDFLLKPVRPSDVSRLCSRVLRGIPKLCVFSSSMGLILDDQGNDVLLANLKGYLQDCSSFGSTSPSPKINNLKDDIFLSISSRV

SEQ ID NO: 42488 - protein, 132 aa, Zea mays
  Coding DNA Sequence Number=SeqID_709
MEERGGEEEGVEREEDEVEPAGRGRTGCAGRGSAVAAVDHRCRREGERGASGRGNGGGGVLPSVKYLCPDPIDGTTANPTTPQVSLINELKDIMGQRTLAFTRLLLREISYNTLGNHGLLVVYAKQSYIQHT

SEQ ID NO: 42489 - protein, 673 aa, Zea mays
  Coding DNA Sequence Number=SeqID_710
  Gene Ontology: Mol. function=RNA-directed DNA polymerase activity; Cellular component=mitochondrion; Biological process=RNA-dependent DNA replication
  Homolog annotation: Hit_ID=UPI00004C1733; Match level="QueryCoverage =82%, HitCoverage=41%, E-value=0.0, Identity=78%"; Hit description =UPI00004C1733 related cluster
  Pfam annotation: Domain name=RnaseH; Domain location=200-327; Score =19.6; E_value=8.6e-07; Accession=PF00075.14; Description=RNase H
  Pfam annotation: Domain name=rve; Domain location=393-575; Score =94.7; E_value=2.8e-25; Accession=PF00665.16; Description=Integrase core domain
  Pfam module annotation: Pfam domain module=RnaseH::rve; Domain location=200-327::393-575
MGPIKDLKGVQRVMGCLAALSRFISRLGERGLPLYRLLRKAECFTWTPEAEEALGNLKALLTNAPILVPPAAVEALLIYVAATTQVVSAAIVVERREEGHALPVQRPVYFISKKLLYAVILTRRKLRHYFESHPVTVVSSFPLGEIIQCREASGRIAKWAVEIMGEAISFAPRKAIKSQVLADFVAEWVDTQLPTVPIQPELWTMFFDGSLMKTGAGAGLLFISPLGKHLRYVLRLHFPASNNVAEYEALVNGLRIAIELGVRRLDARSDSQLVIDQVMKNSHCRDPKTEAYCDEVRRLEDKFYGLELNHIARRYNETADELAKIASGRTTVPPDVFSRDLHQPSVKIDDTPEPEAPSARPEAPSARPEAPLVQPEVPSAPEGEALRVEEERSGVTPNRNWQTPYLQYLHRGELPLDRDEIRRLARRAKSFVLKAPGGYTHLLVAIDKFSKWIEVQPLNSIRSEQAVAFFTNIIHRFGVPNSIITDNGTQFTGRKFLDFCKDHHIRVDWAAVAHPMTNGQVERANDMILQGLKPRIYNDLNKFGKRWMKELPSVVWSLRTTPSRATGFTPFFLVYGAEAILPTDLEYGSPRTRAYADQSNQTSREDSLDQLEEARDMALLHSDARGRHKLTPPWEGPFVIAKVLKPGTYKLANSQGEVYSNAWNIQQLRRFYP

SEQ ID NO: 42490 - protein, 81 aa, Zea mays
  Coding DNA Sequence Number=SeqID_711
MAAQPTRQQGRVEGNRRRDGCQHQGEERVMGKQGEKMGNGERTWGARLRGCGDRRPGACPCAGKRKEKQGKQRVTPEFDGY

SEQ ID NO: 42491 - protein, 116 aa, Zea mays
  Coding DNA Sequence Number=SeqID_712
MTLESGAGLLNDFSFPARFSAAAREERLKEQLGDRITALQQLVSPFGKKHMAFEVEEDDAHPRGRSNANVTDEQGDCHRKGKHVIGGASSSVASMSTMPENTIQVVTLLGTCSQML

SEQ ID NO: 42492 - protein, 82 aa, Zea mays
  Coding DNA Sequence Number=SeqID_713
MADTEKGMRVLEQSSSSTSTTVVEARLGGGKRTGRAIEYIKHLKILGVRGLLPNDEYFLAGARCAATGPNAWRSASPTPKSW

SEQ ID NO: 42493 - protein, 188 aa, Zea mays
  Coding DNA Sequence Number=SeqID_714
MEKPCPWLSHFPKPGISSAHNLHRTSGHLQQNWEQNPEYCNPVAHGHVWSCPSARTQKFHRSCASSFVTSAPPRLCPLVLRIARPTRHPPHLSPPREGRLPFPDPPTTSSVSPSFFASCMPDKWEPSSSQMLDNEDMWEPDLRGGSGGGDRRARAAAGVVERDVEEEDSDSPSSEMSVDEPNGGAGGS

SEQ ID NO: 42494 - protein, 89 aa, Zea mays
  Coding DNA Sequence Number=SeqID_715
  Subcellular localization annotation: CTP_CleavageSite=51; ConfidenceScore=5.25e-01
MAKNRNKKNRAKSGGLATMDTSEGGPATSTAADVPQPMDTSEGKQPSSPPRRSVRSTKARFVNYYVGPSVMCLLIVTLLFVEHWNPIQQ

SEQ ID NO: 42495 - protein, 355 aa, Zea mays
  Coding DNA Sequence Number=SeqID_716
  Subcellular localization annotation: CTP_CleavageSite=53; ConfidenceScore=5.00e-01
SLARPDQTTPAPWTWDWETATYSEAGKTTTSENFQQQRSSSSLTPLPLLPPLSQSQRKSLQFSFSSKTQAPARGTIPNHKAPAMAAAGAAMRLRLLYRMLRVGELLALVAFLSWSSSRVPSAAAAALRLAGSLLLNARFVFVLGNAIVLLLLALSRRERDLSSSSSSFSSASGGQQTSTTAGTPPPQDAASAVFPSSFSDAPTAPPAPSTSLEAFSAPPPAPASDDRPGSPAAARASKLARAAPRRSRSEKMAAGPRLLQVRRAASPPAAPELRRTESENGRRRRSSVSARACRWGADDADEFRRTVEAFIDKHKRFHRQESMTLAVVAGTGSGSGSGGHCEAAPAFTGALAVVE

SEQ ID NO: 42496 - protein, 100 aa, Zea mays
  Coding DNA Sequence Number=SeqID_717
MAKRPSPPPSYGGDDKTIQAKELEARRLMALAEEGSHQLMRKAEPQLDSLSTPARLMNIFEVEGRGRPQPGSLLTTTRLVVILVDDHWWEIVARLRDENP

SEQ ID NO: 42497 - protein, 106 aa, Zea mays
  Coding DNA Sequence Number=SeqID_718
MARLSWRSSFGELEVALLRVPSLSPMDEIVPKQNMDPGRRVILLWKWTRGISVPHKGDDDGGGDGDGDGDDSEGDGKGDGGDDSGKGDGGDSSGISNDRGSNKASG

SEQ ID NO: 42498 - protein, 322 aa, Zea mays
  Coding DNA Sequence Number=SeqID_719
  Gene Ontology: Cellular component=nuclear chromosome; Biological process=chromosome organization and biogenesis (sensu Eukaryota)
  Homolog annotation: Hit_ID=Q3BCU1; Match level="QueryCoverage=83%, HitCoverage=45%, E-value=1e-141, Identity=92%"; Hit description =Cohesion protein
MTLRLRGDFNPSASTFGLYSSLIHLAAITESSLAGGPEDQEEQKMKQQPPKASKRKARWEVPRVIMDNNQMMIPGNIYQTWLKDASSLVSKRRKLNSNFNFIRSTKISDLMHIPPVALISHDNLFSELCYPKPLMQLWKDCTEVKSTKASSGGQRSSSQEPQPKNSPPQAGGEYEMETGGLPMDLTDGIEKLRANMSAKYDRAYNILHSDHSVTPGSPGLSRRSASSSGGSGSAFIQLDPEVQLPSGSGRSKRGQHSSARSLGNLDTVEEDFPLEQEVRDFKMRRLSDYVPTPDLLEETEPTQTPYERRSNPMDKITETIQS

SEQ ID NO: 42499 - protein, 66 aa, Zea mays
  Coding DNA Sequence Number=SeqID_720
MRPTPPARASTPCAAPPARTYHSGEEVMQERLDELICGYATLVGVVPSMKAFSSFPDSMSHCHTRF

SEQ ID NO: 42500 - protein, 110 aa, Zea mays
  Coding DNA Sequence Number=SeqID_721
  Subcellular localization annotation: CTP_CleavageSite=33; ConfidenceScore=5.33e-01
MESGKDEKAFMEGTTPTSVAYPQMSSSRRSCITSSPEWAPNGFSSGSSGFLASLEEPEPFCNSFGKTVSHKETVTETQLEVEVPARPYDELMVLEFGRWCSSVMHHSYHL

SEQ ID NO: 42501 - protein, 185 aa, Zea mays
  Coding DNA Sequence Number=SeqID_722
  Gene Ontology: Mol. function=protoporphyrinogen oxidase activity; Cellular component=mitochondrial inner membrane; Biological process =porphyrin biosynthetic process
  Homolog annotation: Hit_ID=Q9FYV8; Match level="QueryCoverage=69%, HitCoverage=27%, E-value=3e-59, Identity=79%"; Hit description =Protoporphyrinogen IX oxidase
MWGSSDGADRRGRSSDGRGEAGDQGEEETDAFASGTEGEWEASRLIDDLGLQDKQQYPNSQHKRYIVKDGAPALIALFFEPFLYKKANTRNSGKVSEEHLSESVGSFCERHFGREVVDYFVDPFVAGTSAGDPESLSIRHAFPALWNLERNIVVMVIFFLLLSLGLSVHSYISTSIMLYDVIISV

SEQ ID NO: 42502 - protein, 269 aa, Zea mays
  Coding DNA Sequence Number=SeqID_723
  Gene Ontology: Mol. function=protoporphyrinogen oxidase activity; Cellular component=mitochondrion; Biological process=porphyrin biosynthetic process
  Homolog annotation: Hit_ID=Q9FYV8; Match level="QueryCoverage=99%, HitCoverage=55%, E-value=1e-145, Identity=87%"; Hit description =Protoporphyrinogen IX oxidase
IVGAILSKLAAKGDPVKTRHDSSGKRRNRRVSFSFHGGMQSLINALHNEVGDDNVKLGTEVLSLACTFDGVPALGRWSISVDSKDSGDKDLASNQTFDAVIMTAPLSNVRRMKFTKGGAPVVLDFLPKMDYLPLSLMVTAFKKDDVKKPLEGFGVLIPYKEQQKHGLKTLGRSILKQLVTSDLKKLLGVEGQPTFVKHVYWGNAFPLYGHDYSSVLEAIEKMEKNLPGFFYAGNNKDGLAVGSVIASGSKAADLAISYLESHTKHNNSH

SEQ ID NO: 42503 - protein, 146 aa, Zea mays
  Coding DNA Sequence Number=SeqID_724
MTPAKYSHILLEDLLTINIEKVMELDVPILLNILHFQKMTIVYSSKSLEHNFLMKEILSQAQEILSQAQTNSILQIHLHDKMKCVWNFLYLIFYGSVEIAAVDVSIAIFNQLSKEHHNQCEPLPAHGYEMVISLTVLQTEVADRLL

SEQ ID NO: 42504 - protein, 68 aa, Zea mays
  Coding DNA Sequence Number=SeqID_725
MTAVGVSETLYAKATQLVLLANQTPQPNNYMSRGSLEDMVAGVTWPSILPPGWTVEWDPTSIEEEHEE

SEQ ID NO: 42505 - protein, 107 aa, Zea mays
  Coding DNA Sequence Number=SeqID_726
  Gene Ontology: Mol. function=zinc ion binding; Cellular component =nucleus; Biological process=ubiquitin-dependent protein catabolic process
  Homolog annotation: Hit_ID=Q6Z6Z3; Match level="QueryCoverage=73%, HitCoverage=24%, E-value=6e-24, Identity=74%"; Hit description =Putative SINA2 protein,seven in absentia
MAPGSSIVTVVPESDCGDDNGLSESIGGIRLDVDSASKPWSTSASLANVALSSMCGLNDLLECPVCTNSMRPPILQLHNCSEDVTELDVKPDGSWRVKGDAATRDLS

SEQ ID NO: 42506 - protein, 177 aa, Zea mays
  Coding DNA Sequence Number=SeqID_727
MKYVDHPPSNPKKITIKSSQEVFTVEIPRPRNNANKPRQSIAPDVDTPKQMKQLYVRRNTKRSAGRGKNKLTIDMSDLMRNQCLLSDNRHIYYLDHLHHEATPENKYDTSRIKYFDKETIDALTKADRRKPRHAGETYGHCHFCSRTDTCYVAAPKQPANDTFHIHVPRMKDLISSK

SEQ ID NO: 42507 - protein, 53 aa, Zea mays
  Coding DNA Sequence Number=SeqID_728
MAATGCVLRQGCVLRRGCALRRGNDWDAKRTTVAWASRTDLAYGGLAGGNRMS

SEQ ID NO: 42508 - protein, 279 aa, Zea mays
  Coding DNA Sequence Number=SeqID_729
  Subcellular localization annotation: CTP_CleavageSite=87; ConfidenceScore=5.54e-01
MAAESARPPSPPRDSGCPAGAGDSTSSQLTATYLGVSFALFLATLPSGTAARHVASLQSRGRLLASRLLAAEDQLRQLRARRREDARANARAAEIFAGHRAAWMEAERRLQARAAAAADEAASLRAHLADAEADAAALRARAERLEREAAERDELLTALLAATSRAGYSGGGPLPRVHDGEEQEEEERARHDARGEREPEHEQDPLPAPPLDHAADTTDAEALAAAAALYAQQRQKHDDDFYTAAMAASGMPPWMEMDRSKAWQMSFGSWLHASSSILQ

SEQ ID NO: 42509 - protein, 259 aa, Zea mays
  Coding DNA Sequence Number=SeqID_730
  Homolog annotation: Hit_ID=Q84T58; Match level="QueryCoverage=81%, HitCoverage=43%, E-value=5e-92, Identity=83%"; Hit description =Expressed protein
MTTSTKLLNVDVMDLKYDTIESTYNTKHAVPRRESPWKVDVESSGVPAKLRLLEQELLNLEKVVNGDLSKIPLVMRKQVKRYQTLAGKIDDLCKRMKVKPNGYVFVQQTSDPCDSTLNSEFRTQRQTEFLLEAFHLQHRATETRQKLGTLQAETAKGSFGDELTAEAKMCTRRALSSIRNNFKEIQRSLEIWLARILGDLEGMLARDGASRIREYFLSPYTSAVRDCMRMNTLENPWIHGQQLLRTFAVAMPGCGFFFD

SEQ ID NO: 42510 - protein, 386 aa, Zea mays
  Coding DNA Sequence Number=SeqID_731
  Homolog annotation: Hit_ID=Q84T65; Match level="QueryCoverage=90%, HitCoverage=100%, E-value=2e-83, Identity=52%"; Hit description =Expressed protein
  Pfam annotation: Domain name=DZC; Domain location=148-183; Score =68.6; E_value=2e-17; Accession=PF08381.1; Description=Disease resistancezinc fingerchromosome co
  Pfam annotation: Domain name=DZC; Domain location=350-385; Score =76.4; E_value=9e-20; Accession=PF08381.1; Description=Disease resistancezinc fingerchromosome co
  Pfam module annotation: Pfam domain module=DZC::DZC; Domain location =148-183::350-385
MAMGDGNEDDDGMSAARACRHTESCPVGPPYTRMDWILVLKDMVLKLSGTHHRQHGAQHRRGGSPPPPRGRATSLYRSGYYRPGVVQDDMAVPPATYLGGGGAGASSASSTPAWDLPAAARADGEACREWVAQVEPGVQITFVSLPGGAGNDLKRIRFSREMYDKWQAQKWWGDNNERIMELYNVRRFSRQVLPTPPRSDDAERESFYSQSQVGSPSATPSPAPLTPERISWGAFARQVAAPPASSGATGAARQHSFRPMSPPPPSSSNPSERAWQQQQQRHIGGGGGGGAAGGKSPAASEAAAAATEAARTTTSSRDDVSVSNASELEVSEWIIQDQPGVYITVRELADGSRELRRVRFSRERFAELNAKLWWEENKERIQAQYL

SEQ ID NO: 42511 - protein, 200 aa, Zea mays
  Coding DNA Sequence Number=SeqID_732
  Homolog annotation: Hit_ID=Q84T74; Match level="QueryCoverage=79%, HitCoverage=83%, E-value=5e-60, Identity=71%"; Hit description =Expressed protein
  Pfam annotation: Domain name=UPF0131; Domain location=38-162; Score =18.9; E_value=3.9e-05; Accession=PF03674.5; Description =Uncharacterised protein family (UPF0131)
  Subcellular localization annotation: CTP_CleavageSite=51; ConfidenceScore=5.06e-01
MAGHPLRGPLVRGPDRHRTHPPATKQRTTLVFTYGTLKRGFSNHRLLEELFASGDASLVGPAVTSARLPLVCGPYRVPFLLNLPGAGAGAHRVRGEAYAVTARGLARLDELEGVETGHYERLAVAVDLEGGGAVDAIAYFAHRSYANDMWRRSGEKGVPEYTHGVAAGYVRRKDRPQGQTFLEQIRIFNSSPPNPLNNPS

SEQ ID NO: 42512 - protein, 164 aa, Zea mays
  Coding DNA Sequence Number=SeqID_733
  Gene Ontology: Cellular component=nucleus; Biological process =chromosome segregation
  Homolog annotation: Hit_ID=O49454; Match level="QueryCoverage=72%, HitCoverage=42%, E-value=5e-38, Identity=63%"; Hit description=SOF1 protein-like protein
  Pfam annotation: Domain name=Sof1; Domain location=73-160; Score =167.8; E_value=2.8e-47; Accession=PF04158.5; Description=Sof1-like domain
  Pfam annotation: Domain name=WD40; Domain location=34-72; Score=27.4; E_value=5.1e-05; Accession=PF00400.22; Description=WD domain, G-beta repeat
  Pfam module annotation: Pfam domain module=Sof1::WD40; Domain location=73-160::34-72
MTGWALCGGLRCLGCLASLLPPCFDFIANIFINLYLSITLILNTERVFCVKYTYDGTYLVSGSDDTNLRLWKSKASEQLGVLLPRERKKQEYQDALKERYKHLPEVKRIVRHRHLPKPIYKAANLRRTMIEAESRKEERRRKHSAPGSMPVQPFRKRRIIREVE

SEQ ID NO: 42513 - protein, 320 aa, Zea mays
  Coding DNA Sequence Number=SeqID_734
  Gene Ontology: Mol. function=RNA-directed DNA polymerase activity; Biological process=RNA-dependent DNA replication
  Homolog annotation: Hit_ID=UPI00004C1734; Match level="QueryCoverage =29%, HitCoverage=28%, E-value=1e-37, Identity=80%"; Hit description =UPI00004C1734 related cluster
MAPPVDVVGPRPRLGDVEAPPRSRSSLSFVAEVESELWVGRGGDRRLKPGLSPSPGVGRSGVRRLMGLSPSPSPGVGRIGARRLPGLSPSPSPGSGGADSWSGAGGAVLLSGRSVERRSDFGHFGSVDWRTRVRIKLCADGGYQLRIRSLEGATYQRCMNHVFREHIDRTVEAYVDDIVVKMRNASDLLSDLETTFKCLRAKGVKLNPEKCVFGVLRGMLLGFIVSERGIEANPDKIVGPLQKAPGGFSHLLVAIKKFSKWIEVRPLTSIRSEQAVAFFTNIIHRFGVPNSIITDNARSSLGRSSWTSGRTTTSVWTGPP

SEQ ID NO: 42514 - protein, 110 aa, Zea mays
  Coding DNA Sequence Number=SeqID_735
  Gene Ontology: Mol. function=snoRNA binding; Cellular component =nucleus; Biological process=35S primary transcript processing
  Homolog annotation: Hit_ID=Q8W4D9; Match level="QueryCoverage=89%, HitCoverage=21%, E-value=1e-39, Identity=75%"; Hit description=SOF1 protein-like protein
  Pfam annotation: Domain name=WD40; Domain location=56-95; Score=31.8; E_value=2.4e-06; Accession=PF00400.22; Description=WD domain, G-beta repeat
MRVKVISRSTDDYTRERSQDLQKVFRNYDPALRSQEKAVEYTRALNAAKLEKIFAKPFIGAMDGHIDAVSCMAKNPNHLKAIFSGSMDGDVRLWDIAARYCYSIGDYLIP

SEQ ID NO: 42515 - protein, 124 aa, Zea mays
  Coding DNA Sequence Number=SeqID_736
  Subcellular localization annotation: CTP_CleavageSite=46; ConfidenceScore=5.17e-01
MGFNYAHRSAVVGTDTDGFASAAATNRCLVGFGPTATNCCLVCNILAAAADCALATETQEFCVCCCMFEWVQNGTSSSSDTDPLPNELNIMSIRDDKDVKDIVVNGNRAEPGHIIMTSIDGRNG

SEQ ID NO: 42516 - protein, 99 aa, Zea mays
  Coding DNA Sequence Number=SeqID_737
MGFNYAHRSAVDVVIVDVLLRYITHLDWPAAFHANLAGRTLANELDVNGTSSSSDTDPLPNELNIMSIRDDKDVKDIVVNGNRAEPGHIIMTSIDGRNG

SEQ ID NO: 42517 - protein, 142 aa, Zea mays
  Coding DNA Sequence Number=SeqID_738
  Subcellular localization annotation: CTP_CleavageSite=43; ConfidenceScore=5.63e-01
MQQQTQNSCVSVASAQSAAAANILQTRQQFVAVGPKPTRQRFVAAVLAKPSVSVPTTCEHMYDVELVGECAAGKVGMEGGRPVQVGDVAEEDIDDDDVYRRASQIPVGGSRGGGRGSAWGERVRRAASARRLSRRRGRLIVA

SEQ ID NO: 42518 - protein, 51 aa, Zea mays
  Coding DNA Sequence Number=SeqID_739
MGWSSEKIQLGIGAGHNSREVAGMWKHSIKVSYEATKADTTRRLINCKFFP

SEQ ID NO: 42519 - protein, 70 aa, Zea mays
  Coding DNA Sequence Number=SeqID_740
MPASPPLHLALILVAFLFLTDSGLVVTCASTPCVRYPLPPSAIRALLQSPGAPPWGLMSYEVEMGCDEMR

SEQ ID NO: 42520 - protein, 136 aa, Zea mays
  Coding DNA Sequence Number=SeqID_741
  Homolog annotation: Hit_ID=Q9ZQP5; Match level="QueryCoverage=37%, HitCoverage=45%, E-value=4e-07, Identity=48%"; Hit description =Expressed protein
  Pfam annotation: Domain name=HMA; Domain location=60-127; Score=21.0; E_value=0.0042; Accession=PF00403.16; Description=Heavy-metal -associated domain
  Subcellular localization annotation: CTP_CleavageSite=63; ConfidenceScore=5.22e-01
MEVELEHGGDEGGDRGSESSSSSSKRSFGASSDATVSSTPSKLQALRFAEDLSLPSVQVVVMSANMGCSHCRQRVANVVSKMNGLLDYMVDFGKKEVTVRGKVVHTKKKKKRHMRALLGAAGAAAEPSPSTSPPPN

SEQ ID NO: 42521 - protein, 70 aa, Zea mays
  Coding DNA Sequence Number=SeqID_742
MSVSPRRGLGVQAPGQAHRDAAPRLKMARRTPEGPRSHPCLAILGCVLAAAARGIPQKLSMMADPQAAST

SEQ ID NO: 42522 - protein, 326 aa, Zea mays
  Coding DNA Sequence Number=SeqID_743
  Gene Ontology: Mol. function=histone-lysine N-methyltransferase activity; Cellular component=nucleus; Biological process=chromatin modification
  Homolog annotation: Hit_ID=Q8L821; Match level="QueryCoverage=74%, HitCoverage=32%, E-value=1e-62, Identity=58%"; Hit description=SET domain-containing protein SET118
  Subcellular localization annotation: CTP_CleavageSite=66; ConfidenceScore=5.01e-01
MRGAYPVLPTLLCSRRFALLPSPPAHPDLVLPPFPLSRSAGAPRLLRRHREGELLVSLAELDAAVRCSLRSWWMANMDSVVVMEVAPVPIPTFMDATPLNPPLPLVVEELVLRRSARYLNRPTRPNYADQEPPKNPGGRGRGKRKRDEEKPELAAQQGTKTPGRNDSNVEAGERKPMPVTAAVPACCAGVAAEDDATPTGKSAKLRVKETLRAFNSHYLHFVQEEQKRAQAAIQEIEAKGGLKRQTKGGKKKSSKQEAEAEEKEKRPSKRPDLKAITKLYPCLYELAMFAGLILNVEIQMQEMNAVLYQEKTIGHLPGGLRIIELK

SEQ ID NO: 42523 - protein, 109 aa, Zea mays
  Coding DNA Sequence Number=SeqID_744
MVFFLWLWIRQCPRSPGRRARRRDHSGRAEFALGGRQEPSTRFYTQAAKDFRPGGVMHHERTPRIAGESSAVLLIEIGWLRTEICLSRLLREHVKEADMVMGSTHQWIK

SEQ ID NO: 42524 - protein, 402 aa, Zea mays
  Coding DNA Sequence Number=SeqID_745
  Gene Ontology: Mol. function=RNA-directed DNA polymerase activity; Cellular component=membrane; Biological process=RNA-dependent DNA replication
  Homolog annotation: Hit_ID=Q7F805; Match level="QueryCoverage=97%, HitCoverage=39%, E-value=7e-89, Identity=42%"; Hit description=Oryza sativa (japonica cultivar-group) genomic DNA, chromosome 1, PAC clone:P0433F09
MRNFSLAGRLTLVKTVITSQAIYMLSVLNAPKEIINLLDSKRRQFLWVGSDRLTGGKCKVNWKRVARPKALGGLGVLHLGAFARALRLRWLWQICTYHNNALGNLETPCTNVVCLLFAASTNIKIGDGSKISFWDSAWAGGRRPKDLAPSLFSISRHKGKSLARAVRDNAWIADLALLGSVITTRHLHEFFILWSEVQKIQLDPGAQDIITWKFTADHRYSVKSAYLAQFLGSVRTNLDLIIWKNWAPPKYKFFSWLAIQNRIWTTDRLATRNWPHSPTCVLCQGVLESGLHLFVECRFTKRIWEEIAVWVAIEDLKPSNWELSHTLMHWWENLAMISGCSRKGLRSLLILINWIIWRERNVRTFDRRFSTSQQIITLIKCDAAAWIAAGARQLATLLSSST

SEQ ID NO: 42525 - protein, 370 aa, Zea mays
  Coding DNA Sequence Number=SeqID_746
  Gene Ontology: Mol. function=sugar porter activity; Cellular component=integral to membrane; Biological process=carbohydrate transport
  Homolog annotation: Hit_ID=Q6K8S7; Match level="QueryCoverage=93%, HitCoverage=85%, E-value=1e-169, Identity=89%"; Hit description =Putative PLRR-4 polymorphic leucine-rich repeat protein
  Pfam annotation: Domain name=Nuc_sug_transp; Domain location=105-341; Score=17.6; E_value=1.7e-14; Accession=PF04142.6; Description =Nucleotide-sugar transporter
MQRNGVVECSVCRSRVVVPSPRSVSRAYDKHRNKMSSKFRALNVFLVVGDCILVGLQPILVFMSKVDGKFQFSPISVNFLTEVMKVIFAVVMLIIQSRKQKVGEKPLLARSTFIQAARNNVLLAVPALLYAINNYLKFIMQLYFNPATVKMLSNLKVLVIAFLLKFIMRRRFSVIQWEALALLLIGISINQLRTVPVGNTAFGLPVTAIAYIYTLIFVTVPSVASVYNEYALKSQYDTSIYLQNLFLYGYGAIFNLLGILGTVLFQGPESFNILRGHSRATIFLICNNAAQGILSSFFFKYADTILKKYSSTVATIFTGLASAAFLGHSLTINFLLGISVVFISMHQNRCVILEATSKLAFISGKPSDWN

SEQ ID NO: 42526 - protein, 104 aa, Zea mays
  Coding DNA Sequence Number=SeqID_747
MEIVLREATIGDSNPRRDLDHDCDLGGESRTGGRVREEIKRRSIGPTGRISRRCASPSSCRHYSSVELGSSQSKVLWQGMGLGSSLHHVVGIGLGYGTLGCVMR

SEQ ID NO: 42527 - protein, 79 aa, Zea mays
  Coding DNA Sequence Number=SeqID_748
MAWIKRERKNKREGRRKKYHMHLQPKYAPTLSHPVLEGKSNANHVLTERYSGNSLSPLNYHKIIIKITSSYHRYPHHVR

SEQ ID NO: 42528 - protein, 95 aa, Zea mays
  Coding DNA Sequence Number=SeqID_749
MRRARARVSTEDATEREKAVVGRGLLRRRAVTRRKAEEGAARGGGWRMGSKPCARTTGLEMGYAKRASSLTVKDFRVAPPSPGFNSYRERIFRLG

SEQ ID NO: 42529 - protein, 300 aa, Zea mays
  Coding DNA Sequence Number=SeqID_750
  Gene Ontology: Cellular component=integral to membrane
  Homolog annotation: Hit_ID=Q5ZBZ3; Match level="QueryCoverage=90%, HitCoverage=44%, E-value=1e-129, Identity=76%"; Hit description =Putative dymeclin
TYVLISLSIKKLMPILETLYNASRKTSNQIYMLLIILLILSQDSTFNASVHKLVLPGVPWYHERLMHQTSMGSLMVVILIQTIKYNLSKLRDVYLHTNCLAILANMAPHVHRLSAYASQRLVSLFDMLSRKYAKLAELKNDKSLKVISDQMEADNIADDMSTELHIYTDFLRIVLEIINAILTYALPRNPEVVYAVLHRQEVFEPFKNHPRFNELLENIYTMFTQLRFTYEQESHPEEFFIPYAWRLVLSRGFSFNPSAINLFPVEIHLEGEEGGRIVQGFRDCAIIGGRLLCRLYTILS

SEQ ID NO: 42530 - protein, 69 aa, Zea mays
  Coding DNA Sequence Number=SeqID_751
MVVTWGGRGSGRSRGLSGQQCEVDGVEQSRTGPTMARARPRRGDTTKERPRAGGNVVSTHSAIKIDIVS

SEQ ID NO: 42531 - protein, 527 aa, Zea mays
  Coding DNA Sequence Number=SeqID_752
LNSTDKNKHSGTDDEPLRKEATETAIFSSETIALVSTTEDVTSYKDSSIYNEEIVPLMHGTTETSEETIQGNYKSLLQEKIEGSLEELEESSSHDNSPMGGSLAGENTTENTEQGYIEVATVEEILVVMQGETTSSTESIVSTYLDADDSEIKEVVIEDKPVQKESLPDVQPSDGTNLEISKNDNMQIQIPHDQEENRAISKIATVNIMTESDEAFEDDNNILALGNQDEDNAVSTLCGNLYNDEVVAKCQPYLKNPTSMNDPELENEQNERVVGSRRQSSVSVTTTMKHNGIGTIYKEEGIAEKNITAWNLEDNFATENKPEEHYGNLVSITEVNGKDFTGLQSSLSDHHYIGNEEIQRKVSGVSGIVEFDKETVKEILEEDKVNNVEGLGLHFDAHVVTKEGGDLSNLPKAIPLIPLQSLEDIDRKVYRTRDKQETITNSQVDQSQLILLEKYEVLKLENGEILRKCMQLVEDSSNVVIISTDGINHEKVDTNTTSSDFTFEANHYQKEVTEGISAAAFTAQCNQ

SEQ ID NO: 42532 - protein, 168 aa, Zea mays
  Coding DNA Sequence Number=SeqID_753
MEHSGRKLAEGLLVLGYWMAMSTSNTTVICTGSPSAAPNMTEPGRACGPRCPYGVVHWVVCHRTSGMALRLVCLPMGSCCYFDLDVAVLGGSYRGSSRHIPGTTYCPVPSAIWVTVETPMLKSLRLVLSGPTAQRGYISGVVLDRDPTERFPRSRHGSVMSHRIDVAR

SEQ ID NO: 42533 - protein, 60 aa, Zea mays
  Coding DNA Sequence Number=SeqID_754
MEIEGFVEGHIHLETHGHRFPWTRLSGKRLRTTPENVFLPLDLALRDLILTRYKGGPETE

SEQ ID NO: 42534 - protein, 84 aa, Zea mays
  Coding DNA Sequence Number=SeqID_755
MGRSPTWRWWPRRVLELTCGCGAGRPPPGGKVGPPGGSDGRRRLWGWEGDAGGCGRWEENPKPSLIPCRRERIVVLIGDELFGA

SEQ ID NO: 42535 - protein, 129 aa, Zea mays
  Coding DNA Sequence Number=SeqID_756
  Subcellular localization annotation: CTP_CleavageSite=67; ConfidenceScore=5.62e-01
QAPKLHSSLFVFNLQPATISRRSLSAAVGAAASPSGLGRSHGAAPPAGGGPGTAAPTRRARPNKSCSAATASAVSDWCTVYARNLLRGAAPPAAIGQPDAVQRARGLAQAPAGQPASRLRPQAAAQIRH

SEQ ID NO: 42536 - protein, 349 aa, Zea mays
  Coding DNA Sequence Number=SeqID_757
  Gene Ontology: Mol. function=G-protein coupled photoreceptor activity; Cellular component=membrane; Biological process=regulation of transcription, DNA-dependent
  Homolog annotation: Hit_ID=P25764; Match level="QueryCoverage=94%, HitCoverage=28%, E-value=1e-150, Identity=83%"; Hit description =Phytochrome B
  Pfam annotation: Domain name=PAS_2; Domain location=97-217; Score =211.3; E_value=2.3e-60; Accession=PF08446.1; Description=PAS fold
  Subcellular localization annotation: CTP_CleavageSite=39; ConfidenceScore=5.31e-01
MASGSRATPTRSPSSARPEAPRHAHHHHHSQSSGGSTSRAGGGAAATESVSKAVAQYTLDARLHAVFEQSGASGRSFDYSQSLRAPPTPSSEQQIAAYLSRIQRGGHIQPFGCTLAVADDSSFRLLAFSENSPDLLDLSPHHSVPSLDSSAPPHVSLGADARLLFSPSSAVLLERAFAAREISLLNPIWIHSRVSSKPFYAILHRIDVGVVIDLEPARTEDPALSIAGAVQSQKLAVRAISRLQALPGGDVKLLCDTVVEHVRELTGYDRVMVYRFHEDEHGEVVAESRRDNLEPYLGLHYPATDIPQASRFLFRQNRVRMIADCHATPSSLAVAVTMSKQVGVASRRQ

SEQ ID NO: 42537 - protein, 156 aa, Zea mays
  Coding DNA Sequence Number=SeqID_758
  Homolog annotation: Hit_ID=Q6QP51; Match level="QueryCoverage=45%, HitCoverage=37%, E-value=1e-11, Identity=59%"; Hit description =Putative growth-regulating factor 1
  Subcellular localization annotation: CTP_CleavageSite=37; ConfidenceScore=5.76e-01
MQAACNHAKWACPSDFQRTQRGGPRPRVTQPARRSLRASNCTATRTTATPSRLRNQYRDSRQPCGPGKGDTPKRILPREGNRLRASLLIRGSKAGPSEGFNNCLRARGLHTHYWSEVRRPAPRKGSTAASGHSGSAPTTDQGFEGWPSKVSQPPQT

SEQ ID NO: 42538 - protein, 256 aa, Zea mays
  Coding DNA Sequence Number=SeqID_759
  Gene Ontology: Mol. function=hydrolase activity; Biological process =aromatic compound metabolic process
  Homolog annotation: Hit_ID=Q6ASW1; Match level="QueryCoverage=70%, HitCoverage=46%, E-value=1e-78, Identity=78%"; Hit description =Putative lipase
  Subcellular localization annotation: CTP_CleavageSite=48; ConfidenceScore=5.09e-01
MAGSMQAADAAGRLSALLSLLALRRLLAVLQPLALLLLLPFRWRSRPGAGAAASAPGASGKKGKSASSSSSSSSVVLRVPAGSPMVAARRQASARREVAMRRAREAGREYELIPTARGETLFTQCWWPRPSSTVKPRALVVVMHGLNEHSGRYDHLARRLNDIGIKVYGMDWTGHGGSDGLHGYVQSLDHAVNDLKMYLKKVSAENPGLPCFCFGHSTGGGIILKAALDPDVETLISGVVLTSPAVRVQPAHPIIA

SEQ ID NO: 42539 - protein, 863 aa, Zea mays
  Coding DNA Sequence Number=SeqID_760
  Gene Ontology: Mol. function=protein serine/threonine kinase activity; Cellular component=cytoplasm; Biological process=protein amino acid phosphorylation
  Homolog annotation: Hit_ID=Q9FX38; Match level="QueryCoverage=99%, HitCoverage=77%, E-value=1e-171, Identity=42%"; Hit description =Protein kinase, putative
MPENIDLVLEFLRKNRFAKAEAALRGELTGCADSNGMTVQRCVAELKEDDEQEDLVSSNGGPNGAVTERSADSSREFIVKEVDVGALPNGLDGKKGSGIGQPQENNVGDLYPWTFSIANSTAEQLAELLVSEEVPRHRRAAMLAEKRDRGVGTEQPGPLLEQKVSSGRGKGKVDAAGRTAINEQGHSRDKNLVPEKEEMLNGCTVKTVLPFPGENPSSSYNSTHHENERKEVRRSINADGVGKGAKGHFDEGNRQNYFEKSLDTDQVSDRCFDLQLVGDNQREELPKLPPVRLKSEDKLVNMNWEDKINHHGSGAKQSSADHAFMIGSYLDVPIGQDITSSGFFPCGRRTIGSSWLSVSQGITEDTSGFARLDDDSLEYPIGEYWDSDEYDDDDDVGYTRQPIEDETWFLAHEIDYPSDNEKATDHTRGPDRHDRPTKDEDDDQSFVEEDSYISGEQYFHGKNIAQIGTSEGPMVNGIPDNDMIAQYDGQLLDPEELNLMHSEPAWQGFVLQNSELGMLGNGKFLNDSERPHPDDPFVEDDQHGSVRSIGVGISSDAADIGSEVRESLIGGSSEGDIEYFNESSLSVSGKRHSQQDPEKKRVGAKGVKHDQINYAAGIQKGNLLPGAADGGFSFPPPLHSVKNHDSDTKTLWSKKDEMYCINDLDDCQNGVASDDMLATWKKKNSESSLRSSRDEMTSDVVRSRNSSPSYGETEDTTNVRRHKLDDAQEDTGTNLDDEEAAALQEQVRQIKVQEEEFETFNLKIVHRKNRTGFEEDKNFHVVLNSVIAGRYHVSEYLGSAAFSKAIQAHDLHTGMDVCVKIIKNNKDFFDQSLDEIKLLKYVNKHDPGDKYHLLRLYDYFYYR

SEQ ID NO: 42540 - protein, 97 aa, Zea mays
  Coding DNA Sequence Number=SeqID_761
  Gene Ontology: Mol. function=protein-tyrosine kinase activity; Cellular component=integral to membrane; Biological process=protein amino acid phosphorylation
  Homolog annotation: Hit_ID=Q6ASV8; Match level="QueryCoverage=65%, HitCoverage=18%, E-value=4e-19, Identity=71%"; Hit description =Putative Pto kinase interactor
MAGGRTSSEALHEFSRLINYATKSWLLVRPQATPRLSEDKVKQCVDPKLKDDYPPKAVAKLAAVAALCVQYEADFRPNMTIVVKALQPLVNARPGGE

SEQ ID NO: 42541 - protein, 105 aa, Zea mays
  Coding DNA Sequence Number=SeqID_762
MVSGVTETGSQEAVPLVSTYGTVPPAAPPCRAPHASVRYTIPGLVQRGRGRGGRVWLWRGVPAVRLGSPLIPFSSRPVMFPCRDTRSAIEFRPMDFAARERMGIL

SEQ ID NO: 42542 - protein, 274 aa, Zea mays
  Coding DNA Sequence Number=SeqID_763
  Gene Ontology: Mol. function=DNA topoisomerase (ATP-hydrolyzing) activity; Cellular component=chromosome; Biological process =regulation of transcription, DNA-dependent
  Homolog annotation: Hit_ID=Q5ZPV8; Match level="QueryCoverage=81%, HitCoverage=70%, E-value=1e-106, Identity=73%"; Hit description =Putative topoisomerase VI subunit A
  Pfam annotation: Domain name=TP6A_N; Domain location=28-95; Score =62.1; E_value=1.8e-15; Accession=PF04406.4; Description=Type IIB DNA topoisomerase
MAGRDKRRRAAPLEGDEQQLRRRLEEAALLLRRIKDVLLRVLFVVQQLLQQNKHCSKRDIYYMYPSIFVEVAVVDRAINDICILFKCSRHNLNVVPVVKGLVMGWIRFMEGEKKVYCITSVNAAFSIPVDIEAIKDVVSVAHYILVVEKETVFQRLANDKFCERNRCIVITQLAHDANLLRVPDIRWLGVFTSDFEEYCLPDCCLLRLSPEDRRKAEGILARCYLHREAPEWRSELEAMLQKGVKFEIEALSANSISFLSHEYIPQKIKQGMHL

SEQ ID NO: 42543 - protein, 108 aa, Zea mays
  Coding DNA Sequence Number=SeqID_764
MAALSQWAQSSYWVWVGGGLVAWAGREQGPSESLQRQVRIRGLPRKVEDEGYDDPKQCSTRKHHWLKRRPLLQDSHDEYIQYGKLSGFGFVPSLGFTVSLNCIDLNIS

SEQ ID NO: 42544 - protein, 214 aa, Zea mays
  Coding DNA Sequence Number=SeqID_765
MEVKNSGNNANTRTLGMVLRSERELLAQTRAQEDEIAALRLQLENKDREVERLKDLCLRQREEIRTLKDAVLFPDVEPEPEPDRRLRHEISTLTDQIQCLAQEVAQVKAEKHSARSCFDEDGYFSSPRTPGFNEETAFSLECSIGEAETPNYGSPDEMFSKDLNPCLTPCIAKSRSDVSAQFQSSSSQFTKLAQLFGMECQFGSAMSSIGECSM

SEQ ID NO: 42545 - protein, 64 aa, Zea mays
  Coding DNA Sequence Number=SeqID_766
MQGKANCCCLARVQLSILHPSDGHAARGPTTSRSGQPPRALPTSKSRYHCYPKYGSLFFVAAEA

SEQ ID NO: 42546 - protein, 324 aa, Zea mays
  Coding DNA Sequence Number=SeqID_767
  Gene Ontology: Mol. function=RNA-directed DNA polymerase activity; Cellular component=peroxisomal membrane; Biological process =peroxisome fission
  Homolog annotation: Hit_ID=Q10SM7; Match level="QueryCoverage=69%, HitCoverage=94%, E-value=1e-114, Identity=92%"; Hit description =Peroxisomal membrane protein PEX11-1, putative, expressed
  Pfam annotation: Domain name=PEX11; Domain location=11-226; Score =228.0; E_value=2e-65; Accession=PF05648.4; Description=Peroxisomal biogenesis factor 11 (PEX11)
MSSLHATRAELGLVVLYLNKAEARDKICRAIQYGSKFVSNGQPGTAQEVDRSTTLARKVFRLLKWVNDLHALISPPAKGTPLTLVLLGKSKNALLSTFLFLDQFVWLGRTGIVKNKEATDRVARLSLYCWMASSACAGLVELGELKRLSRSMRKLARELRDTDKYENEQYQDKMRQSDERLLALVKAAMDVVVAVGLLQLAPKKVTPRVTGAFGFVTSLISCYQQKAYRKQRGNLKWATCADAGTKIFHANTTVRQRLNSIATLRNSSRHHISSHEGKAKILYEVFKKRLETSDFTNMGFDLNTLIQATEDLSCLESPFTEERG

SEQ ID NO: 42547 - protein, 328 aa, Zea mays
  Coding DNA Sequence Number=SeqID_768
  Gene Ontology: Mol. function=binding
  Homolog annotation: Hit_ID=Q9AUY1; Match level="QueryCoverage=70%, HitCoverage=40%, E-value=9e-58, Identity=54%"; Hit description =Putative arm repeat containing protein
MNQVQGNWTNAKHATKLDSMIPTVAGIGERSFALLCHDDECRASGYTPAVLIAALLGLGLCVAVVAAEKRRRLVGVGATGDDHAAASAGLSQGTVQVQDHGGHWCSNSNRVQVQEMSSRGPDPAPPGEEQETAEELLERVRGMVPAAAAAARAAGGFPGRWKAIAAKLDALPACLSDLSSHPCFARNSLCRELLQSVAATLADAAELAARCREPPADGKLRAQSAVDALSGRLDLGLRDCALLVKTGVLSDAAGPSPPPEEAPDVRELLARLQIGHAEARGRAVDALLDALRRDERGVLAALGRASVAALVQLLTASAPAVREKAATA

SEQ ID NO: 42548 - protein, 233 aa, Zea mays
  Coding DNA Sequence Number=SeqID_769
  Gene Ontology: Mol. function=dihydrodipicolinate reductase activity; Cellular component=cytoplasm; Biological process=lysine biosynthetic process via diaminopimelate
  Homolog annotation: Hit_ID=Q10SL6; Match level="QueryCoverage=94%, HitCoverage=89%, E-value=1e-103, Identity=75%"; Hit description =Dihydrodipicolinate reductase, C-terminus family protein, expressed
  Pfam annotation: Domain name=DapB_C; Domain location=147-233; Score= -2.8; E_value=2.7e-06; Accession=PF05173.4; Description =Dihydrodipicolinate reductase, C-terminus
  Pfam annotation: Domain name=DapB_N; Domain location=15-144; Score =68.4; E_value=2.3e-17; Accession=PF01113.11; Description =Dihydrodipicolinate reductase, N-terminus
  Pfam module annotation: Pfam domain module=DapB_C::DapB_N; Domain location=147-233::15-144
MPPPPPAATAAQSTIKVVIVGATKEIGRTAVVAVSKARGMELAGAIDSQCIGEDAGQISGMDEPLEIPVLNDLTMVLGSIAQSRATGVVVDFSEPSAVYDNVKQAAAFGLSSVVYVPKIELETVTELSAFCEKASVGCLVAPTLSIGSVLLQQAAIQASFHYSNVEIVESRPNPSDLPSQDAIQIANNISDLGQIYNREDMDSSSPCLMPGLILAIRKVVRFKNLIYGLEKFL

SEQ ID NO: 42549 - protein, 331 aa, Zea mays
  Coding DNA Sequence Number=SeqID_770
  Homolog annotation: Hit_ID=Q10SN1; Match level="QueryCoverage=98%, HitCoverage=72%, E-value=5e-98, Identity=55%"; Hit description=F-box family protein, putative, expressed
METEDSVGWDFLDWLGPDISTTIFQLLDDPADLARVAAVSRSWRRFGTLPAPQFPVIVPVLGPVAELDASAVLLPPLPASRAVAVNKFSKHLCRQICPEAASFTRAVVVARLPPPPPPAAHAACESSQVAECRARDGEHAAYSYLAGALVSGKPATDLVMRCVGASSTDNFPDETIENTLVPHDMVNFRPSYWSSGGEDDPDVPESLTYTLASDLCVIEEIRIRPFEATFQHGHPIYSSKAVRIRLGHSKLDPGRETFVSDEDENLTAIADENYMWTYTSPEFPMLQENVLQTFKLPRPALCIGGIVKIELLGRIQKQFTDDKYYICFALG

SEQ ID NO: 42550 - protein, 839 aa, Zea mays
  Coding DNA Sequence Number=SeqID_771
  Gene Ontology: Mol. function=protein kinase activity; Cellular component=integral to membrane; Biological process=protein amino acid phosphorylation
  Homolog annotation: Hit_ID=Q8L4U4; Match level="QueryCoverage=99%, HitCoverage=92%, E-value=1e-172, Identity=54%"; Hit description =Putative receptor-like protein kinase
  Pfam annotation: Domain name=LRR_1; Domain location=120-142; Score =13.5; E_value=0.75; Accession=PF00560.23; Description=Leucine Rich Repeat
  Pfam annotation: Domain name=LRR_1; Domain location=144-167; Score =3.9; E_value=53; Accession=PF00560.23; Description=Leucine Rich Repeat
  Pfam annotation: Domain name=LRR_1; Domain location=168-190; Score =2.1; E_value=1.2e+02; Accession=PF00560.23; Description=Leucine Rich Repeat
  Pfam annotation: Domain name=LRR_1; Domain location=192-212; Score =1.2; E_value=1.7e+02; Accession=PF00560.23; Description=Leucine Rich Repeat
  Pfam annotation: Domain name=LRR_1; Domain location=216-237; Score =8.6; E_value=7.1; Accession=PF00560.23; Description=Leucine Rich Repeat
  Pfam annotation: Domain name=LRR_1; Domain location=22-44; Score=3.8; E_value=57; Accession=PF00560.23; Description=Leucine Rich Repeat
  Pfam annotation: Domain name=LRR_1; Domain location=240-262; Score =9.1; E_value=5.7; Accession=PF00560.23; Description=Leucine Rich Repeat
  Pfam annotation: Domain name=LRR_1; Domain location=264-286; Score =6.5; E_value=17; Accession=PF00560.23; Description=Leucine Rich Repeat
  Pfam annotation: Domain name=LRR_1; Domain location=288-311; Score =13.4; E_value=0.81; Accession=PF00560.23; Description=Leucine Rich Repeat
  Pfam annotation: Domain name=LRR_1; Domain location=313-335; Score =7.9; E_value=9.6; Accession=PF00560.23; Description=Leucine Rich Repeat
  Pfam annotation: Domain name=LRR_1; Domain location=337-359; Score =13.1; E_value=1; Accession=PF00560.23; Description=Leucine Rich Repeat
  Pfam annotation: Domain name=LRR_1; Domain location=361-383; Score =11.0; E_value=2.5; Accession=PF00560.23; Description=Leucine Rich Repeat
  Pfam annotation: Domain name=LRR_1; Domain location=385-407; Score =19.2; E_value=0.014; Accession=PF00560.23; Description=Leucine Rich Repeat
  Pfam annotation: Domain name=LRR_1; Domain location=409-430; Score =10.6; E_value=2.9; Accession=PF00560.23; Description=Leucine Rich Repeat
  Pfam annotation: Domain name=LRR_1; Domain location=46-68; Score=8.2; E_value=8.4; Accession=PF00560.23; Description=Leucine Rich Repeat
  Pfam annotation: Domain name=LRR_1; Domain location=71-93; Score =14.1; E_value=0.51; Accession=PF00560.23; Description=Leucine Rich Repeat
  Pfam annotation: Domain name=LRR_1; Domain location=95-118; Score =8.2; E_value=8.2; Accession=PF00560.23; Description=Leucine Rich Repeat
  Pfam annotation: Domain name=Pkinase; Domain location=550-832; Score =69.8; E_value=8.8e-18; Accession=PF00069.15; Description=Protein kinase domain
  Pfam annotation: Domain name=Pkinase_Tyr; Domain location=550-832; Score=54.3; E_value=8.4e-16; Accession=PF07714.7; Description =Protein tyrosine kinase
  Pfam module annotation: Pfam domain module=LRR_1::LRR_1::LRR_1::LRR _1::LRR_1::LRR_1::LRR_1::LRR_1::LRR_1::LRR_1::LRR_1::LRR_1::LRR _1::LRR_1::LRR_1::LRR_1::LRR_1::Pkinase::Pkinase_Tyr; Domain
  Pfam module annotation: Domain location=168-190::192-212::216-237::22- 44::240-262::264-286::288-311::313-335::337-359::361-383::385 -407::409-430::46-68::71-93::95-118::550-832::550-832
  Subcellular localization annotation: CTP_CleavageSite=79; ConfidenceScore=5.07e-01
SWTPAGDPCGFVGVTCDASTGAVQRLRIHGAGLAGTLAPSLARLPALESVSLFGNALAGGVPPGFRALAPTLRKLNLSRNALAGEIPPFLGAFPWLRLLDLSYNHFAGGIPAGLFDPCLRLRYVSLAHNDLTGPVPPGIANCSRLAGFDFSYNRLSGELPDRVCAPPEMNYISVRSNALSGQISNKLTSCGGIDLFDVGSNNFSGAAPFALLGSVNITYFNVSSNAFEGEIPSIATCGTKFSRLDASGNRLTGPVPESVVNCRGLRFLDLGANALGGAVPPVIGTLRSLSFLRLAGNPGISGSIPPELGGIEMLVTLDLAGLALTGEIPGSLSQCRFLLELNLSGNKLQGAIPDTLNNITYLKVLDLHRNQLDGGIPVTLGQLTNLVLLDLSENQLTGAIPPQLGNLSNLTHFNMSFNNLSGMIPPEPVLQKFDYTAYMGNQFLCGSPLPNNCGTGMKHRKRVGVPVIIAIVAAALILIGICIVCALNIKAYTRKSTDEDMKEEEEVLVSESTPPIASPGSNAIIGKLVLFSKSLPSRYEDWETGTKALLDKDCLIGGGSIGTVYKATFENGMSIAVKKLETLGSVRGQDEFEHEMSQLGNLSHPNLVAFQGYYWSSSMQLLLSEFVASGSLYDHLHGSHPHAFSESSSRGAGGELSWEQRFNVALGAARALAYLHHDCRPQILHLNIKSSNIMLDGKYEAKLSDYGLGKLLPILGSIELSRIHTAIGYIAPELSSPTLRYSDKSDVFSFGVVLLETVTGRKPVDSPGVATAVVLRDYVREVLEDGTASDCFDRSLRGIVEAELVQVLKLGLVCTSNTPSSRPSMAEVVQFLESVRISS

SEQ ID NO: 42551 - protein, 274 aa, Zea mays
  Coding DNA Sequence Number=SeqID_772
  Gene Ontology: Mol. function=solute:hydrogen antiporter activity; Cellular component=integral to membrane; Biological process =regulation of pH
  Homolog annotation: Hit_ID=Q10SB8; Match level="QueryCoverage=81%, HitCoverage=100%, E-value=2e-84, Identity=71%"; Hit description=K+ efflux antiporter, putative, expressed
  Pfam annotation: Domain name=Na_H_Exchanger; Domain location=1-233; Score=-19.0; E_value=0.0016; Accession=PF00999.11; Description =Sodiumhydrogen exchanger family
VSKFLVEKGSTNTLHGQVTIGTLILQDCAVGLLFALLPVLGGASGIFGGVMSMAKLLLVLSVFVAVTYMMTWSIVPRFLKLMIQLSSQCSDYCGLSLELGSFLAGVMISTTDFAHHTMEQVVEAIRNLFAALFLASIGMLIHVKFLWNHVDILLAAVILVIIVKSIVVAIVVKAFGYSMRTAFVVGLSLAQIGEFAFVLLSRASHLHLVGGKMYLLLLGTTALSLVTTPLIFKLIPVVMHLGILMRWFPSENSMQSELPLQEKAVMLEAHNRSL

SEQ ID NO: 42552 - protein, 132 aa, Zea mays
  Coding DNA Sequence Number=SeqID_773
  Gene Ontology: Mol. function=binding; Cellular component=nuclear pore; Biological process=protein import into nucleus, docking
  Homolog annotation: Hit_ID=Q6K6G8; Match level="QueryCoverage=80%, HitCoverage=15%, E-value=2e-48, Identity=85%"; Hit description =Putative Importin 7<Ran-binding protein 7
MPGVPFCALVVLASGDIIEDLYSPRTAAMDFVSELIRKRGKNNLQKFIHFIVDIFRRYDEAPADLKPYRQKDGALLAIGTLCDKLKQTDPYKTELESMLVRHVFPEFNSRVGHLRAKVEYISSSLVNNDIEY

SEQ ID NO: 42553 - protein, 200 aa, Zea mays
  Coding DNA Sequence Number=SeqID_774
MSERRARARCASSTPSRSAGRWSRRQEVAGHGESARHLGATRCGAGQGVSLRRPRLPLLPGELLAAVPALPGVRRPARGRRHHGPRAAEAVRRAGRCERRGVLVAGEGGRRRQAGDPVLGRQERARRPAGSRRRRFVRGYFVSRLAAKMSLAAVVIMIAEGAFGSSAGALPAAYPSAWSEAAASFIRTGMEENATGMEET

SEQ ID NO: 42554 - protein, 76 aa, Zea mays
  Coding DNA Sequence Number=SeqID_775
  Subcellular localization annotation: CTP_CleavageSite=25; ConfidenceScore=5.52e-01
MAAVRSLLRSSASLLRAAPALARSSATTRPSLRRALAAPPRLLRYGPARRYSAACLLPDTVDLMKLDEEQPGKGDH

SEQ ID NO: 42555 - protein, 268 aa, Zea mays
  Coding DNA Sequence Number=SeqID_776
  Homolog annotation: Hit_ID=Q10SE2; Match level="QueryCoverage=38%, HitCoverage=88%, E-value=2e-23, Identity=80%"; Hit description =Expressed protein
MGSPLGGWPSYNPHNFSQLVPADPSAQPSVGRVICEQLDNSKHLNGYFSHRLLVSDNHGGQEHPAEALVPEIRGEAEAKESCGGQPRSGEQQQEAAQGTCGRRRGPVERKKLKTHSWWPSSPASHLSVSCSLHLSLTAELRQFWESDADADAASRRKEGQDKPEATRTDLNAIARCESAGQKKHSQKNIVIKSSEHLHKHGSWGDPNQTDAVQVQRWDWKCAADLQWHVASCAGSSQQSTDQPAKATKQKGSVVLPGRQHQTNGRPAE

SEQ ID NO: 42556 - protein, 529 aa, Zea mays
  Coding DNA Sequence Number=SeqID_777
  Gene Ontology: Mol. function=protein serine/threonine kinase activity; Cellular component=membrane; Biological process=protein amino acid phosphorylation
  Homolog annotation: Hit_ID=Q10SE3; Match level="QueryCoverage=97%, HitCoverage=99%, E-value=0.0, Identity=73%"; Hit description=Protein kinase domain containing protein, expressed
  Pfam annotation: Domain name=Pkinase; Domain location=196-482; Score =142.9; E_value=8.5e-40; Accession=PF00069.15; Description=Protein kinase domain
  Pfam annotation: Domain name=Pkinase_Tyr; Domain location=196-482; Score=140.0; E_value=6.3e-39; Accession=PF07714.7; Description =Protein tyrosine kinase
  Pfam module annotation: Pfam domain module=Pkinase::Pkinase_Tyr; Domain location=196-482::196-482
MGARRRLLADTPPEHRHRQGAPASDWSAGYLNGWLSQPTPIFGLRLWVLVGIAVGAAIVLVLLLIFVCLSHRRRRRGDLLAANLYPAGDTKLLKQHLQHQATPTKDIQEIVRRQQAETPPPPAVQLAKAVAEPKTPPPPPPPQHRQPARKTPGSGGSERDGATPRSTGSAGMPEVSHLGWGHWFTLRELEEATDGLTEENVIGEGGYGIVYKGTLHDSTLIAVKNLLNNRGQAEKEFKVEVEAIGRVRHKNLVRLLGYCVEGAYRMLVYEYVDNGNLDQWLHGDVGEVSPLTWDVRMNIMLGTAKGLAYLHEGLEPKVVHRDIKASNILLDQQWNARVSDFGLAKLLWSEKSYVTTRVMGTFGYVAPEYASTGMLNERSDVYSFGVLIMEIITGRSPVDYTRAAGRGWHSRHLHNFLYQEYGGPAKLNSLPVYHRKAEEVLDPKMAEKPSPKTLKRALLVALRCVDPDANKRPKMGHVIHMLEMDDLLFRDDKKPGRDVHPHGSDRYSSKEEGSISKREHHHHHHHRHR

SEQ ID NO: 42557 - protein, 435 aa, Zea mays
  Coding DNA Sequence Number=SeqID_778
  Gene Ontology: Mol. function=diacylglycerol kinase activity; Biological process=protein kinase C activation
  Homolog annotation: Hit_ID=Q10SE4; Match level="QueryCoverage=68%, HitCoverage=88%, E-value=1e-133, Identity=74%"; Hit description =Expressed protein
  Pfam annotation: Domain name=DAGK_cat; Domain location=43-169; Score =93.4; E_value=6.8e-25; Accession=PF00781.14; Description =Diacylglycerol kinase catalytic domai
  Subcellular localization annotation: CTP_CleavageSite=35; ConfidenceScore=5.59e-01
MAAPATPRQSLILPRASSHSHSQPSAGGLTSYRVTASHRRRGDFVFVVNPLGANGRTGKQWKQLLPLLRTRLADQCNICECITSGPSHAIDVTREAIKDGVDAVIAVGGDGTLHEVVNGFFWEGSPLIPLGTGSDFARTFGWTNDPHDAIDRIVRGVKSKLDVGVMEGPNREPHFFVNVADIHLSAKAGYFASMYKSFGNLCYVFGALRAFWGHNNQDMRIKVNGGEWRTVHNVTALCIGNAKYFGGGMKITPTADPFSGNLEVVILQDFKWYDFILKLHRLYGGTHLSVNGVSSMRLRKTLNPYSTYTKRHLAHAIDKRRRGFLWKGQNNANGGSCPFAWEAVARPIQFGGLGIPNLERFGWTLRAAGFGCKRPILPALGLSMTIAEWCPTLIKLIPKRAMKHRTLAQGLINRSWVEDITGALSVQVLVEYLQL

SEQ ID NO: 42558 - protein, 84 aa, Zea mays
  Coding DNA Sequence Number=SeqID_779
  Subcellular localization annotation: CTP_CleavageSite=13; ConfidenceScore=5.08e-01
MKLSLSPYTLGGRAARVREVTGRTSTFSKSVPDGKRMRRRPSPAVADAQEAQKAYLVGQLWGPSPTHQARISRQNPRPQNGLPA

SEQ ID NO: 42559 - protein, 63 aa, Zea mays
  Coding DNA Sequence Number=SeqID_780
MGIARRTSVVYIGPSCVGARGVCSAPELFRAPESRPWPPSRFRARHRGVWSVREKGEEIVVSH

SEQ ID NO: 42560 - protein, 675 aa, Zea mays
  Coding DNA Sequence Number=SeqID_781
  Gene Ontology: Mol. function=protein dimerization activity; Cellular component=chromatin; Biological process=electron transport
  Homolog annotation: Hit_ID=Q2QPA8; Match level="QueryCoverage=86%, HitCoverage=85%, E-value=1e-159, Identity=67%"; Hit description=HAT family dimerisation domain containing protein
  Pfam annotation: Domain name=hATC; Domain location=463-554; Score =40.0; E_value=8.1e-09; Accession=PF05699.5; Description=hAT family dimerisation domain
  Pfam annotation: Domain name=zf-C2HC_plant; Domain location=10-60; Score=58.1; E_value=2.9e-14; Accession=PF07567.3; Description =Protein of unknown function, DUF1544
  Pfam module annotation: Pfam domain module=hATC::zf-C2HC_plant; Domain location=463-554::10-60
MAPLHGGFGAGKSDLKKKHSLKCNYCDKLINAGITRVKYHLANIAGFNVSKCKKVPTPVKEDMVALLTKNCDAKEKKRKEKQRERDEIDLDNSGGDNSSEEESEHGNDVIVLKSTKGGSSSRLATSGTIDKFYKPESIEESIQKNKRGLSTSQKIQTQLTTQKREERRDRACEYICQFFYEAGIAHNTVTLPSFAHMVEAIGAFGRGLRGPSSYEMSGPFLKKCKEKKWPKGTFPFHHCLDLMLEDLAKIGAVEETISSAKHVTAFLYAHTRVLDLMRKFLGKDLVRSGVTRFATAYLNLKSLQDNKKDISRLFRSDELNELGYLKKAKGKKANKVVRSEGFWKNVDMAVNFFEPLANVLRRMDSDVPAMGFLHGCMLEAKKEIAMRFDNNENRFKVAWDIIDKRWDNKLKTPLHLAGYYLNPYFYYPNKSEIELDGSFRAAVIACITKTVEDEETQDNIIEELNVYQEQQGTFGHDIAVRQRRNKNFNLAKWWLNHGTSTPNLRLLATRILNLTCNSSGCERNWSDFEQVHTKKRNKLLHDRMRDLVFVKFNSRLRQKRENKSKDPLEREMNDVLEDDANEFITGLVPNANSDKDEEHGDAQVGATIHEPQLSQPQPKRKRLVRPRKKKIRSLHSLLYGGLENEAVASSSESEDNGDGDISMHQYSDSDDLGDE

SEQ ID NO: 42561 - protein, 841 aa, Zea mays
  Coding DNA Sequence Number=SeqID_782
  Gene Ontology: Mol. function=nucleoside-triphosphatase activity; Cellular component=membrane; Biological process=cell division
  Homolog annotation: Hit_ID=Q1SK92; Match level="QueryCoverage=94%, HitCoverage=95%, E-value=0.0, Identity=64%"; Hit description=AAA ATPase, central region; DEAD/DEAH box helicase, N-terminal
  Pfam annotation: Domain name=AAA; Domain location=570-755; Score =265.3; E_value=1.2e-76; Accession=PF00004.19; Description=ATPase family associated with various cellular activities (AAA)
  Pfam annotation: Domain name=AAA_3; Domain location=570-696; Score= -8.0; E_value=0.0024; Accession=PF07726.2; Description=ATPase family associated with various
  Pfam annotation: Domain name=AAA_5; Domain location=570-702; Score =12.8; E_value=0.00019; Accession=PF07728.4; Description=ATPase family associated with various cel
  Pfam module annotation: Pfam domain module=AAA::AAA_3::AAA_5; Domain location=570-755::570-696::570-702
MERKSVVMSALGIGIGVGVGLGLASAPWAGGASASASARAAGVTVERVEQDLRRLLADGADSKVTFDEFPYYLSEQTRVVLTSAAYVHLKQAEISKYTRNLAPASRAILLSGPAELYQQMLARALAHYFQAKLLLLDPTDFLIKIHNKYGTGGGTEKTFKRSISETTLERVSGLFGSLSILPQKEQPKGTIRRQSSMTDVKLRSSESTSNLPKLRRNASSSSDMSSMASQGPSTNTAPLRRTSSWTFDDKILVQALYKVLLSVSKSYPIVLYIRDVEKFLHKSPKMYLLFEKLLNKLDGPVLVLGSRIVDMESDEELDYRLTVLFPYNIEIKPPENENHLVSWKSQLEEDMKMIQFQDNRNHIMEVLAENDLECDDLGSICLSDTMCLSKYIEEIVVSAVSYHLMNNKDPDYRNGKLVLSTKSLSHASEIFQGNKMTDKDSMKLEVTDGTLKASEKAIAPTTAKSETKPASSLPPVRPPAAGAPAPRVESKTELEKKDNPPPSAKVPEGTADNEFEKRIRPEVIPANEIGVSFDDIGALDDIKESLHELVMLPLRRPDLFKGGLLKPCRGILLFGPPGTGKTMLAKAIANEAQASFINVSMSTITSKWFGEDEKNVRALFTLAAKVSPTIIFVDEVDSMLGQRNRAGEHEAMRKIKNEFMTHWDGLLSRSDQRILVLAATNRPFDLDEAIIRRFERRIMVGLPSMESRELIMRRLLSKEKVDERLNFKELATMTEGYSGSDLKNLCTTAAYRPVRELIQKERKKELEKLKREKGETPSDLPKKKEETITLRPLSMTDLKEAKNQVAASFASEGVCMSELRQWNELYGEGGSRKKEQLTYFL

SEQ ID NO: 42562 - protein, 306 aa, Zea mays
  Coding DNA Sequence Number=SeqID_783
  Gene Ontology: Cellular component=endoplasmic reticulum
  Homolog annotation: Hit_ID=Q8S2K0; Match level="QueryCoverage=74%, HitCoverage=81%, E-value=9e-83, Identity=66%"; Hit description =Putative 24 kDa seed maturation protein
  Pfam annotation: Domain name=Reticulon; Domain location=121-304; Score=385.5; E_value=8.3e-113; Accession=PF02453.8; Description =Reticulon
MAEQTQPQGEGGASPKHESLMEKLADKLHVGGGKADSSSSSDSDSDERPRPSAPPADELKQPSFSDAAATAAAEAKAKVFRLFGREQPIHKALGGGKRMVLFPTLPMLLAIRLEISRSDLAADVFLWRNKNISAGVLGGATAIWILFELLGYHLLTFVCHGLIFALGVLFLWSNASSFIHKAPPKIPEVIIPEDLVVNIALSTRYEINRAFANLRQIALGRDLKKFLMVIAGFWLLSVLGSCCNFLTLVYIVFVVLHTVPVLYEKYEDQIDSYGEKGWVEIKKQYAVFDEKVLSKVPRGPAKDKKH

SEQ ID NO: 42563 - protein, 505 aa, Zea mays
  Coding DNA Sequence Number=SeqID_784
MATSKKEEKRWEKMWRILDLLDHQLENRDVGQHRLQGQAELVAATVRKTEERGSHNYVPVILGGTNFSVFGENYAEKMVWGRVFGSDSHGLVQQLAHGVGDEWHNNCDQDVVPNVPWMFVGMPQQASTYPVSSEMGLKVAWDGEMQFETHTHEGLLQQLAQGGEALEELAKKKGDVVDETSKSDQPSETVAMVMNGGSMEGLLPASVISVLEEGPEKEQNVENADATSAGGILSQDLVPELTHETNGASEIISAPKVDDEDWEILQVREISEEEVEDYLVVSKEGVVDEVMQVELADGGTGEEEMLFGKEVAGNLVQWDEEFSSNLSMRRGLIRDMVVERSYLNVFHSVVVATVGAVRIIPGVVLFEPNKNVVALVDASSSPLFQPSPFPRSIGTAMEDLEYVEGEAVVKNYYLSIEDVQIRVVDDIDLVDILFDFDHSLSLFGYSFKQILEAMADIWIGMDGFRVMMSHCLDIHGDGCKELPNMEFQELCHLYCRSKWTTIVAL

SEQ ID NO: 42564 - protein, 91 aa, Zea mays
  Coding DNA Sequence Number=SeqID_785
MSGAPGAVHSELLTFGFLRAHSAKIHRTVRCASGVMSIQRNGRLQKREQYAQKSEQASEAHRTVNNTYPVPHRTVRCDIKSALQRSESSEP

SEQ ID NO: 42565 - protein, 200 aa, Zea mays
  Coding DNA Sequence Number=SeqID_786
MPSMTTHCRRHRSATTFNVTDFPQNVIGRCFETRCDALNLGVLETVIAGIWIPERAHPCAASAPGPPPAARPLLPGGAAPSPPPRWPLLPRGAPPPLGGAGPSSPDGGPWFPRGAAPCSPAARPHAPHGAPLLPHSAASTPPRPRPYVSAPRWPRALVPRRGLACPRRGDEDDGFGYDYGNGEDEVVEEDFQEFQEYDEF

SEQ ID NO: 42566 - protein, 90 aa, Zea mays
  Coding DNA Sequence Number=SeqID_787
MEYKMENRRRPVRKSCPKFCQSTICSFKIWASSLLPRREPEFLIRYMNVKPNLRMRSKNLQFSKISFKSCLHNLSTLKKIGLSRLKKYRA

SEQ ID NO: 42567 - protein, 49 aa, Zea mays
  Coding DNA Sequence Number=SeqID_788
MSSNKSGGSKLPGARTLISSPSCALAESCRRYAIAPTIANTLYGLELAL

SEQ ID NO: 42568 - protein, 345 aa, Zea mays
  Coding DNA Sequence Number=SeqID_789
  Subcellular localization annotation: CTP_CleavageSite=26; ConfidenceScore=5.46e-01
MKKASAASRYAAYDSPSPSPRRAAPSAAAATPGAAHGSSRALVVAGRSGRDLLGAKPQAHGNLGSVLRRLISMDKKPPSSKNQLPVPPAAAAAAAAAAKNNGGGKLPGLSRKLFQKASSTEAAAPRKTKALMEVKNSGNNANTRTLGMVLRSERELLAQTRAQEDEIAALRLQLENKDREVERLKDLCLRQREEIRTLKDAVLFPDVEPEPEPDRRLRHEISTLTDQIQCLAQEVAQVKAEKHSARSCFDEDGYFSSPRTPGFNEETAFSLECSIGEAETPNYGSPDEMFSKDLNPCLTPCIAKSRSDVSAQFQSSSSQFTKLAQLFGMECQFGSAMSSIGECSM

SEQ ID NO: 42569 - protein, 55 aa, Zea mays
  Coding DNA Sequence Number=SeqID_790
MATSQKEEERWEKMWRILDWLDHQLENREANDMPRRKQQSFSKRVVAPQTSTTTY

SEQ ID NO: 42570 - protein, 414 aa, Zea mays
  Coding DNA Sequence Number=SeqID_791
  Gene Ontology: Mol. function=transferase activity, transferring glycosyl groups; Cellular component=cytoplasm; Biological process =carbohydrate metabolic process
  Homolog annotation: Hit_ID=Q1S4K2; Match level="QueryCoverage=98%, HitCoverage=53%, E-value=0.0, Identity=74%"; Hit description =Raffinose synthase
  Pfam annotation: Domain name=Raffinose_syn; Domain location=25-414; Score=310.4; E_value=3.2e-90; Accession=PF05691.3; Description =Raffinose synthase or seed imbibition protein Sip1
MAPPSITKNALDAIGLADDHVFMSITLKGTNFLANGQPILSNVPQNIVATPSPFSPLDKSKGAVGCFVGFDTEEPESQHVVSIGKLSGIRFMSIFRFKVWWTTHWVGNSGKDLEHETQMMMLDKNESGRPYVLLLPLLEGPFRASLQPGIDDNVDICMESGSTRVSRSTFRSCLYMHVGDDPYKLVKEAMKVARHHLGTFKLLEEKTPPGVVDKFGWCTWDAFYLNVHPKGVWEGVKGLAEGGCPPGMVLIDDGWQSICHDDDPISDKEGMNRTSAGEQMPCRLIKMEENYKFREYESIKLGNKKGMGAFIRDLKEEYKTIEHVYVWHALCGYWGGIRPNVQGMPPAKVVTPKLSQGLKMTMEDLAVDKIVNNGVGLVRPEVVHEMYEGLHSHLQSVGIDGVKVDVIHDYYKFE

SEQ ID NO: 42571 - protein, 93 aa, Zea mays
  Coding DNA Sequence Number=SeqID_792
  Gene Ontology: Mol. function=nucleic acid binding
  Homolog annotation: Hit_ID=Q5JML8; Match level="QueryCoverage=63%, HitCoverage=42%, E-value=1e-23, Identity=90%"; Hit description=DNA -binding protein-related-like
MTLSCEFISRLCLVCGSSLSSSPCDVLSSFAVDLLKPDATVILRNAKIDMFKGSMRLAVDKWGRIEATEPASFTVKEDNNLSLVEYELVNVAE

SEQ ID NO: 42572 - protein, 248 aa, Zea mays
  Coding DNA Sequence Number=SeqID_793
  Gene Ontology: Mol. function=catalytic activity; Cellular component =alpha,alpha-trehalose-phosphate synthase complex (UDP-forming); Biological process=trehalose biosynthetic process
  Homolog annotation: Hit_ID=Q5D6D9; Match level="QueryCoverage=98%, HitCoverage=28%, E-value=1e-107, Identity=72%"; Hit description =Trehalose-6-phosphate synthase
  Pfam annotation: Domain name=Trehalose_PPase; Domain location=88-248; Score=130.8; E_value=3.8e-36; Accession=PF02358.7; Description =Trehalose-phosphatase
MAITMPGVEKQIRHEKHYRYVSSHDVAYWSQSFMQDLERACKEHYNRHCWGFGFGLSFRILSISPSFRKLSIDHILSVHRRTCRRAIFLDYDGTVVPHSSIIKSPGPEVILFMNSICSDPKNTVFIVSGRGKNSLSDWFAQCENLGIAAEHGYFIRWNRRSEWETFPIAIDFGWKRIAEPVMQLYTEATDGSFIESKESALVWHHQDADPDFGSSQAKELLDHLENVLANEPVVVKRGHQIVEVKPQA

SEQ ID NO: 42573 - protein, 141 aa, Zea mays
  Coding DNA Sequence Number=SeqID_794
  Homolog annotation: Hit_ID=Q6Z806; Match level="QueryCoverage=24%, HitCoverage=6%, E-value=1e-11, Identity=84%"; Hit description =Putative DegP2 protease
  Pfam annotation: Domain name=AT_hook; Domain location=5-17; Score =4.6; E_value=3.6; Accession=PF02178.9; Description=AT hook motif
  Pfam annotation: Domain name=AT_hook; Domain location=55-67; Score =10.6; E_value=0.34; Accession=PF02178.9; Description=AT hook motif
  Pfam module annotation: Pfam domain module=AT_hook::AT_hook; Domain location=5-17::55-67
  Subcellular localization annotation: CTP_CleavageSite=53; ConfidenceScore=5.38e-01
MGDTKRKRGRKPKNPTPSQPLQSPPSSPSDDVFSLSNIEIIPSTSSAVEITTTASRPRGRPKKLPKLPDNPDPLPPPPILSPCRHVSNGTAIGVGGGSGGGGVGRGSYWCSSGAGNGCSGEGVLRSHRAQLLVALAEKKTV

SEQ ID NO: 42574 - protein, 386 aa, Zea mays
  Coding DNA Sequence Number=SeqID_795
  Gene Ontology: Mol. function=serine-type endopeptidase activity; Cellular component=chloroplast thylakoid membrane; Biological process=proteolysis
  Homolog annotation: Hit_ID=Q6Z806; Match level="QueryCoverage=99%, HitCoverage=67%, E-value=0.0, Identity=82%"; Hit description =Putative DegP2 protease
MLTVNDDEFWEGVSPVEFGELPALQDAVTVVGYPIGGDTISVTSGVVSRIEILSYVHGSTELLGLQIDAAINSGNSGGPAFNDKGNCVGIAFQSLKHEDAENIGYVIPTPVIQHFIQDYEKNEAYTGFPILGIEWQKMENPDLRKAMGMKPEQKGVRIRRVDPTAPESGVLKSSDIVLSFDGVDIANDGTVPFRHGERIGFSYLVSQKYAGDSSAIKVLRNSEILNFNIKLTSHRRLIPAHNKGRPPSYYIIAGFVFTTVSVPYLRSEYGKDYEYEAPVKLLDKLLHSMLQSPDEQLVVVSQVLVSDINIGYEDIVNTQVVALNGKPVKNLRRLAEMVENCDDEFLKFDLEYEQIVVLRTKTAKAATPDILATHCIPSAMSVDLKA

SEQ ID NO: 42575 - protein, 245 aa, Zea mays
  Coding DNA Sequence Number=SeqID_796
  Gene Ontology: Mol. function=serine-type endopeptidase activity; Cellular component=mitochondrion; Biological process=proteolysis
  Homolog annotation: Hit_ID=Q6Z806; Match level="QueryCoverage=97%, HitCoverage=42%, E-value=7e-95, Identity=71%"; Hit description =Putative DegP2 protease
MGMKPEQKGVRIRRVDPTTPESGVLKSSDIVLSFDGVDIANDGTVPFRHGERIGFSYLVSQKYTGDSSAIEVLRNSEILNFNIKLTSSRRVIPAHNRGKPPSYYIIAGFVFTTVSVPYLRSEYGDNYEYEAPMNLLDKLYHATLQSPDEQLVVVSQVLVSDINIGYEDIVNTQVLALNGKPVANLWRLAEMVENCDDEFLKFDLEYEQIVVLRTMTAKAATPDILATHCIPSAMSADLKALRPWT

SEQ ID NO: 42576 - protein, 91 aa, Zea mays
  Coding DNA Sequence Number=SeqID_797
  Gene Ontology: Mol. function=serine-type endopeptidase activity; Cellular component=chloroplast thylakoid membrane; Biological process=proteolysis
  Homolog annotation: Hit_ID=Q6Z806; Match level="QueryCoverage=83%, HitCoverage=13%, E-value=8e-34, Identity=87%"; Hit description =Putative DegP2 protease
  Subcellular localization annotation: CTP_CleavageSite=54; ConfidenceScore=5.14e-01
MDAVVKVFCIHTEPNFSLPWQRKRQYSSSSSGFVISGRRVLTNAHSVEHYTQVKVKKRGSDTKYLATVLSIGTECDIDGGVCLYILARFHA

SEQ ID NO: 42577 - protein, 157 aa, Zea mays
  Coding DNA Sequence Number=SeqID_798
  Homolog annotation: Hit_ID=Q2HTA7; Match level="QueryCoverage=85%, HitCoverage=7%, E-value=7e-50, Identity=72%"; Hit description =Helicase, C-terminal; Argonaute and Dicer protein, PAZ; Type III restriction enzyme, res ...
  Homolog annotation: Hit description=subunit; Ribonuclease III, bacterial
MEAAVEEAALSSSKRTKWQFMGARDAGSRDELRLVYGVSERTESDGAANLIQKLRAINYALGELGQWCAYKVALSFLTALQNDERANYQVDVKFQESYLRKVVDLLHCQLTEGAAMKSDSNDVEMHNSENPKPNELEEGELPDSHGINSLLAKCVIW

SEQ ID NO: 42578 - protein, 378 aa, Zea mays
  Coding DNA Sequence Number=SeqID_799
  Homolog annotation: Hit_ID=Q2HTA7; Match level="QueryCoverage=44%, HitCoverage=8%, E-value=8e-53, Identity=61%"; Hit description =Helicase, C-terminal; Argonaute and Dicer protein, PAZ; Type III restriction enzyme, res ...
  Homolog annotation: Hit description=subunit; Ribonuclease III, bacterial
  Pfam annotation: Domain name=DEAD; Domain location=275-378; Score= -46.9; E_value=0.052; Accession=PF00270.19; Description=DEADDEAH box helicase
MAGGPGGGGDAGGEHAAAAYWYDACEDSASLLCGIDFAASADFDPGLIPAMDCGADDGFVAEIDRILESINAEATPAPPPPPPAPAPAPAPAPVAPLQPQPQLQEAAATVAHNAVAVSDVAQRAPAVEARKEPRREFPVAAANGGDDCRDSKRQRLPAGGTGGPRHDWRRRPMAPPPPSRGWEDRGRGRREYDRPRKRDRDGHYGQCHDHHRRDPRGFWERDRGGKMVFRHGMWEAEADRQGKRARTKDGCPPAENKAEVDRSGKEKPATEEKARQYQLEVLEQAKSRNTIAFLETGAGKTLIAVLLIKSICDKMLKENKKILAVFLVPKVPLVYQQAEVIRERTGYRVGHYCGEMGQDFWDSRKWQREFESKQIMNF

SEQ ID NO: 42579 - protein, 75 aa, Zea mays
  Coding DNA Sequence Number=SeqID_800
MENHPGKQCYHKGSDHAAHDEQQHDMLLVNWQEIPAGPGDLHHDGATTPGVDGEDVVRFGLAQRGNREPRQRDRE

SEQ ID NO: 42580 - protein, 53 aa, Zea mays
  Coding DNA Sequence Number=SeqID_801
MAKSVQVGALEAPYLCWIDSLSFLALCMFMYTSQSLSDNTLKMQPSAITLSLS

SEQ ID NO: 42581 - protein, 113 aa, Zea mays
  Coding DNA Sequence Number=SeqID_802
MRWKRQAFPDPVTYLFSQCVPKEGNKDKLDSRASQLCGYSQVLYVSGRPKARAPASVATPPYRVGRSRSRRSGIHFTIAVGRWPRRAGAGWAVVSWSWAGRWNGPNYQRHLHT

SEQ ID NO: 42582 - protein, 589 aa, Zea mays
  Coding DNA Sequence Number=SeqID_803
  Homolog annotation: Hit_ID=Q7F1F1; Match level="QueryCoverage=53%, HitCoverage=92%, E-value=4e-98, Identity=55%"; Hit description =Putative auxin-induced protein
  Pfam annotation: Domain name=DUF568; Domain location=332-461; Score =135.3; E_value=1.7e-37; Accession=PF04526.4; Description=Protein of unknown function (DUF568)
VTCNYGHPPSTNEHARRVGDRIRNAAVTVASVRRGGCPVAIPRRPAGPPKRRASFSGSQSGASHVYGIRIRRRRRHHARQSPAPRPSRGCRPCMSLLLPAGRAPLMLIPGDVRADDGTEFLLHVDDKPASRENDRRDRCEEKRHGFGWHPPHVLGFVYLLLKGYFAVTGTTASISAPTCPPPSAASCPPPLLTEPASTPGPHPHQPLQRPAPKLQLRSVTQTNDTLGLEPTVPPARPRDPAAMSIPRLLLLAVLAAAAACAPAHAAGAGACAAEKFSGNRAFAACADLARLGASLHWSYDAAAASLSVAFLAAPPSAGGWVAWGLNPRAQSMDGTQALVAVPSSGGGGAYEVQTYSISGTSLGAPGPLSAYRTSGLAAEVGGDGRVRVFATLVLPNGTGAEVNHVWQVGPYSGGIQIHDTKGDNMNAKGTLNLLTGATAAASGGGSIIRKKNTHGILNAVSWGLLLPMGAIFARYLKTFRSADPAWFYLHVACQLLGYGVGVSGWATGIHLGNLSKGITYSLHRNIGITVFALGTLQRWKTGYIAAISVLGAVAVALEAVTWGVVLRRRKEESKSYNGTSNGGRLPLSM

SEQ ID NO: 42583 - protein, 98 aa, Zea mays
  Coding DNA Sequence Number=SeqID_804
MDTDPLTPVFVLHHSARNLRRHYHREGAIRAATSIAPLTPSLQEIGGLGIEASVWGCSRTGCRKELRPLTPSIAHRSRSSASVPLNTVDRPQHGPNRR

SEQ ID NO: 42584 - protein, 140 aa, Zea mays
  Coding DNA Sequence Number=SeqID_805
MGHNTGPVLSPRLVGRRVKRPNARYSGPEWTLLLTNWYQRLPILALEIPPYFTRLAKMAGASDPNLAAALNAQSKQIKAQSKSLTTQSKLLQQLCDRLETQDARWRHLEKSVAANSDDIVAIQVQVANCDTTPDTIGALG

SEQ ID NO: 42585 - protein, 276 aa, Zea mays
  Coding DNA Sequence Number=SeqID_806
  Gene Ontology: Mol. function=GPI anchor binding; Cellular component =membrane; Biological process=auxin mediated signaling pathway
  Homolog annotation: Hit_ID=Q84QW4; Match level="QueryCoverage=58%, HitCoverage=61%, E-value=2e-47, Identity=63%"; Hit description =Putative auxin-induced protein
  Pfam annotation: Domain name=DUF568; Domain location=88-201; Score =68.9; E_value=1.7e-17; Accession=PF04526.4; Description=Protein of unknown function (DUF568)
MPRHLALLLPLLLLASPAATRLASAACAGEKFPAGRAYASCEDLPKLGASLHWTYDASKSSLSVAFVAAPAAAGGWVAWGLNPTGEGMAGAQALVALAGAGAAAPAVRTYNITGYVPLGKASTPLDFPATDLAADAAGGKIRVYGKLQLRKGMKAVNQVWQVGASSTGGAPDKHAFQADNLGAKSKLVLAGKAPAAAEAPSPALAPEAGGPSAGGDSGAGASSSTAPSKSPNAAVPAAGVSAPALLALALVGFLAAQDELAAGALQSPAMQATPAG

SEQ ID NO: 42586 - protein, 148 aa, Zea mays
  Coding DNA Sequence Number=SeqID_807
MGKSNKCKREPTPPSEDFGDSEYSEEEFSSESEKSPAPVSPPVSSDDSDDSQGLATEVWTYIRAVERSGLEGSDESEYSSDEEDSSDSSEEGGGGDGRDDDDDDGGDCDDDEDDGDGGGRCGSKGGNGGSSGGSNGDGSSKGSNKASG

SEQ ID NO: 42587 - protein, 69 aa, Zea mays
  Coding DNA Sequence Number=SeqID_808
  Homolog annotation: Hit_ID=Q69UI5; Match level="QueryCoverage=94%, HitCoverage=22%, E-value=3e-08, Identity=60%"; Hit description =Putative avr9 elicitor response protein
MMAAAALRPHKSSPARVPTRCVAALCAACFLVGVGVVNRYWPVPEPHPGCPDKGVGQDDIRHRDAPGCG

SEQ ID NO: 42588 - protein, 103 aa, Zea mays
  Coding DNA Sequence Number=SeqID_809
  Gene Ontology: Biological process=nervous system development
  Homolog annotation: Hit_ID=Q69UI7; Match level="QueryCoverage=92%, HitCoverage=17%, E-value=3e-27, Identity=64%"; Hit description=VPS13- like protein
MFEGVVSQVLYGLLRRYVKGIQKEQLKIGIWKEEILLENVELILEAFDYLQLPFALKNGRIGKLSIRIPWKKLGWDPIIIVIEDVYVCACPREDSEACHRIWS

SEQ ID NO: 42589 - protein, 59 aa, Zea mays
  Coding DNA Sequence Number=SeqID_810
  Gene Ontology: Mol. function=galactosyltransferase activity; Cellular component=membrane; Biological process=protein amino acid glycosylation
  Homolog annotation: Hit_ID=Q69UI5; Match level="QueryCoverage=55%, HitCoverage=8%, E-value=5e-13, Identity=90%"; Hit description =Putative avr9 elicitor response protein
MSLTLSANCSDCEWKGQAGNPCAASFDWNCTGICNPVERMTEMCSNGIVSWPVRVRKLG

SEQ ID NO: 42590 - protein, 533 aa, Zea mays
  Coding DNA Sequence Number=SeqID_811
  Homolog annotation: Hit_ID=Q10SM0; Match level="QueryCoverage=53%, HitCoverage=50%, E-value=3e-37, Identity=41%"; Hit description =Expressed protein
MAARGVQAPAPRRPVTLRDFLELGCDSSSDGFRSYPRRLLPLPPDAVLHLQQQQAPPTPRAEAAAAQRLLRRSSSSLALALFSSSLPGSGSGSGPAGALARISSISRSFSRRIKEGFWRRRDEDEGDGDGDDDYDGDYFDDRDSCGFPSPLVSSCSASDSDESEADVTTAPERNKATASSSTSPSPSPSSADHDRTRTDAAVADGDKAETAAVEDGDSTTGAPSTVGDKQQQLSPVSVLDFAFDDNDGEEEGSDAGTSCSCSSPAFQFQRCTPPAVDLHGTKPQAQLLHKIRRYDGVAQGIDPVDLDARFTAATSESGESADASTRLATTTSSSSTDTSSSSSSSAETTAPQHDDEEAEHQSAERALSPSPSLHYQADQEEPDDEYRLLARLLEHDAAAAECLDDEVARVLVLDFFAEGADRRLTRSAAAGGRPLHDDRSESLLVRAAAAWLRGAGPRWGIGDVARSGKAALDDMERSRRWMCVGEEECDVAADVECDAVDALVDELVTELAIVLPRWPRCDVAVDDDNVLVD

SEQ ID NO: 42591 - protein, 100 aa, Zea mays
  Coding DNA Sequence Number=SeqID_812
  Gene Ontology: Mol. function=metal ion binding; Biological process =metal ion transport
MARKDGSSSERLSLSEKPVASGCFAATEEIQEVESAPAVDVKPKREEASEAADAKSAQAQEQAQEQVVVLKVSLHCKACAGKVKKHLSKMEGSETSVRSS

SEQ ID NO: 42592 - protein, 673 aa, Zea mays
  Coding DNA Sequence Number=SeqID_813
  Gene Ontology: Mol. function=unfolded protein binding; Cellular component=cytosol; Biological process=cellular protein metabolic process
  Homolog annotation: Hit_ID=Q9FW88; Match level="QueryCoverage=83%, HitCoverage=97%, E-value=0.0, Identity=74%"; Hit description =Putative cytosolic chaperonin, delta-subunit
  Pfam annotation: Domain name=Cpn60_TCP1; Domain location=37-574; Score=623.1; E_value=2.4e-184; Accession=PF00118.14; Description=TCP- 1cpn60 chaperonin family
MAAAVAAPAPSRKTETYTDTKRRDDVRGANIAAARAVADAVRTSLGPRGMDKMIASGDQAQEVIITNDGATILSRMALLQPAARMLAELSRSQDAAAGDGTTTVVVLAGSLLRRAQSLLSAGAHPTAAADALHRLATRAVEILHAMAIPIELSDRESLVKSASTALNSKVVSQYSTLLSPLAVDAALSVVDPAHPDLLDLRDIRIVKKLGGTVDDTELIPGLIFDKKASHAAGGPTRMENAKIAVIQFQISPPKTDIEQSVIVSDYAQMDRILREERNYILGMVKKIKAAGCNVLLIQKSILRDAVTDLSLHYLAKAKILVVKDVERDEMEFITKTLNCLPIANIEHFRTDKFGYADVVEEVSVGEGKVVKITGIKDMGRTATVLVRGSNQLVIDEAERSLHDALCVISRNQNGRDAVLGVDVASCETLCDASLKYWLDETHGTNARCLVSKRFLIAGGGAPEIEMSMQLAAWAKELRGMESYCIKEFAEALEVIPYTLAENAGLNPISIVTELRNRHARGEKNTGINVRKGQITNILEENVVQPLLVSTSAITLACECVRMILKIDDIVTVRSVVASYPPTPKRANVAAPFHPATSQALTSALFISLQVLSIEAAGEDHIADLPRSSSPSLSHPFLQDKPNVNHVRARISNLHVEGASSLGFDSHDASSLRG

SEQ ID NO: 42593 - protein, 102 aa, Zea mays
  Coding DNA Sequence Number=SeqID_814
MSARLTTLVRRFRPRCVYHTCSRSTPRWELHAVTSFIDSISTPVAQPLLHSHDQRYELPKKAQRSFKCYFNIFNGPLSHLATKALVALCELEDPNEAGLQSS

SEQ ID NO: 42594 - protein, 416 aa, Zea mays
  Coding DNA Sequence Number=SeqID_815
  Gene Ontology: Mol. function=protein-tyrosine kinase activity; Cellular component=integral to membrane; Biological process=protein amino acid phosphorylation
  Homolog annotation: Hit_ID=Q6ZDZ0; Match level="QueryCoverage=99%, HitCoverage=52%, E-value=3e-85, Identity=45%"; Hit description =Putative Systemin receptor SR160
  Pfam annotation: Domain name=LRR_1; Domain location=111-134; Score =12.4; E_value=1.3; Accession=PF00560.23; Description=Leucine Rich Repeat
  Pfam annotation: Domain name=LRR_1; Domain location=135-156; Score =14.9; E_value=0.3; Accession=PF00560.23; Description=Leucine Rich Repeat
  Pfam annotation: Domain name=LRR_1; Domain location=161-183; Score =1.4; E_value=1.6e+02; Accession=PF00560.23; Description=Leucine Rich Repeat
  Pfam annotation: Domain name=LRR_1; Domain location=87-109; Score =2.0; E_value=1.2e+02; Accession=PF00560.23; Description=Leucine Rich Repeat
  Pfam module annotation: Pfam domain module=LRR_1::LRR_1::LRR_1::LRR _1; Domain location=111-134::135-156::161-183::87-109
ASLGLRARDWPLRADPCARWAGVDCAAGRVVGVTVAGLRRTRLGAARPPLLALDGLRRLTALARFNASGFPLPGEIPPWLAAGLPPPLAVLDLTSAAVNGTLPPDLGASGNLTALLLSGNTLTGPVPPALLSAAGLRVLDLSRNNLSGPLPNVSVSLGAAGASVFNVSGNSLYGVAADAIGALRRRFQVVDVSSNYLDGAWNGSDTTVLATTNCFYGVPAQRSRADCEEFYRKQGVKLVDPPAPSPVPSSEPPPSPSPEKKKKKKHGISKKLLIGVLVAAGTLVAVFFIALLFCLVKRRSRGRRGGRGRGVAPNEEGTRSVSVRRRDSSVNPVVLSPSAVSPSANDGPKDASAVIGEITYEQLVLATGGFGDDQLIKHGHSGDMYHGVLENGSHVIVKKVGAKGANRHASELDFYV

SEQ ID NO: 42595 - protein, 289 aa, Zea mays
  Coding DNA Sequence Number=SeqID_816
  Gene Ontology: Mol. function=oxidoreductase activity, acting on the CH-CH group of donors; Cellular component=mitochondrion; Biological process=tricarboxylic acid cycle
  Homolog annotation: Hit_ID=Q6ZDY8; Match level="QueryCoverage=79%, HitCoverage=59%, E-value=4e-88, Identity=85%"; Hit description =Succinate dehydrogenase [ubiquinone] flavoprotein subunit, mitochondrial precursor
  Pfam annotation: Domain name=DAO; Domain location=36-279; Score= -58.4; E_value=0.046; Accession=PF01266.14; Description=FAD dependent oxidoreductase
  Pfam annotation: Domain name=FAD_binding_2; Domain location=36-289; Score=42.1; E_value=1.4e-10; Accession=PF00890.14; Description=FAD binding domain
  Pfam module annotation: Pfam domain module=DAO::FAD_binding_2; Domain location=36-279::36-289
MWRSCVSRGLSRAKASASRLLSTASSSYTVVDHTYDAVVVGAGGAGLRAAIGLSEHGFNTACITKLFPTRSHTVAAQGGINAALGNMSEDDWRWHMYDTVKGSDWLGDQDSIQYMCREAPKAVIELENYGLPFSRTEEGKIYQRAFGGQSLDFGKGGQAYRCACAADRTGHAMLHTLYGQAMKHNTQFFVEYFALDLLMDNEVSPIIVKVFFTENVPVVKVVSLEIVKEPIPVLPTVHYNMGGIPTNYHGERLGRKAEELMLVRISRFEAILLTLYTLMTHFYVISNNF

SEQ ID NO: 42596 - protein, 652 aa, Zea mays
  Coding DNA Sequence Number=SeqID_817
  Gene Ontology: Mol. function=isomerase activity; Biological process =cell redox homeostasis
  Homolog annotation: Hit_ID=Q5EUD1; Match level="QueryCoverage=99%, HitCoverage=100%, E-value=0.0, Identity=99%"; Hit description =Protein disulfide isomerase
  Pfam annotation: Domain name=DUF1692; Domain location=435-649; Score =296.0; E_value=6.9e-86; Accession=PF07970.2; Description=Protein of unknown function (DUF1692)
  Pfam annotation: Domain name=Thioredoxin; Domain location=311-430; Score=35.6; E_value=1.7e-07; Accession=PF00085.10; Description =Thioredoxin
  Pfam module annotation: Pfam domain module=DUF1692::Thioredoxin; Domain location=435-649::311-430
MISSSKLKSVDFYRKIPRDLTEASLSGAGLSIVAALAMVFLFGMELSSYLAVNTTTSVIVDRSSDGEFLRIDFNMRCPNLRTNSVHEEGVSTGVIVVEPQPLMQHFRVHAAKAHLHLHARRREAKATTEGESEAETNFRKGVTLGTTPSRVRDGSGFLPRKTMLGNVTPPTGEAAPTGVAVAEAFAQEAPPAPTSGQEPLSPPSIHPARNPPEGRRRDGCRTSRKAVSAATPTGLAHRTGQLLATFPALSCEFASVDVSDVLGTNRLNITKTVRKYSIDRNLVPTGSEFHPGPIPILNKHGDDVEEDHVDGAFSLSSRNFDSFSHQYPVLVVNFYAPWCYWSNRLKPSWEKTAKIMRERYDPEMDGRILLGKVDCTEEVELCRRNHIQGYPSIRVFRKGSDIKENQGHHDHESYYGERDTESLVAAMETYVANIPKEAHALEDKSNKTVDPAKRPAPMASGCRIEGFVRVKRVPGSVVISARSGSHSFDPSQINVSHYVTQFSFGKRLSPRMLHEFIRLTPYLRGYHDRLAGQSYTVKHGEVNANVTIEHYLQVVKTELVTQRSSKELKVLEEYEYTAHSSLVHSFYVPVVKFHFEPSPMQVLVTEVPKSFSHFITNVCAIIGGVFTVAGILDSIFHNTLRMVKKIELGKNI

SEQ ID NO: 42597 - protein, 135 aa, Zea mays
  Coding DNA Sequence Number=SeqID_818
  Gene Ontology: Mol. function=structural constituent of ribosome; Cellular component=intracellular; Biological process=translation
  Homolog annotation: Hit_ID=O23290; Match level="QueryCoverage=62%, HitCoverage=81%, E-value=6e-26, Identity=67%"; Hit description=60S ribosomal protein L36a
  Pfam annotation: Domain name=Ribosomal_L44; Domain location=42-115; Score=143.0; E_value=7.9e-40; Accession=PF00935.9; Description =Ribosomal protein L44
MFGCSDFNQSRLSRFTVYLLIAARVNVPKTKKTYCKNKECKKHTLHKVTQYKKGKDSLSAQGKRRYDRKQSGYGGQTKPVFHKKAKTTKKIVLKLQCQSCKHYSQHAIKEDNLQEHKTSIPALLGTELIDTELNS

SEQ ID NO: 42598 - protein, 53 aa, Zea mays
  Coding DNA Sequence Number=SeqID_819
MDLETGKSRGSLDLRCMNVSLLTKWIWKLESQEGVSLTKFLSSSIGKLGFPQK

SEQ ID NO: 42599 - protein, 102 aa, Zea mays
  Coding DNA Sequence Number=SeqID_820
MARLTGGEEGPTRGGVSSGRSWRSRRERSPVNLRSGRVESERGCTVKASVGFIGAGVGVGVGSCLARRGVERRGVLWRCQGASNAWPFPSAHVLAPIEQPNV

SEQ ID NO: 42600 - protein, 258 aa, Zea mays
  Coding DNA Sequence Number=SeqID_821
  Gene Ontology: Mol. function=protein disulfide oxidoreductase activity; Cellular component=chloroplast; Biological process=cell redox homeostasis
  Homolog annotation: Hit_ID=Q84Y95; Match level="QueryCoverage=40%, HitCoverage=60%, E-value=7e-35, Identity=65%"; Hit description =CAXIP1 protein
  Pfam annotation: Domain name=Glutaredoxin; Domain location=83-147; Score=112.0; E_value=1.7e-30; Accession=PF00462.14; Description =Glutaredoxin
  Subcellular localization annotation: CTP_CleavageSite=61; ConfidenceScore=5.67e-01
MAASAPAVRPLARAAIPIPLSARPRTARVSLLPLAPLAPAQRLALGRTGQARLPARSRSVRCLAALSPEMRETLDKVVGSSKVLLFMKGTKDFPQCGFSHTVVQILRSLDVPFETLDVLANEALRQGLKEYSSWPTFPQLYIDGEFFGGCDITVGKLLYVLSLHSQMLEPVRFTELTISCGARTLERPQVLDRRHGTRRSPLAVAGEKPALTLSTSVLCPSHPHSPHRSCCFLYAFCSCYNVHSDTERHTRVENCRKL

SEQ ID NO: 42601 - protein, 276 aa, Zea mays
  Coding DNA Sequence Number=SeqID_822
  Gene Ontology: Mol. function=transporter activity; Cellular component= intracellular; Biological process=transport
  Homolog annotation: Hit_ID=Q851Z2; Match level="QueryCoverage=96%, HitCoverage=95%, E-value=8e-88, Identity=64%"; Hit description =Putative phosphatidylinositol/phosphatidylcholine transfer protein
  Pfam annotation: Domain name=CRAL_TRIO; Domain location=108-275; Score=64.9; E_value=2.5e-16; Accession=PF00650.10; Description =CRALTRIO domain
  Pfam annotation: Domain name=CRAL_TRIO_N; Domain location=8-93; Score= 11.6; E_value=0.0023; Accession=PF03765.5; Description=CRALTRIO, N -terminus
  Pfam module annotation: Pfam domain module=CRAL_TRIO::CRAL_TRIO_N; Domain location=108-275::8-93
MAEREQQEQVARDDAAEWKQVAELRAVTQAQDPSCKSKRKSQDARTHDRLTVTQDEDDYTLRRFLRARDHNIGKASAMLLKYLKWKPAAKPHGAIAAAEVAREAAQGKLYLQGHDREGRPLIYGFGARHHPARRDLDEFKRYVVHVLDATVARLPPPPPGDVRQEKFAAVADLAGWGYANCDIRGYLAALDIMQSYYPERLARVFLVHVPYVFMAAWKIVYPFIDDNTKKKFVFVPDKDLDRTLREAIDDSQLPEIYGGKLKLKLVTPPANKLPSH

SEQ ID NO: 42602 - protein, 242 aa, Zea mays
  Coding DNA Sequence Number=SeqID_823
  Homolog annotation: Hit_ID=Q2QQY1; Match level="QueryCoverage=23%, HitCoverage=25%, E-value=7e-15, Identity=67%"; Hit description=SAM domain family protein
  Pfam annotation: Domain name=SAM_1; Domain location=174-237; Score =66.6; E_value=8e-17; Accession=PF00536.20; Description=SAM domain (Sterile alpha motif)
  Pfam annotation: Domain name=SAM_2; Domain location=173-239; Score =53.6; E_value=6.8e-13; Accession=PF07647.7; Description=SAM domain (Sterile alpha motif)
  Pfam module annotation: Pfam domain module=SAM_1::SAM_2; Domain location=174-237::173-239
MADLRPPEPGTNGSSAVVVAALPAVEAAKAAAAAAAAACGAQPPAPPYSKRRRRPSVRLGDIDAPPPRRNHKPSSSSHSRPPRRPHPDDPDTHGGRGPKPPAQRRPRTAWIPAGPAEGCYDDEERYYDDEDQSDSAAAAAAAAAMARVSGSRDAGGDESDGVADWGLPNGRLSSAMRHGRVKAWLDGLGLSRYAPVFEIHEVDGEVLPLLTLEDLKDMGIGAVGSRRKMYAAILKLRSDNAS

SEQ ID NO: 42603 - protein, 153 aa, Zea mays
  Coding DNA Sequence Number=SeqID_824
  Gene Ontology: Mol. function=receptor activity; Cellular component =membrane; Biological process=Golgi organization and biogenesis
  Homolog annotation: Hit_ID=Q84LH7; Match level="QueryCoverage=87%, HitCoverage=16%, E-value=4e-55, Identity=81%"; Hit description =Putative conserved oligomeric Golgi complex component
MINSSTLVKKWYICNLCPQVFLEGDRIRYLSEDDKTKLCRGSTDKITAIYYDLVSEVVTVLLRSIYFNSLKARKTESSLQRLRQGAQRRVGASTDASDNIISDTDKICMQLFLDIQEYARNLRAIGIDAREIDSYRALWQCVAPKDRQENIQF

SEQ ID NO: 42604 - protein, 308 aa, Zea mays
  Coding DNA Sequence Number=SeqID_825
  Gene Ontology: Cellular component=membrane; Biological process =hypersensitive response
  Homolog annotation: Hit_ID=Q852C9; Match level="QueryCoverage=83%, HitCoverage=98%, E-value=6e-74, Identity=64%"; Hit description =Putative nitrate-induced protein
  Pfam annotation: Domain name=NOI; Domain location=188-263; Score =49.7; E_value=9.8e-12; Accession=PF05627.2; Description=Nitrate -induced NOI protein
MAACASPNRLSVLGVCINLLTWIYLFQHQGPGVPKFGSWEDEGDHPYTQYFENARKGKSPGRSATQNEHRTGDPEALFKEDTTPSAKASPLRTGSEDPVAPKPKDAAFARGKPYAEPATHKHGANTSYERKTGMERSPLHPHHQARLVNRGGVSSPSWERRGSSEGNRGAAPTTPGRSSKMRPGGRGDETPERGSAVPKFGEWDEKDPSTGEGFTDIFNKVREEKQSGDAPVITSGNAGGGYSRSNQGRKYESSVSQLQTCCHNAGSNYFLGLKHLFAGLLMLQLVQELMLPCMVADASAGSAADRCR

SEQ ID NO: 42605 - protein, 193 aa, Zea mays
  Coding DNA Sequence Number=SeqID_826
  Gene Ontology: Mol. function=structural constituent of cytoskeleton; Cellular component=cytoskeleton; Biological process=actin filament polymerization
  Homolog annotation: Hit_ID=Q1W4C5; Match level="QueryCoverage=96%, HitCoverage=98%, E-value=5e-77, Identity=79%"; Hit description=Actin- related protein complex 4
  Pfam annotation: Domain name=ARPC4; Domain location=5-192; Score =319.6; E_value=5.6e-93; Accession=PF05856.3; Description=ARP23 complex 20 kDa subunit (ARPC4)
MSTHQANTLRLYLTCIRNTLEAAMCLQNFPCQEVERHNKPEVELKTSPELLLNPVLICRNEAEKCLIETSINSIRISMKVKQADELENILAKKFLRFLSMRAEAFQVLRRKPVQGYDISFLITNYHCEDMHKHKLIDFIVQFMEMQRCLYVGSVLTLFCLHEPQDIDKEISELKLSVNTRGRLVATEFLKQFL

SEQ ID NO: 42606 - protein, 536 aa, Zea mays
  Coding DNA Sequence Number=SeqID_827
  Gene Ontology: Mol. function=zinc ion binding; Cellular component =intracellular
  Homolog annotation: Hit_ID=Q69L44; Match level="QueryCoverage=100%, HitCoverage=76%, E-value=0.0, Identity=80%"; Hit description=SWIM zinc finger family protein-like
  Pfam annotation: Domain name=SWIM; Domain location=424-460; Score =14.2; E_value=0.014; Accession=PF04434.8; Description=SWIM zinc finger
MRGCTCHFTIKRLYARPSLLLIIYHERRHVNKSGFICHGPLDRDAIGPGARKMPYIGSEIQQQTMSLIYLGVPEENILQTHIEGIQRYCSKDAKVDNLASQYVQKLGMIIKRSTHELDLDDQASIRMWVDRNRKSVFFYQDSTEADAFILGIQTQWQLQQMMRFGHQSLLASHSSFGVSKLKYPLHTLLAFDSRQHALPVAWVITRSVTKKDTLKWMSTLTDRIHSIDSTWGIGGFIIDDPASELGPIREVFACPVLFSMWHIRRTWLKNVIKKCSNVEVQREIFILLGKTICNIWSEKNPMDALGQLFQDFVDQTAFIKYFKSFWVPKLEMWIDSIRNLPLASQESCGAIEGYHLKLKLTTELHSSYWINLFADESGSFPEVKADYIASTSWQRALQIPDDAVTFDDKDPLVARVVSQKETSQTRTVWSPGSEFSLCNCSWSMQGNLCKHVLKVNMVCGARKDFQPSLSFQSFQHVLLDLWQKPLDDSFSLDLSVARVMQMQEKIKHVAELATSSGIAQVAGKLPMQWTKKRGRR

SEQ ID NO: 42607 - protein, 690 aa, Zea mays
  Coding DNA Sequence Number=SeqID_828
MRGRRACLWWFLAQDDSHSIGGYGARAVINIDLERACFAELVFNTSLRSVPVYEKQKEKKHKKDKKDKVRKEGKEKKDKDRSKDKHKDKKDRKEKHRDKKKDKSKDKSRDSGEGIERNDEAHHGQKVGESSRRSEEIKDLKFREDLVRDVQDEKGAASRPSENYGVSNDRNRKGFSASPAMETERFALNKVHIQSSNAPRKNEGLVQQSISANRQKNGTSIRHSESLTTFAQRTVGGFPPAPSTEEKFKAARPLSNTEAAPRKEGIGQRISNISILVPKRTENTNRDVAKKEVGTSSPLPPNPANAMHKGNDKVGRPMENTQVPMQRFGSPSMSTAAVGMDRGTPRSSIPSPSITIRRPNGIVRPPKNISVSSKKPDAGDVSPAIGKEKEQGGRLLQANISTDQKLVMSKPPAVEKAAHGSAERTEKVSRDGVPDVAKKEDKKSDRHEKKKRKEKDKHKERKKEKEAKKEKEKHNYKEHDKTRENNISYPVDSLNLKPSAPPVAPPVDGGKSVVPDENLKKRKNHETNGYLQNHLEMRPTKLPRPALPINLVENGTASHVAAPLSSVKPEAIINNIEKAERLHKEEKMNGNQQAERAPVDPVAAYENGITSRKSPHPDCKYLSQIYSVPEAPQMMELPGQEGEDWLFDRGGTKSRKPSSAAEADEAPQVWAQALKIDQADVIALPYVVPF

SEQ ID NO: 42608 - protein, 349 aa, Zea mays
  Coding DNA Sequence Number=SeqID_829
  Gene Ontology: Mol. function=hydrolase activity, hydrolyzing O -glycosyl compounds; Cellular component=cellulose and pectin -containing cell wall; Biological process=carbohydrate metabolic process
  Homolog annotation: Hit_ID=Q5N863; Match level="QueryCoverage=75%, HitCoverage=54%, E-value=1e-131, Identity=83%"; Hit description =Putative latex cyanogenic beta glucosidase
  Pfam annotation: Domain name=Glyco_hydro_1; Domain location=11-344; Score=218.0; E_value=2.2e-62; Accession=PF00232.9; Description =Glycosyl hydrolase family 1
MGSTGREPEVTRANFPDGFVFGVATSAYQIEGARREGGKGDNIWDVFTDDKERVLDRSNAEIAVDHYHRYKEDIELMASLGFSAYRFSISWARIFPDGLGEKVNEQGVAFYNDLINFMISKGIEPYATLYHWDLPNNLQKTLGGWISDKIVEYFALYAEACFANFGDRVKRWITINEPLQTAINGYGIGIFAPGGCQGETARCYLAAHHQILAHAAAVDVYRRKFKAAQSGEVGLVVDCEWAEPFSEKLEDQIAAQRRIDFQLGCQGSSLADVGTELELIEDRTWKSFGEDAVELNVVGTCESLGEEEPSTFSEAEKHHSWRRSMIEEIDSIERNQRIVPLLRFCPVTG

SEQ ID NO: 42609 - protein, 88 aa, Zea mays
  Coding DNA Sequence Number=SeqID_830
  Homolog annotation: Hit_ID=Q5N864; Match level="QueryCoverage=78%, HitCoverage=86%, E-value=2e-11, Identity=51%"; Hit description =Ribosomal protein-like
MHECCRGGGDRRGHSMDTRDRDRKLRIFSGIEHPFHDRPLEAFVMPPRQVREMRPRARRAMLRAQKKEHSNRAKEEEDAKNATAEVTA

SEQ ID NO: 42610 - protein, 344 aa, Zea mays
  Coding DNA Sequence Number=SeqID_831
  Gene Ontology: Mol. function=structural constituent of ribosome; Cellular component=ribonucleoprotein complex; Biological process =translation
  Homolog annotation: Hit_ID=P49625; Match level="QueryCoverage=89%, HitCoverage=96%, E-value=1e-127, Identity=74%"; Hit description=60S ribosomal protein L5-1
  Pfam annotation: Domain name=Ribosomal_L18p; Domain location=54-215; Score=235.1; E_value=1.5e-67; Accession=PF00861.12; Description =Ribosomal L18pL5e family
MGWLWTLLHNALKDPVLLVRSFDLAVYNGGFVKTHKTNAYFKRFQVKFKRRRAGKTDYRARIRLINQDKNKYNTPKYRFVVRFVSFDYLTIWFLPIAMTNKDITAQIISASIAGDMVLASAYSHELPRYGLEVGLTNYAAAYCTGLLLARRVLKIRGLDQEYEGNVEATGEDFSVEPADERRPFRALLDVGLIRTTTGNRVFGALKGALDGGLDIPHSEKRFAGFKKDDKQLDADTHRRYIYGGHVADYMKNLAEEEPEKYQSHFSAYIKKGVEADEIEALYKKVHAAIRADPSIVKSTKQPPKEHKRYNPKKLTYEQRKASLIERLNQLNSSGGADDDDEDDE

SEQ ID NO: 42611 - protein, 610 aa, Zea mays
  Coding DNA Sequence Number=SeqID_832
  Gene Ontology: Mol. function=motor activity; Cellular component =myosin complex; Biological process=signal transduction
  Homolog annotation: Hit_ID=Q9XEI4; Match level="QueryCoverage=98%, HitCoverage=39%, E-value=0.0, Identity=88%"; Hit description =Unconventional myosin heavy chain
  Pfam annotation: Domain name=Myosin_N; Domain location=19-72; Score =48.0; E_value=3.1e-11; Accession=PF02736.9; Description=Myosin N -terminal SH3-like domain
  Pfam annotation: Domain name=Myosin_head; Domain location=104-609; Score=615.1; E_value=6.2e-182; Accession=PF00063.11; Description =Myosin head (motor domain)
  Pfam module annotation: Pfam domain module=Myosin_N::Myosin_head; Domain location=19-72::104-609
MPTLLNGGGKGTPVNIIVGSHVWVEDPNLAWIDGEVISIKNNEVHVQTSNGKKKGSSTVLFQYFTRVVKENLDKKIKEFHTIQEVTTDRSKVFPKDMEAPPGGVDDMTRLSYLHEPGVLQNLATRYELNEIYTYTGSILIAVNPFQRLPHLYDTHMMEQYKGADFGELSPHVFAIADVAYRAMINEGKSNSILSNPVLEAFGNAKTVRNNNSSRFGKFVEIQFDKTGRISGAAIRTYLLERSRVCQINSPERNYHCFYFLCAAPPEYTQRYKLSDPRSFHYLNQSSCIEVDGINDAEEYLATRRAMDIVGINEEEQEGIFRVVAAVLHLGNINFAKGTEIDSSVIKDDKSRFHLNIAAELLKCDCQNLEKALITRVIVTPEEVITRTLDPASAVASRDALAKIIYSRLFDWIVEKINVSIGQDPNSKQLIGVLDIYGFESFKVNSFEQLCINYTNEKLQQHFNQHVFKMEQEEYTREEINWSYIEFVDNQDVLDLIEKKGGLIALLDEACMFPRSTHETFAQKLYTTFKNNKRFAKPKLSRTDFTVVHYAGDVTYQADYFLDKNKDYVVAEHQDLLNASSCLFVAGLFPPLPQETAKSSKFSSIGSRFKV

SEQ ID NO: 42612 - protein, 70 aa, Zea mays
  Coding DNA Sequence Number=SeqID_833
MVLFRILCLSSPLLSQLLLLACVLGVLRFAWLLIESYFAGIRDSVLVQNSDGLIEIVVYSRYSILTSLNR

SEQ ID NO: 42613 - protein, 283 aa, Zea mays
  Coding DNA Sequence Number=SeqID_834
MVGWLPLPSSGELFPPLPLSYRVALVAPPTPACDATPGLALMAEDPRVAIGLYWIRPRRRPLVSARLSHPCRRRVRPLPAPLAPVSRPLHRPPLPHPCRRQAAVLGPDDALMLPLVFPHGAISTTVYNQSSALTSTLCAPSPSNDAAAILTATWATVAAARQRAQDTTRAIEQEQAVVNAIKRQYTETYHCLAGKGVSDGSPRPLVTAPTLSSLRQPQPRPSAPLFTPRRRPSPASRQPSPTFSRWTPLSTLSGTTRSCRPSTATPSPTTSYSRSLHRQRIAS

SEQ ID NO: 42614 - protein, 148 aa, Zea mays
  Coding DNA Sequence Number=SeqID_835
MGRQAHHGQSWALAEEPEKRLWRESSDQRDNRTVCVSAGGAGAARGCAGVGGATRGNRGDAEAARGCAREGGAAQGDSGDAEATRGYAGEGVAGGATQGSAVDGPTWKGGSIVGDTESRSRNTSSSVREAAKEEEKGKSDRRNQHDER

SEQ ID NO: 42615 - protein, 197 aa, Zea mays
  Coding DNA Sequence Number=SeqID_836
  Gene Ontology: Mol. function=carboxyl- and carbamoyltransferase activity; Cellular component=ornithine carbamoyltransferase complex; Biological process=amino acid metabolic process
  Homolog annotation: Hit_ID=Q8SA97; Match level="QueryCoverage=99%, HitCoverage=24%, E-value=8e-18, Identity=38%"; Hit description =Ornithine carbamoyltransferase
MALPVDVAGLCPRSGDVGAPPKPRSSLSSVAEAEPEPLGRARRGSFGRGQGGVRALGSGEVEFRRLLGLSPSPSPGSGGAEFAVFRVLARVRALGSGGAEFAVFRVLARVRALGSGGAEFAVFRVLARVRALGSGGAEFPMAPLARPDCLSDSLCRVALQSEWRRRPCPSVRLLYADGGYQLRIRRLEGTPNYGPRQ

SEQ ID NO: 42616 - protein, 214 aa, Zea mays
  Coding DNA Sequence Number=SeqID_837
MDGRYQMVGPGQFSLTARGGTTHVCSGELAGDEWHRRVVAHGSEAVPPIFGEESRATESKGEKRRGQGRFVTSRGSHGPLDSSRGATTSWVDGGGTVPAWRRVGERGHGKSEGEDKLGCVPSYERRGGAYHGKGHDGASMSMGERARDGGERCQLLPSVHMALGWAGGSTDMQMREGESEWGLGASSGRGRGGCGLDVRHGHGVLGVRVGRAGG

SEQ ID NO: 42617 - protein, 46 aa, Zea mays
  Coding DNA Sequence Number=SeqID_838
MGRLRCSAEALMVRDIEPDGSRHRAGRRPPKTSLVDVESKRDEDLR

SEQ ID NO: 42618 - protein, 412 aa, Zea mays
  Coding DNA Sequence Number=SeqID_839
  Gene Ontology: Mol. function=pepsin A activity; Cellular component =anchored to membrane; Biological process=proteolysis
  Homolog annotation: Hit_ID=Q1S463; Match level="QueryCoverage=77%, HitCoverage=75%, E-value=2e-93, Identity=50%"; Hit description =Eukaryotic aspartyl protease
  Pfam annotation: Domain name=Asp; Domain location=86-412; Score= -134.1; E_value=1.1e-05; Accession=PF00026.14; Description=Eukaryotic aspartyl protease
  Subcellular localization annotation: CTP_CleavageSite=27; ConfidenceScore=5.05e-01
MAPPPPWLAALLFLLLPALLPAVGSVSGAAAAGIFRVRRKLPAGVGGDTGANISALRAHDGRRHGRLLAAADLPLGGLGLPTDTGLYFTEIKLGTPPKRYYVQVDTGSDILWVNCISCSKCPRKSGLGLDLTFYDPKASSSGSTVSCDQGFCAATYGGKLPGCTANVPCEYSVMYGDGSSTTGFFITDALQFDQVTGDGQTQPGNATITFGCGAQQGGDLGNSNQALDGILGFGQANTSMLSQLAAAGKAKKIFAHCLDTIKGGGIFAIGNVVQPKCYFVFFFAHGLLNIPLFLLVMILLSRPHYNVNLKSIDVGGTTLQLPAHVFETGEKKGTIIDSGTTLTYLPELVFKQVMDVVFSKHRDIAFHNLQDFLCFQYSGSVDDGFPTITFHFEDDLALHVYPHEYFFPNGVT

SEQ ID NO: 42619 - protein, 52 aa, Zea mays
  Coding DNA Sequence Number=SeqID_840
MTARQVATTELRGDGGQKCEADRSSVRTQASLPSLGVAPLEVTPSSLDNRSP

SEQ ID NO: 42620 - protein, 876 aa, Zea mays
  Coding DNA Sequence Number=SeqID_841
  Gene Ontology: Mol. function=motor activity; Cellular component =myosin complex; Biological process=signal transduction
  Homolog annotation: Hit_ID=Q9XEI4; Match level="QueryCoverage=96%, HitCoverage=59%, E-value=0.0, Identity=87%"; Hit description =Unconventional myosin heavy chain
  Pfam annotation: Domain name=DIL; Domain location=707-801; Score =118.0; E_value=2.8e-32; Accession=PF01843.9; Description=DIL domain
  Pfam annotation: Domain name=IQ; Domain location=146-166; Score=17.5; E_value=0.048; Accession=PF00612.17; Description=IQ calmodulin -binding motif
  Pfam annotation: Domain name=IQ; Domain location=169-189; Score=27.8; E_value=3.7e-05; Accession=PF00612.17; Description=IQ calmodulin -binding motif
  Pfam annotation: Domain name=IQ; Domain location=194-214; Score=25.3; E_value=0.00022; Accession=PF00612.17; Description=IQ calmodulin -binding motif
  Pfam annotation: Domain name=IQ; Domain location=217-237; Score=22.4; E_value=0.0016; Accession=PF00612.17; Description=IQ calmodulin -binding motif
  Pfam annotation: Domain name=IQ; Domain location=242-262; Score=23.2; E_value=0.00095; Accession=PF00612.17; Description=IQ calmodulin -binding motif
  Pfam annotation: Domain name=IQ; Domain location=265-285; Score=15.3; E_value=0.23; Accession=PF00612.17; Description=IQ calmodulin-binding motif
  Pfam module annotation: Pfam domain module=DIL::IQ::IQ::IQ::IQ::IQ::IQ ; Domain location=707-801::146-166::169-189::194-214::217-237::242 -262::265-285
MEIAVFFGEVIPLCRRLGSRLQLQSLMETLSSTEPHYIRCVKPNNLLKPAIFENTNVIQQLRCGGVLEAIRISCAGYPTRKTFYEFVNRFGVLAPEVLEGSNDDKIACQKILEKMGLENYQIGKTKVFLRAGQMADLDARRAEVLGRAARIIQRQIRTYIARKQFAELKRSATQLQSFVRGTLARKLYECMRQEAAAVKIQKNMRRHKARESYLQLQAAAITLQTGLRAMSARKEFRFRKETKAAVHIQAQWRRHRDYSHYKNLQGAALTYQCAWRQRLARRELRKLKMAARETGALKEAKDKLEKRVEELTWRLGLEKRLRTDLEEAKAQEIAKLQETLHDMQLQVEESKAMVVKEREAARKAIEEAPPVIKETPVLVEDTEKINSLTTEVEQLKALLLTERQATEAAKREHAESELRNEELIKKFESAEKKIEQLQETVHRLEEKATNMESENKVLRQQAVAISPTSKSLAAYPKSPFQLKTPENGNALNGEVKSSPDITPILPNPKELEAEEKPQKSLNEKQQENQDLLIKCVSQDLGFSSGKPIAACLIYRCLLHWRSFEVERTGVFDRIIQTIGSAIEGMRASPQSAGRAFMGSRLIGGLGDLRQVEAKYPALLFKQQLTAFLEKIYGMIRDNLKKEISPLLGLCIQAPRTSRASLIKGSRSQANALAQQTLIAHWQSIVKILTNYLNVLKANYVPSVLISKVFTQIFSFINVQLFNRKSLYCSLLLRRECCSFSNGEYVKAGLAELEQWCIYATEEVIHQKPKKTLKEITNDLCPVLSIQQLYRISTMYWDDKYGTHTVSSDVISSMRVMMTEDSNNAVSSSFLLDDDSSIPFSVDDISKSMTEIEVTDVDMPPLIRENSGFTFLHQRKD

SEQ ID NO: 42621 - protein, 75 aa, Zea mays
  Coding DNA Sequence Number=SeqID_842
MAAVQGRPVGLIERSQCSHGDRGGGSDGGEEEGVAEVVVLEVAEQRRRSVELADLEGNGFWRPTLPIADARWRSG

SEQ ID NO: 42622 - protein, 742 aa, Zea mays
  Coding DNA Sequence Number=SeqID_843
  Gene Ontology: Mol. function=mismatched DNA binding; Cellular component=MutSalpha complex; Biological process=response to DNA damage stimulus
  Homolog annotation: Hit_ID=Q9XGC9; Match level="QueryCoverage=99%, HitCoverage=100%, E-value=0.0, Identity=99%"; Hit description=DNA mismatch repair protein MSH2
  Pfam annotation: Domain name=MutS_I; Domain location=24-131; Score =75.2; E_value=2e-19; Accession=PF01624.10; Description=MutS domain I
  Pfam annotation: Domain name=MutS_II; Domain location=144-286; Score =103.5; E_value=6.2e-28; Accession=PF05188.8; Description=MutS domain II
  Pfam annotation: Domain name=MutS_III; Domain location=293-612; Score= 311.1; E_value=2.1e-90; Accession=PF05192.9; Description=MutS domain III
  Pfam annotation: Domain name=MutS_IV; Domain location=470-567; Score =88.5; E_value=2e-23; Accession=PF05190.8; Description=MutS family domain IV
  Pfam annotation: Domain name=MutS_V; Domain location=529-663; Score= -164.2; E_value=0.0042; Accession=PF00488.12; Description=MutS domain V
  Pfam annotation: Domain name=Nnf1; Domain location=409-513; Score= -16.8; E_value=0.091; Accession=PF03980.4; Description=Nnf1
  Pfam module annotation: Pfam domain module=MutS_I::MutS_II::MutS _III::MutS_IV::MutS_V::Nnf1; Domain location=24-131::144-286::293 -612::470-567::529-663::409-513
MEGDDFTPEGGKLPEFKLDARQAQGFISFFKKLPQDPRAVRLFDRRDYYTAHGENATFIARTYYHTMSALRQLGSSSDGILSASVSKAMFETIARNILLERTDCTLELYEGSGSNWRLTKSGTPGNIGSFEDILFANNDMEDSPVIVALFPACRESQLYVGLSFLDMTNRKLGLAEFPEDSRFTNVESALVALGCKECLLPADCEKSIDLNPLQDVISNCNVLLTEKKKADFKSRDLAQDLGRIIRGSVEPVRDLLSQFDYALGPLGALLSYAELLADDTNYGNYTIEKYNLNCYMRLDSAAVRALNIAEGKTDVNKNFSLFGLMNRTCTVGMGKRLLNRWLKQPLLDVNEINNRLDMVQAFVEDPELRQGLRQQLKRISDIDRLTHSLRKKSANLQPVVKLYQSCSRIPYIKGILQQYNGQFSTLIRSKFLEPLEEWMAKNRFGRFSSLVETAIDLAQLENGEYRISPLYSSDLGVLKDELSVVENHINNLHVDTASDLDLSVDKQLKLEKGSLGHVFRMSKKEEQKVRKKLTGSYLIIETRKDGVKFTNSKLKNLSDQYQALFGEYTSCQKKVVGDVVRVSGTFSEVFENFAAVLSELDVLQSFADLATSCPVPYVRPDITASVEPGACDQSFGIHVAEFANFPEAVVALAKSKAAELEDFSTTPTFSDDLKDEVGSKRKRVFSPDDITRGAARARLFLEEFAALPMDEMDGSKILEMATKMKADLQKDAADNPWLQQFF

SEQ ID NO: 42623 - protein, 52 aa, Zea mays
  Coding DNA Sequence Number=SeqID_844
  Gene Ontology: Mol. function=peptidase activity; Biological process =proteolysis
  Homolog annotation: Hit_ID=Q08688; Match level="QueryCoverage=86%, HitCoverage=80%, E-value=1e-09, Identity=65%"; Hit description =Putative thiol protease homolog
MVGYGAESGGRKYWIVKNSWGEKWGEKGYFRGFASRGASRTSGAPANTTLDP

SEQ ID NO: 42624 - protein, 281 aa, Zea mays
  Coding DNA Sequence Number=SeqID_845
  Gene Ontology: Mol. function=cysteine-type endopeptidase activity; Cellular component=vacuole; Biological process=proteolysis
  Homolog annotation: Hit_ID=Q1SLM3; Match level="QueryCoverage=88%, HitCoverage=65%, E-value=1e-49, Identity=44%"; Hit description =Peptidase C1A, papain
  Pfam annotation: Domain name=Inhibitor_I29; Domain location=40-97; Score=78.2; E_value=2.5e-20; Accession=PF08246.2; Description =Cathepsin propeptide inhibitor domain (
  Pfam annotation: Domain name=Peptidase_C1; Domain location=145-281; Score=112.8; E_value=9.6e-31; Accession=PF00112.13; Description =Papain family cysteine protease
  Pfam module annotation: Pfam domain module=Inhibitor_I29::Peptidase _C1; Domain location=40-97::145-281
MAAYQQAPALLCACLMLVLMAGAASGGRVDVEDMLMMDRFRAWQATYNRSYLTAAERLRRFEVYRQNMELIEATNRRAELSYQLSETPFTDLTSEEFLATHTMSTRLHASEAARRHRELITTHAGPVSDGGRQWNRRNYTTDLDVPESVDWRTKGAVTTVKDQGACGGCWSFATVAAIEGLHKIRTGQLVSLSEQEVLDCSSPPNNGCHGGNPAAAIDWVSANGGLTTESDYPYEGRQGKCKLDKARNHVAKIRGRKLVDQNNEAALEVAVAQQPVAVGHE

SEQ ID NO: 42625 - protein, 240 aa, Zea mays
  Coding DNA Sequence Number=SeqID_846
  Gene Ontology: Mol. function=cysteine-type endopeptidase activity; Cellular component=endoplasmic reticulum; Biological process =proteolysis
  Homolog annotation: Hit_ID=Q84M28; Match level="QueryCoverage=84%, HitCoverage=61%, E-value=2e-58, Identity=50%"; Hit description =Cysteine protease-2
  Pfam annotation: Domain name=Peptidase_C1; Domain location=42-239; Score=294.0; E_value=2.9e-85; Accession=PF00112.13; Description =Papain family cysteine protease
MSTRLHASEAARRHRELITTHAGPVSDGGRQWNRNYTTDLDVPESVDWRTKGAVTPVKDQGACGSCWSFVTVAAIEGLHKIRTGQLVSLSEQAVLDCSSPPNHGCNRGDPAAAIDWVSANGGLTTESDYPYVGRQGKCKLDKARNHVAKIKGRKLVDQNNEAALEVAVAQQPVAVDMNRIVNHGVTMVGYGVESGGRKYWIAKNSWGNEWGEKGYFRLERRIKDARGTCGIAVWANYPVM

SEQ ID NO: 42626 - protein, 331 aa, Zea mays
  Coding DNA Sequence Number=SeqID_847
MAPTRGAGGGVRLPPMNALEILRETVRVLRGDPHAFTSILFLLLCPASGCLLLSAAALDGAVVLPLARRLLAAAATSGLPLTHFVGQLAHHLAATLVSAVVSLPALLTLLLAARAAVAYTVAAVYAGKPLAAGDITLLARRAWPRLAATYALGCAAVAVGLVAFLALLVTACSTLRAMLYPPDIVVCAGLFTVLAYSVVYAHTIIICNLGGVIAVLEEVAGINALRRSVQLMRGQTHVGLLIFLGSTIGLAFVEGLFEHRVKTLSYGDGSSRLWEGPLLVLMYSVVMLVDSMMSAVFYFTCRSSNLDFLDEQGGSVEELEMMRAGSLDAFR

SEQ ID NO: 42627 - protein, 544 aa, Zea mays
  Coding DNA Sequence Number=SeqID_848
  Gene Ontology: Mol. function=zinc ion binding
  Homolog annotation: Hit_ID=Q8H055; Match level="QueryCoverage=97%, HitCoverage=97%, E-value=1e-114, Identity=43%"; Hit description =Putative DHHC-type zinc finger protein
  Pfam annotation: Domain name=zf-DHHC; Domain location=165-229; Score =97.9; E_value=3.1e-26; Accession=PF01529.11; Description=DHHC zinc finger domain
  Subcellular localization annotation: CTP_CleavageSite=63; ConfidenceScore=5.19e-01
MRRHGWQLPYHPLQVVAVSVFLALAFAFYVFFAPFVGRKVFQYVVMGLYTPLVRAPAWFLRCRAASTNPADPGVFKSKKYLSLYGSGKHKHLKESRKTSSDARLQIEGTREKQEHEVAASSERSITQYKDNNPSCLSSTLSPSLLLFYPLSFVFSCCQPHESSSEQQATEEGMFFCSLCEVQVLKYSKHCRVCDKCVDGFDHHCRWLNNCIGRRNYRRFFILMSTAVILGISTYDYIIALREQEQDDLSGQQSPQMSRVSSYTGLSSASSFGPLRRGSWCTPPRLFLEDQFDVIPSEAASSHNSATKRKEDQGKRKKGSGAVKISPWALARLNAEEVSRVAAEARNKSKVLVPIRKDDYSRGHETDSSYGGTSSGRIDLGPDSKRRTNRRGRQPSDLFLKPVAKISTDAIDSASSDMSNLAPLQLEARSAFHPSRAASSVNVGGSSPDSSLDSPDLHLYRVSAVSSSGAEDLQLTALTAPGSTSHQGIQLSRSTSDGYEASGGEDSDRIPSQIVHRSSNWASIILNSDQSASSSGILVPKNRLS

SEQ ID NO: 42628 - protein, 87 aa, Zea mays
  Coding DNA Sequence Number=SeqID_849
MADLRCGGRRRTQPAQHAIGRGAGCESKAERRRVAGYDGGAAGHTLSMLLVHVAFKRNAWDDNSTVEWSGRVVALALGLGLRHRRQC

SEQ ID NO: 42629 - protein, 92 aa, Zea mays
  Coding DNA Sequence Number=SeqID_850
MDDHFGFSDDDGIEKNTVANSTIHLMTIKVGEGDQEVGDDKDKFGRFHCGGKMKFMGMDKFRTPSSKSREQPVDRRQPSAPDSLVHPDRAVF

SEQ ID NO: 42630 - protein, 122 aa, Zea mays
  Coding DNA Sequence Number=SeqID_851
  Subcellular localization annotation: CTP_CleavageSite=35; ConfidenceScore=5.60e-01
GLRQPAAGQSFLFLFASTILPPPPLAPPRSCPAPCASTPAPSAARLVHPRPVWPALPPRVPRAWSPGLYQPHVATDEDARACSSCPVPAGRPPALRLPLSGSAPELVCLNASVRVQHSGSAP

SEQ ID NO: 42631 - protein, 131 aa, Zea mays
  Coding DNA Sequence Number=SeqID_852
  Gene Ontology: Mol. function=unfolded protein binding; Cellular component=prefoldin complex; Biological process=protein folding
  Homolog annotation: Hit_ID=Q4TC35; Match level="QueryCoverage=72%, HitCoverage=60%, E-value=2e-15, Identity=40%"; Hit description =Chromosome undetermined SCAF7054, whole genome shotgun sequence
  Pfam annotation: Domain name=Prefoldin; Domain location=24-129; Score= 32.4; E_value=1.6e-06; Accession=PF02996.8; Description=Prefoldin subunit
MAAAEAWVRQEKVRKFEEFVDQRLKPDLTNAIAQRNKVFEQQKTFLDLKRNIENLERNGVTSMRSMVNLGSEVYMQAEVPDTRHIFVDIGLGFHVEFTWQEALQFISFTVIRVQIENFPLEKLSGVGPIID

SEQ ID NO: 42632 - protein, 133 aa, Zea mays
  Coding DNA Sequence Number=SeqID_853
MRHWRSMPSRPETDFRHRRRLVLLVHHVVRWGVRRGGGSMTWWCQSLLADAIQWRTGAEDGVGSREVRANGGARQGLRTHIEESLSIKGAGAVIQGCGAGGDGELSVEVAVGRAWAGGGVVMLGGRPRYVLKE

SEQ ID NO: 42633 - protein, 120 aa, Zea mays
  Coding DNA Sequence Number=SeqID_854
MTEVYLLLGARAYWLLHRGHAMALLGARRDGRHTHLQRGARVCRACLRAVEKRGQSGTEPSARILQLLLENGIRVNELTRTKAALILPSVFDDPDEVDKEKEVEYEEIEEEVEYEEIEED

SEQ ID NO: 42634 - protein, 125 aa, Zea mays
  Coding DNA Sequence Number=SeqID_855
MEHQDVAILKLINKMRLMEARLSKRISGRCDNIERRLDDDVKRPVVCDEISIFDEVPSLTRSHVSAAASLILIWALPKTGSISPRSFGPRPELPGFASSIGHPRHAEQLRREWASAGGGQRRRLS

SEQ ID NO: 42635 - protein, 139 aa, Zea mays
  Coding DNA Sequence Number=SeqID_856
MTIDEFGEPGSPVSLRERSFDTVPFPGPPRKCMAVSFLANEVSDLCIGKPAVRSLPLSAAAGDLAAALRRVARSGAPSCVAVTGPARAVVGRVGLADVLCFLCTDPEALARPAVVFSKPVSALLPKDGAGEVRRVDPRS

SEQ ID NO: 42636 - protein, 57 aa, Zea mays
  Coding DNA Sequence Number=SeqID_857
MSKQCPQTSRMKHHTLRCSRQEDVRLDVLATGVFEGNTRSWIFIGENCVQVQQISTR

SEQ ID NO: 42637 - protein, 536 aa, Zea mays
  Coding DNA Sequence Number=SeqID_858
  Gene Ontology: Mol. function=RNA-directed DNA polymerase activity; Cellular component=intracellular; Biological process=RNA-dependent DNA replication
  Homolog annotation: Hit_ID=UPI00004C1732; Match level="QueryCoverage =95%, HitCoverage=35%, E-value=0.0, Identity=80%"; Hit description =UPI00004C1732 related cluster
  Pfam annotation: Domain name=RnaseH; Domain location=372-499; Score= -1.0; E_value=7.1e-05; Accession=PF00075.14; Description=RNase H
MPDIPRDVAKHSLGIRAGARPVKQPLRRFDEEKRRAIGEEIHKLIAAGFIKEVFHPEWLANPVLVKKKGATYQRCMNHMFGEHIGRTVEAYVDDIVVKTKKASDLVSDLETTFKCLRAKGVKLNPEKYVFGIPRGMLLGFIVSERGIEANPEKITAITNMGPIKDLKGVQRVMGCLVALSRFISRLGERGLPLYRLLRKTERFTWTPEAEEALGNLKALLTSAPSLVPPAAGEALLIYVAATTQVVSAAIVVERREEGHALPIQRSVYFISEVLSETKICYPQVQKLLYAVILTRRKLRHYFESHPVTVVSSFPLGEIIQCRETSGRIAKWAVEIMGETISFTPRKAIKSQVLADFVAEWVDTQLPTAPIQPELWTMYFDGSLMKTGAGAGLLFISPLGKHLRYMLRLHFPASNNVAEYEALVNGLCIAIELGVRCLDAHGDSQLVIDQVMKNSHCRDRKMEAYCDEVRRLEDEFYGLELNHIARRYNETADELAKIASGRTKVPADVLSRDLHQPSIKTNDTLEPEEASVTEPPK

SEQ ID NO: 42638 - protein, 143 aa, Zea mays
  Coding DNA Sequence Number=SeqID_859
  Gene Ontology: Mol. function=hydrolase activity, acting on acid anhydrides, in phosphorus-containing anhydrides; Cellular component =nucleus; Biological process=nucleobase, nucleoside, nucleotide and nucleic acid metabolic process
  Homolog annotation: Hit_ID=Q6AUI3; Match level="QueryCoverage=44%, HitCoverage=8%, E-value=3e-24, Identity=82%"; Hit description =Putative nucleotide excision repair protein XP-D
MLFAILITKSILSLNAVLKQLSLASLDIGRTNRSKYSYAPKSGVRYDGFYRIKKCWRQFGVQVKADVVFKKVALNSILYLKLCCHDASLAIRPVFDHFKTLVITSGTLNPIDLYPRLLNFNLVISRRFTMSLTRDCICPMVLT

SEQ ID NO: 42639 - protein, 64 aa, Zea mays
  Coding DNA Sequence Number=SeqID_860
MGKPVPSLLMLLLSRGGIPLDSPTRWIKQHYAKGRKTKLVSNLGFLGHTWPLVVDAYHSRFRFG

SEQ ID NO: 42640 - protein, 59 aa, Zea mays
  Coding DNA Sequence Number=SeqID_861
AFIVSSNEVDRHTEAFEELERLAGPDDNLDMFVTVLSLDVAMEEDLDVDGDSFRRRKLW

SEQ ID NO: 42641 - protein, 405 aa, Zea mays
  Coding DNA Sequence Number=SeqID_862
  Gene Ontology: Mol. function=transporter activity; Cellular component= integral to membrane; Biological process=transport
  Homolog annotation: Hit_ID=Q9LHQ6; Match level="QueryCoverage=95%, HitCoverage=72%, E-value=1e-127, Identity=59%"; Hit description =Organic anion transporter-like protein
  Pfam annotation: Domain name=MFS_1; Domain location=1-361; Score= -5.1; E_value=0.00054; Accession=PF07690.6; Description=Major Facilitator Superfamily
  Pfam annotation: Domain name=Sugar_tr; Domain location=8-394; Score= -34.8; E_value=8.8e-06; Accession=PF00083.14; Description=Sugar (and other) transporter
  Pfam module annotation: Pfam domain module=MFS_1::Sugar_tr; Domain location=1-361::8-394
MGENEIDMQACGGQSGAGVFGHLSDSFLGRKGSLQVVCVLNAAFGLLTALAPTYWAYAALRLLTGFSTGSVGVLAFVLATEPVGPARRGAAGMSAFYFFSGGIAALAGVAALLPRSWRLLYAATSLPSLVFAVAVVPFVSESPRWYLVRRRPDDALRVVRAIAAANGRAVPEDLTLKLDDEDEDDDGGAAAAAAAAASTSSGSIVDVFRSPTTRVRLVLSVLINLLASVVYYGLSLNVVNLKTNLYVTVVVNSLAEMPAYLLTALLLDRFGRKPLAIGTMLLSGVFCTAGSLIPGAGTMRLARMACGVVGIFGMAATYNLLFIYTAELFPTVVRNAALGCTAQAAQMGAIVAPLVVVLGERLPFAVFGASGIVGGLLVFYLPETMNKPLYDTMAGLEEGEKSVIK

SEQ ID NO: 42642 - protein, 132 aa, Zea mays
  Coding DNA Sequence Number=SeqID_863
MAHFAPPLRPPLLPTPKVMPPHHREFLRMAVLACFGRVFVQGVCRQPITDPRGDNCAQKIKLRCPRRACGGRGDGHGGSCKGAAGVERIPGGGNCVEGRWIHQAGGLGPDWLPYLGSMAERARPVAAWLCIA

SEQ ID NO: 42643 - protein, 113 aa, Zea mays
  Coding DNA Sequence Number=SeqID_864
  Gene Ontology: Mol. function=protein serine/threonine kinase activity; Cellular component=cytoplasm; Biological process=protein amino acid phosphorylation
  Homolog annotation: Hit_ID=Q5I6E9; Match level="QueryCoverage=64%, HitCoverage=12%, E-value=4e-12, Identity=67%"; Hit description =AvrPto-dependent Pto-interacting protein 3
MVEAEVLLALEYLHVIRVVYRDLKTENDLVREDGHIMLSDFDLSGRLHGLVDADEIFHELRPQVPAPNPPASNPHASCPSSLARGAQRAAAPTRNPRAASPGSGLVSNLDLAA

SEQ ID NO: 42644 - protein, 119 aa, Zea mays
  Coding DNA Sequence Number=SeqID_865
MTYILIVTSNHVTECGVKVVRLLLIADLQGQGSVVDVPNELMDLAMKGSLNDVGSVDVFSWISCLDLRSLAVLTNSTLSSSSDPHNISFHYLIPEGGNDKLSYFKLKVLLPDSDLTVTR

SEQ ID NO: 42645 - protein, 154 aa, Zea mays
  Coding DNA Sequence Number=SeqID_866
  Homolog annotation: Hit_ID=Q6Z6A4; Match level="QueryCoverage=43%, HitCoverage=18%, E-value=7e-18, Identity=71%"; Hit description =Oxidation protection protein-like
MGKRSKGRTGLLSRGKHSIGKIINKAARISGFKQTTAEPKIDRKAVIHTEPDAPVLEHQEPKEVASFELAYKPIDVRRVQLAYKLFDEKMVGSCVTGKIYHLKTMPPENEENSIRLITRSDATFEKIKDPKKQFMGLAEPELSTYNPFKLSNTS

SEQ ID NO: 42646 - protein, 243 aa, Zea mays
  Coding DNA Sequence Number=SeqID_867
  Gene Ontology: Mol. function=kinase activity
  Homolog annotation: Hit_ID=Q5DK69; Match level="QueryCoverage=99%, HitCoverage=53%, E-value=1e-63, Identity=54%"; Hit description =Pollen-specific kinase partner protein
  Pfam annotation: Domain name=DUF315; Domain location=1-168; Score= -106.1; E_value=4.6e-09; Accession=PF03759.4; Description=Domain of unknown function (DUF315)
MAINANVLMEMEVPESYTESLPKNGKSTLGDSVYRLITDDHFHPEELLRSVDSSDEHSIVDLKNRIEASAVIWQKKMTHNKDSKLPWGHSHEKRGMFEGRAENVLLLIKHRFPGIAQSALDISKIQCNKDVGLAILESYSRTLESLAFTVMSRIEDVLSADLAARDLRNTESMRIAASLASDDTDKVVSDAKAEVEKTGRMEPVSPALSDLVGPKLTKISPVATKRFSYLENLGGTRSPIARH

SEQ ID NO: 42647 - protein, 132 aa, Zea mays
  Coding DNA Sequence Number=SeqID_868
  Gene Ontology: Mol. function=protein-tyrosine kinase activity; Cellular component=integral to membrane; Biological process=protein amino acid phosphorylation
  Homolog annotation: Hit_ID=Q5QNM3; Match level="QueryCoverage=85%, HitCoverage=16%, E-value=2e-37, Identity=60%"; Hit description =Leucine-rich receptor-like protein kinase-like
MITSSKEWTEHSESCFRRKVDALSRINHKNFVNLLGFCEEEEPFTRMMVLEYAPNGTLHESLHAEDFERIAWRGRMRIVMGLAYCVQHMHELSPPVAHPDMQSSSVLLSEDGAAKALVERVTNDDRERSLVA

SEQ ID NO: 42648 - protein, 409 aa, Zea mays
  Coding DNA Sequence Number=SeqID_869
  Gene Ontology: Mol. function=protein-tyrosine kinase activity; Cellular component=integral to membrane; Biological process=protein amino acid phosphorylation
  Homolog annotation: Hit_ID=Q5QNM3; Match level="QueryCoverage=70%, HitCoverage=50%, E-value=4e-77, Identity=44%"; Hit description =Leucine-rich receptor-like protein kinase-like
  Pfam annotation: Domain name=Pkinase; Domain location=187-377; Score=- 88.6; E_value=0.0028; Accession=PF00069.15; Description=Protein kinase domain
  Pfam annotation: Domain name=Pkinase_Tyr; Domain location=187-377; Score=-90.5; E_value=6.5e-07; Accession=PF07714.7; Description =Protein tyrosine kinase
  Pfam module annotation: Pfam domain module=Pkinase::Pkinase_Tyr; Domain location=187-377::187-377
MDASSSLSLLALVTMLSLLHSATTDAAAGLPAARTSHRRLLLLHQQDTNLAALPPPARVHVVPVDVHVPSHGTGSFPAASPGPHGGKNGPSEAAPATPATAAAYLSRSMRWLYMVAVPAVALLALAGLACWLLCRKSAVATIGPWKTGLSGQLQKAFVTGVPKLQRSELERACEDFSNIVVSYPHYTVYKGTLSTGVEIAVVSTMITSSKEWTEHSESCFRRKVDALSRINHKNFVNLLGFCEEEEPFTRMMVLEYAPNGTLHESLHAEDFERIAWRGRMRIVMGLAYCVQHMHELSPPVAHPDMQSSSVLLSEDGAAKALVERVTNDDRSVASLLDPTLGGDHREDELAVIGEVIRACMQSDPRRRPSMREVAARLREAVGISPVAATPRLSPLWWAELEVLSAAEAS

SEQ ID NO: 42649 - protein, 491 aa, Zea mays
  Coding DNA Sequence Number=SeqID_870
  Gene Ontology: Mol. function=kinase activity
  Homolog annotation: Hit_ID=Q5DK69; Match level="QueryCoverage=88%, HitCoverage=90%, E-value=1e-138, Identity=59%"; Hit description =Pollen-specific kinase partner protein
  Pfam annotation: Domain name=DUF315; Domain location=1-416; Score =603.1; E_value=2.6e-178; Accession=PF03759.4; Description=Domain of unknown function (DUF315)
  Subcellular localization annotation: CTP_CleavageSite=64; ConfidenceScore=5.31e-01
MDAQAQPFTRRALSRSCGSKGSRLSVDHPPPPLAGGPSADKGVAGSSSSLAVPPEPARREGPPSDAEKVREKFSKLLLGEDMSGTGKGVTSALALSNAITNLAASVFGEQRRLQPMADDQKSRWKKEVDWLLSVADHIVEFVPSQQVAENGTSVEIMITQQRQDLQMNIPALRKLDAMLLEYLDSFAGKQEFWYASKDADGPGKGSTPRQDDKWWLPTVRVPPDGLSGAYSKWLQNQKDLVAQVLKAAMAINANVLMEMEVPESYTESLPKNGKSTLGDSVYRLITDDHFDPEELLRSVDSSDEHSIVDLKNRIEASAVIWQKKMTHNKDSKLPWGHSHEKRGMFEGRAENVLLLIKHRFPGIAQSALDISKIQCNKDVGLAILESYSRTLESLAFTVMSRIEDVLSADLAARDLRNTESMRIAASLASDDTDKVVSDAKAEVEKTGRMEPVSPALSDLVGPKLTKISPVATKRFSYLENLGGTRSPIARH

SEQ ID NO: 42650 - protein, 619 aa, Zea mays
  Coding DNA Sequence Number=SeqID_871
  Gene Ontology: Mol. function=galactose oxidase activity; Biological process=cell wall catabolic process
  Homolog annotation: Hit_ID=Q6AT39; Match level="QueryCoverage=96%, HitCoverage=96%, E-value=0.0, Identity=71%"; Hit description =Putative glyoxal oxidase
  Pfam annotation: Domain name=DUF1929; Domain location=512-618; Score =148.0; E_value=2.5e-41; Accession=PF09118.1; Description=Domain of unknown function (DUF1929)
  Pfam annotation: Domain name=Glyoxal_oxid_N; Domain location=114-357; Score=507.5; E_value=1.6e-149; Accession=PF07250.2; Description =Glyoxal oxidase N-terminus
  Pfam module annotation: Pfam domain module=DUF1929::Glyoxal_oxid_N; Domain location=512-618::114-357
MGSLPRAAVFAVALLLLASSGEAFFEIFNIFRARPETDYFQNAFEGTHEQTAPTQTEQEEKGAAPGAATGLTRVPPGGPASKAAQDTIVLAADKDGGPVGSWTIVSENSGVSAMHMAVMRHGKAVMFDTSTTGRSLMRLPQDNCRIDPRAKEEGTMDCWAHSVEFDYNTGGLRPLKILTDTWCSSGALDADGNLVQTGGYFDGEKVVRTLGPCDTCDWLEQPNSFAEGRWYATQVVLPDGRFIVFGGRRAFSYEYVPWPGKSNDKAVRLPLLRETTDDAENNLYPFVNLLPSGNLFLFANDRSVIFDHKSSRIVRELPKLDGGSRNYPGSAMSTLLPLDLRNASVGDPEPEVVICGGAPKKSFRKGENNTFLPALRDCARINLGRPDARWEKEDMPVGRVMGDMLILPTGDLLLLSGAAKGCSGWGFGRQPVLTPVLYSPRKAQGPRFRALASSTIARMYHSTSAVLPDATVLVAGGNTNAAYNFSGVDFPTEVRVERFSPPYLGEGAAGNRPVLDAASLPAEGMQYGSPLTFRFSVPAEPVAEADVKTTMYAPPFTTHGCSMNQRLLILRVTAFVEEGRSYRVTVDAPRKPELAPRGYYLLFVVAKGVPSMGAWVKVR

SEQ ID NO: 42651 - protein, 179 aa, Zea mays
  Coding DNA Sequence Number=SeqID_872
MAQRIVFFAADLDLASREGSCREEEIIGTLREIIDLTSHLVPELVTVYLPPSNRTIRPDHHCRAAGRERRRTGQVFPFADLGELSGRGALRVRGESVRGLGGANQGSVREELLIGVSPATENRTTAWAVKPSPRFKALVCGFGAPQSWRRRAVRVLRRALDAVAPRDISGEGDERLPSI

SEQ ID NO: 42652 - protein, 525 aa, Zea mays
  Coding DNA Sequence Number=SeqID_873
  Gene Ontology: Mol. function=transferase activity; Cellular component= nucleus; Biological process=regulation of transcription
  Homolog annotation: Hit_ID=Q1RZ85; Match level="QueryCoverage=90%, HitCoverage=72%, E-value=1e-102, Identity=34%"; Hit description =Asp/Glu racemase; Polynucleotidyl transferase, Ribonuclease H fold
  Pfam annotation: Domain name=PPR; Domain location=137-171; Score =42.0; E_value=2e-09; Accession=PF01535.11; Description=PPR repeat
  Pfam annotation: Domain name=PPR; Domain location=199-233; Score =39.8; E_value=9.3e-09; Accession=PF01535.11; Description=PPR repeat
  Pfam annotation: Domain name=PPR; Domain location=301-335; Score =44.3; E_value=4.1e-10; Accession=PF01535.11; Description=PPR repeat
  Pfam annotation: Domain name=PPR; Domain location=336-370; Score=3.8; E_value=2.6; Accession=PF01535.11; Description=PPR repeat
  Pfam annotation: Domain name=PPR; Domain location=372-406; Score =14.5; E_value=0.14; Accession=PF01535.11; Description=PPR repeat
  Pfam annotation: Domain name=PPR; Domain location=75-109; Score=14.1; E_value=0.16; Accession=PF01535.11; Description=PPR repeat
  Pfam module annotation: Pfam domain module=PPR::PPR::PPR::PPR::PPR::PP R; Domain location=137-171::199-233::301-335::336-370::372-406::75-109
PFPSSTTLLTKTLLRAYALNSLPHAALAVFLDVPLRQRGTFTYSFLIKALAAAGLTPVRGAHAHVVKLGSAEDTFVGNALIDAYSKNQGLSDAKKVFDEMTTRDVVSWNTAMAAMVRQGEVDAARSMFDEMPEKDTVSWNTMLDGYAKAGEAEKAFELFQRMPGRNVVSWSTVVSAYCKKGDMEMARVIFDKMPAKNLVTWTIMVSACAQKGLVEEAGRLFTEMMDAAIELDVIAVVSILAACAESGSLALGKRIHRHVRQRKLSRSTLVCNALMDMFCKCGCVNRADYIFDTEIVEKDLVSWNIIIGGFAMHGPGEKALELFAQMKQQGFHPDAVTLINVLSACTHMGLVEEGRRFFANMETDYGIKPQIEHYGCMVDLLGRGGLIKEAVDMIKRMPWEPNEVIWGSLLSACRLHKNVEYAELAVNELSNLQPSSAGNYAVLSNIYAEAGKWSDMAKARVQMKGTGSQKTAGSSWIELNEAFHEFTVGDRKHPESDQISDMIDRLSSHVKFVGCVPVGHELFVQ

SEQ ID NO: 42653 - protein, 93 aa, Zea mays
  Coding DNA Sequence Number=SeqID_874
  Gene Ontology: Mol. function=intramolecular transferase activity, phosphotransferases; Cellular component=chloroplast; Biological process=carbohydrate metabolic process
  Homolog annotation: Hit_ID=Q53QR8; Match level="QueryCoverage=68%, HitCoverage=10%, E-value=5e-21, Identity=81%"; Hit description =Phosphoglucomutase/phosphomannomutase, C-terminal domain, putative
FKYNSGQLAPETITDQIYGNTLSIFEIKTADISDNVLPSVGVVSYGEFTIEVIDHVLDYLELMECMVGDIGDKFFTKRALRGVHVVICLTDAC

SEQ ID NO: 42654 - protein, 102 aa, Zea mays
  Coding DNA Sequence Number=SeqID_875
MDGYGGSPYGADGKKGEITAHGFYSWSWGRFMPKIPAEIHGNWPSQPRTVELVAPVRAISRGLLQRNGEGDGSDVRGPQASEKPSVAQGLACGAQTSVPGIR

SEQ ID NO: 42655 - protein, 103 aa, Zea mays
  Coding DNA Sequence Number=SeqID_876
  Subcellular localization annotation: CTP_CleavageSite=10; ConfidenceScore=5.63e-01
MALAPCALPRAPSVSTRPRYRACACPPPLTSGPDLPAARFVRLSSFPPVGPSRRPVGPARQGAPALASRTRDTRAADAWDSPCSGSDAGNMEDFEEFQEYDEF

SEQ ID NO: 42656 - protein, 630 aa, Zea mays
  Coding DNA Sequence Number=SeqID_877
  Gene Ontology: Mol. function=RNA-directed DNA polymerase activity; Cellular component=nucleus; Biological process=RNA-dependent DNA replication
  Homolog annotation: Hit_ID=Q8S472; Match level="QueryCoverage=97%, HitCoverage=57%, E-value=0.0, Identity=77%"; Hit description =Putative gypsy-type retrotransposon RIRE2
  Pfam annotation: Domain name=Retrotrans_gag; Domain location=118-209; Score=67.9; E_value=3.3e-17; Accession=PF03732.7; Description =Retrotransposon gag protein
MWAIRWTQGISIPHTPGRLGNEHPHRNRRTHLDEWVRRGYHRRRGGRYDSGEDRSPSPEPPGPQAFSRAIRRAPFPTRFRTPTTITKYSGETRPELWLADYRLACHLGGTDDDNLIIRNLPLFLSDTARAWLEHLPRGHISNWDDLVQAFAGNFQGTYVHPGNSWDLRSCRQQPRESLWDYIRRFSKQRTELPYVTDSDVIGAFLAGTTCRDLVSKLGRKTPTRASELMDIATKFAFGQEAVEAIFRKDKQPQGRPSEDAPEASTQRGTKKKGKKKSQAKRDAADVDLVAAAEYKNPRKPPGGANLFDKMLKEPCPYHQGPVKHTLEECAMLRCHFHKVGPPAEGGRARDDDKKEDHKAGEFPEVHDCFMIYGGQVANASAWHRKQEHREVCSVKVAAPAYLDWSDKPITFDQGDHPDRVPSPGKYPLVVDPVIGNVRLTKVLMDGGSNLNIIYAETLGLLRIDLSSVRAGAAPFHGIIPGKRVQPLGQLNLPVCFGTPSNFRRETLTFEVVGFRGTYHAVLGRPCYAKFMAVPNYTYLKLKMPGPNGVITVGPTYRHAYECDVECMEYAEALAESEALIADLESLSKEAPDVKCHAGNFEPAEMVKSVPLDPSNDASKQIRIGSELDPK

SEQ ID NO: 42657 - protein, 86 aa, Zea mays
  Coding DNA Sequence Number=SeqID_878
MARKEDGEGEVDCIGGRYGYLGAGANHHARQELLLWGGGGRRLHLRESSLRATRGGEGGGAPGGEGIERGERGCARDCKWEFPAEE

SEQ ID NO: 42658 - protein, 83 aa, Zea mays
  Coding DNA Sequence Number=SeqID_879
MERSSPEKTEFARAEKKIVDWRRTDGRLDESNAVVLSNFANNAGLETAINFDEQFQKLWIEYGETVSRFGKGSTRGFKPYIYC

SEQ ID NO: 42659 - protein, 139 aa, Zea mays
  Coding DNA Sequence Number=SeqID_880
MKLWKETSRSSKTTTSSRCGLAATPSRLPVKAAVIYISFPHFDLFVLATSKDQDEGSGTSVEKLHEKETFQWMKRELQLEKAPSLGICRKLQKEGRIYALKLTSTWEETCLNGEGVLCAKELKAQPCDDDEVTLLKPRL

SEQ ID NO: 42660 - protein, 47 aa, Zea mays
  Coding DNA Sequence Number=SeqID_881
MRRNLKPIIQRVQLCLETSRRRSWDVFHPVLVYIVLLADYTMHSNLY

SEQ ID NO: 42661 - protein, 288 aa, Zea mays
  Coding DNA Sequence Number=SeqID_882
  Gene Ontology: Mol. function=transferase activity, transferring hexosyl groups; Cellular component=integral to membrane; Biological process=carbohydrate biosynthetic process
  Homolog annotation: Hit_ID=Q8LIF5; Match level="QueryCoverage=99%, HitCoverage=76%, E-value=1e-122, Identity=75%"; Hit description =Putative glycosyltransferase
  Pfam annotation: Domain name=Glyco_transf_8; Domain location=1-262; Score=274.7; E_value=1.8e-79; Accession=PF01501.10; Description =Glycosyl transferase family 8
MTLDANYLRGTMAAVFSILQHTACPENVAFHFLAAAADPDSDSDPDPLAAIRATFPYLDPSVHRFDPSRVRGRISRSVRHALDQPLNYARIYLADTLPAVVRRVIYLDSDVVVVDDVRKLWSVDLGERHVVAAPEYCHANFTKYFTDAFWSDRELRAAFRDRRPCYFNTGVMVMDVARWRRGGYTRRVEEWMAVQKRKRIYHLGSLPPFLLVLAGDIRPVDHRWNQHGLGGDNVEGRCRSLHPGPISLLHWSGKGKPWLRLDSRKPCTVDYLWAPYDLYKAAATALEE

SEQ ID NO: 42662 - protein, 526 aa, Zea mays
  Coding DNA Sequence Number=SeqID_883
  Gene Ontology: Mol. function=oxidoreductase activity; Cellular component=integral to membrane; Biological process=electron transport
  Homolog annotation: Hit_ID=Q8LIF2; Match level="QueryCoverage=99%, HitCoverage=99%, E-value=0.0, Identity=70%"; Hit description =Putative cytochrome P450
  Pfam annotation: Domain name=p450; Domain location=79-523; Score =199.7; E_value=6.9e-57; Accession=PF00067.12; Description=Cytochrome P450
MTTAWCWPWPWQATLLAAAAWLCLHAAVARLMEALWWRPRRLERHFARHGVRGPGYRLYLGSSIELSRLMEDASSRPAPRDEPHRVLPRVLAFHHHWDKLYGPMHLIWFGTTPRLVVSSPELIREVLLSRSQHFDRYEAHPLIRQFEGLGLSNIHGDEWARRRKILAPAFHAENLKLLAPFVAGTVQRMLEERVLLPGGPGEVELDVADWYRRLPQEVITVATFGRNNSDEGSAVFRLQAEHASYATEAHSKVFFPGYRFLPTRRNRRVWQLDREIRRLLAKLVAGLQSGGSGDHRHQGRDHGRAGGGMRDFMSFMAPAMAADEIIEESKNFFFAGQETLTSLLTWATVALAMHQEWQDRAREEVMEVCGSRAVPTKDHIPRLKTLGMVINETLRLYPPAVAMIRKAKRDVELGGCVVPAGTEIMIPIMAVHHDAGVWGDDATEFDPARFADDGDRRPRQQMAFFPFGGGARVCIGQYLALMEAKIALATVLQRCKFRLSPAYVHAPRVLMILNPQHGAPVIFRPL

SEQ ID NO: 42663 - protein, 203 aa, Zea mays
  Coding DNA Sequence Number=SeqID_884
  Gene Ontology: Mol. function=hydrogen ion transporting ATP synthase activity, rotational mechanism; Cellular component=proton -transporting two-sector ATPase complex; Biological process=ATP synthesis coupled proton transport
  Homolog annotation: Hit_ID=Q8H3D7; Match level="QueryCoverage=94%, HitCoverage=41%, E-value=7e-67, Identity=65%"; Hit description=Leaf senescence related protein-like
  Pfam annotation: Domain name=DUF231; Domain location=18-190; Score =160.1; E_value=5.8e-45; Accession=PF03005.6; Description=Arabidopsis proteins of unknown function
MAPRWKDADVLVFNTGHWWNHERLQQLGCYFQDGKTLRLNMSVEDAYERALNTLQKWVQKEVNTTKTLVVLRTYSPAHVRASNGGGGGCVRETAPELNTSRIALHRWPGLLNPSPALIEAAKKRQLATMHVLNVTLMTAQRRDGHPSVYNVRLPSPAAAQEQVTTRAADCSHWCLPGVPDAWNELLYALILHRTRTTSLGGSD

SEQ ID NO: 42664 - protein, 109 aa, Zea mays
  Coding DNA Sequence Number=SeqID_885
MTVSRLMKVSHIIMLFLCNALGNRLLCLHFGTLVVYATFQTPNFKNCCDVSKRGLPFVLKFSQDIKRVRVPTIEMLDANVSTAVTVAFRMLLEEQQMVEFVEVVSMCQR

SEQ ID NO: 42665 - protein, 46 aa, Zea mays
  Coding DNA Sequence Number=SeqID_886
  Gene Ontology: Cellular component=chromosome, pericentric region; Biological process=cell cycle
  Homolog annotation: Hit_ID=Q6K9G7; Match level="QueryCoverage=85%, HitCoverage=16%, E-value=6e-10, Identity=62%"; Hit description =Kinetochore protein-like
GLNAVHHVVKDRLDKRMANWEKFCLRHCFDVPEGFVADENVHNLEK

SEQ ID NO: 42666 - protein, 164 aa, Zea mays
  Coding DNA Sequence Number=SeqID_887
  Gene Ontology: Mol. function=DNA binding; Biological process=DNA integration
  Homolog annotation: Hit_ID=UPI00004C1731; Match level="QueryCoverage =53%, HitCoverage=6%, E-value=4e-40, Identity=91%"; Hit description =UPI00004C1731 related cluster
MATRGFESELGEEEIARPWNTHVANIGALGDSLTGVIFVEFVSSFELQFLKLLQDEHPYLHILTLLSYRLRIGYYMERANDMILQGLKPRIYNDLNKFGKRLMKELPSVVWSLRTTPSRATGFSPFFLVYGAEAILPIDLEYGSPRTRAYDDQSNQTSREDLLD

SEQ ID NO: 42667 - protein, 71 aa, Zea mays
  Coding DNA Sequence Number=SeqID_888
MWRRLQCNVFKWSVVINRPSRVLNAAAQRQAREAEGSKGTSDAEPNSKKDQLVLDICVICLEQEYNAVFVP

SEQ ID NO: 42668 - protein, 127 aa, Zea mays
  Coding DNA Sequence Number=SeqID_889
MAPRGSFYSSTEPRSRWSSIWKAPECLLSMGAPDWYCAVDDFFPSIVKPTVVDRRSLGTPDSPVVHRTVRCDLVTVGQADVSYVDCATNRWLGAQLAHRTVRCTPDNPVIYSHGARLILESCWFASW

SEQ ID NO: 42669 - protein, 257 aa, Zea mays
  Coding DNA Sequence Number=SeqID_890
MENENINEVGDDEVEEDRMSTGISGRSPAATLSSKSQKKDNYDGKRNRTESNCPSLDKFKDVHVQFQNAIQHASTMAAAMELFKDVCDRFQSVVQHASEMAAAVELFNDAHSCFQSALQNVNTSAVIEQFKDALDHFQGITHNGKMVAAVEYGTEMQEKSMCEEPQRKAKVIAIAEVLKLGFSGIEVVTTASIFAKEPNQMDMFLALPEIYKKDYILQMLSGRPCDPLTLYTMHLTSFKAVKVDNVSNIQPVSLYSA

SEQ ID NO: 42670 - protein, 86 aa, Zea mays
  Coding DNA Sequence Number=SeqID_891
  Gene Ontology: Mol. function=cytochrome-c oxidase activity; Cellular component=mitochondrial respiratory chain; Biological process =electron transport
  Homolog annotation: Hit_ID=Q6J4I2; Match level="QueryCoverage=70%, HitCoverage=100%, E-value=4e-17, Identity=63%"; Hit description =Putative COX VIIa-like protein
  Pfam annotation: Domain name=COX7a; Domain location=28-81; Score =96.3; E_value=9.3e-26; Accession=PF02238.6; Description=Cytochrome c oxidase subunit VIIa
MTITLYPKISSRRLVLSLWMTEAPFLPRERLFKQQHYFQNLTKHTYLKGRYDVITSVAIPLALAASSMFMIGRGVYNMSHGVGKKE

SEQ ID NO: 42671 - protein, 104 aa, Zea mays
  Coding DNA Sequence Number=SeqID_892
  Gene Ontology: Cellular component=chromosome, pericentric region; Biological process=cell cycle
  Homolog annotation: Hit_ID=Q6K9G7; Match level="QueryCoverage=93%, HitCoverage=42%, E-value=6e-15, Identity=42%"; Hit description =Kinetochore protein-like
MEDGDESAAAALGLSPQLFVNEVHGIIADISAEAFEAAAAPGVVGAAKAAEKAMDLQRGLNAVHHVVKDRLDKRMANWEKFCLRHCFDVPEGFVADENVHNLEK

SEQ ID NO: 42672 - protein, 73 aa, Zea mays
  Coding DNA Sequence Number=SeqID_893
MASTATKDNVYIDDHWHGLQAFDDTKLGAKSLGVLFQRGPMEAKQALYTKNLADVVVWDLRAWQWEKLLMSIT

SEQ ID NO: 42673 - protein, 46 aa, Zea mays
  Coding DNA Sequence Number=SeqID_894
MAIPNYTYQKPKMSGPIGTIIMGTMPSSKIGKRARRLSPYRKDFFV

SEQ ID NO: 42674 - protein, 77 aa, Zea mays
  Coding DNA Sequence Number=SeqID_895
  Homolog annotation: Hit_ID=Q1T176; Match level="QueryCoverage=69%, HitCoverage=28%, E-value=2e-12, Identity=64%"; Hit description=GINS complex, Psf1 component
MDIDLTVDMVPPKDPYIQVRVLEDIGEVSLGDHSVSLTKNSLHFLRRTDAEQFISQVPTLKCLLYLDLLLKLRMCEQ

SEQ ID NO: 42675 - protein, 85 aa, Zea mays
  Coding DNA Sequence Number=SeqID_896
MAPLALRQDALSLSFWVELVSCAGAPTPGAIGPVTCAEPTNAQLSTRQARREKRATQPPPVAKRESRDFFLSASPKLVEFVSPIS

SEQ ID NO: 42676 - protein, 236 aa, Zea mays
  Coding DNA Sequence Number=SeqID_897
MLQGPPLRLGGWVPHVMQAGSGQKKPDRRAWDRERGIPRKGSFSAKEPGSEPPTTDQGFEGWPSVGFNSRLRSRGPDTHYWLAPEGFTVASDTERGMTREGQRRLRHSDCSATRQSESDRQSGLAKGTTANSAPPDPRARTRANKTRKTANSAPPDPRARTRAKTRKTANSAPPDPRARTRAKTRKTANSAPPDPRARTRAKTRKTANSAPPDPRARTRAKTRKTTKLRSARPQAA

SEQ ID NO: 42677 - protein, 260 aa, Zea mays
  Coding DNA Sequence Number=SeqID_898
MPLKNICSSVSAHTGVPEGFPILNNIRGNPLFWYRHTFATMNHPLLKYARKCTKLNGIGWDGMRCHGLHDPPIPSLYGLGGKGKEQEMKGSKSDFGVMAIQQVKSRGEMENEWEWEGGRWVDRRVTSTNNAALALAVKQSAKEIANAPSPVMPRMAVSSLLFVVAKSESEEWSVAVSEVEGFDGRKLSKGSIRGWRRGRDTKGEVVDGRGRDTRGRRWAVVSGSPVPTDATETEARPGKLMMSLSPDSLSGSWSGSNHTP

SEQ ID NO: 42678 - protein, 322 aa, Zea mays
  Coding DNA Sequence Number=SeqID_899
  Homolog annotation: Hit_ID=O82782; Match level="QueryCoverage=48%, HitCoverage=51%, E-value=3e-63, Identity=73%"; Hit description=1-(5 -phosphoribosyl)-5-[(5- phosphoribosylamino)methylideneamino] imidazole-4-carboxamide
  Homolog annotation: Hit description=isomerase, chloroplast precursor
  Pfam annotation: Domain name=His_biosynth; Domain location=103-300; Score=-49.8; E_value=1.8e-07; Accession=PF00977.11; Description =Histidine biosynthesis protein
  Pfam annotation: Domain name=Vicilin_N; Domain location=4-117; Score=- 67.5; E_value=0.03; Accession=PF04702.3; Description=Vicilin N terminal region
  Pfam module annotation: Pfam domain module=His_biosynth::Vicilin_N; Domain location=103-300::4-117
MIDTKRSSTAGRDCAQRANEEAATAPGGRRQQQQRVAIATAAAARARRRRDSSSAGRPQLQQRACSSHAGAQKARQQQCRAAATAAEGMQQPRGRAEGATAAVPGGRNCSRGRADEATAAGAGSSTAGSRGRADEATAAGAGSSTAAGAGDSRVGEARSAAAGYVLSDGKMNIERLTKLVELVGKQRLVLDLSCRKKDGRYTIVTDRWQKFSDVFVDEPALEYLAAFADEFLVHGVDVEGKRLGIDEELVELLGHHSPIPVTYAGGVSTMDDLERIKKAGKSRVDVTVGSALDIFGGDLPYKDVVLWHKKQSMVGQVSRNMW

SEQ ID NO: 42679 - protein, 154 aa, Zea mays
  Coding DNA Sequence Number=SeqID_900
  Subcellular localization annotation: CTP_CleavageSite=70; ConfidenceScore=5.21e-01
ADSRRPPALESHGDRPPAAIDGPPSTSPSSLFPHLAEPSSLHSRTTSPSRRPSTAGVQDRIAESSSLHTRSDRLAVSPTSNPCPPLNSPCGLPGSPSRRGYLAPAPSSSGPAHSRSRPSPSTSSLRQAVAKLIQGQVSKLRGTEAAATDSEMSP

SEQ ID NO: 42680 - protein, 78 aa, Zea mays
  Coding DNA Sequence Number=SeqID_901
MSVEHAKKEMVTGEKPEGSGRCIKVQHKPINIQVRDPIQRSKRNEVCCGLAHRTVRSATGQCPVPQVPVGDLLLNAMN

SEQ ID NO: 42681 - protein, 278 aa, Zea mays
  Coding DNA Sequence Number=SeqID_902
DDADRCVSCTMRLPMTILVQQSSPIPGASVVIPLSEQLDGHPRAGAFSRRQSRAGSRRTDQPVSHLVLWPDAERIFLDCLAWHSGRRVARTTRVAVDPVRPAGTAPVAQQHRLRRPAKPTRFVTWRHYTSVSVRRRTGHQTRCSAINAPDLGIDALLAKFGRGEALASASDFARSQEEQIPHVRTGDRDRPTRGLLQHRIDMFDAQLAREIHALHASRLATSPGHRHTPHRPSPSAAAAATAAARLTAAPERLRAEAPQLMDGTRLAVKPGQGVQRRG

SEQ ID NO: 42682 - protein, 561 aa, Zea mays
  Coding DNA Sequence Number=SeqID_903
  Gene Ontology: Mol. function=DNA binding; Cellular component=nucleus; Biological process=regulation of transcription, DNA-dependent
  Homolog annotation: Hit_ID=Q5QT31; Match level="QueryCoverage=72%, HitCoverage=81%, E-value=1e-144, Identity=64%"; Hit description =Transcription factor myb
  Pfam annotation: Domain name=Myb_DNA-binding; Domain location=137 -182; Score=52.4; E_value=1.5e-12; Accession=PF00249.21; Description =Myb-like DNA-binding domain
  Pfam annotation: Domain name=Myb_DNA-binding; Domain location=85-131; Score=58.5; E_value=2.2e-14; Accession=PF00249.21; Description=Myb -like DNA-binding domain
  Pfam module annotation: Pfam domain module=Myb_DNA-binding::Myb_DNA -binding; Domain location=137-182::85-131
MAVPSLSLLVISCVCVISCRRTSGPIRRTKGGWTLKEHSYEMLLIASKYANRMKHCGRQLKLSRDRTEVQCLHRWQKVLNPELIKGPWTQEEDEKIIDLVRKYGPTKWSIIAKSLPGRIGKQCRERWHNHLNPEIRKDAWTPEEERALIDAHQVFGNKWAEIAKVLPGRTDNSIKNHWNSSLKKKLEAYSNSSVLSVSKLFVHDDFKDKMKPVATDGHLDLNQMPSIGSKDSSGRAYHSIVSPLSQAYNLDSSCLSLSIPTMQPLTSHEMSSLIDGSAVTLVVQCLESDSVRDKDQEIDSVQEKGVEVSSTPDPVGVELESAPAKRGAELSSKNELHSTLGPLCYQILNMEDVIPISTPLCSEHNGAHQTSQQCMSPNGYTSLSPTIGKVSSQLTVDSILRMAADSFPCTPSILRKRKRNKATPGSGNELKTGGVNNDSFYTPNGTNGKDTTPRSFKTAASFSSLGSVDGLLTSVCILNIINCAFLTLSIINLFFHTFQGINGNLMKPDRTLWNPFRTNQPHANVVVQAKSKSITFSGDKELPAMEMTYGTQANSLPCHLM

SEQ ID NO: 42683 - protein, 70 aa, Zea mays
  Coding DNA Sequence Number=SeqID_904
  Gene Ontology: Mol. function=oxidoreductase activity; Biological process=electron transport
  Homolog annotation: Hit_ID=Q6Z690; Match level="QueryCoverage=97%, HitCoverage=8%, E-value=3e-26, Identity=79%"; Hit description =Putative polyamine oxidase
MMLLDWHLANLEYANVTPLADLSMAFWGQDDPYEMCGDHDFISGGNSQFVRAFTDGIPKLYGQNVERIHY

SEQ ID NO: 42684 - protein, 85 aa, Zea mays
  Coding DNA Sequence Number=SeqID_905
MGMGMVDVGGNKAEVGGGRLVEVDGSGAAVVVIGGDGMGGAVGFDKGADATSLVLSSLPGISDTRLLELRLLRRAARLSVITISL

SEQ ID NO: 42685 - protein, 421 aa, Zea mays
  Coding DNA Sequence Number=SeqID_906
  Gene Ontology: Mol. function=protein serine/threonine kinase activity; Biological process=protein amino acid phosphorylation
  Homolog annotation: Hit_ID=Q10PA1; Match level="QueryCoverage=99%, HitCoverage=60%, E-value=1e-149, Identity=67%"; Hit description =Protein kinase family protein, putative, expressed
  Pfam annotation: Domain name=Pkinase_Tyr; Domain location=332-421; Score=-173.0; E_value=0.074; Accession=PF07714.7; Description =Protein tyrosine kinase
MAADHGEGVGRCILVGLHMDAVGRDLLQWALHQEVRRGDRIVAVHIYRKSDKTNTLKLIRTLDDYLAEYEALCNQKQVVLVGRVTPGSSIQKELVKEAKLCAAMVVVLGANKKYSFGGSSCLAKYCAKKLPPTTTVVAIQDGKAVFVREAPRPPLEPKPVLRTVLHPSVGLEPKVIIPNPNRRARSMSMDLDAPCCGHGAADAPASRGSGGRCSAARTPPPPPTAAPVQTPGGKNHEPRKQSVVHWVMSLPRRSAPSESAEPHAGAGLESELKAMLGGSGARCRWFRYEELYDSTNHFSAGASSLFLIVSLAPFRFQLTRFLAVTDRPRSWLVAENLIGNGGNSRVYRGSLACGRQVAIKLCKASAEASKDFLREVDIITKLQHHRIVPLIGVCVEGRNLISVYRYLPRGSLEDNLHGTVP

SEQ ID NO: 42686 - protein, 342 aa, Zea mays
  Coding DNA Sequence Number=SeqID_907
  Gene Ontology: Mol. function=binding; Cellular component =intracellular; Biological process=metabolic process
  Homolog annotation: Hit_ID=Q10PA0; Match level="QueryCoverage=96%, HitCoverage=50%, E-value=1e-154, Identity=67%"; Hit description =Pentatricopeptide, putative, expressed
  Pfam annotation: Domain name=PPR; Domain location=108-142; Score=8.6; E_value=0.71; Accession=PF01535.11; Description=PPR repeat
  Pfam annotation: Domain name=PPR; Domain location=174-208; Score=1.9; E_value=4.5; Accession=PF01535.11; Description=PPR repeat
  Pfam annotation: Domain name=PPR; Domain location=37-71; Score=50.0; E_value=8e-12; Accession=PF01535.11; Description=PPR repeat
  Pfam annotation: Domain name=PPR; Domain location=72-106; Score=5.9; E_value=1.5; Accession=PF01535.11; Description=PPR repeat
  Pfam module annotation: Pfam domain module=PPR::PPR::PPR::PPR; Domain location=108-142::174-208::37-71::72-106
MCPNLLLENALMDMYASCGCLKDAREIFDLMSARDVISWTSIISAYGKHGHGREAVDLFEKMLGQGLEPDSIAFVAVLAACGHAGLLADGKHYFDSMTSRYHIIPKAEHYTCMVDLLGRAGCINEAYDFITTMLIEPNERVWGALLQACRIHSNMDIGLVAADNLFSLVPEQTGYYVLLSNMYARAGRWADVTSVRSVMVNKGIKKFPGTSIVELGDQVHTFHIGDRCHPQSEMIYHKLDELLGKIRGMGYNPEVEATLHDVEEEDKEDHLSVHSEKLAIAFLLLNTSPGTIIRVTMNLRTCSDCHLAAKLISIITCREIVLKDTNRIHHIVQGVCSCGDYW

SEQ ID NO: 42687 - protein, 259 aa, Zea mays
  Coding DNA Sequence Number=SeqID_908
  Gene Ontology: Mol. function=binding; Cellular component =intracellular; Biological process=metabolic process
  Homolog annotation: Hit_ID=Q10PA0; Match level="QueryCoverage=71%, HitCoverage=42%, E-value=2e-67, Identity=53%"; Hit description =Pentatricopeptide, putative, expressed
  Pfam annotation: Domain name=PPR; Domain location=117-151; Score =10.7; E_value=0.4; Accession=PF01535.11; Description=PPR repeat
  Pfam annotation: Domain name=PPR; Domain location=220-254; Score =27.7; E_value=4e-05; Accession=PF01535.11; Description=PPR repeat
  Pfam module annotation: Pfam domain module=PPR::PPR; Domain location =117-151::220-254
MMLLDWHLANLEYANVTPLADLSMAFWADRMHASRSHLPTSGESLLRLLAACRAPAHLPSLRAAHARLLVLLHPSHPSAAHANVKLIQAYAACSALPLAHTVLESSSPDGRSRTTTVCFNVLIRALTASSLHRDALVLFASMRPRGPACFPDHYTYPLALKSCSASKDLLLGLQIHSAVAKLRLDRNVYVAHSAISMYSRCGRPEDAYRVFDGMPHRDVVSWNAMIAGFARVGLFDRAIEVFKQFVVLQGSMPDAGTMA

SEQ ID NO: 42688 - protein, 342 aa, Zea mays
  Coding DNA Sequence Number=SeqID_909
  Gene Ontology: Mol. function=binding; Cellular component =intracellular; Biological process=metabolic process
  Homolog annotation: Hit_ID=Q10PA0; Match level="QueryCoverage=96%, HitCoverage=50%, E-value=1e-155, Identity=67%"; Hit description =Pentatricopeptide, putative, expressed
  Pfam annotation: Domain name=PPR; Domain location=108-142; Score=8.6; E_value=0.71; Accession=PF01535.11; Description=PPR repeat
  Pfam annotation: Domain name=PPR; Domain location=174-208; Score=1.9; E_value=4.5; Accession=PF01535.11; Description=PPR repeat
  Pfam annotation: Domain name=PPR; Domain location=37-71; Score=50.0; E_value=8e-12; Accession=PF01535.11; Description=PPR repeat
  Pfam annotation: Domain name=PPR; Domain location=72-106; Score=5.7; E_value=1.6; Accession=PF01535.11; Description=PPR repeat
  Pfam module annotation: Pfam domain module=PPR::PPR::PPR::PPR; Domain location=108-142::174-208::37-71::72-106
MCPNLLLENALMDMYASCGCLKDAREIFDLMSARDVISWTSIISAYGKHGHGREAVDLFEKMLGQGLEPDSIAFVAVLAACSHAGLLADGKHYFDSMTSRYHIIPKAEHYTCMVDLLGRAGCINEAYDFITTMLIEPNERVWGALLQACRIHSNMDIGLVAADNLFSLVPEQTGYYVLLSNMYARAGRWADVTSVRSVMVNKGIKKFPGTSIVELGDQVHTFHIGDRCHPQSEMIYHKLDELLGKIRGMGYNPEVEATLHDVEEEDKEDHLSVHSEKLAIAFLLLNTSPGTIIRVTMNLRTCSDCHLAAKLISIITCREIVLKDTNRIHHIVQGVCSCGDYW

SEQ ID NO: 42689 - protein, 141 aa, Zea mays
  Coding DNA Sequence Number=SeqID_910
  Homolog annotation: Hit_ID=Q10P58; Match level="QueryCoverage=40%, HitCoverage=13%, E-value=5e-07, Identity=53%"; Hit description =Glycosyl hydrolases family 17 protein, expressed
  Subcellular localization annotation: CTP_CleavageSite=73; ConfidenceScore=5.01e-01
MKKPGCFGIMSTYRNEKEFTFLASARRKKGEAKGSPKKSMLASFRSRRVSPLPPTLPHCSNSQHCPPIGLACRSAPSPATYWHNLLTPQSVMPLLAGLSIDVRMYDVDLTVLLAFTRTGFELIVNVHNECLDTIADTGSAT

SEQ ID NO: 42690 - protein, 640 aa, Zea mays
  Coding DNA Sequence Number=SeqID_911
  Gene Ontology: Mol. function=glucose-1-phosphate adenylyltransferase activity; Cellular component=chloroplast; Biological process =glycogen biosynthetic process
  Homolog annotation: Hit_ID=P55241; Match level="QueryCoverage=80%, HitCoverage=100%, E-value=0.0, Identity=97%"; Hit description =Glucose-1-phosphate adenylyltransferase large subunit 1, chloroplast precursor
  Pfam annotation: Domain name=Hexapep; Domain location=535-552; Score =2.8; E_value=65; Accession=PF00132.14; Description=Bacterial transferase hexapeptide (th
  Pfam annotation: Domain name=Hexapep; Domain location=588-605; Score =17.0; E_value=0.066; Accession=PF00132.14; Description=Bacterial transferase hexapeptide (th
  Pfam annotation: Domain name=NTP_transferase; Domain location=209 -487; Score=390.6; E_value=2.3e-114; Accession=PF00483.13; Description=Nucleotidyl transferase
  Pfam module annotation: Pfam domain module=Hexapep::Hexapep::NTP _transferase; Domain location=535-552::588-605::209-487
MALLRITLTKSERSSSVMGKDSEYHLQANSSGRKVSKTMNGLQKAKAKGKIGTLMMVGCMSLSITCKKCEPLFLSSPPVCPLILYINTSTASQLATRSLREASAISISQPPFFCSVVYLVVGGDMQFALALDTNSGPHQIRSCEGDGIDRLEKLSIGGRKQEKALRNRCFGGRVAATTQCILTSDACPETLHSQTQSSRKNYADANRVSAIILGGGTGSQLFPLTSTRATPAVPVGGCYRLIDIPMSNCFNSGINKIFVMSQFNSTSLNRHIHRTYLEGGINFADGSVQVLAATQMPEEPAGWFQGTADSIRKFIWVLEDYYSHKSIDNIVILSGDQLYRMNYMELVQKHVEDDADITISCAPVDESRASKNGLVKIDHTGRVLQFFEKPKGADLNSMRVETNFLSYAIDDAQKYPYLASMGIYVFKKDALLDLLKSKYIQLHDFGSEILPRAVLDHSVQACIFTGYWEDVGTIKSFFDANLALTEQPSKFDFYDPKTPFFTAPRCLPPTQLDKCKMKDAFISDGCLLRECNIEHSVIGVCSRVSSGCELKDSVMMGADTYETEEEASKLLLAGKVPVGIGRNTKIRNCIIDMNARIGKNVVITNSKGIQEADHPEEGYYIRSGIVVILKNATINDGSVI

SEQ ID NO: 42691 - protein, 229 aa, Zea mays
  Coding DNA Sequence Number=SeqID_912
MGYWDLTRTENGQPQRQTEQMGDGSRIADHVPQYLTTADGLADGATTELAAVDAATEARLSAGVAVRREARLRASPSGDGLAARRCGLTAGGAQGSAGLAARRKVRGDGGAPWGEAGLASRREVARVRRGEKRSIREVSISDTVSDTGALLLKKDVVKLDSIAQKVNTHCLSSVGVIQHWLTNIPIKSLLKNLSDHEGKKGKKGEGAPGVLVMLVASQGGEEGGELGRG

SEQ ID NO: 42692 - protein, 458 aa, Zea mays
  Coding DNA Sequence Number=SeqID_913
  Homolog annotation: Hit_ID=Q8LSJ9; Match level="QueryCoverage=79%, HitCoverage=57%, E-value=0.0, Identity=96%"; Hit description=X1
  Pfam annotation: Domain name=XS; Domain location=178-292; Score =274.3; E_value=2.5e-79; Accession=PF03468.5; Description=XS domain
  Pfam annotation: Domain name=zf-XS; Domain location=110-150; Score =82.8; E_value=1e-21; Accession=PF03470.5; Description=XS zinc finger domain
  Pfam module annotation: Pfam domain module=XS::zf-XS; Domain location= 178-292::110-150
MAYRGIGVSRIRIRILFFPDNGEAGGSPSKKAGSPLVPASAWASVLHLFSEVTSEAEVAYIFFPFLKMDHSSDEDTEISDSEIDDYEGKIYARLMSGDLKLNKNGENYICPFCSSKKKNYSKSSLVQHASGVSAAPNREAKEKAVHRALFKYLKNGLAKSPEPGSHATPVEPQPLQNRDEKFVWPWMGVLVNVPTEWKDGRQIGESGNRLKEQLSHFCPLRVIPLWTFRGHTGNAIVEFGKDWNGFRNARTFESHFAAGGFGKKDWIGKKNQGSELYGWLARAEDYNSPGIIADHLRKNGDLKSVNDLAKEGARKNDRLVANLANQIEVKNRYLQELECKYSETTASLEKMMGQREQLLQSYNEEISKMQQLARRHSQKIIDENQKLRSDLEAKMNDLDVRSKQLDEIAAKSDYDRRSLEQEKQKNAIKSSHLKLATLEQQKADENVLKLEYSIVSPK

SEQ ID NO: 42693 - protein, 107 aa, Zea mays
  Coding DNA Sequence Number=SeqID_914
  Subcellular localization annotation: CTP_CleavageSite=82; ConfidenceScore=5.24e-01
MALPLGLWAGWSGWPGWPVSARQALHVVNLGRVAWWSARDSHRSVTGPAVSGSGRGDCTASASASASALHTGCIRFRFTFVHAMLAAAINGSPRPEGGNVRGRLQTF

SEQ ID NO: 42694 - protein, 695 aa, Zea mays
  Coding DNA Sequence Number=SeqID_915
  Gene Ontology: Mol. function=protein serine/threonine kinase activity; Cellular component=membrane; Biological process=protein amino acid phosphorylation
  Homolog annotation: Hit_ID=Q10PA1; Match level="QueryCoverage=99%, HitCoverage=100%, E-value=0.0, Identity=69%"; Hit description =Protein kinase family protein, putative, expressed
  Pfam annotation: Domain name=APH; Domain location=352-523; Score= -17.5; E_value=0.1; Accession=PF01636.13; Description=Phosphotransfera se enzyme family
  Pfam annotation: Domain name=Pkinase; Domain location=350-622; Score =108.6; E_value=1.9e-29; Accession=PF00069.15; Description=Protein kinase domain
  Pfam annotation: Domain name=Pkinase_Tyr; Domain location=350-622; Score=84.5; E_value=3.3e-22; Accession=PF07714.7; Description =Protein tyrosine kinase
  Pfam module annotation: Pfam domain module=APH::Pkinase::Pkinase_Tyr; Domain location=352-523::350-622::350-622
MAADHGEGVGRCILVGLHMDAVGRDLLQWALHQEVRRGDRIVAVHIYRKSDKTNTLKLIRTLDDYLAEYEALCNQKQVVLVGRVTPGSSIQKELVKEAKLCAAMVVVLGANKKYSFGGSSCLAKYCAKKLPPTTTVVAIQDGKAVFVREAPRPPLGAEPKPVLRTVLHPSVGLEPKVIIPNPNRRARSMSMDLDAPCCGHGAADAPASRCLDDATKGDGGVAPEQRLGWPLLRRAHAAAAASAAPVQTPGGKNHEPRKQSVVHWVMSLPRRSAPSESAEPHAGAGLESELKAMLGGSGARCRWFRYEELYDSTNHFSAGASSLFLIVSLAPFRFQLTRFLAVTDRPRSWLVAENLIGNGGNSRVYRGSLACGRQVAIKLCKASAEASKDFLREVDIITKLQHHRIVPLIGVCVEGRNLISVYRYLPRGSLEDNLHGERSKPALSWENRYKAALGIAEALSYLHSGSPRPVIHRDVKSSNILLAEEFEPQLSDFGLAIWAPTNPTSVTHSDVVGTFGYLAPEYFMYGKVTDRVDVYALGVVLLELLSGRKSISSDGSSPKGQESLVMWATPVLSSGNICDLLDPRLDVKHDEVEVRRMASAASLCLRRSARLRPPISQILSILRGESAASIADQGATEPDCVDDEAYPAANVRSHLGLALLDVEDSESISSTEHSSGLSPLEEYLRERWSRSSSFD

SEQ ID NO: 42695 - protein, 34 aa, Zea mays
  Coding DNA Sequence Number=SeqID_916
RSSFVPDVEASLKPVVGMPFENLTDVEKCYIDYA

SEQ ID NO: 42696 - protein, 189 aa, Zea mays
  Coding DNA Sequence Number=SeqID_917
  Subcellular localization annotation: CTP_CleavageSite=37; ConfidenceScore=5.10e-01
MRLPMTILVQQSSPIPGSATCASVVIPLSEQLDGHPRAGAFSRRQSRAGSRRTDQPVSHLVLWPDAERIFLDCLAWHSGRRVARTTRVAVDPVRPAGTAPVAQQHRLRRPAKPTRFVTWRHYTSVSVRRRTGHQTRCSAINAPDLGIDALLAKFGRGEALASASDFARSQEEQIPHLVDFSSTGLTCSM

SEQ ID NO: 42697 - protein, 695 aa, Zea mays
  Coding DNA Sequence Number=SeqID_918
  Gene Ontology: Mol. function=catalytic activity; Cellular component =intracellular; Biological process=metabolic process
  Homolog annotation: Hit_ID=Q10PA0; Match level="QueryCoverage=87%, HitCoverage=74%, E-value=0.0, Identity=74%"; Hit description =Pentatricopeptide, putative, expressed
  Pfam annotation: Domain name=PPR; Domain location=117-151; Score =10.7; E_value=0.4; Accession=PF01535.11; Description=PPR repeat
  Pfam annotation: Domain name=PPR; Domain location=220-254; Score =27.7; E_value=4e-05; Accession=PF01535.11; Description=PPR repeat
  Pfam annotation: Domain name=PPR; Domain location=289-323; Score =36.1; E_value=1.2e-07; Accession=PF01535.11; Description=PPR repeat
  Pfam annotation: Domain name=PPR; Domain location=390-424; Score =50.0; E_value=8e-12; Accession=PF01535.11; Description=PPR repeat
  Pfam annotation: Domain name=PPR; Domain location=425-459; Score=5.7; E_value=1.6; Accession=PF01535.11; Description=PPR repeat
  Pfam annotation: Domain name=PPR; Domain location=461-495; Score=8.6; E_value=0.71; Accession=PF01535.11; Description=PPR repeat
  Pfam annotation: Domain name=PPR; Domain location=527-561; Score=1.9; E_value=4.5; Accession=PF01535.11; Description=PPR repeat
  Pfam module annotation: Pfam domain module=PPR::PPR::PPR::PPR::PPR::PP R::PPR; Domain location=117-151::220-254::289-323::390-424::425 -459::461-495::527-561
MMLLDWHLANLEYANVTPLADLSMAFWADRMHASRSHLPTSGESLLRLLAACRAPAHLPSLRAAHARLLVLLHPSHPSAAHANVKLIQAYAACSALPLAHTVLESSSPDGRSRTTTVCFNVLIRALTASSLHRDALVLFASMRPRGPACFPDHYTYPLALKSCSASKDLLLGLQIHSAVAKLRLDRNVYVAHSAISMYSRCGRPEDAYRVFDGMPHRDVVSWNAMIAGFARVGLFDRAIEVFKQFVVLQGSMPDAGTMAGILPAMGNAKPDDIRFVRRVFDNMQFKELISWNAMLAVYANNEFHVKAVELFMLMEKDEVEPDSITLATVLPPCGELSAFSVGKRIHEIIKRKNMCPNLLLENALMDMYASCGCLKDAREIFDLMSARDVISWTSIISAYGKHGHGREAVDLFEKMLGQGLEPDSIAFVAVLAACSHAGLLADGKHYFDSMTSRYHIIPKAEHYTCMVDLLGRAGCINEAYDFITTMLIEPNERVWGALLQACRIHSNMDIGLVAADNLFSLVPEQTGYYVLLSNMYARAGRWADVTSVRSVMVNKGIKKFPGTSIVELGDQVHTFHIGDRCHPQSEMIYHKLDELLGKIRGMGYNPEVEATLHDVEEEDKEDHLSVHSEKLAIAFLLLNTSPGTIIRVTMNLRTCSDCHLAAKLISIITCREIVLKDTNRIHHIVQGVCSCGDYW

SEQ ID NO: 42698 - protein, 141 aa, Zea mays
  Coding DNA Sequence Number=SeqID_919
MAPRILCDDGGSQPPYGSKRTKDQGPLREGWPRGDEDETGARLEPLAPSPAWTLVTPYCKRTRPGRGTNTKAAGFPPLSRRSPAASLSPFALGLALDPSGLGHAATFTHRLKDPPVSKRRQSGTRQRSLCRVSHSTKYCSR

SEQ ID NO: 42699 - protein, 442 aa, Zea mays
  Coding DNA Sequence Number=SeqID_920
  Gene Ontology: Mol. function=phosphoric monoester hydrolase activity; Cellular component=chromosome, pericentric region
  Homolog annotation: Hit_ID=Q6VEY3; Match level="QueryCoverage=97%, HitCoverage=100%, E-value=1e-140, Identity=58%"; Hit description=CTD- phosphatase-like protein
  Pfam annotation: Domain name=NIF; Domain location=258-433; Score =225.0; E_value=1.7e-64; Accession=PF03031.8; Description=NLI interacting factor-like phosphatase
MVKLPALRMKRMFHGDDCANEFKIRTMKSMKVSHFHVSELEQSAMSNLSDKTPQDEPDPTIQLADQDIRVTEASGLHDLIGGKSMLEDLTSEVIDSPNSEGDSSANYDDNKSVLHAVNYVGKEFADDGVDSSFQNFCFSDHEANWGLNECCRLMDIYSPDDDFSYLLDSPPDLLPSYTGFCDEFVSIDALMNMSSRCGIFPLIESATEASVDNKPCSSEVDLCFNNSEVLEWLNPNLLEGDLPDLVDFAELNSNATPAKKEQWTRNVTLVLDLDETLVHSTMKHCDDADFTFSMFYDMKEHVVYVKKRPHVHMFLQRMVEMFEVVIFTASQSVYADQLLDMLDPEKKLFSKRFFRESCLITDSGYRKDLTVVGVDLAKVAIIDNTPQVFELQVNNGIPIESWYSNPLDEALPQLIPFLETLAVADDVRPIIAKKFGNIIDNR

SEQ ID NO: 42700 - protein, 276 aa, Zea mays
  Coding DNA Sequence Number=SeqID_921
MEGSRMASATLTTDDLLKRVKGAGLWVYRTALPPIPKDVTGWATCRLAIEQQKKKDKEKKRIHEKRAAHDALERHHRAQEREGLPLEASPSTIGGGSGDDDEGMEVWLGFNPKVRLWSEPSLVGPSIGPDVSVLRLEVSAPLPKTQTSVETGSIPTTEEEAAERPVDPLSAPTMGAKCTRSLGPRMLGLPRPSLKRKAGALILTPAEVVKCLASLPLKCLASHELQEVTNIRFLRAIRNSSCIGGQSKGGVKWHEVKADSDEYIVKAMHTNTLQCF

SEQ ID NO: 42701 - protein, 138 aa, Zea mays
  Coding DNA Sequence Number=SeqID_922
  Subcellular localization annotation: CTP_CleavageSite=76; ConfidenceScore=5.25e-01
MPSVCCRVTHARAARGPYLMRVARTTRVAVDPVRPAGTAPVAQQHRLRRPAKPTRFVTWRHYTSVSVRRRTGHQTRCSAINAPDLGIDALLAKFGRGEALASASDFARSQEEQIPHVRTGDRDRPSEFGFQFGLFLFV

SEQ ID NO: 42702 - protein, 53 aa, Zea mays
  Coding DNA Sequence Number=SeqID_923
MVEPREHLRLQDMISPLTTLRLRSAPTYTPRQAVRCVPPPMHQANLSRVGAKT

SEQ ID NO: 42703 - protein, 202 aa, Zea mays
  Coding DNA Sequence Number=SeqID_924
MATGGWEAAPVDRPRLVKTPSGNPLPRRRGQVKERIVRDIAEALATAAALACGDRTGVGKRGEGGRAAAATASPSPETSRFQNPPRGSRHTSVRRDRPLRSRPFPDFALLRLQCRHCVPSSLALLQRHPPLRGPSTAPYSSMTSPAAYSCLALLRRQAPIEEVTGALPSVTHDVDADDVGDPPNVLIEIQRSIGCLSILDAT

SEQ ID NO: 42704 - protein, 71 aa, Zea mays
  Coding DNA Sequence Number=SeqID_925
MEHGYPCNGCGKEKRPPLKRGQLKLQIARTLLGSLAAPKERVAVRFCSVLSPSAGLLLTFFSRLSWLAGSY

SEQ ID NO: 42705 - protein, 73 aa, Zea mays
  Coding DNA Sequence Number=SeqID_926
MGSVVKTDHFRLSPVDMSGDEIGVMIIGSHAAQGSVARPEARFFGPTRTWHGSEGVMLRPARHDPAGRACAGT

SEQ ID NO: 42706 - protein, 1008 aa, Zea mays
  Coding DNA Sequence Number=SeqID_927
  Gene Ontology: Mol. function=zinc ion binding
  Homolog annotation: Hit_ID=Q10RY0; Match level="QueryCoverage=68%, HitCoverage=96%, E-value=0.0, Identity=69%"; Hit description=Zinc finger family protein, putative, expressed
  Pfam annotation: Domain name=PHD; Domain location=125-172; Score=4.1; E_value=0.022; Accession=PF00628.19; Description=PHD-finger
  Pfam annotation: Domain name=VWA; Domain location=297-474; Score =105.3; E_value=1.8e-28; Accession=PF00092.18; Description=von Willebrand factor type A domain
  Pfam annotation: Domain name=VWA_CoxE; Domain location=241-450; Score= -66.5; E_value=0.0016; Accession=PF05762.4; Description=VWA domain containing CoxE-like protei
  Pfam annotation: Domain name=zf-C3HC4; Domain location=126-169; Score= 44.2; E_value=4.5e-10; Accession=PF00097.15; Description=Zinc finger, C3HC4 type (RING finger)
  Pfam module annotation: Pfam domain module=PHD::VWA::VWA_CoxE::zf -C3HC4; Domain location=125-172::297-474::241-450::126-169
  Subcellular localization annotation: CTP_CleavageSite=28; ConfidenceScore=5.38e-01
PTIPPPTPRPSRRQHFVRSKGAPPFVPRGPMAAAWARAKRALATGLCVGVPARQLAIEDAPPVVEAPSSVAEDKLESAPVSVRRLTSFGSRSSQQGILFDPQLLGKVKLATRGYSDMYSWGKQKTCAICLGGMRSGQGHALFTAECSHKFHFHCISSNIKHGNLICPICRAKWKELPGAQPADASYGRARVNPLNWPQDEGHMAVVRRLSHTYSGNLQEHLPFFRTLEAGVFNDDEHIDLQSDNISEHNAVAGSVKIKAYSEVPAIEQSTTKEIFAILIHLRAPKSSHSASSRAPLDLVTVLDVSGSMAGTKIALLKNAMSFVIQTLGPNDRLSVVAFSSTARRLFPLRRMTLSGRQQALQAVSSLVASGGTNIADGLKKAAKVIEDRRLKNSVCSIILLSDGQDTYTLPSDRNLQDYSAVVPPSILPGTCQHVQIHTFGFGSDHDSAAMHAIAEISSGTFSFIDAEGSIQDGFAQCIGGLLSVVVKEVRLGIECVDNGVLLTSIKSGGYTSQVAEDGRGGSVDIGDLYADEERGFLVTLHVPAAQGQTVLIKPSCMYHDAITTENIEVHGEEVRIQRPEHRVDCKMSPEVEREWHRVQATEDMSAARAAAEVGAFSQAVAILEARRRILEAQAAQSSDDQFLALMAELREMQQRVENRRRYEESGRAFMLAGLSSHSWQRATARGDSTEITTTIHTYQTPSMVDMLQRSQILVPPIADMLNSSPTVAPPNRFSRPSRQWDESVEAENHVDSGINKSIDHIEHAKPKIHAKGGSPWRGPLPKPRVSKMTFAAALDKAIHVDPCSRERSKSASRFLERVHPFSAFTGGVVRDTTQSLSNFENQKVRSCKNVGPFSPFLRRDYWRSAFTGDCVGDTKEALSKFENQKVGHYKNIGPKPGAQSLKLGMEWDEKYPLSTLVALSRDVSDHTPLLLHMGETRKGNQNSPFKLELGWLLRDGFYDMVKVIWTNKNGGSSPMEKWWAKIRHVSQHLRGWREEDEWKIQKGKEGNP

SEQ ID NO: 42707 - protein, 758 aa, Zea mays
  Coding DNA Sequence Number=SeqID_928
  Homolog annotation: Hit_ID=Q9FI68; Match level="QueryCoverage=39%, HitCoverage=55%, E-value=1e-117, Identity=61%"; Hit description =Arginine methyltransferase-like protein
  Pfam annotation: Domain name=REF; Domain location=531-749; Score =249.4; E_value=7.5e-72; Accession=PF05755.3; Description=Rubber elongation factor protein (REF)
MAENAQRLMSGNPSLGQRITVIRGKVEEVELPEKADILISEPMGTLLVNERMLESYVIARDRFLAPDGKMFPTTGRGDCEQISREGEKDESRDSGSKGRQWRVIHMAPFSDEYLYVEIANKALFWQQHNFFGVDLTPLHGSAFQGYFSQPVVDAFDPRLLISPPIYHTLDFTSMKEEELYEIDIPLSFVASVGTRVHGLACWFDVLFNGSTVQRWLTTAPGSPTTHWYQLRCVLSQPLYVMAGQEITGRLHLVAHSAQSYTIYLTMSAKMWGVGAEQGGILQTSTGKLELKEPYYRLSQPQSYMLPQDQQQQQQLSSLQPHSSWLKPGSDLNLPGVRSVGKQQESYTRESRAGRSARSRSASNGAAGNGISRPSQPACFHQLWKRFPCVPCRLVVAKKLSSTGSIDLSTVVPKSVDRTCRQIFCCLTSKQNCEGCHASSFLPTVVPKTVDDISYVCSLIKIVLHSHPKFLEPGFDARHHRLWPTSGSALQFEPLAHRSIRAIREKKRHRPVTPLATCPSRSGYVSVPLQSVLAQPGRWRLPRPAVCLAGLYGLAKDHAGPLRPSVDAVESAVKGVVSPVYDRFGGLPLDVLAFVDRKVDDTVHEVDKHLPGALKAASAHVYAVVRGVPEVARELAAEAQRSGVRGAARAALAMTEPVARDVYGRVEPVAKDLYVRYEPAAEHLAVSAWRSLNGLPVFPHVAEIVVPTAAHWADKYNRAVAAAAEHGYAGAKYLPAIPTERIAKVFSSAPEAEPLAEGQ

SEQ ID NO: 42708 - protein, 1436 aa, Zea mays
  Coding DNA Sequence Number=SeqID_929
  Gene Ontology: Mol. function=helicase activity; Biological process =viral genome replication
  Homolog annotation: Hit_ID=Q5VR06; Match level="QueryCoverage=93%, HitCoverage=99%, E-value=0.0, Identity=48%"; Hit description =Helicase-like protein
  Pfam annotation: Domain name=DUF889; Domain location=1093-1349; Score= 370.4; E_value=2.9e-108; Accession=PF05970.5; Description=Eukaryotic protein of unknown function (DUF889)
  Subcellular localization annotation: CTP_CleavageSite=43; ConfidenceScore=5.09e-01
MDGDDEADPPISHVTSHVTDTWAFTPRRKFSIVTTHKNAALARQQRKRALDQWRLLTRGPAKSIRTPMNCGYFPEEYIAALKASYRGRSYHGTLDYECEHCHALFWYGEKSSINRETGRPQYHTCCKSGKIYIPSFRDRPEPLASLAIFNGDSRSKKFMRSIRQYNCLFAFTSMGARIDNSINDGRGPPLFKICGQVHHRVGSLLPLDDSAPQFLQLYVYDTANEVSNRLKCLDADHRPVESLDPSIVHDLISMLDQHNPFAKKFRMARDRLADHNNEDFIIRIVGAKKGDPVQYNLPTTDELAMLVVGDFSLDTYKRDIIIETHNRELKRISSLHPAYMPLQYPLLFPYGERGFQLGIHYTNRNPIGATTGRHMTMQEYYCYQFHYRKNQPNPYLCYGLLSSQAKVDARAAIEESRLHYIAQNQRNLRMESIQGIADAVSRGCINGDEMGKRVVLPASHIGGRRYMIQNYHDGLAICGKYGPPDFFVTFTCNPSWPEITESIFQHGQTAPDRSDCYIPLNSKNVACLMHTLYFGSPLTLLNQHPELIDSFITAEIPDPETDPLGRRNNGRVVFKNKIALDNRYIVPSNLLLLKKFGAHTNVEWCNKTIFIKYLFKYVTKGPDRSKMFLQRIQSGEDVPYDEETDARNEIKEYIDSRYLCDIDSCWRVFGFEIHRHYPAVERMHVHLPNENYITYNTSANMAGILSQSFLRKTMLTEWFTTNQQHSNARNLTYSQFPSKWRWDDKTRTWHPRQTREGKIGRLYYVHPLAGDKYYLRMLLLVVKGARSYEEVRTYNNIVYNTFKEACKARGLLGDDQEWLAAFNEAATWATSSQLRQLFVTMLLYCQVADEYTLFGKVWKYLADDIEYNIRKALNQTNYQIPEDDLKNYLLDKLAVLFNKSGGNIHDFNLPRKTDNLEGRNVNHLLKEELSYDANSLSYESEVLIYQLNTEQMKAFNTIVENVLSGQPGFYFVSGYGGTGKTFLWNTIVAYLRSQKKVVLTVASSGVAALLLPGGRTAHSRFKIPCDLNETTTCNIKRGTMLAELIEVASLIIWDEAFMTHRIAFEALDRTLRDLLSPRCPVAEKTPFGGKVVVLGGDARQILPVIEGGTQSQIIDAAITSSPLWTSITVLYLTENMRLKSPHLDSASKNEIASFSKWLLDIGDGKVPARAKDSETEKYWIKIPQDILLTPQNNSLQCIVDSAYPDLTDNYADIQYLKERAILSPTNDVIDTVNNFVVTLIPGDPREYLSCDSIVKGPDSNDSYDLLYPVEFLNSITGNNFPQHQLILKKGVPIMLLRNINQSEGLCNGTRLIIVTLGDLIIEAKIMTGKYKDKTVLIPRVCLTLKTLKLPFTLERRQYPIKVCYAMTINKSQGQTLSSVAVYLKKPVFTHGQLYVAFSRVTSKKGLRVLIEDDDGKSTDETKNIVYREIFSRFPAH

SEQ ID NO: 42709 - protein, 66 aa, Zea mays
  Coding DNA Sequence Number=SeqID_930
MEVENLREAREPGERWMVGELMSSGDGGVLDVVAFPLSVNDIGSQSKGWKYSSDVDSTVARLCSAG

SEQ ID NO: 42710 - protein, 64 aa, Zea mays
  Coding DNA Sequence Number=SeqID_931
MKYSLPKQTSTTEAGVWASSQRITRSDSDSDDVPPPAAAAAGVGVDEQRADGDHLLVAAHELGQ

SEQ ID NO: 42711 - protein, 97 aa, Zea mays
  Coding DNA Sequence Number=SeqID_932
  Gene Ontology: Mol. function=transferase activity, transferring glycosyl groups; Biological process=metabolic process
  Homolog annotation: Hit_ID=Q8H462; Match level="QueryCoverage=99%, HitCoverage=20%, E-value=3e-34, Identity=71%"; Hit description =Putative Flavonol 3-O-glucosyltransferase
MAQMEREHLSVVMFPWLAHGHVTPYLELARRLTSANDADIDVTVHLVSTPVNLSAIARHQTPRIRFAELHLPAAPDLPPELHTTKHLPARLMPALKR

SEQ ID NO: 42712 - protein, 46 aa, Zea mays
  Coding DNA Sequence Number=SeqID_933
MAASRRGLVVADSWPRRGARVTLCRQPSPWRGEEKSAPPAQEVSES

SEQ ID NO: 42713 - protein, 250 aa, Zea mays
  Coding DNA Sequence Number=SeqID_934
  Gene Ontology: Cellular component=intracellular; Biological process =ribosomal large subunit biogenesis and assembly
  Homolog annotation: Hit_ID=Q8H458; Match level="QueryCoverage=99%, HitCoverage=100%, E-value=1e-125, Identity=86%"; Hit description =Putative TGF(Transfoming growth factor) beta inducible nuclear protein TINP1
  Pfam annotation: Domain name=Ribosomal_S8e; Domain location=1-227; Score=306.7; E_value=4.1e-89; Accession=PF01201.12; Description =Ribosomal protein S8e
MPQGDHIELHQKRHGKRLDHEERKRKREARELIGAKGKRFAKKRYAEKAQMKKTLKMHDESNKRQKVDDDVQEGALPPYLLDRDQTQRAKVLSNTIKQKRKEKAGKWDVPLPKVRPVAEEEMFKVLRTGKRKTKQWKRMVTKATFVGAGFTRKPPKYERFIRPTGLRFTKAHVTHPELKCTFNLDIISVKKNPNGPMYTSLGVMTRGTIIEVNVSELGLVTPAGKVVWGKYAQVTNNPENDGCINAVLLV

SEQ ID NO: 42714 - protein, 81 aa, Zea mays
  Coding DNA Sequence Number=SeqID_935
MADPGASVNIAARHHLASQLARQPPVTHTGWWGGARSYHHGRGVGRGIKGEGGASRRRTATSPHIQHPTSVDDIVLPQKMY

SEQ ID NO: 42715 - protein, 88 aa, Zea mays
  Coding DNA Sequence Number=SeqID_936
MGALKIIGRGLEAGNTVRSLRGTYLRGKIPIDEQTVFFYEGGDEYRGESSSLEGTEEQGYTGGEAQPQLSEKFAIMGIFTCGFDVLEA

SEQ ID NO: 42716 - protein, 197 aa, Zea mays
  Coding DNA Sequence Number=SeqID_937
MDGWMAVSHAPARPAQEDTACGRMHSGGVLSVSPSYRQPHEPGRTVRGARLWGRLFSSSPRSAQPVAALRLQWCDAFVSLVARASVYDWASTRKFAPWERWMDLREASVCHAHDELLALSSAAAAATAAEDFLRWQFPESPRGKGWWSAARQLVEDAWRSLGEAKNAARLMDNFVLCEFTTRKKARSVGQNPTLLLK

SEQ ID NO: 42717 - protein, 141 aa, Zea mays
  Coding DNA Sequence Number=SeqID_938
  Gene Ontology: Mol. function=metal ion binding; Biological process =metal ion transport
  Homolog annotation: Hit_ID=Q10LJ9; Match level="QueryCoverage=45%, HitCoverage=17%, E-value=6e-19, Identity=69%"; Hit description=Heavy metal-associated domain containing protein, expressed
MASGEAEPLQYTVSEHDRFFSVRLCVSLTDRPPDVLSSALPVPPDHRAAGVHPLRGLQEEGQEGAPQHRRRVQGDGGRGAAQGDRHRQRGSGRARPAAAQGRQAGGAVAFAGAGKRRGQQGRACCTPGEGGAKEAADTKGG

SEQ ID NO: 42718 - protein, 101 aa, Zea mays
  Coding DNA Sequence Number=SeqID_939
MVVVFFHLQAANGFLFIAMNELVEEILVKFGARVWVRRLVTEILKKLTEKLNVWQFAAAFGGQKLPEAETNMHNRCWGLRVWLLRAVLRKDCESRFRLRMK

SEQ ID NO: 42719 - protein, 266 aa, Zea mays
  Coding DNA Sequence Number=SeqID_940
  Gene Ontology: Mol. function=structural constituent of cell wall; Cellular component=cellulose and pectin-containing cell wall
  Homolog annotation: Hit_ID=Q5VR46; Match level="QueryCoverage=56%, HitCoverage=28%, E-value=2e-42, Identity=60%"; Hit description =Putative leucine-rich repeat/extensin 1
  Pfam annotation: Domain name=LRR_1; Domain location=159-181; Score =1.2; E_value=1.7e+02; Accession=PF00560.23; Description=Leucine Rich Repeat
  Pfam annotation: Domain name=LRR_1; Domain location=183-205; Score =8.2; E_value=8.3; Accession=PF00560.23; Description=Leucine Rich Repeat
  Pfam annotation: Domain name=LRR_1; Domain location=207-229; Score =10.6; E_value=2.9; Accession=PF00560.23; Description=Leucine Rich Repeat
  Pfam annotation: Domain name=LRR_1; Domain location=231-254; Score =4.7; E_value=38; Accession=PF00560.23; Description=Leucine Rich Repeat
  Pfam module annotation: Pfam domain module=LRR_1::LRR_1::LRR_1::LRR _1; Domain location=159-181::183-205::207-229::231-254
  Subcellular localization annotation: CTP_CleavageSite=45; ConfidenceScore=5.49e-01
MVTRKTRVRASAKPPDPAFESRSLVPHTSPAPLSHRETVSTRNRRASASPSPISCKRELRPHRPYLDFAATPSFDTGDEMRGFVILALLASAASSSFGAAATTSEGGGGGPVVATWKRQAIFSDPNNLTADWVSPRVYNYTGVYCVPLPSSPDRRGALAVAEVNLNHGDIAGFLPSELGLLADLALLHLNSNQFCGVLPRALRRLRLLHELDLSNNHFVGPFPDVVLDLPALCFLDLRFNDFKGVVPPRLFDRPLDAIFLNHNRLI

SEQ ID NO: 42720 - protein, 462 aa, Zea mays
  Coding DNA Sequence Number=SeqID_941
  Pfam annotation: Domain name=DUF506; Domain location=214-422; Score =177.6; E_value=3.2e-50; Accession=PF04720.3; Description=Protein of unknown function (DUF506)
MTQQTRHEPRRGRPAPRACSLFRGTSPCECDTYRARAASRLLHGAGCSAETAKGLGTWAATSDQPQGNSKQAERAAKAKPWVSRRKPVVRAPCWTQVTQHVGHREPRRQWAGRPLPRERKGKVPVSGTRLGRTASTSSDAPTAAPRASQSQPRHMRRAAQHHRTAPAPPLLAADMAAYIRLDDAVRARLRGGAHAAGCTTSSSSGSDHDASACLSELVQAFLETGAGGTAEEGPRAAPKEYGSDDEDGAAASAAATVRALLDPPAEEDAFRIRLAAAVAAAAEAEAALRAHGAAFRRALARRLRGAGYDAGVCRSRWEASGGAAAGTYEYVDVVAVAPAAARYIVDADFRAALEVARATPEYAAVVAAVPAPAVVAREEAVGRAVRVASDAARRSLRAHGLHVPPWRKTRYMLAKWLGPYKRSTSSAAGGVMSMPGGAGLDVKCRAVGFFAPPAAAPAARIK

SEQ ID NO: 42721 - protein, 189 aa, Zea mays
  Coding DNA Sequence Number=SeqID_942
  Gene Ontology: Mol. function=cysteine protease inhibitor activity; Biological process=defense response
  Homolog annotation: Hit_ID=Q4FZ47; Match level="QueryCoverage=63%, HitCoverage=78%, E-value=4e-40, Identity=74%"; Hit description =Putative cystatin
  Pfam annotation: Domain name=Cystatin; Domain location=19-119; Score =27.7; E_value=4.2e-05; Accession=PF00031.11; Description=Cystatin domain
GSGAGIRQPSGEYRGRKVGARTEVRDVEGDGEVQELGRFSVAEYNRQLREGGGGGGRLEFGRVVAAQRQVVSGLKYYLRVVAVEEGGGAGNGGERVFDAVVVVKPWLDSRTLLTFAPAAAKLMDKSGERARMNSLGPSTCCPRVVLNLKWIWESRVTKVVPMPFIDSNNSRMLSKTLKSLSECQNLCDV

SEQ ID NO: 42722 - protein, 66 aa, Zea mays
  Coding DNA Sequence Number=SeqID_943
MAQRHISLSECQGDTMGSHGHNLQQSKAEPMTGMMNRWGFRERKKGERGEAVGGRHGQQRPWAERS

SEQ ID NO: 42723 - protein, 237 aa, Zea mays
  Coding DNA Sequence Number=SeqID_944
MDEWGWGSAWLWVELDRGGVVEFKQGMWNSRSHFAGGQDNDGNDDQPYGYGYGGGQQYEATGGKKRASSRLKKSSGSKKDDEYTKYAGNSNEADDNRRNRPNDDNNYNGGGGNHYSGAGAAIGAPYYGAAGAGGYGSSSPYYGNAAVHGTGGDGGGGYAPYNNAPAAFWAPQDGTRSPMFISTREVHVYGAPGGYDNYDGSNNDDRQRRRGGGGFFGPAFHAVGRFFDRKFGFSDRD

SEQ ID NO: 42724 - protein, 335 aa, Zea mays
  Coding DNA Sequence Number=SeqID_945
MSIYIEMPSKPFTIDRVTAPAPLPNAAPARPRGSETSARPRSACSPRILPHDLRYRNGIPRTPACSPHNPADLRYRNAAAAAKSTPTHPSSTKPPPRRSPLPTPESGTQPPRAPAYRPGNPTSAADSAPTPPAMTRNDRPYASGTTAEKPPLAVSPSLVPRSTLPRCPAPRPSRGPSPTPSSSRPPPLQPPAAGNPAAGRHRPKKRCHGGVDSASPTLTPDSVVLAILIGDEDIEPAMLAKEANGGHMAIEAPTRWLHQIQKTEVEKRSEPKQAGFKNKLEKHRRTDQGLKKGVLKFEFFLQESQSQMRKLKRFEASSPASEKEKKQDRKQDRSP

SEQ ID NO: 42725 - protein, 204 aa, Zea mays
  Coding DNA Sequence Number=SeqID_946
  Subcellular localization annotation: CTP_CleavageSite=33; ConfidenceScore=5.39e-01
MGVACSPALEVSSPRAPGCMSSFRPPELRWIGRCNARSSLRAPRTSRDAARTSRLVCRCRYSHIEGHRLLAGLGSAAASGPGDAAACPHKGTAVAHPLDRGATAGGLGIAASTPDRGTAATARRGRGVAATAATGRGSTAATGRGSTAATGRGSTAATGRGCQGVGAIDLGADPLDGEVDDAYLGAKIYDIEVRATSVPLWPSI

SEQ ID NO: 42726 - protein, 807 aa, Zea mays
  Coding DNA Sequence Number=SeqID_947
  Gene Ontology: Mol. function=binding; Cellular component=COPI vesicle coat; Biological process=protein transport
  Homolog annotation: Hit_ID=Q8RZX0; Match level="QueryCoverage=75%, HitCoverage=64%, E-value=0.0, Identity=93%"; Hit description =Putative adapter-related protein complex 4 epsilon 1 subunit
  Pfam annotation: Domain name=Adaptin_N; Domain location=41-597; Score= 210.4; E_value=4.2e-60; Accession=PF01602.10; Description=Adaptin N terminal region
  Pfam annotation: Domain name=HEAT; Domain location=152-188; Score =23.7; E_value=0.00066; Accession=PF02985.12; Description=HEAT repeat
  Pfam annotation: Domain name=HEAT; Domain location=361-393; Score =5.3; E_value=9.6; Accession=PF02985.12; Description=HEAT repeat
  Pfam module annotation: Pfam domain module=Adaptin_N::HEAT::HEAT; Domain location=41-597::152-188::361-393
MEQLRTFGRELAMGSQGGWGQSKDFLDLVKSIGEARSKAEEDRIIARELEHLKRRLADPDVPRRKMKELLLRLVYAEMLGHDASFGHIHAVKMTHDESLPLKRTGYLAVALFLDERHDLVILVVNTIQKDLRSDNYLVVCAALTAACRLIGEEAIPAVLPQVVDLLVHPKEAVRKKAVMALHRFYQRSSSSVSHLVSNFRKRLCDNDPGVMGATLCPLYDLISEEPNSYKDLVVSFVNILKQVAERRLPTSYDYHQMPAPFIQIKLLKILAVLGSGDKQASGHMYTVLGDIFKKGDTASNIGNAILYECICCISSIFPNPKMLVAAAETTSKFLKSDSHNLKYMGIDALGRLIKINPDIAEEHQLAVIDCLEDPDDTLKRKTFELLYKMTKSTNVEVIVDRMIEYMINITDHHYKTEIASRCVELAEQFAPSNQWFIQTMNRVFEHAGDLVNIRVAHNLMRLIAEGFGDEDEGADSQLRSSAVDSYVRIVGEPKLPSSFLQIICWVLGEYGTADGKHSASYIIGKLCDVAEAHLTDDTVKAYAISAILKIFAFEIALGRRIDLLPECQTLVDELLASHSTDLQQRAYELHALLGLGKNDVESVMPADASCEDIEKCVATLKQGPSQLAASARWRVGEAPSPALEATANHQQKSGNKRPHDSDHQEVYAVESSGSPCPLWLEAPIVFDRRDHPSKVPHLGTYPLVVEAIVGPKRLSKVLMDRGSDLNIIAAPIHDITPDYVKFEVDFPGAYNAILGSPGYVKFMVVSNYTYLKLKMPDPMGSLWRPLPSKQPMRVSKLAASSRQDKPL

SEQ ID NO: 42727 - protein, 170 aa, Zea mays
  Coding DNA Sequence Number=SeqID_948
  Subcellular localization annotation: CTP_CleavageSite=37; ConfidenceScore=5.08e-01
MSDHWSAARSVGLVYVGQRQTQHPGACTANFMRYDANAMENRTALACASPARKPCTLPGSRSRRAVAVSTRARALPDAARRVKGARARCPAHGSTTRIHGFAECSALCQVFFIGQYFVECRTRQNPALGNEHVYREQDSRHRNTLGKNLFAECQTLGEGDARQRTVNDRL

SEQ ID NO: 42728 - protein, 978 aa, Zea mays
  Coding DNA Sequence Number=SeqID_949
  Gene Ontology: Mol. function=zinc ion binding
  Homolog annotation: Hit_ID=Q10RY0; Match level="QueryCoverage=70%, HitCoverage=96%, E-value=0.0, Identity=69%"; Hit description=Zinc finger family protein, putative, expressed
  Pfam annotation: Domain name=PHD; Domain location=95-142; Score=4.1; E_value=0.022; Accession=PF00628.19; Description=PHD-finger
  Pfam annotation: Domain name=VWA; Domain location=267-444; Score =105.3; E_value=1.8e-28; Accession=PF00092.18; Description=von Willebrand factor type A domain
  Pfam annotation: Domain name=VWA_CoxE; Domain location=211-420; Score= -66.5; E_value=0.0016; Accession=PF05762.4; Description=VWA domain containing CoxE-like protei
  Pfam annotation: Domain name=zf-C3HC4; Domain location=96-139; Score =44.2; E_value=4.5e-10; Accession=PF00097.15; Description=Zinc finger, C3HC4 type (RING finger)
  Pfam module annotation: Pfam domain module=PHD::VWA::VWA_CoxE::zf -C3HC4; Domain location=95-142::267-444::211-420::96-139
MAAAWARAKRALATGLCVGVPARQLAIEDAPPVVEAPSSVAEDKLESAPVSVRRLTSFGSRSSQQGILFDPQLLGKVKLATRGYSDMYSWGKQKTCAICLGGMRSGQGHALFTAECSHKFHFHCISSNIKHGNLICPICRAKWKELPGAQPADASYGRARVNPLNWPQDEGHMAVVRRLSHTYSGNLQEHLPFFRTLEAGVFNDDEHIDLQSDNISEHNAVAGSVKIKAYSEVPAIEQSTTKEIFAILIHLRAPKSSHSASSRAPLDLVTVLDVSGSMAGTKIALLKNAMSFVIQTLGPNDRLSVVAFSSTARRLFPLRRMTLSGRQQALQAVSSLVASGGTNIADGLKKAAKVIEDRRLKNSVCSIILLSDGQDTYTLPSDRNLQDYSAVVPPSILPGTCQHVQIHTFGFGSDHDSAAMHAIAEISSGTFSFIDAEGSIQDGFAQCIGGLLSVVVKEVRLGIECVDNGVLLTSIKSGGYTSQVAEDGRGGSVDIGDLYADEERGFLVTLHVPAAQGQTVLIKPSCMYHDAITTENIEVHGEEVRIQRPEHRVDCKMSPEVEREWHRVQATEDMSAARAAAEVGAFSQAVAILEARRRILEAQAAQSSDDQFLALMAELREMQQRVENRRRYEESGRAFMLAGLSSHSWQRATARGDSTEITTTIHTYQTPSMVDMLQRSQILVPPIADMLNSSPTVAPPNRFSRPSRQWDESVEAENHVDSGINKSIDHIEHAKPKIHAKGGSPWRGPLPKPRVSKMTFAAALDKAIHVDPCSRERSKSASRFLERVHPFSAFTGGVVRDTTQSLSNFENQKVRSCKNVGPFSPFLRRDYWRSAFTGDCVGDTKEALSKFENQKVGHYKNIGPKPGAQSLKLGMEWDEKYPLSTLVALSRDVSDHTPLLLHMGETRKGNQNSPFKLELGWLLRDGFYDMVKVIWTNKNGGSSPMEKWWAKIRHVSQHLRGWREEDEWKIQKGKEGNP

SEQ ID NO: 42729 - protein, 194 aa, Zea mays
  Coding DNA Sequence Number=SeqID_950
MHDSISYASPMRFSSWTDNLRERTLEALRSPKAAIAGPRGRAGEDGVLGAKTLAHPPLLLQHHLFVEPHHTELHGDRHKTLKELMAIGPSLVSPPWGCGQAEMGWGAMQGAGEGESESRRKTKSDGEQRGRGRVGGARFDRGFVWSNAETTMGVKTHRFFLMEVVTLWNPSPNRFLETRSSNVEDTGYCGSKEL

SEQ ID NO: 42730 - protein, 791 aa, Zea mays
  Coding DNA Sequence Number=SeqID_951
  Gene Ontology: Mol. function=glutamine-tRNA ligase activity; Cellular component=soluble fraction; Biological process=tRNA aminoacylation for protein translation
  Homolog annotation: Hit_ID=Q5VRX8; Match level="QueryCoverage=99%, HitCoverage=100%, E-value=0.0, Identity=85%"; Hit description =Putative tRNA-glutamine synthetase
  Pfam annotation: Domain name=tRNA-synt_1c; Domain location=266-572; Score=562.8; E_value=3.3e-166; Accession=PF00749.11; Description =tRNA synthetases class I (E and Q), catalytic domain
  Pfam annotation: Domain name=tRNA-synt_1c_C; Domain location=574-765; Score=259.0; E_value=9.6e-75; Accession=PF03950.8; Description=tRNA synthetases class I (E and Q), anti-codon binding domain
  Pfam annotation: Domain name=tRNA_synt_1c_R1; Domain location=14-166; Score=211.7; E_value=1.7e-60; Accession=PF04558.5; Description =Glutaminyl-tRNA synthetase, non-specific RNA binding region part 1
  Pfam annotation: Domain name=tRNA_synt_1c_R2; Domain location=167 -259; Score=134.6; E_value=2.8e-37; Accession=PF04557.5; Description =Glutaminyl-tRNA synthetase, non-specific RNA binding region part 2
  Pfam module annotation: Pfam domain module=tRNA-synt_1c::tRNA-synt_1c_ C::tRNA_synt_1c_R1::tRNA_synt_1c_R2; Domain location=266-572::574 -765::14-166::167-259
MGTGGDGDKAGPALPLEALLALGLDQRTAENALVNAKVTANLAAVIAEAGIKECDKSIGNLLYAVATKYPTNALVHRPVLISYVLSTKIKSPAQLDAALSFLTNTGPDSLDVDKFEEACGVGVVVSIEEIKSTVTDILEENMEAIKEQRYHINGLVRKRHPWGDAKAVKEEIDKRLAEILGPKTEADSIKPVKKKKEKTAKVEEKKVAVATTAPPSEEELNPYTIFPQPEENFKVHTEIFFSDGNIWRAHNTKEILEKHLKATGGKVMTRFPPEPNGYLHIGHAKAMFIDFGLAKERNGHCYLRFDDTNPEAEKKEYIDHIQEIVHWMGWEPYKVTYTSDYFQPLYEHAVELIRKGLAYVDHQTAEEIKEYREKKMNSPWRDRPIEESLNLFEDMRRGLIAEGAATLRMKQDMQNENKNMSDLIAYRIKFTPHPHAGDNWCIYPSYDYAHCMVDSLENITHSLCTLEFDIRRPSYYWLLVALGLYQPYVWEYSRLNISNTVMSKRKLNRLVTENWVDGWDDPRLLTLAGLRRRGVSSTAINSFIRGIGITRSDNSLIRVDRLEYHIREELNKTAPRTMVVLRPLKVVITNLEEGKVLDLDGKMWPDASDTDASSHYKLPFSRTVYIEKTDFRLKDSKDYYGLAPGKSVMLRYAFPIKCTDVIYGDTPDDIVEIRAEYDPLKTSKLKGVLHWVAEPAPGVEPLKVEVRLFEKLFMSENPAELEDWLGDLNPHSKEVIKDAYAVPSLATAVLGDKFQFERLGYFAVDTDSTPEKLVFNRTVTLRDSFGKAGPK

SEQ ID NO: 42731 - protein, 350 aa, Zea mays
  Coding DNA Sequence Number=SeqID_952
  Gene Ontology: Mol. function=microtubule motor activity; Cellular component=microtubule associated complex; Biological process =intracellular protein transport
  Homolog annotation: Hit_ID=Q9ZQ52; Match level="QueryCoverage=48%, HitCoverage=19%, E-value=3e-35, Identity=41%"; Hit description =Putative kinesin heavy chain
  Pfam annotation: Domain name=Kinesin; Domain location=118-330; Score=- 173.5; E_value=0.0019; Accession=PF00225.13; Description=Kinesin motor domain
  Pfam annotation: Domain name=SWIB; Domain location=277-334; Score =4.2; E_value=0.0076; Accession=PF02201.9; Description=SWIBMDM2 domain
  Pfam module annotation: Pfam domain module=Kinesin::SWIB; Domain location=118-330::277-334
MACGAVANIVKSSLGLVGLDKISCALTSNQEDTKLRGIMALVLAIKQKQQSLSLEAHDCANAIPDLSNMIKAVQGLVAQCEDLKLKCYEEMDKRKKLYNIVQETKGIYYPEFIRFFCRCRPLSKDEVSSGLNANGGTTKKTFKFDRVFTTNDDQGIGKTFTMEVNESNSGVNYRTLEELFNIAEERKGSVTYDFSVSVLEIVLVTLKRFPFYFRAGELQRNGMSATGALGRLHHRAALRPVAAVSNWLTPTRSCITSFTDYEFTVYLHSVGKLQPHCNKVYKRFAMRKNKFMGSNKNQAKKTDINCDATLKSLFGGRDKVGMLEISKLLSPDFPKISKLPWSMEPGMSLW

SEQ ID NO: 42732 - protein, 109 aa, Zea mays
  Coding DNA Sequence Number=SeqID_953
MGLHAAISGQGSGRRNRRHAWCEQQDADERGGRWGIAQRGEAGAGAQGEEKQPYVQQAQVDKKRYEKESAVYRGEAAGSQEQQKHWESFLHASDPKTKSESLNAITRFF

SEQ ID NO: 42733 - protein, 750 aa, Zea mays
  Coding DNA Sequence Number=SeqID_954
  Gene Ontology: Mol. function=RNA-directed DNA polymerase activity; Cellular component=mitochondrion; Biological process=RNA-dependent DNA replication
  Homolog annotation: Hit_ID=UPI00004C1731; Match level="QueryCoverage =96%, HitCoverage=49%, E-value=0.0, Identity=85%"; Hit description =UPI00004C1731 related cluster
  Pfam annotation: Domain name=RnaseH; Domain location=274-401; Score= -3.7; E_value=0.00013; Accession=PF00075.14; Description=RNase H
  Pfam annotation: Domain name=rve; Domain location=481-640; Score =104.1; E_value=4.1e-28; Accession=PF00665.16; Description=Integrase core domain
  Pfam module annotation: Pfam domain module=RnaseH::rve; Domain location=274-401::481-640
MRNASDLLSDLETTFRCLKAKGVKLNPEKCVFGVPRGMLLGFIVSERGIEANPEKIAAITNMGPIKDLKGVQRVMGCLAALSRFISRLGERGLPLYRLLRKTECFTWTPEAEEALGNLKALLTNAPILVPPAAGEALLICVVATTQVVSAAIVNERREEGHALPVQRSVYFISEVLSETKIRYPQIQKLLYAVILTRRKLRHYFETHPVTVVSSFPLGEIIQCREASGRIARWAVEIMGETISFAPRKAIKSQLLADFVAEWVDTQLPTAPIQPELHTMFFDGSLMKTGAGAGLLFISPLGKHLRYVLRLHFSASNSVAEYEALVNGLRIAIELGVRRLDARGDSQLVIDQVMKNSHCRDPKMEVCCNEVRCLEDKFYGLEVNHIARRYNETADELAKIASGRTTVPPDVFSRDLHQPSVKTDDTPEPEAPSAQPEAPSAPQGFYWPTAVADATRIVRTCQGCQFYVRQTHLPAQALQTIPITWPFAMWGLDLVGPLQKAPGGYTHLLVSIDKFSKWIEVRPLNNIRSEQAVAFFTNIIHRFGVPNSIITDNGTQFTGIKFLYFCENHHIRVDWAAVAHPMTNGQVECANGMILQGLKPRIYNDLNKFGKRWMKELPSVVWSLRTTPSRATGFTPFFLVYGTEAILPTDLEYGSPRARAYDDQSNRTNREDSLDQLEEARDMALLHSARYRQSLRRYHARGVRSRDLQVGDLVLRLRQDARGRHKLTPPWEGPFVIAKVLNPGTYKLANS

SEQ ID NO: 42734 - protein, 99 aa, Zea mays
  Coding DNA Sequence Number=SeqID_955
MELAPMEEFDTHGPKENTLLPPYLRKSALRYRTTQTKYALSMQLLFYPIIFFKTSPTVQAYLVRLASNMFKNTTCFLHTFVYKKYGLAASIFFIAAAAA

SEQ ID NO: 42735 - protein, 164 aa, Zea mays
  Coding DNA Sequence Number=SeqID_956
  Homolog annotation: Hit_ID=Q39025; Match level="QueryCoverage=24%, HitCoverage=10%, E-value=3e-08, Identity=67%"; Hit description =Mitogen-activated protein kinase 5
MATCTAPPPRKVGKSYSDARQSTYHLRPTPTDDMPGCGLDASPQRTDGRRINFRRGHMGRAEEGKGVGQWGWRAGVERLHRRVVVGSPRVCLNMATVVLQSSEVVPRGVGENESKTLDCELYHLYLGYQPQPMNIILPRKRGLSYDHFTEDAAYRSHINSQGIL

SEQ ID NO: 42736 - protein, 163 aa, Zea mays
  Coding DNA Sequence Number=SeqID_957
  Gene Ontology: Mol. function=tyrosine decarboxylase activity; Cellular component=cytoplasm; Biological process=metabolic process
  Homolog annotation: Hit_ID=Q5TKP8; Match level="QueryCoverage=92%, HitCoverage=54%, E-value=4e-39, Identity=58%"; Hit description =Putative lysine decarboxylase-like protein
MGDGEAAVPSRFRTVCVFCGSNAGRRKVYADAALELGHELVRRGINLVYGGGSIGLMGVIARTVRHGGCHVLGYHAGYRACSSTSLFRFVLFCTPFQILSIHLRCWSWVIPKALMPIEISGESVGEVRVVDDMHQRKAEMARQSQAFIALPGARPDQTSPAKT

SEQ ID NO: 42737 - protein, 413 aa, Zea mays
  Coding DNA Sequence Number=SeqID_958
  Homolog annotation: Hit_ID=Q9ASF7; Match level="QueryCoverage=99%, HitCoverage=98%, E-value=9e-79, Identity=46%"; Hit description=SF16 protein-like
  Subcellular localization annotation: CTP_CleavageSite=65; ConfidenceScore=5.30e-01
MGASGKWIKSLVALKAPEKAAGHKGGRKWRLWRSSSATSRASAGEGSALASESSSASADSFNSVLAAVVRAPPRDFLLIRQEWAAVRIQTAFRGFLVSPVFLLRFHYVAALIMTLAIMWWRERARERRARSSADGHGSQGQDALNGCASSTKDAMEQWCDRHGSVAEVRSNLHMKHEGAAKRERAIAYALSHQPRGSRQKGTPSSPANCVRSHDPNGCNQDFSYLDGWMATKPWETRSTERNHSDSQLAKHCEEPNLPASKLSDASSVKIRRNNVTTRVSAAKRPPPSSVLSAASSDSAYGDKSPRSRPSVTLTSATTNTVLASEARSDSGDTGGPNYMSLTKSAKARLSGCSGSSHHRSFQRPRSGDMSRVTLSSIDTQSNAGSEISVTSKRLNSMSLNLKGRSLDKENEED

SEQ ID NO: 42738 - protein, 544 aa, Zea mays
  Coding DNA Sequence Number=SeqID_959
  Gene Ontology: Mol. function=phosphoribosylamine-glycine ligase activity; Cellular component=chloroplast; Biological process=purine base biosynthetic process
  Homolog annotation: Hit_ID=Q6YZX5; Match level="QueryCoverage=99%, HitCoverage=98%, E-value=0.0, Identity=75%"; Hit description =Putative glycinamide ribonucleotide synthetase
  Pfam annotation: Domain name=ATP-grasp_3; Domain location=193-381; Score=-41.1; E_value=0.0079; Accession=PF02655.5; Description=ATP -grasp domain
  Pfam annotation: Domain name=GARS_A; Domain location=189-383; Score =424.5; E_value=1.5e-124; Accession=PF01071.10; Description =Phosphoribosylglycinamide synthetase,
  Pfam annotation: Domain name=GARS_C; Domain location=441-537; Score =161.9; E_value=1.7e-45; Accession=PF02843.7; Description =Phosphoribosylglycinamide synthetase, C domain
  Pfam annotation: Domain name=GARS_N; Domain location=86-188; Score =187.7; E_value=2.7e-53; Accession=PF02844.6; Description =Phosphoribosylglycinamide synthetase, N domain
  Pfam module annotation: Pfam domain module=ATP-grasp_3::GARS_A::GARS _C::GARS_N; Domain location=193-381::189-383::441-537::86-188
  Subcellular localization annotation: CTP_CleavageSite=23; ConfidenceScore=5.46e-01
MTCAAYSIRGPLMLAARRSSDVFASSKSCNGKSSVSYPVIQWWSSNCSSFTMRHVASHHHLIVKASATWHSKASATDAATASDERITVLVIGGGGREHALCYALNRSPSCAAVLCAPGNAGIAQSGDATCISDLDISSSDDVISFCRKREVGMVVVGPEAPLVAGLVNDLVKVGIPTFGPSSEAAALEGSKDFMKKLCDKYNIPTAKYRTFTDAVEAKKYVKNEGAPIVVKADGLAAGKGVVVAMTLDEAFEAIDSMLVEGSFGSAGSLVIIEEFLEGEEASFFALVDGTNALPLESAQDHKRVGDGDVGPNTGGMGAYSPAPIVTDELKRTVMESIIIPTVKGMSTEGCKFVGVLYAGLMIEKKSGLPKLIEYNVRFGDPECQMSLNPSSVTMLTLSSRTRRSGTHEVLMMRLESDLAQVLLSACQGELGNVSLTWSPEMAMVVVMASQGYPGPYKKGTVIKNVDKAEQVSPAVKIFHAGTALDGDGNLVAVGGRVLGVTAKGKDIEEARARAYGAVDAVEWPEGFFRHDIGWRALRQKQAAK

SEQ ID NO: 42739 - protein, 147 aa, Zea mays
  Coding DNA Sequence Number=SeqID_960
MPKSDAQDDATHDGGGCEYREGVHTANCRKELSGRGDRRRCDDAMTTASNSRVLESRLRPQQPRAQNQHHGEFALALAGVPAVRTRANCSGGDEFLLGEVVLSLTDDGARNRDQTHIKRNCSSTGIIPSNYKVGATGGNHVGQMVFL

SEQ ID NO: 42740 - protein, 215 aa, Zea mays
  Coding DNA Sequence Number=SeqID_961
  Homolog annotation: Hit_ID=Q84ZC7; Match level="QueryCoverage=49%, HitCoverage=37%, E-value=9e-47, Identity=79%"; Hit description =Proteasome inhibitor-like protein
  Pfam annotation: Domain name=PI31_Prot_Reg; Domain location=117-179; Score=71.6; E_value=2.5e-18; Accession=PF08577.1; Description=PI31 proteasome regulator
MCPIRKQIKIREPHALSGGAKSRRGKKSKCSSFIRWEWLEYPFSILPQQHCRKPALMRSCHWQTGDSSTRLGRRCRWDPLSDIHSNEKFPIRPGYVSGSIRIRYGIRHRLIYPPIAPIGSDDLYPGPGAGFYPHSGIGSGGSMHVGPNDPRFFPSNPFSAPFGGLGSVPPGSRYDPIGPPDVPGFEPSSFVRRPRRPPGGSTHPDLEFFQQGPDF

SEQ ID NO: 42741 - protein, 205 aa, Zea mays
  Coding DNA Sequence Number=SeqID_962
  Homolog annotation: Hit_ID=Q10EV9; Match level="QueryCoverage=55%, HitCoverage=64%, E-value=2e-15, Identity=35%"; Hit description =Expressed protein
  Pfam annotation: Domain name=DUF538; Domain location=17-168; Score =115.2; E_value=1.8e-31; Accession=PF04398.3; Description=Protein of unknown function, DUF538
MAKLPRLPCSFAVLALMCIIPLTAPRPALSSRAAPRDGVSFAGAGNTIHQLLKDHGLPGGLLPRGVESYTLDESTGLLEARLSAPCYATYDNGELAYFDNVVRGNLSKGALRGVEGLSQEELFVWLPVKGILVQDQEPGVILFDIGLAHKSLSRSLFEDPPDCKPSASGGMSAASAARREGTQGEILTRHCFRFVRGNMVPFSIG

SEQ ID NO: 42742 - protein, 124 aa, Zea mays
  Coding DNA Sequence Number=SeqID_963
MALKISAGSFVARGGWLSRAGRPRQCSSVGEKEKKLLLFFFLRAGLILLSTPAKTVPDKLTLWPPRKGLLRLEVESMEGNSWRIVSSVHGKRSDSRLLWHAFSRQGNRSEASCLNLLSYESGRR

SEQ ID NO: 42743 - protein, 110 aa, Zea mays
  Coding DNA Sequence Number=SeqID_964
MPFQTSSVLYLAILVMHHPRDSFAQLVHQSLKTYSCRWLLQEGFVDNGTDEHCTMLVRRNCRALINGREPKYQISLMIAASASDVLFLSLKDILEFILRILGIKPHSLPR

SEQ ID NO: 42744 - protein, 134 aa, Zea mays
  Coding DNA Sequence Number=SeqID_965
MALYALLSFFFALYFQAQGEGTITDALGPSPGGPAPETAAEFVVLREPMAIPERLLRAAATAVGAANATDPDTQMTELMCLECDCCLKHTSPRVCLTTCCCQRVCGESVCSIPEPLPMVRQEVESGELFLFVFI

SEQ ID NO: 42745 - protein, 428 aa, Zea mays
  Coding DNA Sequence Number=SeqID_966
  Subcellular localization annotation: CTP_CleavageSite=26; ConfidenceScore=5.10e-01
MAVTTRFELPRFLTNRTPMWFKRMLSPSKKTENSPVFRFFMDLNDAVSYVKRLNVPSGMVGACRLDVAYEHFKEKPHMFQFVPNEKQVQAANKLLKSLPQRGRRKKLDGVPVFSAQNLNIAVATNDGIRCCPDFFVFVQLCHWQMPRRYTPYFFDKNLLDNILEASMDQHFHSIMQNRHTRRRRDIVDDSLTSEIIEESAESLLEPPEVQELMNEIGPAGIPLNVVTKAAEIQFLDVVDKVLLGNKWLRKASGIQPKFPYVVDSFEERTAVSIANIATTSSLTASNDDSSCQNNQETQSSEPSGDNSSYRNHNNEDHNHFPFSNLLPNIWPGHDRKFKSQESDNKFSRYDADVKSKLQANPLLPKITMVGISMGDGAQMSKANLKKTMEDLTKELEQTSEENMFGDEKDPLFVANVGDYSRITKISSA

SEQ ID NO: 42746 - protein, 213 aa, Zea mays
  Coding DNA Sequence Number=SeqID_967
  Subcellular localization annotation: CTP_CleavageSite=38; ConfidenceScore=5.38e-01
MVNTWPTNAGPPPPLAMLPPPVAPAPTIRVPGSGCAPRRDSEAEETGRRSGTARWGAAGAGEAGGDGGGDVEERKGKAEAREWKGLDDEEEHGMVDPSCTDRTGGACLVGTGLGGACLFVRFWWWGMGSELCNLWEGGPGPGAFPMRGTSATVLTVQCTGMGHAGNAPPRTRAYPIPPPLPDLRVDETPEYPIGYPTSTDKIDRQMLQVKLFR

SEQ ID NO: 42747 - protein, 171 aa, Zea mays
  Coding DNA Sequence Number=SeqID_968
  Gene Ontology: Mol. function=GTP binding; Cellular component =intracellular; Biological process=small GTPase mediated signal transduction
  Homolog annotation: Hit_ID=Q9FLE0; Match level="QueryCoverage=92%, HitCoverage=30%, E-value=6e-56, Identity=69%"; Hit description=GTP -binding protein-like
  Pfam annotation: Domain name=MMR_HSR1; Domain location=1-106; Score =19.7; E_value=1.6e-05; Accession=PF01926.13; Description=GTPase of unknown function
FIRRREALVYNTPGDHVTRDIREGVAKLGDLRFRVLDSAGLETAATSGSILARTADMTGNVLARSQFAIFLIDVRDGLQPLDLEVGQWLRKHASGIHTLVAMNKSESLDEHGFLTAAAGEAHKLGFGDPVAISAETGLGMAELYEILRPLFEEYMFQLRNTPNKFAHIMLN

SEQ ID NO: 42748 - protein, 76 aa, Zea mays
  Coding DNA Sequence Number=SeqID_969
MQQLLRGNLIPRVTSIGKSDFERIFKEVFEDLSDKNTGILDINSRHVATLMVYNSIIRQLVGPHKDPPYMNTITEK

SEQ ID NO: 42749 - protein, 135 aa, Zea mays
  Coding DNA Sequence Number=SeqID_970
  Subcellular localization annotation: CTP_CleavageSite=82; ConfidenceScore=5.37e-01
MARSAPAWPRCLRGAVGPRRSPATRATRSDPTRPRYLLAAHSVAHSQRISAALRVLAWCARCLGVVVMRIVVLVLTMVMVVRVATTAKEKMKPWRKTSRSSKITMSFMRGLAATPSRLPVEAACIYVLFWHFDYC

SEQ ID NO: 42750 - protein, 171 aa, Zea mays
  Coding DNA Sequence Number=SeqID_971
  Gene Ontology: Mol. function=GPI anchor binding; Cellular component =integral to membrane
  Homolog annotation: Hit_ID=Q84KI4; Match level="QueryCoverage=87%, HitCoverage=33%, E-value=4e-84, Identity=95%"; Hit description =Phytochelatin synthetase-like protein 2
  Pfam annotation: Domain name=Phytochel_synth; Domain location=5-160; Score=267.7; E_value=2.3e-77; Accession=PF04833.5; Description =Phytochelatin synthetase-like conserv
MAKVVVTMFNYQQFRHIGAPGWQLGWTWAKKEVIWSMVGAQTTEQGDCSKFKGNTPHCCKKDPTIVDLLPGTPYNMQIANCCKAGVINTFNQDPANVASSFQISFGLAGTTNKTVKVPKNFTLKTPGPGYTCGRAIVGRPTKFLSTDGRRVTQALRVEVQPHHIIQSVPIP

SEQ ID NO: 42751 - protein, 162 aa, Zea mays
  Coding DNA Sequence Number=SeqID_972
  Subcellular localization annotation: CTP_CleavageSite=76; ConfidenceScore=5.36e-01
MVPGVIIMAMSTPVLRRLGFGAAHRVAPRGRFSVSKSQLQLGFIERSSVGSLWVEQWPPPSSGSWESRGVTRAAPRATEVEVELLQSHLVKFNDRVMALKVELMELRCHLGRALDFVGARGSSLVERVNNVPRCVRSTIGLGARRGAIAALLVGGFKTGCNL

SEQ ID NO: 42752 - protein, 133 aa, Zea mays
  Coding DNA Sequence Number=SeqID_973
MEMATGQATMKGGPRWRTNLRREIADGTTDSALDLVLGELQQCPRPSQAKAGTEWLACKRARVARGAAEIALEQRRTQPVVEVAKEEALAEGSHTAATGQARMVGEVATACARSRAEEGHKSGPHHASVAPGE

SEQ ID NO: 42753 - protein, 53 aa, Zea mays
  Coding DNA Sequence Number=SeqID_974
MALGELQAGNPSEALAPLAGAGSKLGVRWGPSSYSQTPTHIVVDPIRPGQMLL

SEQ ID NO: 42754 - protein, 1090 aa, Zea mays
  Coding DNA Sequence Number=SeqID_975
  Gene Ontology: Mol. function=aminoacyl-tRNA ligase activity; Cellular component=cytoplasm; Biological process=tRNA aminoacylation for protein translation
  Homolog annotation: Hit_ID=Q01B72; Match level="QueryCoverage=97%, HitCoverage=97%, E-value=0.0, Identity=52%"; Hit description=[J] KOG0437 Leucyl-tRNA synthetase
  Pfam annotation: Domain name=Anticodon_1; Domain location=796-933; Score=53.2; E_value=8.5e-13; Accession=PF08264.3; Description =Anticodon-binding domain
  Pfam annotation: Domain name=tRNA-synt_1; Domain location=23-758; Score=-302.2; E_value=1.2e-06; Accession=PF00133.12; Description =tRNA synthetases class I (I, L, M and V)
  Pfam annotation: Domain name=tRNA-synt_1e; Domain location=502-757; Score=-224.4; E_value=0.062; Accession=PF01406.10; Description=tRNA synthetases class I (C)
  Pfam annotation: Domain name=tRNA-synt_1g; Domain location=412-770; Score=-257.1; E_value=0.0004; Accession=PF09334.1; Description=tRNA synthetases class I (M)
  Pfam module annotation: Pfam domain module=Anticodon_1::tRNA-synt _1::tRNA-synt_1e::tRNA-synt_1g; Domain location=796-933::23-758::502 -757::412-770
MSTNPDEPKSRARTDFLLNNELEVQKFWDENKVFQADPGNDSPSPGEKFFGNFPYPYMNGLLHLGHAFSLSKLEFGAAYHRLRGSNVLLPFAFHCTGMPIKASADKLAREIQQYGYPPVFPVAEGSSAAVADATQADQVDVVAPDKFKGKKSKATAKAGAQKYQWEIMKSFGLDDEEIARFQDPYHWLTHFPPLAKEVLKKFGLGCDWRRSFITTDMNPYYDAFVKWQMRKLKKLGKVVKDMRYTIYSPLDGQPCADHDRATGEGVQPQEYVLIKMEVISPFPPKLKSLEGRKVYLAAATLRPETMYGQTNCWVLPDGMYGAFEINDTDVFILTARSAFNLAYQHLSRVPEKPTCLCELSGSDLIGLPLKSPLAFNETIYALPMLTVLTDKGTGIVTSVPSDSPDDFMALQDLVTKPALRAKYGVKDEWVLPYEIIPIIHIPEFGDKSAEKVCHDLKIKSQNDKEKLAEAKRMTYLKGFTDGTMIVGEFSGRKVQEAKPLIKSKLLEEGTAVLYSEPEKKVMSRSGDECVVALTDQWYITYGEAEWKQKAVKCLDHMNTFSTETRNGFEHTLGWLNQWACSRSFGLGTRIPWDEQFLVESLSDSTLYMAYYTVAHLLQNGNMYGKEISSVRPEEMTDEVWDFVFCDGPAPKSEIPAALLNKMKHEFKYWYPFDIRVSGKDLIQNHLTFCIYNHTALLPEHHWPIGFRCNGHLMLNSEKMSKSTGNFLTLEDAIKKYSSDATRFALADAGDGMDDANFVTETANSAVMRLTKEISWMEEVTAAESKLRTGPPTTYADRVFSNEMNIAIKETEKSYNAFMFRDALKSGFYDLQLARDEYRLSCGAAGMNRDLLWRFMDVQTRLITPICPHYAEHVWQKIMKKEGFAIKAGWPAADTPDPTLRIANKYLQDSIVLMRKLLQKQESGSKKPKKGAAPAPPSEEKKMSIGLIYVNEHYSGWKEQCLKVLQSKFDSQSRSFSPDQEIAEALKECPIGQEMNLKQVQKLCMPFIKLKKDEAREVGPQALDLKLPFGEMDVLRENLELIKRQLGLEQVEVLSASDEAARAKAGEHASLLEKNPPSPGDPIAIFLSKQS

SEQ ID NO: 42755 - protein, 58 aa, Zea mays
  Coding DNA Sequence Number=SeqID_976
MAPRYQPRSHLVVALVLTLRDLSAIDHGAELADDRRQRTPVHARREIVKKIRRYLPCK

SEQ ID NO: 42756 - protein, 146 aa, Zea mays
  Coding DNA Sequence Number=SeqID_977
  Gene Ontology: Mol. function=binding; Cellular component=thylakoid; Biological process=photosynthesis
  Homolog annotation: Hit_ID=Q337L2; Match level="QueryCoverage=91%, HitCoverage=22%, E-value=3e-49, Identity=65%"; Hit description=TPR Domain containing protein, expressed
MECLCSGEQLKASDETMRSSDSTITKDFSASGYSSWNGEIEQYLDNGNIEEAELSLREGICLNYETSALVPKMKISIARKTGRGKTHSQWDSPPMPLHAVSLLMEAIYLKARALHDLGKDKANIQASSVCLSLILSNPFSDAYGND

SEQ ID NO: 42757 - protein, 114 aa, Zea mays
  Coding DNA Sequence Number=SeqID_978
  Gene Ontology: Mol. function=protein disulfide oxidoreductase activity; Biological process=cell redox homeostasis
  Homolog annotation: Hit_ID=Q10L92; Match level="QueryCoverage=68%, HitCoverage=39%, E-value=5e-14, Identity=53%"; Hit description =Glutaredoxin family protein, expressed
MDDCGGGGKRPFQLARSLTYHHHPGHRPAAASRWRRQHQQHQLADEPRAPRPQAVVLYTTSLRGVRRTFADCAAVRAILRGFRVAARRSRRQMEDDGECWWGRGRSDDDGAEEL

SEQ ID NO: 42758 - protein, 315 aa, Zea mays
  Coding DNA Sequence Number=SeqID_979
  Gene Ontology: Cellular component=chloroplast thylakoid membrane
  Pfam annotation: Domain name=PAP_fibrillin; Domain location=63-267; Score=-42.6; E_value=0.0099; Accession=PF04755.3; Description=PAP _fibrillin
  Subcellular localization annotation: CTP_CleavageSite=35; ConfidenceScore=5.62e-01
MAAVVALAPASPALLPVPFRGRRDGRVALSPRRTRCSAGRCRATAQTFQGGAAASYAREMERLSAKESLLLAFKDAGGFEALVSGKTTEMQRIDVNERIVGLERLNPTPRPTTSPFLEGRWNFEWFGDSSPGAFAARLLFERSPTAVAHFMGLDVLIKDGYSKLSSNLKFVNTIQSKFLLTTQLSVEGPIRMKEEYVEGLIEIPRINEESLPEQLKGLLGQTAGALQQLPSPIRDAVSEGLKLPLSGSFQRLFMISYLDEEILLIELKPDDQLNQNATKIIRDAAGAPDVLTRLEGPQPNPGDGTADAVISEYES

SEQ ID NO: 42759 - protein, 139 aa, Zea mays
  Coding DNA Sequence Number=SeqID_980
  Pfam annotation: Domain name=VQ; Domain location=35-65; Score=38.2; E_ value=2.9e-08; Accession=PF05678.4; Description=VQ motif
  Subcellular localization annotation: CTP_CleavageSite=32; ConfidenceScore=5.15e-01
MKHAAKLPSRGASSSQHRLSHAIPKTPPRKIRIVHVLAPEVIKTEARDFRKVVQRLTGMPSSQKGSCAASALTDEDASPSSLSSWQPTAMSSPMKVEAETSSGEGGGLLYDLDPDGYNDGFYDFLLSSCDTDGVAGFKL

SEQ ID NO: 42760 - protein, 344 aa, Zea mays
  Coding DNA Sequence Number=SeqID_981
  Gene Ontology: Mol. function=nucleotide binding; Cellular component =protein complex; Biological process=barrier septum formation
  Homolog annotation: Hit_ID=Q94F85; Match level="QueryCoverage=99%, HitCoverage=82%, E-value=1e-144, Identity=81%"; Hit description =Plastid division protein FtsZ
  Pfam annotation: Domain name=Tubulin; Domain location=1-184; Score =222.1; E_value=1.2e-63; Accession=PF00091.15; Description =TubulinFtsZ family, GTPase domain
  Pfam annotation: Domain name=Tubulin_C; Domain location=186-308; Score=96.5; E_value=7.9e-26; Accession=PF03953.7; Description =TubulinFtsZ family, C-terminal domain
  Pfam module annotation: Pfam domain module=Tubulin::Tubulin_C; Domain location=1-184::186-308
GIEFYAINTDSQALINSQAQYPLQIGEQLTRGLGAGGNPNLGEQAAEESRETIATALRDSDLVFITAGMGGGTGSGAAPVVAQISKEAGYLTVGVVTYPFSFEGPSAESHFFLEDLRRRSIFPTVALEALEKLEKSVDTLIVIPNDKLLDVADENMPLQDAFLLADDVLRQGVQGISDIITIPGLVNVDFADVKAVMKNSGTAMLGVGVSSSKNRAQEAAEQATLAPLIGSSIEAATGVVYNITGGKDITLQEVNKVSQIVTSLADPSANIIFGAVVDDRYTGEIHVTIIATGFPQSFQKSLLADPKGARIVESKEKAATLAHKAAAAAVQPVPASAWSRRLFS

SEQ ID NO: 42761 - protein, 129 aa, Zea mays
  Coding DNA Sequence Number=SeqID_982
MEEGSATVGEGSAREATAAAGRVGRPIADERDAIGKGPCRAGLAGERGRSAAPLLVAGARPWGRADMGSGDVASLVATSGWHAGAELQRCVPGDDGVDPAATGSGERGPRVALGAAARHGRLEEGSRGG

SEQ ID NO: 42762 - protein, 79 aa, Zea mays
  Coding DNA Sequence Number=SeqID_983
  Pfam annotation: Domain name=CHCH; Domain location=31-71; Score=33.7; E_value=6.4e-07; Accession=PF06747.3; Description=CHCH domain
  Subcellular localization annotation: CTP_CleavageSite=29; ConfidenceScore=5.27e-01
MATAQAASASPTHHRASPGMSPPQPPYPSAARIADSACFPQYTASLKCLEANQDKTKCQQQFDDYKECKKKEILAVACT

SEQ ID NO: 42763 - protein, 649 aa, Zea mays
  Coding DNA Sequence Number=SeqID_984
  Gene Ontology: Mol. function=hydrolase activity, hydrolyzing O -glycosyl compounds; Cellular component=apoplast; Biological process =carbohydrate metabolic process
  Homolog annotation: Hit_ID=Q9ZTQ4; Match level="QueryCoverage=93%, HitCoverage=93%, E-value=0.0, Identity=83%"; Hit description=Cell wall invertase
  Pfam annotation: Domain name=Glyco_hydro_32C; Domain location=465 -583; Score=188.7; E_value=1.4e-53; Accession=PF08244.2; Description =Glycosyl hydrolases family 32 C termi
  Pfam annotation: Domain name=Glyco_hydro_32N; Domain location=48-423; Score=455.4; E_value=7.5e-134; Accession=PF00251.10; Description =Glycosyl hydrolases family 32 N termi
  Pfam module annotation: Pfam domain module=Glyco_hydro_32C::Glyco _hydro_32N; Domain location=465-583::48-423
  Subcellular localization annotation: CTP_CleavageSite=41; ConfidenceScore=5.09e-01
MARLPLAACAVAAAFYLCLHLASSSSSAPRLAPAPSDGGRRAGRTAYHFQPAKNWQNGPMYYNGMYHLFYQYNPHGALWGVGNLSWGHSVSGDLVNWAALDTALDPTSPFDANGCWSGSATILPGGTPAILYTGIDANGEQVQNVAFPRDPADPLLRRWDKPGYNPVIPLPADVPGDKFRDPSTAWLGRDGLWRVAVSAEVRGVASTLVYRSADFLRWERAPAAAPLHASRAAGMVECPDLFPVKEEGDDGDGQGLDASASGAGLRHVLKLSVMDTLQDYYMVGRYDDAADAFVPAEPERGDDVRGWRRLDYGHVYASKTFFDARGSRRVLWAWANESDSQADDVAKYRCPNGPARPARVPQPRPKHGTPAWSPPARMISFLLSSAVRPTPTHSSLAWLACVTQTFPRKLWLDEDGKQLRQWPVEEIETLRRKRVVLRRGTALATGGMNEIVGVAGSQADVEVAFKVSSLAGAEALDPNWLLDPQKLCGEKGASVPGGVGPFGLIVMASSDLREHTAVFFRAFRYHGRYKLLMCTDLTRSSTRAGVYKPPYGGFVDVDVEEHETINLRTLIDHSVVESFGADGRMCITARVYPEHAETSNNHMFVFNNGTGTVEVYKLEAWELAAATVNSVGGNDSLVISKSNDQSESY

SEQ ID NO: 42764 - protein, 62 aa, Zea mays
  Coding DNA Sequence Number=SeqID_985
MGAGGGAAGGHGGDVGQKTKVAATTGMRKVKEGMSQGFQWIKDKCQHGGVKKQQGSEAPRYY

SEQ ID NO: 42765 - protein, 334 aa, Zea mays
  Coding DNA Sequence Number=SeqID_986
  Gene Ontology: Mol. function=protein binding
  Homolog annotation: Hit_ID=Q10KR0; Match level="QueryCoverage=58%, HitCoverage=52%, E-value=3e-49, Identity=47%"; Hit description =Expressed protein
  Pfam annotation: Domain name=SNARE_assoc; Domain location=145-263; Score=96.3; E_value=9.3e-26; Accession=PF09335.1; Description=SNARE associated Golgi protein
MGSPGSANGRRGEYVRIPEEVEVASKGEADAAAAIKAAVAAECPRVLRCRAIRWWAKVAVLGIFLAGAGAAAVVFLGPLVIKKCSRILIYYDRILIDLFGSQFLGVYIAMRVVAPILYWESITFSRPAIALICFGTIALFPSVLLPSSPFMWLAGMTFGYLYGFLIITVGMSIGMSLPYFIGSAFHCRIHRWLEKWPKKAAFVRLAGEGDWHHQFKAVALLRISPFPYLVFNYASVATNVKYYPYIAGSMAGTIHETFLAIYRWHAKEKLMPFFANSGKLLQSLAVATSQGSFLSVDQIIYNGIGFTIAATSTAAITIYAKKALQKLQAEDEIF

SEQ ID NO: 42766 - protein, 88 aa, Zea mays
  Coding DNA Sequence Number=SeqID_987
MVGEIPITDRSPDFLLLVQDTWNRGPSESSKDIFLVSWVHVELTYGILPTTDRGAAAAAIPPQLATMALDTASRASTRRLLQRGPGGN

SEQ ID NO: 42767 - protein, 75 aa, Zea mays
  Coding DNA Sequence Number=SeqID_988
MADRHGRAPAKGQVSHLGAELGEAWGGLWRARWPRAQARVFGGGWRQGQSLREGEAARNEVRVVRGALAGLYKGS

SEQ ID NO: 42768 - protein, 85 aa, Zea mays
  Coding DNA Sequence Number=SeqID_989
  Subcellular localization annotation: CTP_CleavageSite=53; ConfidenceScore=5.29e-01
MAHQSFFDPPKTFSPPFSLLCSWIHGLFPATEFAVAPSSPLPNSGDPGATLARACLNSGDLTAAERSGAAEWEIGSNLFLNDFGG

SEQ ID NO: 42769 - protein, 299 aa, Zea mays
  Coding DNA Sequence Number=SeqID_990
  Homolog annotation: Hit_ID=Q9FKY8; Match level="QueryCoverage=48%, HitCoverage=57%, E-value=1e-36, Identity=55%"; Hit description =Arabidopsis thaliana genomic DNA, chromosome 5, P1 clone:MUD21
  Pfam annotation: Domain name=DUF1649; Domain location=16-178; Score =18.0; E_value=1.9e-07; Accession=PF07855.3; Description=Protein of unknown function (DUF1649)
MAETAKLCWYTSYTPFEAWFGKLEKHISTHFLGGRHHCSNRNSWRKATVQCGLPELEKEVDEKIDQFSAWVEKHPNRRSQICLSFFDEKHRHPGWFVNKTERIYWEQWFINLQVMFPKRYSKSNSSKGLTNIQANAVEETSTRRAALEASINEVLFQIIKFANEKKDHIPAIPDRIFNHEIMIPRLGLTKLFCLSYIKASLNFGPGDIQAKVMLCMGRALTYGMGRALTYGLLCMGVAGVGGFLNLWFLILPGSDLIVQGILEAALAQSGCLFYLRGHLELMGGWQWATIIDSPREFFG

SEQ ID NO: 42770 - protein, 80 aa, Zea mays
  Coding DNA Sequence Number=SeqID_991
MTWRIIYRNGFSLLLGLTLVSEHLYGVAYEWYYALKSDHDIMSWACFVEFFHMYFGLPICTNSLTEMKALYCTDLTWGSK

SEQ ID NO: 42771 - protein, 64 aa, Zea mays
  Coding DNA Sequence Number=SeqID_992
MGVFLMELDDDQEMDEVAKALGISSHALTSIDVGATIFNVILGVQWHPSLGAIMWNFDAFHMTF

SEQ ID NO: 42772 - protein, 82 aa, Zea mays
  Coding DNA Sequence Number=SeqID_993
MATPGIEKKLRWGLDDGDSRLDRGRGAGLRRLTDSCLGQGWLRPFPSATIGGVARVRGEELAGDAGRECSRGLKATGMAWED

SEQ ID NO: 42773 - protein, 82 aa, Zea mays
  Coding DNA Sequence Number=SeqID_994
MKRKYDCTTIYSIFFTGAKGTGYEAFKRDPQEGRFLTQGTWFDRLIGQKKGDRSCADPGSCFRALLSLQACKYPTFRPASII

SEQ ID NO: 42774 - protein, 187 aa, Zea mays
  Coding DNA Sequence Number=SeqID_995
  Gene Ontology: Mol. function=protein serine/threonine kinase activity; Cellular component=cytoplasm; Biological process=protein amino acid phosphorylation
  Homolog annotation: Hit_ID=Q9LUL2; Match level="QueryCoverage=59%, HitCoverage=22%, E-value=1e-37, Identity=65%"; Hit description =Protein kinase
VGTHEYLAPELVSGSGHGNGVDWWAFGVFLYELVYGRTPFKGHTKEATLKNILSKQATYPQLDGEADASQLRDLVGRLLERDPRRRMGATRGAAEIKRHPFFSGVDWALIRCVAPPVVPDRDAAAPVGGGDRKAAKLGSWSSMSSNRGSKKRKSSSFGRRSTSTCEERQGVFRKLMSWNQESRSLSC

SEQ ID NO: 42775 - protein, 51 aa, Zea mays
  Coding DNA Sequence Number=SeqID_996
MTKSMAAAYTFCSRTNKTIAANLKERNGILSFWFQRRIELIFGHPVISTLT

SEQ ID NO: 42776 - protein, 147 aa, Zea mays
  Coding DNA Sequence Number=SeqID_997
  Homolog annotation: Hit_ID=Q10NZ2; Match level="QueryCoverage=27%, HitCoverage=15%, E-value=2e-14, Identity=80%"; Hit description =Expressed protein
  Subcellular localization annotation: CTP_CleavageSite=33; ConfidenceScore=5.66e-01
MVSATSVAALSRRNQAPPHRTTSPATGRTRRHRKSTRSNIAQIWTRRREGPRHRLPWGSRRRQFAPSGDGEEGEGGRERLKAEQQQQSLLLQLSWVTSRIGHPITGYGQETRNRAARQRIPNKIWTDEDGVEHVEILAQMGSSDRSG

SEQ ID NO: 42777 - protein, 101 aa, Zea mays
  Coding DNA Sequence Number=SeqID_998
MDTEAAVVNQPLTMLWSMGLGRDTEHSVGRQQGQKGWSTLESWSVSAGFIELEFALCQVSQRLVHPAAAPHGRRCLVALRVLAERPTVISKGPPLAFRQVD

SEQ ID NO: 42778 - protein, 110 aa, Zea mays
  Coding DNA Sequence Number=SeqID_999
MPVTSPHDRAFDKVFRPMRNCSPEEDGLIVYREGTLDDLTVETCSRHAATGDDGAAGHVIPGISCSDLGCLRKVDGNCLEEGCKSRRGTARGHDDDFFVVQLKDLFPSYY

SEQ ID NO: 42779 - protein, 144 aa, Zea mays
  Coding DNA Sequence Number=SeqID_1000
MEGGRAAAQGIERESDKRERSPNHQSGRWGKLLSKGAPDSPTTVGAVRRCSAWHIGQSGATPDSPVNYSGGLFQKSEAEEFGVILPGAPDSPTKSSVPSELVTQRDTSPASPFNTQELSNNSNTLEQDSQVIKASQVIKASQVP

SEQ ID NO: 42780 - protein, 194 aa, Zea mays
  Coding DNA Sequence Number=SeqID_1001
  Subcellular localization annotation: CTP_CleavageSite=25; ConfidenceScore=5.27e-01
MGRPVLLMVFMGAMGVGLQSTNSGRQMLGSTDMWTGNRVGRWSQVPLCPRLPATFPDYSLQRGHYSLVKNTDPTTPRSLPQRGLQVGPCPNLVESGPADVRSLCSCDRPFAPSVAAGGAFTGTSTPYAVGVPSCHCWGCLHQDLDSVRCGGAELSHAVDFDSAADKPPSSRSAVWAEASPLIPEEVFRCCEPCV

SEQ ID NO: 42781 - protein, 477 aa, Zea mays
  Coding DNA Sequence Number=SeqID_1002
  Gene Ontology: Mol. function=peroxidase activity; Cellular component =vacuole; Biological process=response to oxidative stress
  Homolog annotation: Hit_ID=Q10LQ5; Match level="QueryCoverage=61%, HitCoverage=90%, E-value=1e-124, Identity=77%"; Hit description =Peroxidase 52, putative, expressed
  Pfam annotation: Domain name=TFIID-31kDa; Domain location=358-475; Score=85.3; E_value=1.8e-22; Accession=PF02291.6; Description =Transcription initiation factor IID,
  Pfam annotation: Domain name=peroxidase; Domain location=48-293; Score=424.0; E_value=2.1e-124; Accession=PF00141.13; Description =Peroxidase
  Pfam module annotation: Pfam domain module=TFIID-31kDa::peroxidase; Domain location=358-475::48-293
MVVSILTHPFMAAAACVAVALALLATTSSAQLDPHFYDKACPAALPTIKRLVEEAVAAEPRMGASLLRLHFHDCFVNGCDGSILLDDTPFFTGETMAAPNANSVRGFDVIDRIKGAVNAACRGNVVSCADVVAIAARDSVVALGGPSYDVPLGRRDARTASQAAANSSIPAPTFGIDRLASNFASHGLSLQDLVALSGAHTLGFSRCTNFRDRLYNETATLDGSLAASLRAACPRAAGTGDDSLAPLDPTPARFDAAYFASLLRNRGVLHSDQQLFAGGPGVADALVRLYAADTDAFRRDFADAMVRMGSLSPLTGSNGEIRYNCRKFVRFARRRRHTPETPKPHTNHGRRRRASIGTVGRCCRSRREPRDARVVRELLRSMGLGEGEYEPRVVHQFLDLAYRYVGDVLGDAQVYADHAGKAQIDADDVRLAIQAKVNFSFSQPPPREKDSAAYATPTAVPFDRVRLTGSQAPPEAP

SEQ ID NO: 42782 - protein, 113 aa, Zea mays
  Coding DNA Sequence Number=SeqID_1003
  Homolog annotation: Hit_ID=Q9FQY2; Match level="QueryCoverage=25%, HitCoverage=7%, E-value=8e-08, Identity=89%"; Hit description =Protein phosphatase type-2C
MHARAKHSPAVLPSREAPARSTPPLQILQPSARQAPGSGEGPACVALIRNKQLIVANAGDSRCVISRNGQAVLPQFGSACVPDPPSSRSPEVLQMHGLRSGLYRQPVKISSKG

SEQ ID NO: 42783 - protein, 145 aa, Zea mays
  Coding DNA Sequence Number=SeqID_1004
MSEEAASARMSLVIWCRTVTRSRKEERAVWVVFMAMLAVCECSRPGDPSLVAKGRDNWYQSYRPLRGSSSRKRSSQDSSTTAPIPKPSTQTKVLFGSKNVTQMEEDSDQWERLMKKMDWLTQKVMGMDEVQQQLLAQARLAATVA

SEQ ID NO: 42784 - protein, 248 aa, Zea mays
  Coding DNA Sequence Number=SeqID_1005
  Gene Ontology: Mol. function=protein binding; Cellular component =membrane; Biological process=meiosis
  Homolog annotation: Hit_ID=Q10SJ9; Match level="QueryCoverage=93%, HitCoverage=68%, E-value=2e-97, Identity=77%"; Hit description=LEM3 family/CDC50 family protein, expressed
  Pfam annotation: Domain name=CDC50; Domain location=6-235; Score =256.2; E_value=6.7e-74; Accession=PF03381.6; Description=LEM3 (ligand-effect modulator 3) family  CDC50 family
MGIELLLIDFVNVRPIGINYADILFFLHSFPRYVKSRSDKQLRYKDAAHLTKDCEPEVYSAGGAPIVPCGLVAWSLFNDTYTISVNKKAIVVNKKDIAWQSDKKKKFGSDVYPSNFQNGNLIGGAKLNESIPLSEQEDLIVWMRTAALPTFRKLYGRIETDIMENDELTVVIQNNYNTYSFGGSKALVLSTTSWIGGKNNFIGFAYLIVGGFCLFLALVFVVLYMIKPRTLGDTSFLSWNRGTMDYPS

SEQ ID NO: 42785 - protein, 272 aa, Zea mays
  Coding DNA Sequence Number=SeqID_1006
  Gene Ontology: Mol. function=protein binding
  Homolog annotation: Hit_ID=Q6L4C3; Match level="QueryCoverage=83%, HitCoverage=92%, E-value=7e-73, Identity=56%"; Hit description=RIKEN cDNA 1500006O09, related
  Pfam annotation: Domain name=DUF783; Domain location=55-272; Score =259.1; E_value=9e-75; Accession=PF05615.3; Description=Protein of unknown function (DUF783)
MYTLYTHVPLLDLPLSRVTLVIVSRIVESGMLAKGRRLAGRGGEMSAHYPFGPQDDDAIIKHRLLTRTTTTRGEPPLKKLQKKFMSFATEIEKDADNITDCERLYKAFLHEINTFELPLLKSKAVVDANIREKESFNELQVEIERQILQAKTDIEVLKKQLEQSKIERQHKEECEAIRKLICLQPPRSETEKLIADLEKEIADLEDENVACTRTLELRKKQFALLLHVVEELKISIEDEQKSIADELRAITGEQKMSTGEGSVGASDSMVVD

SEQ ID NO: 42786 - protein, 339 aa, Zea mays
  Coding DNA Sequence Number=SeqID_1007
  Gene Ontology: Mol. function=RNA-directed DNA polymerase activity; Biological process=RNA-dependent DNA replication
  Homolog annotation: Hit_ID=Q10SK1; Match level="QueryCoverage=63%, HitCoverage=57%, E-value=2e-85, Identity=74%"; Hit description =Expressed protein
MAAVRRCCLLAAVLLWSALASAATAAPAPVVAGPVSRVEDATMFRIYYGQSFKVIKNSGDGKSYLLMQNTSKMASKTKYCTGRIKSFVIPLASFSVDTTTSPVSFFELLGVLESLKGITSNQVASQCVLQSYTSGNAQLVNRTDVQTLSQFTAHFISDTDEDRGCNFAAYVPLEEGTPLQMAEWIKYLGTFTNSENRANAVYDAVKTTKCIFIWIDMNNTPLQVKTNYLCLSKVAANLGTRFKPVVAWIEFTQVPSVGDEDYDEDEVAQIQHFNSQATTILLASLSREEYKKVQGLKIAKEIWDVLKTAHEGDEVTKITKRETIEGELGRFRLRQGEEP

SEQ ID NO: 42787 - protein, 90 aa, Zea mays
  Coding DNA Sequence Number=SeqID_1008
MAQVHISLSHGCLAHELTCSVNLTANDYHDKGVIRTMESSTEVVSGSFLCSGKNASDDRRIQASDEAKYIEPSEAEESSRGEGQFFRFYD

SEQ ID NO: 42788 - protein, 195 aa, Zea mays
  Coding DNA Sequence Number=SeqID_1009
MWMATGTRIGTLWRLCDRCFDSHQALGGHVLGHHRKRAKIAIAAGAVHDVVDDKVHGKGKGGVGEPVFAGSHDIAVSSGHGFTYGNSRSDKKMDIGTASPNRKVVVAGTCREGANGNGNGHGDGCRTRYKCKVCGTECLTGRALGGHMGKHQKRLPVGGGGKADRSPSPATRTTTARPLAQLFGAERLQREIRPS

SEQ ID NO: 42789 - protein, 340 aa, Zea mays
  Coding DNA Sequence Number=SeqID_1010
  Gene Ontology: Mol. function=kinase activity; Biological process=RNA -dependent DNA replication
  Homolog annotation: Hit_ID=Q851S1; Match level="QueryCoverage=53%, HitCoverage=34%, E-value=3e-77, Identity=78%"; Hit description =Putative ABC transporter
  Pfam annotation: Domain name=ABC1; Domain location=193-279; Score =5.0; E_value=9.2e-06; Accession=PF03109.7; Description=ABC1 family
MARVHESRRQGREATKQTSRPDPPKLFGFRTGRVSELLAPEERETEKRSRGSRHMWRRAATAALSLGAGAGAVSIATSEDPAATFKVCAHLPPRLLRDSVTAATIAFDYKWSLWGLEPGTPVWQSAKHHAHLRSANRLQELCFRNGGIYIKLGQHIAQLEYVVPEEYVQTMRESMLKRCPVSSYEQVRGVFTKDLGESPETVFAEFDPAPFASASLAQVHVARTHDGQKVAVKVAQHCASGLVTNMHKSCAIPIRCDGQVVQAGCSMLQCSPTSFPCKYLGLPISDKKLRKTDLMLWIEKIADRLPNWKARHLNLAGRTTLVKFVLSAIPIYLLIAINIP

SEQ ID NO: 42790 - protein, 114 aa, Zea mays
  Coding DNA Sequence Number=SeqID_1011
MATVPVPLPWPSVRRSLQEGAASAASYERRAPWQGAARPAATVRSVETLVVIVAAIVLAAVLAGVLARVCGGRHVVPSAQYHDEEGWVERRCRSCLDSGLPPPEQGASKTSEAK

SEQ ID NO: 42791 - protein, 57 aa, Zea mays
  Coding DNA Sequence Number=SeqID_1012
MGKAISIVTTPKRSGVDHEQLIRSLINHTVGKHCNIITTLCDRQMLGIVVQSCVGKE

SEQ ID NO: 42792 - protein, 369 aa, Zea mays
  Coding DNA Sequence Number=SeqID_1013
  Homolog annotation: Hit_ID=Q01DI1; Match level="QueryCoverage=38%, HitCoverage=65%, E-value=8e-31, Identity=48%"; Hit description =Homology to unknown gene
  Pfam annotation: Domain name=DUF1517; Domain location=96-367; Score =301.6; E_value=1.4e-87; Accession=PF07466.2; Description=Protein of unknown function (DUF1517)
  Subcellular localization annotation: CTP_CleavageSite=42; ConfidenceScore=5.35e-01
MAAASLLEATRFLSTPHPRSRSRPLPFPPGSGLHPHLLRTPRLSTLRVHLHRPAPLGAQEPARPGALLAVDALRRSVLDSLAALKRPALALLLAGVLLAAASAGGPHAAALAASGGRVGGSAFSSRSSSPRSYGYSAPAPRGGYTAAPFYSPSPFVSVGPALGIGFGGSGFLVTLMGFAAFLYLAGFLSDSSGATSVLTETEKTTVLKLQVGLLGMARSFQKELDQIAEKADTSTPAGLSYVLTETTLALLRHPDCCISAYSSVDVKRSIDNGEKRFNQLSIEERGKFDEETLVNVNSIKRNKGGSQRSSGFSNEYIVITILVAAEGVHKVPVINSSNDLKTALQKMGAIPSRKILVFLASFFLSLVIS

SEQ ID NO: 42793 - protein, 711 aa, Zea mays
  Coding DNA Sequence Number=SeqID_1014
  Gene Ontology: Mol. function=microtubule plus-end binding; Cellular component=cytoplasmic microtubule
  Homolog annotation: Hit_ID=Q8LSJ9; Match level="QueryCoverage=87%, HitCoverage=96%, E-value=0.0, Identity=95%"; Hit description=X1
  Pfam annotation: Domain name=XH; Domain location=579-711; Score =269.0; E_value=9.5e-78; Accession=PF03469.5; Description=XH domain
  Pfam annotation: Domain name=XS; Domain location=178-292; Score =274.3; E_value=2.5e-79; Accession=PF03468.5; Description=XS domain
  Pfam annotation: Domain name=zf-XS; Domain location=110-150; Score =82.8; E_value=1e-21; Accession=PF03470.5; Description=XS zinc finger domain
  Pfam module annotation: Pfam domain module=XH::XS::zf-XS; Domain location=579-711::178-292::110-150
MAYRGIGVSRIRIRILFFPDNGEAGGSPSKKAGSPLVPASAWASVLHLFSEVTSEAEVAYIFFPFLKMDHSSDEDTEISDSEIDDYEGKIYARLMSGDLKLNKNGENYICPFCSSKKKNYSKSSLVQHASGVSAAPNREAKEKAVHRALFKYLKNGLAKSPEPGSHATPVEPQPLQNRDEKFVWPWMGVLVNVPTEWKDGRQIGESGNRLKEQLSHFCPLRVIPLWTFRGHTGNAIVEFGKDWNGFRNARTFESHFAAGGFGKKDWIGKKNQGSELYGWLARAEDYNSPGIIADHLRKNGDLKSVNDLAKEGARKNDRLVANLANQIEVKNRYLQELECKYSETTASLEKMMGQREQLLQSYNEEISKMQQLARRHSQKIIDENQKLRSDLEAKMNDLDVRSKQLDEIAAKSDYDRRSLEQEKQKNAIKSSHLKLATLEQQKADENVLKLVEEQKVSNNVSYGSLTVWKLQREKHAALKKILMLEQQLDAKQKLELEIQQLKGKLKVMEHMPGDEDSASKNKINELSEALQEKIDELDGMESLNQTLVIKESKSNIELQEARKELENGLLDLSGGQTHIGIKRMGELDLKAFSKACQKERTENAEVTAAFLCSKWEAEIKNPDWHPFRVVTIDGKEMAIIEDDAKLRALKEEHGEEIYAMVTKALLETNEYKSKGSYPVGELWNFKENRKVTLKEAVQFVLRQWRTNRRKR

SEQ ID NO: 42794 - protein, 82 aa, Zea mays
  Coding DNA Sequence Number=SeqID_1015
MEKSTRKAMSLPDWLIARFLGRGGTRLRENIRRCAATGDPHLPLNHCHELLSHQGLNTEPDQFDANADKLGPPRRPYPCIPK

SEQ ID NO: 42795 - protein, 237 aa, Zea mays
  Coding DNA Sequence Number=SeqID_1016
  Gene Ontology: Mol. function=GTP binding; Cellular component =intracellular; Biological process=small GTPase mediated signal transduction
  Homolog annotation: Hit_ID=Q9FLE0; Match level="QueryCoverage=99%, HitCoverage=44%, E-value=4e-84, Identity=69%"; Hit description=GTP -binding protein-like
  Pfam annotation: Domain name=MMR_HSR1; Domain location=1-106; Score =19.7; E_value=1.6e-05; Accession=PF01926.13; Description=GTPase of unknown function
  Pfam annotation: Domain name=MMR_HSR1; Domain location=186-231; Score= 15.9; E_value=3.5e-05; Accession=PF01926.13; Description=GTPase of unknown function
  Pfam module annotation: Pfam domain module=MMR_HSR1::MMR_HSR1; Domain location=1-106::186-231
FIRRREALVYNTPGDHVTRDIREGVAKLGDLRFRVLDSAGLETAATSGSILARTADMTGNVLARSQFAIFLIDVRDGLQPLDLEVGQWLRKHASGIHTLVAMNKSESLDEHGFLTAAAGEAHKLGFGDPVAISAETGLGMAELYEILRPLFEEYMFQLRNNDLNQDDPISEVETEAHDGDESKLPLQLAIVGRPNVGKSTLLNTLLQEQRVLVGPEAGLTRDSIRAQFQFDSRTVYL

SEQ ID NO: 42796 - protein, 173 aa, Zea mays
  Coding DNA Sequence Number=SeqID_1017
  Subcellular localization annotation: CTP_CleavageSite=51; ConfidenceScore=5.53e-01
MASGGGGPAFVGQVFTMLDPSGNGLMAVTTRFELPRFLTNRTPMWFKRMLSPSKKTENSPVFRFFMDLNDAVSYVKRLNVPSGMVGACRLDVAYEHFKEKPHMFQFVPNEKQVQAANKLLKSLPQRGRRKKLDGVPVFSAQNLNIAVATNDGIRCCPDFFVFVQLCHWQMPRR

SEQ ID NO: 42797 - protein, 338 aa, Zea mays
  Coding DNA Sequence Number=SeqID_1018
  Homolog annotation: Hit_ID=Q6QP54; Match level="QueryCoverage=23%, HitCoverage=48%, E-value=3e-11, Identity=50%"; Hit description =Putative kinase
MRGAIIAYLAELARWDTGLVLCGPSRVRAPGSGEAEVVRQRPGRSPSPGVGRSGVRRLLGLSPSPSPGVGRSGVHRLLGLSPSPSPGSGGAEFAVFRDLARVRALGRAERSSSSSGAEPESEPWVGRSGVRRLPGLSPSPSTGSGGAEFPMVPLAGPDCLSVSLCQMALQSEWRRRRCPSVRPLYADGGYQLRIRSLEGTPNYGPRQVLSNKIQESSVLAMSCASDDYYIKDYGVILAPEHYVATCVAVFGKLRRCRCLDAVQSGCTALSIFKQGDLMVYYLADESGVHFVWQPNQESSVLVMSCASNDYYIKDYDIILAPEVTQRRTNSNNHSPSSG

SEQ ID NO: 42798 - protein, 137 aa, Zea mays
  Coding DNA Sequence Number=SeqID_1019
  Gene Ontology: Mol. function=zinc ion binding
  Homolog annotation: Hit_ID=Q8LSK1; Match level="QueryCoverage=81%, HitCoverage=20%, E-value=5e-37, Identity=75%"; Hit description=YZ1
MAREAASEATASRESGAEAAGECWSEALKSFLDHIPVSSVPGALQPTASPGVGSDEDDPFHSIYPTTNHLAFVFVPHAAVEVKLHGSVLGALDAMYSSNAAGAVIIDVVHSSLGKYVDRDIGFVEFSSLVLWALEVT

SEQ ID NO: 42799 - protein, 448 aa, Zea mays
  Coding DNA Sequence Number=SeqID_1020
  Gene Ontology: Mol. function=amino acid binding; Biological process =metabolic process
  Homolog annotation: Hit_ID=Q75IY1; Match level="QueryCoverage=95%, HitCoverage=90%, E-value=5e-89, Identity=46%"; Hit description =Putative ACT domain containing protein, ACR4, with alternative splicing forms
  Pfam annotation: Domain name=ACT; Domain location=108-180; Score =40.1; E_value=7.4e-09; Accession=PF01842.15; Description=ACT domain
  Pfam annotation: Domain name=ACT; Domain location=16-83; Score=9.6; E_ value=0.23; Accession=PF01842.15; Description=ACT domain
  Pfam annotation: Domain name=ACT; Domain location=250-317; Score =10.5; E_value=0.18; Accession=PF01842.15; Description=ACT domain
  Pfam annotation: Domain name=ACT; Domain location=328-395; Score =45.3; E_value=2.1e-10; Accession=PF01842.15; Description=ACT domain
  Pfam module annotation: Pfam domain module=ACT::ACT::ACT::ACT; Domain location=108-180::16-83::250-317::328-395
MACGSRSRTNEMVDEYEKLVDSANKYGTLLEVVQVLTDLKLTIKRAYISSDGEWFMDVFHVVDQDGNKLYDCQVIDRIEQSLGAGSLSFRGPPERAVAVEAEAEEAQTTIELVGRDRPGLLSEVFAVLADLRCNVVASEVWTHDGRVAALVHVTDADTLGAIEDPARLDTARRLLRHVLRGSSRDKKAARAAVSARVVEHAPRRLHQMMRADRSARRDGEGEGEGDGERERGGAGMPVVAVEDCAERGYTLVNVRCRDRAKLLFDTVCTLTDMQYVVFHGTVIAEGSEAYQEYYIRHLDDRAASSGEERERLRRGLEAAIQRRYTEGLRLELCCEDRVGLLSDVTRVFREHGLSVTHAEVGTRGARAANVFYVVDASSGEPVQAQAVAAVRAEIGEQLLFVREHQDAAAAAANGTRSTVAGGRRSLGNMIRSRSEKFLYNLGLIRSCS

SEQ ID NO: 42800 - protein, 106 aa, Zea mays
  Coding DNA Sequence Number=SeqID_1021
MCRCGDAREPRLLEPIRFTAPVPVSLVLVVPGEWRLSASELPQISHLKGIGSTMDVNHITEMEDGLNDDGMEYPFECDANASNNDQIVEDHADDAPIASGENAIVQ

SEQ ID NO: 42801 - protein, 73 aa, Zea mays
  Coding DNA Sequence Number=SeqID_1022
  Subcellular localization annotation: CTP_CleavageSite=60; ConfidenceScore=5.51e-01
MNKDKGPMPMSISKMKTKKPIGTPTGSKLMASAFKVTSSKNELMVLMQKLAEVVQPAIASASASASESRLEGG

SEQ ID NO: 42802 - protein, 138 aa, Zea mays
  Coding DNA Sequence Number=SeqID_1023
  Gene Ontology: Mol. function=DNA binding; Biological process=DNA integration
  Homolog annotation: Hit_ID=O24587; Match level="QueryCoverage=53%, HitCoverage=7%, E-value=3e-30, Identity=86%"; Hit description=Pol
  Pfam annotation: Domain name=rve; Domain location=5-136; Score=8.2; E_ value=0.0012; Accession=PF00665.16; Description=Integrase core domain
MKVKGEAHIGKECDSDYSSSDSDDEGLAASVLDKSSLFPNERHKFLMAKEKKDKTETQETLKRFLGRAPNEFELKVKKIRSYNGSKFKNLQVEDYIEEEGIKHEFFAPYTPQQNGVVEGKNRTLIDMARTMLGEYKTS

SEQ ID NO: 42803 - protein, 586 aa, Zea mays
  Coding DNA Sequence Number=SeqID_1024
  Gene Ontology: Mol. function=RNA-directed DNA polymerase activity; Cellular component=mitochondrion; Biological process=RNA-dependent DNA replication
  Homolog annotation: Hit_ID=Q8S463; Match level="QueryCoverage=93%, HitCoverage=28%, E-value=0.0, Identity=86%"; Hit description =Putative prpol
  Pfam annotation: Domain name=RnaseH; Domain location=1-123; Score= -24.4; E_value=0.011; Accession=PF00075.14; Description=RNase H
  Pfam annotation: Domain name=rve; Domain location=328-487; Score =110.5; E_value=4.9e-30; Accession=PF00665.16; Description=Integrase core domain
  Pfam module annotation: Pfam domain module=RnaseH::rve; Domain location=1-123::328-487
MFFDGSLMKTGAGAGLLFISPLGKHLRYVLRLHFPASNNVAEYEALVNRLRIAIELGVRCLDARGDSQLVIDQVMKNSHCRDLKMEAYCDEVRRLEDKFYGLELNHIARRYNETANELAKIASGRTTVPPDVFSRDLHQPSIKIDDTLDPKAPSAQPEVPSTQSEASSARPEAPSARPEAPSASEGEALRVEEEQSGVTPDQNWQTPYLKYLHRGELPLDRAEARRLVRRAKSFVLLGDGKELYHRSPSGILQRCISIAEGQELLQEIHSGACGHHAAPRALVRNAFRQGFYWPTAVADAARIVRTCEGCQFYARQTHLPTQALQTIPITWPFAVWGLDLVSPLQKAPGGYTHLLVAIDKFSKWIEVRPLNSIMSEQAVAFFTNIIHRFEVPNSITTDNGTQFTGRKFLDFCEDHHIRVDWAAVAHPMTYGQVERANSMILQGLKPRIYNDLNKFGKRWMKELPSVVWSMRTTPSRATGFMPFFLVYGAEAILPTDLEYGSPRTRAYADQSNQASREDSLDQLEEARDKALLHSARYQQSLRRYHARGVGPETSRWATWYFGCDKTPEGDTSSHLPGKGRLSSPKF

SEQ ID NO: 42804 - protein, 239 aa, Zea mays
  Coding DNA Sequence Number=SeqID_1025
  Gene Ontology: Mol. function=protein transporter activity; Cellular component=membrane; Biological process=intracellular protein transport
  Homolog annotation: Hit_ID=Q5JMS0; Match level="QueryCoverage=78%, HitCoverage=67%, E-value=2e-55, Identity=64%"; Hit description =Putative syntaxin 6
  Pfam annotation: Domain name=SNARE; Domain location=152-214; Score =49.0; E_value=1.6e-11; Accession=PF05739.9; Description=SNARE domain
MRGGGRALRLATRCGLLLVTARLRLAGPRGDDELEKTISVASRDPAYYGLDEVELSRRRNWTGSSHKQLTMYLNLLHGSSQFMHEHIQVGTVKRAIEKGKSNAATSKYQDTSRTNHYSAQDNDDFLSSESDRQLLLMRICCRSAFNICCLLQQDEELDELSESVQRIGGVGLTIHEELSGQERILNDLSLEMETTSNRLDFVQKRVAMVIKKAGIKGQIMLIVFLIVLFIILFVLVFLT

SEQ ID NO: 42805 - protein, 175 aa, Zea mays
  Coding DNA Sequence Number=SeqID_1026
MAERLDQITYVLIHPLRCFSLKAWKLPLSVIIAKDEVIIDHGEGIVSVWTRCKTITSNLRVENAKKALFPQWANHGPVSRANAASNNSRLPVQKLSLNFLWSLELMGRDGSIRQFLPHRPHYPTFMHPRLVAVGYMYNATSSCKSHARILFGYLPDKALHTIATEKYGCEDNLVS

SEQ ID NO: 42806 - protein, 175 aa, Zea mays
  Coding DNA Sequence Number=SeqID_1027
  Homolog annotation: Hit_ID=Q01DI1; Match level="QueryCoverage=71%, HitCoverage=50%, E-value=9e-15, Identity=41%"; Hit description =Homology to unknown gene
  Pfam annotation: Domain name=DUF1517; Domain location=17-173; Score= -78.9; E_value=3e-07; Accession=PF07466.2; Description=Protein of unknown function (DUF1517)
MFLIPAPLNHLPDQNNVLAPFPTIENTEFAKRDNIGITSASGLLYLSLLIGCKSYQYFMLEHLIMCLVKVDVKRSIDNGEKRFNQLSIEERGKFDEETLVNVNSIKRNKGGSQRSSGFSNEYIVITILVAAEGVHKVPVINSSNDLKTALQKMGAIPSRKILVFLASFFLSLVIS

SEQ ID NO: 42807 - protein, 42 aa, Zea mays
  Coding DNA Sequence Number=SeqID_1028
MKGPGLFSDIGKKEGYFLLLLLSPRYHCRHLSLTGSDLLTYD

SEQ ID NO: 42808 - protein, 90 aa, Zea mays
  Coding DNA Sequence Number=SeqID_1029
  Gene Ontology: Mol. function=protein transporter activity; Cellular component=membrane; Biological process=intracellular protein transport
  Homolog annotation: Hit_ID=Q5JMS0; Match level="QueryCoverage=83%, HitCoverage=23%, E-value=7e-14, Identity=56%"; Hit description =Putative syntaxin 6
VDELEKTISVASRDPAYYGLDEVELSRRRNWTGSSHKQLTMYLNLLHGSSQFMHEHIQVGTVKRAIEKGKSNAATSNTRIQARPTTILPR

SEQ ID NO: 42809 - protein, 306 aa, Zea mays
  Coding DNA Sequence Number=SeqID_1030
  Gene Ontology: Mol. function=voltage-gated ion-selective channel activity; Cellular component=mitochondrial outer membrane; Biological process=anion transport
  Homolog annotation: Hit_ID=Q7Y1C6; Match level="QueryCoverage=99%, HitCoverage=99%, E-value=1e-136, Identity=82%"; Hit description =PgPOR29
  Pfam annotation: Domain name=Porin_3; Domain location=3-299; Score =181.7; E_value=1.8e-51; Accession=PF01459.12; Description=Eukaryotic porin
MKGPGLFSDIGKKAKDLLSKDYTYDQKLSIFTASASGVGTRDRVWTGPLTELDEINLTLVNCVTERCKMGLTSTAVKKGGLYSLDVSSVYKYKNTTVDVKLDTESNISTTLTVLDALPSTKLVTSVKLPDYNSGKVELQYFHENATFATVVGTKPTPVIDLSGTVGAQGVAFGAEAGYDTATGKFTKYTAAIGVTKPDYHAAFILADKGDTIKVSGVYHLDEKQKASAVAELTRRLSTNQNTLTVGGLYTVDPQTAVKARLNNTGTLAALLQHELKPKSLLTISGEFDTKALDRSPKFGLALALKP

SEQ ID NO: 42810 - protein, 113 aa, Zea mays
  Coding DNA Sequence Number=SeqID_1031
  Gene Ontology: Mol. function=ATPase activity, coupled to transmembrane movement of ions, phosphorylative mechanism; Cellular component=membrane; Biological process=calcium ion transport
  Homolog annotation: Hit_ID=Q9FVE8; Match level="QueryCoverage=91%, HitCoverage=9%, E-value=6e-39, Identity=80%"; Hit description=Plasma membrane Ca2+-ATPase
MVISDNINTAKAIARECGILTDGGIAIQGLDFQTKNEEELTQLIPKIQMHQVMARSSPLDKHTLVKHLQTKLDEVVAVTGDGTNGAPALHEADIGLAMGIAGTEEISRFPLHG

SEQ ID NO: 42811 - protein, 67 aa, Zea mays
  Coding DNA Sequence Number=SeqID_1032
  Gene Ontology: Mol. function=adenosylmethionine decarboxylase activity; Biological process=spermidine biosynthetic process
  Homolog annotation: Hit_ID=O24215; Match level="QueryCoverage=63%, HitCoverage=10%, E-value=2e-10, Identity=72%"; Hit description=S -adenosylmethionine decarboxylase proenzyme (EC 4.1.1.50) (AdoMetDC) (SamDC) [Contains: ...
  Homolog annotation: Hit description=S-adenosylmethionine decarboxylase alpha chain; S- adenosylmethionine decarboxylase beta chain]
MPPLSTPKELVVTLEMCMTRLDKKRAYVFFKTSIDGYTSCAKDMTKPSGFYIDTCFRIKAILAFRLS

SEQ ID NO: 42812 - protein, 167 aa, Zea mays
  Coding DNA Sequence Number=SeqID_1033
  Gene Ontology: Mol. function=transferase activity, transferring phosphorus-containing groups; Cellular component=integral to membrane; Biological process=two-component signal transduction system (phosphorelay)
  Homolog annotation: Hit_ID=O82424; Match level="QueryCoverage=85%, HitCoverage=53%, E-value=4e-58, Identity=64%"; Hit description =Pyruvate dehydrogenase kinase isoform 2
MALGVQQLKKELGRSRKVPFEFDEIHEFLDRFYMSRIGIHMLIGQHVALHDPKPEPGVIGIINTRLSPIQVAQAACEDACSVCLREYVSTPDINIYGDPNFTFPLAMKVAGYQEAASQEFFTYLYSTAKNPPELDRPNTEGVTMEYHICWREMAFKEAQWKFGPTYG

SEQ ID NO: 42813 - protein, 206 aa, Zea mays
  Coding DNA Sequence Number=SeqID_1034
  Subcellular localization annotation: CTP_CleavageSite=19; ConfidenceScore=5.30e-01
MMDGPPSRGRPTGPAPSVPSVTASRLLLLGAAQPQPQPLCKGHVSHCGCSMSTGSGSRGSEWRGGGDDVGGGAVEAKGGWEAERGRVGGGGRGRATRQRVRGEVRDWVVTRWRRMECGRCRHTMRYGRSRSMDGRTAERGRQTTLALLICSTDITDAVTEKSHSLLASLKYGQHLFSHAFTRCWDWTLTLPSHSHCIFSTSVLATG

SEQ ID NO: 42814 - protein, 585 aa, Zea mays
  Coding DNA Sequence Number=SeqID_1035
  Gene Ontology: Mol. function=peptidyl-prolyl cis-trans isomerase activity; Cellular component=membrane fraction; Biological process =protein transport
  Homolog annotation: Hit_ID=Q5Z4M6; Match level="QueryCoverage=90%, HitCoverage=87%, E-value=0.0, Identity=73%"; Hit description=Trigger factor-like
  Pfam annotation: Domain name=FKBP_C; Domain location=301-393; Score= -2.0; E_value=0.0062; Accession=PF00254.18; Description=FKBP-type peptidyl-prolyl cis-trans is
  Pfam annotation: Domain name=Trigger_C; Domain location=394-575; Score=93.7; E_value=5.7e-25; Accession=PF05698.4; Description =Bacterial trigger factor protein (TF) C-terminus
  Pfam annotation: Domain name=Trigger_N; Domain location=134-288; Score=15.1; E_value=3.6e-05; Accession=PF05697.4; Description =Bacterial trigger factor protein (TF)
  Pfam module annotation: Pfam domain module=FKBP_C::Trigger_C::Trigger_ N; Domain location=301-393::394-575::134-288
  Subcellular localization annotation: CTP_CleavageSite=67; ConfidenceScore=5.88e-01
MELATVAAAVASAAARPHGPFSSPRAVSASVSWTSLSLAYTSRCLSSTSSRRRLRWLPVTSAAVELREATAGGGDSLRVTKTPQPGSSVKFSVEVPTSIIHECYQSTLQEYAKRVKVSVSAQTGCKHVDEHTHMKFRNALLVPLYDNEVGQSAVLAIPDFAYSHRSQYQFIVAVPGFRPGKTIPENVLINYVGPQHVQDATIEAILKHTLPQALSSVEERALEDSVRILTQFDDMRNSFSLDNVFRYDVAVDVAPEVRWLSEDKYRNLKVVVEIDEAVDAEKAAEKELQRRHKALGLLRIVADRGLQIGDLVVLDIFAESINNDGSRGEKISSAESTGFHLDTEENSNLVPGFLGSLIGIRAGETRSFPIQFPESFERESLRGVRAQFTVVCKELFYRELPVMDDSLAVKLLPGCTTIDEVRERILKRCKEVEKTAIEQATDNAILDQLGKLVEVDVPRALFQEQGQQLYGAKLLQLQAERKLDKDQLASLSTKRSVQAYLEDEKENITRIIKQMLAVGDIFKSENLQYSTDQLVKEVENSIAEFKQYNQDYDEDNIRQQVQDVLEAAKVLEWLKENCSVEYIRR

SEQ ID NO: 42815 - protein, 48 aa, Zea mays
  Coding DNA Sequence Number=SeqID_1036
MVDVSYAFMVDVYYVLSCLQKREILADPIAVAVILIQPDLMTLNEAEC

SEQ ID NO: 42816 - protein, 371 aa, Zea mays
  Coding DNA Sequence Number=SeqID_1037
  Gene Ontology: Mol. function=transferase activity; Cellular component= membrane
  Homolog annotation: Hit_ID=Q2RB29; Match level="QueryCoverage=99%, HitCoverage=78%, E-value=1e-177, Identity=82%"; Hit description =Secondary cell wall-related glycosyltransferase family 47, putative, expressed
  Pfam annotation: Domain name=Exostosin; Domain location=1-321; Score =346.9; E_value=3.4e-101; Accession=PF03016.6; Description=Exostosin family
MPPEFHFGLLGWSPPSPDSVWPDVTAASPPPRYPGGLNQQHSVEYWLTLDLLSSSPPCGRHSAVRVSDSRDADLVFVPFFASLSYNRHYRPVPPEKVSRDRVLQEKLVRYLAARPEWRRYGGADHVIVAHHPNSLLHARAVLHPAVFVLSDFGRYPPRVASLEKDVIAPYKHMAKTYANDSAGFDDRPTLLYFRGAIYRKEGGSIRQELYYMLKEEKDVYFSFGSVQDHGASKASQGMHSSKFCLNIAGDTPSSNRLFDAIVTHCVPVIISDDIELPYEDVLDYSKFSIFVRSSDAVKKGYLMRLLSGVSKQQWTKMWDRLKEVDKHFEYQYPSQKDDAVQMIWQALSRKVPSIKLKVHRSNRFSRSNRGK

SEQ ID NO: 42817 - protein, 284 aa, Zea mays
  Coding DNA Sequence Number=SeqID_1038
  Homolog annotation: Hit_ID=O04109; Match level="QueryCoverage=35%, HitCoverage=32%, E-value=1e-46, Identity=83%"; Hit description=Myb factor
  Pfam annotation: Domain name=Myb_DNA-binding; Domain location=60-105; Score=41.6; E_value=2.6e-09; Accession=PF00249.21; Description=Myb -like DNA-binding domain
  Pfam annotation: Domain name=Myb_DNA-binding; Domain location=7-54; Score=34.9; E_value=2.8e-07; Accession=PF00249.21; Description=Myb -like DNA-binding domain
  Pfam module annotation: Pfam domain module=Myb_DNA-binding::Myb_DNA -binding; Domain location=60-105::7-54
MTTAIKKGPWMPEEDLVLVSYIHEHGPSKWRHVAASTGLMRCSKSCRLRWTNYLRPGIRRGHFTAREERVIVHLHSLLGNRWAAIASHLPQRTDNDIKNYWNTHLKKKKVVVEEQQRAAAAAAKRHVDDGGITTSRSPRLLAKDDSYGYDYDARPAAAYPCTMDNVSKPLKVKLGCMKSASSSSPPAQDGSSSIRRPFFSLDQTSGSTAPLPPISNVVPQLAGTVLAGQGQGRHGGRFFHEPPQQQLSSIMENWLFLPKQQHQQQMTQSSPTPTAAAHCPCCFS

SEQ ID NO: 42818 - protein, 149 aa, Zea mays
  Coding DNA Sequence Number=SeqID_1039
MVVDTKLGWWRRCLLSLRSVMEDATDAKGDGSVLYGYEVPSPGNRGIRGEADGNADHARMADSVEMRTEESLHQFGVLRADHTGKKALLDRAHWSGAGSGALLGWPDCRAAPPTSVATNLHLRTRRETGHWVPPVGTHGHKLGCAVVVW

SEQ ID NO: 42819 - protein, 149 aa, Zea mays
  Coding DNA Sequence Number=SeqID_1040
MVVDTKLGRWRRCLLSLCSVMEDATDAKGDGSVLYGYEVPSPGNRGIRGEADRNADHARMADSVEMRAEESLHQFGVLRADHTGKKALLDRAHWSGAGRGALLGWPDCRAAPPTSVATNLHLRTRRETRHWVPPVGTHGHKLGCAVVVW

SEQ ID NO: 42820 - protein, 163 aa, Zea mays
  Coding DNA Sequence Number=SeqID_1041
MRKRLHNLHLFERNKTLSIELLSKSYPTKEKTLKGMLVIRESRAILSIVKPFVKIGFQGRKRKRKTCNSTGPILAQTAQQHRESGRAHARGGNFTERPSRFSLTENRFLHRYSESLTVCTKALEVLFLYRLKSTTASSAGLCSGELDWPEKAKTGAPEQRTWD

SEQ ID NO: 42821 - protein, 134 aa, Zea mays
  Coding DNA Sequence Number=SeqID_1042
MALPISPSSCYCWRSTISWGLAPFFHRLASRMFIMQSGCGLPPVVIYKDDYQPCGGENFKDVHHPCWGGRRAELGSYLPHGLVTRFFLQHLEEKDVHQPCEGGELRLCGASRPASATSRQASCPLAWMVLSSLS

SEQ ID NO: 42822 - protein, 128 aa, Zea mays
  Coding DNA Sequence Number=SeqID_1043
  Gene Ontology: Mol. function=DNA binding
  Subcellular localization annotation: CTP_CleavageSite=49; ConfidenceScore=5.24e-01
MASPGAMRQWSEDVDQLLGMAHSGSTRSRPQSSRRQHEASASVHSPSVRAALTEDLRAELSRRRAAEDAPVSWEKSNDLWAELNRRRAGKDVCVSLERTRERRHNIEGRNLDKDFVAVAPQTPVGTRS

SEQ ID NO: 42823 - protein, 150 aa, Zea mays
  Coding DNA Sequence Number=SeqID_1044
  Subcellular localization annotation: CTP_CleavageSite=87; ConfidenceScore=5.23e-01
MKDHKPRFTRGPLRDHQNSASPEHALKQGMFSGESSSRPRSPLPRTAVSASPKPASAFAIYSVANSRTLYRALLEYCVNQYSISKPLARGLSQLQAVPLEAINRVAYDFWRAGEHSTVSPPPRYWHNLNQPQGLGLLPSPAQLVFLTTST

SEQ ID NO: 42824 - protein, 160 aa, Zea mays
  Coding DNA Sequence Number=SeqID_1045
  Subcellular localization annotation: CTP_CleavageSite=44; ConfidenceScore=5.29e-01
MKLALALQVPKSSTQTNIKNKLGFKRRSKKETDVFPGLAHRTVRCTTRQCPVHQGSYTPNSPASGFPGAADCPMYHRTVRCTSGATTICAQRSTLTGEHCSTVTRQKSEQKVRGAPDCPVPHEDKASNGRPALSPNDRVLWRHIGHCPVAHRTVRCAHRQ

SEQ ID NO: 42825 - protein, 75 aa, Zea mays
  Coding DNA Sequence Number=SeqID_1046
MASVYRCAQPKTISRRRRVLQLGDGQAQRYETQRDRPGCRLALNHSYDLLTGRKPAIKSPRIPFPPYYPINKDQQ

SEQ ID NO: 42826 - protein, 160 aa, Zea mays
  Coding DNA Sequence Number=SeqID_1047
MQQPSWDWDWDSELLLLRRSWKRSWAARALSSCSLPPPGLLAFFAIVVFFLAVSGYVDYKAIERRAEIGARVFAAPLALATVFLLFVALSWRRRYWATRRRKAAHHYPWSSSSSSQHEADAVAPWGVLAAVAILLLMMTFQQSVHSMWFRPLWDSDYYDP

SEQ ID NO: 42827 - protein, 150 aa, Zea mays
  Coding DNA Sequence Number=SeqID_1048
MEINGEGEDSEIGTVQKQQYLRPTLLVSGGGANEEEEAAEAALGISAPADGGRRQQDTRYVDIFLQLVLIEEGGLAELAFPGERIKEEEEEEEEGMDGWMDRKWPYGPNQTKSIGGFVSCQRPICRLPPDHPRLIPQIMLTINYSWGEEE

SEQ ID NO: 42828 - protein, 140 aa, Zea mays
  Coding DNA Sequence Number=SeqID_1049
  Homolog annotation: Hit_ID=Q10AA9; Match level="QueryCoverage=76%, HitCoverage=27%, E-value=2e-27, Identity=56%"; Hit description=La domain containing protein, expressed
IFVLLNYEPAQPMMYRVFALLDLVFLCVEKVQGLKKDLQYIKETVQSSSILEMKDNKIRKHDDWVKWVIPRESNPDVPSSSASVPRPDVNNLTAHLGGMDLQDSASSAGAVEPKHNDVVQNGSPSGNEEAAVAEDSSDQQ

SEQ ID NO: 42829 - protein, 292 aa, Zea mays
  Coding DNA Sequence Number=SeqID_1050
  Homolog annotation: Hit_ID=Q5IBC6; Match level="QueryCoverage=76%, HitCoverage=100%, E-value=1e-110, Identity=91%"; Hit description =DANA2
MLELEEGPGRTPSGYGGGVGRDAKGERSEEDKEGPRPTQCTTQGIVSGGGGGGPAETPRPGAVCRLEGEMKATLKGRYEGDKATAATTLAAPAGDLRLKASATEAAFTNGPSLRGLTLTLEKPGAFLVDLKPHNQDVRFQFMNSALVLDKRVSLTYTHSTSLAAAPAAAPPSRTALDCTVTFDPANKVSLSHSLGSGGCRLKYTYAHGVDRLTTIEPLFDTNKNAWEFAITRKFAGGDAVKGTYQASTKLLGLEWSRDSLAGGSFKVATTFDLSDQSKAPKLIAESTWNYEI

SEQ ID NO: 42830 - protein, 108 aa, Zea mays
  Coding DNA Sequence Number=SeqID_1051
  Gene Ontology: Mol. function=kinase activity; Cellular component =nucleus; Biological process=cholesterol homeostasis
  Homolog annotation: Hit_ID=Q9FUY5; Match level="QueryCoverage=87%, HitCoverage=19%, E-value=2e-46, Identity=95%"; Hit description =Protein kinase AKINbetagamma-1
MVITVRTYWQPVKVTLSDGTVSEGTLRVSEAAIQISRCRVSEYLSLHTCYDLLPDSGKVIALDINLPVKQSFHILHEQGIPVAPLWDSFRGQFVGLLSPLDFILILRE

SEQ ID NO: 42831 - protein, 374 aa, Zea mays
  Coding DNA Sequence Number=SeqID_1052
MGFPVPGRLLQLGMGAAGSERGWKGSVVRVGDGRRRGRRCHGEVGLRRLRSVHAAALHRRRAGNWVDTGPQNRGFDGRGDGRRQQRVRRRDWIRCGTVCETGAEVDAVADVCGVAVLQEDCAARHERPGSDPTRAMVGTVGIRHAGRGEGEVGEGADVRGREWGRGRGGGMRLRAGAGCVSGQNVHHPEVLFFATLSKPQANPRRVGRRGGSSEAEVESVFRGRGRVRAPGSGEAEVVRQRPGRSPSPGVGRSGVRRLLGLSLSPSPGVGRSGVRRLLGLSPSPSPGVGRSGVRRLPGLSPSPSPGSGEAEFAVFRDLARVRALGSGGAEFAVFRDLARVRALGSGGAEFAVFRDLARVRALGRAERSSPSSET

SEQ ID NO: 42832 - protein, 119 aa, Zea mays
  Coding DNA Sequence Number=SeqID_1053
  Homolog annotation: Hit_ID=Q69P89; Match level="QueryCoverage=25%, HitCoverage=5%, E-value=2e-08, Identity=90%"; Hit description =Membrane protein PTM1-like
MAGRFLLVVAVALLLRPGDASVHEYRGLSFANKGNAFILHAGSEGLYAASHANTTAEDAAAVAEALIRAKGWLRYSYSGVDAGSRVDLGSYRAGYSAARHLDGCGFCENLVILHSRVKV

SEQ ID NO: 42833 - protein, 75 aa, Zea mays
  Coding DNA Sequence Number=SeqID_1054
MAQRSDSVAQRVRVSECSAGPADQRKGRANALEPLPGGALVLAPPQQKRDQGCAQEMARWAKWSGGRPMRGCNNT

SEQ ID NO: 42834 - protein, 98 aa, Zea mays
  Coding DNA Sequence Number=SeqID_1055
  Subcellular localization annotation: CTP_CleavageSite=66; ConfidenceScore=5.11e-01
MAVIRQPDGGCTQHQCISCYAKHHPGKGASKRSQVARSSLTQATFRHASAPPLGQHSLSDLDLQASGSAAPEDSHPLPINCPHLQSTCLGILSTNLVP

SEQ ID NO: 42835 - protein, 166 aa, Zea mays
  Coding DNA Sequence Number=SeqID_1056
  Gene Ontology: Mol. function=identical protein binding; Cellular component=cell wall; Biological process=negative regulation of enzyme activity
  Homolog annotation: Hit_ID=Q6AUV9; Match level="QueryCoverage=96%, HitCoverage=23%, E-value=2e-37, Identity=47%"; Hit description =Subtilase family protein
MAAPHITGVVALLKAAHPDWSPAAIKSAMLTTADRLDNGGQPILDEQHAEATSFAMGAGHVNVSRATDPAGAGKALKTITSPSSTCSEVGSIPESWLNYPTITVPLKDTPVTVPRTLTNVGPAKTYGANVQGPSSMDIWVSPDYLVFSEPGEKKTFNVTVTVVGTH

SEQ ID NO: 42836 - protein, 75 aa, Zea mays
  Coding DNA Sequence Number=SeqID_1057
  Gene Ontology: Cellular component=phragmoplast
  Homolog annotation: Hit_ID=Q6ZJ66; Match level="QueryCoverage=84%, HitCoverage=13%, E-value=4e-18, Identity=75%"; Hit description =Putative microtubule-associated protein
MAGTLKEQLNSITPALQEMQMRKDARVKQFVEVQTEIHRIASEIVGRLAGGAVAVNEEDLRTTKPLVVPVYHHRP

SEQ ID NO: 42837 - protein, 91 aa, Zea mays
  Coding DNA Sequence Number=SeqID_1058
MAEERQPPRGRAPPTTARRRIASSPEVGLGATVGTLRQGYPLLLYQGAVPVRLPLSRTKLAEKLSAWQSAASFGGQKLQKAETNTTIDHLI

SEQ ID NO: 42838 - protein, 127 aa, Zea mays
  Coding DNA Sequence Number=SeqID_1059
MWRGRRPIKRGEAVALEWSGVGRRKASEANGNENGNGRTNGGEGVAAASLGATTPRVPCSPCRACACPCGGGARRTVNNHESIRLMTMSAGGQGRIEAELYGARVMDGSRSTGATDRRWGSGTRLPA

SEQ ID NO: 42839 - protein, 59 aa, Zea mays
  Coding DNA Sequence Number=SeqID_1060
MSLCRAGLLVSQLQTLPVVVSAGFADHAEHLGAVVGSPDFPAARLRLTLATKADDFPTS

SEQ ID NO: 42840 - protein, 86 aa, Zea mays
  Coding DNA Sequence Number=SeqID_1061
MGSKPAGDAAEGEEWKSISGERHRQRGASRLVGNCGGDVMRMAIRGLIPRRGGLGQSFLKSCVAAEISVMAVAEARDDTRVPAAAA

SEQ ID NO: 42841 - protein, 101 aa, Zea mays
  Coding DNA Sequence Number=SeqID_1062
MAQEMTMLLVPQTLMLSNEKERLTKTSTSGFQRYVACLKQLHHSRTKEKHLHQELQYKTMKEMCFWTQAPPAMEARFWELRIAFGNYPSSSRLLLELPPTV

SEQ ID NO: 42842 - protein, 140 aa, Zea mays
  Coding DNA Sequence Number=SeqID_1063
  Gene Ontology: Cellular component=mitochondrion
  Homolog annotation: Hit_ID=Q1S1U3; Match level="QueryCoverage=70%, HitCoverage=15%, E-value=2e-12, Identity=44%"; Hit description=Trp repressor/replication initiator
MDMSRMETLYHADKEKTEALILELVVWLHHLISKSGNTSGGVRSPIKSPVSSPTQKGAAMTMLSGKTNNLPPILTQEDQDMLRGVKYRKFVLEISKSQEFDTKSSHSKQSRLSKSNSHSPASGSRKDLFPALNFTKAKIL

SEQ ID NO: 42843 - protein, 359 aa, Zea mays
  Coding DNA Sequence Number=SeqID_1064
  Gene Ontology: Mol. function=isomerase activity; Cellular component =periplasmic space; Biological process=carbohydrate metabolic process
  Homolog annotation: Hit_ID=Q33AZ5; Match level="QueryCoverage=99%, HitCoverage=91%, E-value=1e-163, Identity=78%"; Hit description =Aldose 1-epimerase family protein, expressed
  Pfam annotation: Domain name=Aldose_epim; Domain location=6-355; Score=404.2; E_value=1.9e-118; Accession=PF01263.10; Description =Aldose 1-epimerase
MAAEPKILELSNGKITARISNWGATITSLLVPDAQGPHRSLFSLFRLLWVTSWLLRFPGSVADVVLGFDGLDPYVKGMSPYFGCIVGRVANRIKDGKFTLNGLEYSLPVNNGPNSLHGGLKGFDKVVWDVVEHKDGECPSITFQYHSKDGEEGYPGDVTIRATYSLPEATTLRLDMEATPENKATPISLAQHTYWNLAGHACGDILNHSLQIWGKHITPVDENTIPTGEIMPVDGTPFDFTTERRIGERIDGVPGGYDHNYVLDCGDEKDGLKRAARLKDPSSLRTLDLWTDAPGMQLYTANYVDGIGGKAGAVYAKHAGVCLETQGFPNAINQPEFPSVVVRPGEKYKHTMLFEFSGC

SEQ ID NO: 42844 - protein, 349 aa, Zea mays
  Coding DNA Sequence Number=SeqID_1065
  Subcellular localization annotation: CTP_CleavageSite=47; ConfidenceScore=5.21e-01
QTTPAPWTWDWETATYSEAGKTTTSENFQQQRSSSSLTPLPLLPPLSQSQRKSLQFSFSSKTQAPARGTIPNHKAPAMAAAGAAMRLRLLYRMLRVGELLALVAFLSWSSSRVPSAAAAALRLAGSLLLNARFVFVLGNAIVLLLLALSRRERDLSSSSSSFSSASGGQQTSTTAGTPPPQDAASAVFPSSFSDAPTAPPAPSTSLEAFSAPPPAPASDDRPGSPAAARASKLARAAPRRSRSEKMAAGPRLLQVRRAASPPAAPELRRTESENGRRRRSSVSARACRWGADDADEFRRTVEAFIDKHKRFHRQESMTLAVVAGTGSGSGSGGHCEAAPAFTGALAVVE

SEQ ID NO: 42845 - protein, 119 aa, Zea mays
  Coding DNA Sequence Number=SeqID_1066
  Homolog annotation: Hit_ID=Q3BCU1; Match level="QueryCoverage=26%, HitCoverage=5%, E-value=2e-10, Identity=100%"; Hit description =Cohesion protein
MGYGVVVYGCDRGLKVFSTCARSSFYVKFKKKTVWKLKSPRNLYIFPKVNNLMDTIGFLFPGSSPLSSKLALIEEGDALVFRSWLCPVLATCDYIKVTQLERKGDELYGDILISRGLKM

SEQ ID NO: 42846 - protein, 165 aa, Zea mays
  Coding DNA Sequence Number=SeqID_1067
  Gene Ontology: Mol. function=identical protein binding; Cellular component=cell wall; Biological process=negative regulation of enzyme activity
  Homolog annotation: Hit_ID=Q6AUV9; Match level="QueryCoverage=96%, HitCoverage=23%, E-value=5e-38, Identity=48%"; Hit description =Subtilase family protein
MAAPHITGVVALLKAAHPDWSPAAIKSAMLTTADRLDNGGQPILDEQHAEATSFAMGAGHVNVSRATDPAGAGALKTITSPSSTCSEVGSIPESWLNYPTITVPLKDTPVTVPRTLTNVGPAKTYGANVQGPSSMDIWVSPDYLVFSEPGEKKTFNVTVTVVGTH

SEQ ID NO: 42847 - protein, 189 aa, Zea mays
  Coding DNA Sequence Number=SeqID_1068
  Gene Ontology: Cellular component=integral to membrane; Biological process=protein insertion into membrane
  Homolog annotation: Hit_ID=Q9FYL3; Match level="QueryCoverage=40%, HitCoverage=7%, E-value=9e-10, Identity=43%"; Hit description =Protein ARTEMIS, chloroplast precursor
MVEGGNCLSPTMRRAVAAQGPLRLTNNILSTAQQVWLQKLGGAKNPVKEYIDKLSREESTNVQKNGSTVQSKPLPKLSKAQPSQELKPTGPQRGERKIKIFRKLKEEESRRKEVLGQAEQSEQSSFESSVVDGAQISDASSGDKNDEQEPHEIGPIVANSNGGVNHSRNEKTENFSSEKEAADDHSSVM

SEQ ID NO: 42848 - protein, 51 aa, Zea mays
  Coding DNA Sequence Number=SeqID_1069
MANGGSVLYIREHDEHGGGVRRPTTPTGHARARGWRVRLMRCLNVLDLLVS

SEQ ID NO: 42849 - protein, 111 aa, Zea mays
  Coding DNA Sequence Number=SeqID_1070
  Gene Ontology: Mol. function=glucose-1-phosphate adenylyltransferase activity; Cellular component=chloroplast; Biological process =glycogen biosynthetic process
  Homolog annotation: Hit_ID=P55234; Match level="QueryCoverage=57%, HitCoverage=12%, E-value=2e-23, Identity=86%"; Hit description =Glucose-1-phosphate adenylyltransferase large subunit 2, chloroplast precursor
MRINCCSIWRNKALRRMCFSERGAVSSTQCVLTSDAGPDTLVVRTSFQRNYADPNEVTAVILGGAGEDDRGRKSQQEGHKEHQQHKLTLPTVSNYTIHDATDGTDNGKQEG

SEQ ID NO: 42850 - protein, 95 aa, Zea mays
  Coding DNA Sequence Number=SeqID_1071
  Subcellular localization annotation: CTP_CleavageSite=83; ConfidenceScore=5.41e-01
MSGAHRTVQCPLPTVGPATCPALIARPTVGPGRPLAHRTVRCTPDSPVCFTYAVQQCASPRGKLRTTTTIALGTIISDYFFLRLELVPVRHPTSQ

SEQ ID NO: 42851 - protein, 266 aa, Zea mays
  Coding DNA Sequence Number=SeqID_1072
  Homolog annotation: Hit_ID=Q6K5Q1; Match level="QueryCoverage=34%, HitCoverage=13%, E-value=2e-12, Identity=43%"; Hit description =Putative peptidylprolyl isomerase
MLSRVPPSIIGSAHKNMDTKLTGPWSYEREGVNQGPHRKGTCYGQRHRRAQRRMTRSTEETHAVISKCNVADHFHLFIKPGYKAIQFLGFLHICISLLPHSCARDAKLYGNMISKLSRLEDTEDNGQMSQTVNKKRGLLWPLSEMVRRFFTADGSKGSTLWPALRLLIPIIALVAVCVGYYMHNSVEEIDCTNCECLSLYRSDEYYTYLLADEWRTGLKALGADSISKLKKAFPELVQEVWLVSIVNYNAPKQSDQDDCYFCDFSQ

SEQ ID NO: 42852 - protein, 187 aa, Zea mays
  Coding DNA Sequence Number=SeqID_1073
  Gene Ontology: Cellular component=integral to membrane; Biological process=protein insertion into membrane
  Homolog annotation: Hit_ID=Q9FYL3; Match level="QueryCoverage=40%, HitCoverage=7%, E-value=9e-10, Identity=43%"; Hit description =Protein ARTEMIS, chloroplast precursor
MVEGGNCLSPTMRRAVAAQGPLRLTNNILSTAQQVWLQKLGGAKNPVKEYIDKLSREESTNVQKNGSTVQSKPLPKLSKAQPSQELKPTGPQRGERKIKIFRKLKEEESRRKEVLGQAEQSEQSSFESSVVDGAQISDASSGDKNDEQEPHEIGPIVANSNGGVNHSRNEKTENFSSEKEAADDHSS

SEQ ID NO: 42853 - protein, 112 aa, Zea mays
  Coding DNA Sequence Number=SeqID_1074
  Subcellular localization annotation: CTP_CleavageSite=64; ConfidenceScore=5.36e-01
MAAPSHLHLPGCPQTLALPLPWPRGFSAPPGLLSRSRRLRPVAALGPADAGDLLGRVEALLYTVADAAVSAEPVAAAGTKEAAAGDWLSSITNSMETVLKVLLCFLNVLRNI

SEQ ID NO: 42854 - protein, 71 aa, Zea mays
  Coding DNA Sequence Number=SeqID_1075
  Gene Ontology: Mol. function=glucose-1-phosphate adenylyltransferase activity; Cellular component=chloroplast; Biological process =glycogen biosynthetic process
  Homolog annotation: Hit_ID=P55234; Match level="QueryCoverage=94%, HitCoverage=14%, E-value=7e-27, Identity=82%"; Hit description =Glucose-1-phosphate adenylyltransferase large subunit 2, chloroplast precursor
MRINCCSIWRNKALRRMCFSERGAVSSTQCVLTSDAGPDTLRNYADPNEVTAVILGGGTETQLLPLTSAHR

SEQ ID NO: 42855 - protein, 325 aa, Zea mays
  Coding DNA Sequence Number=SeqID_1076
  Subcellular localization annotation: CTP_CleavageSite=27; ConfidenceScore=5.12e-01
MHQPSRANPALHLALTGGTRTSAVCPRVETYLGTVVWGLVVNLTGSPTLAGVSAIDRWACLVSWFSHAVSFATNPSSTATTRVESATAPLPRSRLASEPTGGTHPPGALRLRSLRRWARVSAAVRHCRSSQATAHRVRRQVKRSCTQLTSPDYKGGRSRVLPSLFVLPLIPTATVTVGKKGVIAATSIGPPPRRREFIPGYSTGWSRNQRGWHHRRVENPGGARLNRIPTVSRKNRSPVRALCLQRRSCRGPRLRCHYCRYGFSVEFHLDSRMGNCSSYGRLDHGSAASAVRRWNPAVGDPDTAARSVMGGRTVGDRLILTDGQD

SEQ ID NO: 42856 - protein, 113 aa, Zea mays
  Coding DNA Sequence Number=SeqID_1077
  Gene Ontology: Mol. function=hydrolase activity; Biological process =metabolic process
  Homolog annotation: Hit_ID=Q10NU5; Match level="QueryCoverage=99%, HitCoverage=30%, E-value=6e-24, Identity=55%"; Hit description =Expressed protein
MGALHVVGELRISFRQQPTSVVAKNSGHDAVIEEIHGLIRVYKDGQVERFPLILVVPCTWGGTAPDAPGVVVARDVVVDPATGVWARLYAPTVTSAGDKARRPVVVYFHGGGF

SEQ ID NO: 42857 - protein, 73 aa, Zea mays
  Coding DNA Sequence Number=SeqID_1078
MDVVSYRYAGPISLFNSSTVYDYTIHTHNNASAAVIYRTTVYHDCDARAPTFVDLLYERPTVKAALQQQQQQQ

SEQ ID NO: 42858 - protein, 871 aa, Zea mays
  Coding DNA Sequence Number=SeqID_1079
  Gene Ontology: Mol. function=transcription factor activity; Cellular component=endoplasmic reticulum; Biological process=regulation of transcription, DNA-dependent
  Homolog annotation: Hit_ID=Q6YUW7; Match level="QueryCoverage=74%, HitCoverage=82%, E-value=0.0, Identity=74%"; Hit description =Chromosome structural maintenance protein-like
  Pfam annotation: Domain name=RINT1_TIP1; Domain location=165-655; Score=336.6; E_value=4.3e-98; Accession=PF04437.4; Description=RINT -1  TIP-1 family
MALKLDSLVGDIEDAVSSSVTGKLKSRVDNSEETHHVAIGYLKSIEDLLASVAVTRPQWTRLLSSVDHRVDRSLAILRPQAIVDHRSLLSSLGWPPSLAGSKFSSINSGKQAEIVNPLFVMRGDLKSKYSESFLALCNLQGLQKRRKARQLKGHCVGNQLRQPLWVIEELVNPISTAAQRHFSKWAEKPEFVFALAYKIIRDFVDSMDEILQPLVDKANLIGYSCREEWISGMVIALSTYLAKEIFPKQIEVLQESSSSSDSGSTAYQARVSWLSLVDLMISFDKRIQDLILSAGLLLTVKDDDSWQRISVLCVFCDRPDWLQVWAEIERQESLNKLRSAMDLEKNWSTGIRGTMLEYSDDYKAPVITSVVHHTLSLLIDRARPIPSITLRAEFISMSAAPIISEFLGYMLRRCQEAEGLTALADDNAVLKVSQSINAARYFESTLAEWCEDVFFLEMENLTVNGESGCIFQQEINHLKEFRVEWTDKISTVILRGFDARSRDYLKNKRQWLEKSDGPAVSRTFIESLDYMQEQLSKLQGGLNTVDFVTVWRGVASGVDQLLFAGIFTSGTKVSSDGVERLQGDLSVLFAIFSAWCLRPEGFFPRLSEGLRLLKIDEQQLREGAFKDKNWLREHGIRHLAAADTERIIKNRVLFLLYIHLRSWRIGWCNKSSEYTLAPHSHRNVPFDPDCKHLSLPNTKATHGDGWRRCQSAPTPTGALMRQGAQQLLAANLGPERFREGALIRRARVPPGPEPPPDNAVCHSPNPGPRARGGLTIGKRWTERDRRRRLGRRYERSIDPAAAAAAAERVVVCTALQPQAGAPRGTMHSSRGTTNMWLHVSLLVVPSTEEWSMVKIMKVIRVHADRLEVMND

SEQ ID NO: 42859 - protein, 225 aa, Zea mays
  Coding DNA Sequence Number=SeqID_1080
  Gene Ontology: Mol. function=molecular_function; Cellular component =integral to membrane; Biological process=biological_process
  Homolog annotation: Hit_ID=Q6YUX5; Match level="QueryCoverage=75%, HitCoverage=89%, E-value=5e-86, Identity=87%"; Hit description =Putative ABA-responsive protein
  Pfam annotation: Domain name=TB2_DP1_HVA22; Domain location=40-139; Score=172.3; E_value=1.2e-48; Accession=PF03134.9; Description =TB2DP1, HVA22 family
MYRGTLESELFKRVNLPPRLKNLPFQPASLLSIFSNIEHQRDLLIFLLSIGTPRPLVSLAYPLYASVRAIETKSAVDDQQWLTYWVLYSFITLFELTFAPVLEWLPFWSYAKLFFNCWLVLPQFNGAAHVYEHFVRPMIVNQQVVNIWYIPKKDESSRPDDVISAAQRYIEQNGSKAFENLVNKFKSSNPRRSILEEVEVERRARIQLESEAREVNPFFNPEYQY

SEQ ID NO: 42860 - protein, 47 aa, Zea mays
  Coding DNA Sequence Number=SeqID_1081
MSGGTPDSPVAVRWRPPPRALSAVAAGPCGTPHRGRIGSSTAVRDPP

SEQ ID NO: 42861 - protein, 122 aa, Zea mays
  Coding DNA Sequence Number=SeqID_1082
  Subcellular localization annotation: CTP_CleavageSite=32; ConfidenceScore=5.04e-01
MARRKQAVMGREQKGPIAGAPAPSIPFTSQISCSPFTSQIQMLAPPPPQPAPRNAHPDSQMPALASSHLPNPDVGPASSPACSPRCPPRLPDAGPASSHLPDPDDGLASSPACSPRCPPRLP

SEQ ID NO: 42862 - protein, 649 aa, Zea mays
  Coding DNA Sequence Number=SeqID_1083
  Gene Ontology: Mol. function=transferase activity, transferring glycosyl groups; Cellular component=integral to membrane
  Homolog annotation: Hit_ID=Q8H038; Match level="QueryCoverage=90%, HitCoverage=98%, E-value=0.0, Identity=72%"; Hit description =Xyloglucan galactosyltransferase KATAMARI1 homolog
  Pfam annotation: Domain name=Exostosin; Domain location=201-549; Score=533.6; E_value=2.1e-157; Accession=PF03016.6; Description =Exostosin family
MTPQISETINAMGLHGDSGGTGHDGGWGEEDGRVEAVELPVSVRRGPGRSSMRRRPVLPAHHDDVDKGGGKPASSRLCFLATLCAMFWVLIFYFHFAVVSNDPAASAAQGAEARIAGAHTRIPERDGASRVDVPLAFASEPPPPPPPPPPPPAARPKEAEDEVAAGVRREEAPPEVAAPYPFERALRTAENQSDPCGGRYIYVHDLPPRFNEDMLRDCEKLSVWTNMCRFMSNDGLGPPLGNEEGVFSDTGWYGTNQFSVDVIFGNRMKQYECLTKDSSVAAAVFVPFYAGFDVARYLWGYNITTRDAASLDLVEWLMNKPEWSVMGGRDHFLVAGRITWDFRRLTEEEADWGSKLLFLPAAKNMSMLVVESSPWNSNDFGIPYPTYFHPAKDAEVFLWQDRMRSLERPWLFSFAGAPRPGDPMSIRGQLIDQCRSSSLCKLLECDLGESKCHSPSTIMKMFQSSMFCLQPQGDSYTRRSAFDSMLAGCVPVFFHPGSAYVQYTWHLPKNYTTYSVFIPEDDIRSGNASIEERLKSIHPDVVKQMREEVINLIPKVIYADPRSKLETLKDAFDVSIEAIINKVTKLRRDIIAGQEDKDFIEENSWKYSLLDDGQQAIGPHKWDPFFSKPKDKGGDSSGSSAEAAKNSWK

SEQ ID NO: 42863 - protein, 1040 aa, Zea mays
  Coding DNA Sequence Number=SeqID_1084
  Gene Ontology: Mol. function=protein serine/threonine kinase activity; Cellular component=integral to membrane; Biological process=protein amino acid phosphorylation
  Homolog annotation: Hit_ID=Q6Z8Y3; Match level="QueryCoverage=95%, HitCoverage=95%, E-value=0.0, Identity=57%"; Hit description =Putative CLAVATA1 receptor kinase
  Pfam annotation: Domain name=LRRNT_2; Domain location=34-75; Score =49.8; E_value=9.1e-12; Accession=PF08263.3; Description=Leucine rich repeat N-terminal domain
  Pfam annotation: Domain name=LRR_1; Domain location=103-122; Score =2.5; E_value=96; Accession=PF00560.23; Description=Leucine Rich Repeat
  Pfam annotation: Domain name=LRR_1; Domain location=127-149; Score =16.0; E_value=0.14; Accession=PF00560.23; Description=Leucine Rich Repeat
  Pfam annotation: Domain name=LRR_1; Domain location=151-173; Score =11.4; E_value=2.1; Accession=PF00560.23; Description=Leucine Rich Repeat
  Pfam annotation: Domain name=LRR_1; Domain location=175-197; Score =7.2; E_value=13; Accession=PF00560.23; Description=Leucine Rich Repeat
  Pfam annotation: Domain name=LRR_1; Domain location=199-221; Score =11.6; E_value=1.9; Accession=PF00560.23; Description=Leucine Rich Repeat
  Pfam annotation: Domain name=LRR_1; Domain location=223-245; Score =11.0; E_value=2.5; Accession=PF00560.23; Description=Leucine Rich Repeat
  Pfam annotation: Domain name=LRR_1; Domain location=247-269; Score =11.5; E_value=2; Accession=PF00560.23; Description=Leucine Rich Repeat
  Pfam annotation: Domain name=LRR_1; Domain location=271-293; Score =7.8; E_value=10; Accession=PF00560.23; Description=Leucine Rich Repeat
  Pfam annotation: Domain name=LRR_1; Domain location=295-317; Score =16.8; E_value=0.08; Accession=PF00560.23; Description=Leucine Rich Repeat
  Pfam annotation: Domain name=LRR_1; Domain location=319-341; Score =11.0; E_value=2.5; Accession=PF00560.23; Description=Leucine Rich Repeat
  Pfam annotation: Domain name=LRR_1; Domain location=343-365; Score =15.3; E_value=0.22; Accession=PF00560.23; Description=Leucine Rich Repeat
  Pfam annotation: Domain name=LRR_1; Domain location=367-389; Score =6.8; E_value=15; Accession=PF00560.23; Description=Leucine Rich Repeat
  Pfam annotation: Domain name=LRR_1; Domain location=391-413; Score =12.8; E_value=1.2; Accession=PF00560.23; Description=Leucine Rich Repeat
  Pfam annotation: Domain name=LRR_1; Domain location=415-437; Score =8.6; E_value=6.9; Accession=PF00560.23; Description=Leucine Rich Repeat
  Pfam annotation: Domain name=LRR_1; Domain location=439-461; Score =14.0; E_value=0.55; Accession=PF00560.23; Description=Leucine Rich Repeat
  Pfam annotation: Domain name=LRR_1; Domain location=463-485; Score =8.0; E_value=9; Accession=PF00560.23; Description=Leucine Rich Repeat
  Pfam annotation: Domain name=LRR_1; Domain location=487-509; Score =2.2; E_value=1.1e+02; Accession=PF00560.23; Description=Leucine Rich Repeat
  Pfam annotation: Domain name=LRR_1; Domain location=511-533; Score =15.3; E_value=0.22; Accession=PF00560.23; Description=Leucine Rich Repeat
  Pfam annotation: Domain name=LRR_1; Domain location=535-557; Score =11.9; E_value=1.7; Accession=PF00560.23; Description=Leucine Rich Repeat
  Pfam annotation: Domain name=LRR_1; Domain location=559-581; Score =14.4; E_value=0.43; Accession=PF00560.23; Description=Leucine Rich Repeat
  Pfam annotation: Domain name=LRR_1; Domain location=583-606; Score =9.6; E_value=4.5; Accession=PF00560.23; Description=Leucine Rich Repeat
  Pfam annotation: Domain name=LRR_1; Domain location=79-101; Score =5.5; E_value=27; Accession=PF00560.23; Description=Leucine Rich Repeat
  Pfam annotation: Domain name=Pkinase; Domain location=718-1005; Score= 130.0; E_value=6.7e-36; Accession=PF00069.15; Description=Protein kinase domain
  Pfam annotation: Domain name=Pkinase_Tyr; Domain location=718-1005; Score=76.1; E_value=1.1e-19; Accession=PF07714.7; Description =Protein tyrosine kinase
  Pfam module annotation: Pfam domain module=LRRNT_2::LRR_1::LRR_1::LRR_ 1::LRR_1::LRR_1::LRR_1::LRR_1::LRR_1::LRR_1::LRR_1::LRR_1::LRR_1: LRR_
  Pfam module annotation: Pfam domain module=Pkinase_Tyr; Domain location=34-75::103-122::127-149::151-173::175-197::199-221::223 -245::247-269::271-293::295-317::319-341::343-365::367-389::391 -413::415-437::439-461::...
  Pfam module annotation: Domain location=463-485::487-509::511 -533::535-557::559-581::583-606::79-101::718-1005::718-1005
MTSATPRLGSTPHLFFPFSFSLAFLCCIAVCNAAGDEAAALLAVKASLVDPLGKLGGWNSASASSRCSWDGVRCNARGVVTGLNLAGMNLSGTIPDDILGLTGLTSIILQSNAFEHELPLVLVSIPTLQELDVSDNNFAGHFPAGLGALASLAHLNASGNNFAGPLPADIGNATALETLDFRGGYFSGTIPKSYGKLKKLRFLGLSGNNLGGAIPAELFEMSALEQLIIGSNEFTGTIPAAIGNLANLQYLDLAIGKLEGPIPPEFGRLSYLNTVYLYKNNIGGPIPKEIGNLTSLVMLDISDNTLTGTIPVELGQLANLQLLNLMCNRLKGGIPAAIGDLPKLEVLELWNNSLTGPLPPSLGSTQPLQWLDVSTNALSGPVPAGLCDSGNLTKLILFNNVFTGPIPAGLTTCASLVRVRAHNNRLNGTVPAGLGGLPRLQRLELAGNELSGEIPDDLALSTSLSFIDFSHNQLRSALPSNILSIRTLQTFAAADNELTGGVPDEIGECPSLSALDLSSNRLSGAIPASLASCERLVSLNLRSNRFTGQIPGAIAMMSTLSVLDLSSNFFSGVIPSNFGGSPALEMLNLAYNNLTGPVPTTGLLRTINPDDLAGNPGLCGGVLPPCGAASSLRASSSETSGLRRSHMKHIAAGWAIGISVLIASCGIVFLGKQVYQRWYANGVCCDEAVEEGGSGAWPWRLTTFQRLSFTSAEVLACIKEDNIVGMGGTGVVYRADMPRHHAVVAVKKLWRAAGCLEEVATVDERQDVEAGGEFAAEVKLLGRLRHRNVVRMLGYVSNNLDTMVLYEYMVNGSLWEALHGRGKGKMLLDWVSRYNVAAGVAAGLAYLHHDCRPPVIHRDVKSSNVLLDTNMDAKIADFGLARVMARAHETVSVFAGSYGYIAPEYGSTLKVDLKGDIYSFGVVLMELLTGRRPVEPDYSEGQDIVGWIRERLRSNSGVDELLDASVGGRVDHVREEMLLVLRIAVLCTAKSPKDRPTMRDVVTMLGEAKPRRKSSSATVPATIVDKDKPVFTTSPDSSYL

SEQ ID NO: 42864 - protein, 121 aa, Zea mays
  Coding DNA Sequence Number=SeqID_1085
MRGHIASAGAARGPIASAYVIGCPIASAPTACGPVASTRVYQRLDPSVPYDGGPHLAPTRSHDESSVYQPGAIHATKSDTSSFILQCGDDDVYLLYVETSCSRRPVSPSSSARSPPCSTSS

SEQ ID NO: 42865 - protein, 228 aa, Zea mays
  Coding DNA Sequence Number=SeqID_1086
  Homolog annotation: Hit_ID=Q5ZD36; Match level="QueryCoverage=99%, HitCoverage=12%, E-value=5e-39, Identity=63%"; Hit description=Zinc finger-like
REARKAFSWVPRDSGTKTPPKDILRKRKSSGSGGDRSSWEAMPGLQEERTPVYPSEAQERLPFVSAPDEWVLTGDPDKDDATRSSHKYETSPDITLFKALSYAKNLFKKLVGSSDLSSGSERSKEVDDVSVDTGSSSTGSQYLDELSDFLTQADMWLGRAELLQSLLGSGIIASLDDIADKESSSRLRDRLVNDERYSMAIDAVPVWVAWGHALVRMEHYAQARVKFK

SEQ ID NO: 42866 - protein, 49 aa, Zea mays
  Coding DNA Sequence Number=SeqID_1087
MGLLTRPRCEWPRYGTDGLGGKAIKKITRSALPFWGRCRDMTFEEECHG

SEQ ID NO: 42867 - protein, 383 aa, Zea mays
  Coding DNA Sequence Number=SeqID_1088
  Homolog annotation: Hit_ID=Q5ZD36; Match level="QueryCoverage=76%, HitCoverage=12%, E-value=1e-115, Identity=72%"; Hit description=Zinc finger-like
MALIEEDACWCSGNDMWVERLVGYVAMSSRTFVVASVVGDGVINNICSDSSSPAISYTRLIGSEILLWLRKLYGLISEGKLSDALAVSDRCLRNGASDNLLQLLIEQKEEKGPGTGQIHPYGSHSLGNDTSQYCLRLRDKKVAAQLALKYLHSWDLDAATNVLTMCMCHLPENDPMRSEVLHMKQSLQRYGHIMSADEHYTRWQEVEADCEDDPEGLALRLAAKGAVSAALEVAESASLSIDLRRELQGRQLVKLLITDPLNGGGPAAASRFLSTLRDSNDALPVAIGAMNLLPDLRSKQLLVHFFLKRTVGNLSDAEIARLNLWALGLRVLSLLPLPSQQRCSSLHEHPQLIVEVLLMMKQLQSASLVYQLDYSYCVCPHLY

SEQ ID NO: 42868 - protein, 66 aa, Zea mays
  Coding DNA Sequence Number=SeqID_1089
MAGVRRAMEERWWQAGGQWHGGSSHFTWKLGQLIFFCVQVQLFTLHDAVNSIHDSFSFTFDLAADS

SEQ ID NO: 42869 - protein, 536 aa, Zea mays
  Coding DNA Sequence Number=SeqID_1090
  Gene Ontology: Mol. function=binding; Cellular component=nucleus; Biological process=protein amino acid phosphorylation
  Homolog annotation: Hit_ID=Q2QTL4; Match level="QueryCoverage=93%, HitCoverage=86%, E-value=9e-59, Identity=27%"; Hit description =Pentatricopeptide, putative, expressed
  Pfam annotation: Domain name=PPR; Domain location=117-151; Score =18.5; E_value=0.025; Accession=PF01535.11; Description=PPR repeat
  Pfam annotation: Domain name=PPR; Domain location=193-227; Score =24.4; E_value=0.00041; Accession=PF01535.11; Description=PPR repeat
  Pfam annotation: Domain name=PPR; Domain location=255-289; Score =16.9; E_value=0.072; Accession=PF01535.11; Description=PPR repeat
  Pfam annotation: Domain name=PPR; Domain location=363-396; Score=8.3; E_value=0.77; Accession=PF01535.11; Description=PPR repeat
  Pfam annotation: Domain name=PPR; Domain location=397-431; Score=8.0; E_value=0.84; Accession=PF01535.11; Description=PPR repeat
  Pfam annotation: Domain name=PPR; Domain location=433-467; Score=7.5; E_value=0.98; Accession=PF01535.11; Description=PPR repeat
  Pfam annotation: Domain name=PPR; Domain location=51-85; Score=15.9; E_value=0.098; Accession=PF01535.11; Description=PPR repeat
  Pfam module annotation: Pfam domain module=PPR::PPR::PPR::PPR::PPR::PP R::PPR; Domain location=117-151::193-227::255-289::363-396::397 -431::433-467::51-85
MASWKLAKAVQDPPRLSRLARRTIEVTEAGRGGQAERALEMFEAMPVKSQVSWNAALAALVDAGRTDWALSFFRKMPRRNATSYATMIGGLSRAGGAAAAEARLLFEELTLDQHNVFTWTAMVSCHVRNGEPGKAVELFVALYAEFFARGVLPNAHTFSSLLKACVGVQSPAMLLQLHGVIFKLLDEGSRSCFVWNALVDAHAKLGALSDAEKVFHGMRQRDICSWNIMMDGYSRHKLVDRALDLFRSMREKDTSTWNIIICCLGENRLGEDALRLFIDLVRSYGHCGGDAEVNASIYTTVLHICSVLALLAFGRQVHARAVKDGFGRSNVFVSNSLISMYSSCGATLDLEQVLEEMAVRDVVSWNSAIQGLGQNGLGRQALAAGERALELGMYNGNTFIAILTSCSHAGMVVEGLSYFDAMAKKHGVEPTLDHYISVIDLLGRAGRLQDAYDLLRKMPFAPDAVAWRTLLHSCLAHKNTAVGSIAVQELMALQPDGGARNYERLVQGCGGSSTADETQAGNEKSADHTPGCSWVT

SEQ ID NO: 42870 - protein, 240 aa, Zea mays
  Coding DNA Sequence Number=SeqID_1091
  Homolog annotation: Hit_ID=Q5ZC72; Match level="QueryCoverage=77%, HitCoverage=34%, E-value=2e-51, Identity=59%"; Hit description=Light stress-responsive one-helix protein-like
MDRAELWTHLWPGYNRQHNRFIVGLQQQKTGFENVEMLLAVEGGGFFSSSASGYSHGLALLLLGRKAEEKPVKASPWNQYRLVDREAEQVYHLPSAKDQAPGKCAPFVCFGCTANGLEVASPSKAVSSNALGRGTSQEEASCSAHKALTTSASISGSERRGCLKSNSKRDSLEHRIVVSEGEEPRESVEEVQTLRSSIERRKVQWTDTCGKELFEIREFETSLQSPPKSLRAPLDQDNLI

SEQ ID NO: 42871 - protein, 961 aa, Zea mays
  Coding DNA Sequence Number=SeqID_1092
  Gene Ontology: Mol. function=hydrolase activity; Cellular component =intracellular; Biological process=metabolic process
  Homolog annotation: Hit_ID=Q8S263; Match level="QueryCoverage=88%, HitCoverage=86%, E-value=0.0, Identity=71%"; Hit description =Putative pentatricopeptide (PPR) repeat-containing protein
  Pfam annotation: Domain name=PPR; Domain location=128-161; Score =19.5; E_value=0.012; Accession=PF01535.11; Description=PPR repeat
  Pfam annotation: Domain name=PPR; Domain location=236-270; Score =24.7; E_value=0.00034; Accession=PF01535.11; Description=PPR repeat
  Pfam annotation: Domain name=PPR; Domain location=311-344; Score=9.4; E_value=0.58; Accession=PF01535.11; Description=PPR repeat
  Pfam annotation: Domain name=PPR; Domain location=416-449; Score=3.5; E_value=2.9; Accession=PF01535.11; Description=PPR repeat
  Pfam annotation: Domain name=PPR; Domain location=484-517; Score=0.7; E_value=6.1; Accession=PF01535.11; Description=PPR repeat
  Pfam annotation: Domain name=PPR; Domain location=618-652; Score =31.8; E_value=2.4e-06; Accession=PF01535.11; Description=PPR repeat
  Pfam annotation: Domain name=PPR; Domain location=653-687; Score=1.2; E_value=5.4; Accession=PF01535.11; Description=PPR repeat
  Pfam annotation: Domain name=PPR; Domain location=719-753; Score =50.0; E_value=7.8e-12; Accession=PF01535.11; Description=PPR repeat
  Pfam annotation: Domain name=PPR; Domain location=754-788; Score =30.0; E_value=8.1e-06; Accession=PF01535.11; Description=PPR repeat
  Pfam annotation: Domain name=PPR; Domain location=789-823; Score=9.9; E_value=0.5; Accession=PF01535.11; Description=PPR repeat
  Pfam module annotation: Pfam domain module=PPR::PPR::PPR::PPR::PPR::PP R::PPR::PPR::PPR::PPR; Domain location=128-161::236-270::311-344::416- 449::484-517::618-652::653-687::719-753::754-788::789-823
  Subcellular localization annotation: CTP_CleavageSite=16; ConfidenceScore=5.43e-01
MHRKVRVPPLPHLTLRCASSSSAAASVSPPPPRRLPPPVPLCDLLAHRLGPPRSPLSPPPPRPHADLLPLLRRGGDANSPENLHVELIKRGLNHDLFLCNHLVNSYAKGARLAAASQVFDEMPERNAVSWTCLVSGYVLHGIAEEAFRVFRAMLREVQAGCRPTSFTFGTLLRACQDGGPDRLGFAVQVHGLVSKTEYASNTTVCNALISMYGSCTVGPPILAQRVFDGTPIRDLITWNALMSVYAKKGDVASTFTLFKDMQRGDSRIQLRPTEHTFGSLITAASLSSGSSAVLDQVLVWVLKSGCSSDLYVGSALVSAFARHGLTDEAKDIFLSLKQKNAVTLNGLIVGLVRQDFSEEAVKIFVGTRNTVDVNADTYVVLLSALAEYSISEEGLRIGRVVHGHMLRTGLTDLKIAVSNGLVNMYAKCGAIESASKIFQLMEATDRISWNTIISALDQNGLKLLTAGQQVHCDAVKWGLDLDTSVSNVLVKMYGECGAMSDYWKVFNSMAEHDEVSWNTMMGVMASSQTPISEIVKVFNNMMRGGLIPNKVTFINLLAALSPLSVLELGKQVHAAVMKHGVMEDNVVDNALISCYAKSGDMGSCEHLFTNMSDRRDAISWNSMISGYIYNGNLQEAMDCVWLMIHSGQIMDCCTFSIILNACASVAALERGMELHAFGIRSHLESDVVVESALVDMYSKCGRVDYASKLFNSMTQRNEFSWNSMISGYARHGLGRKAIEIFEEMLRSRESPDHVTFVSVLSACSHAGLVERGLEYFEMMPDHGILPQIEHYSCVIDLLGRAGKIDKIKEYIQRMPIEPNALIWRTVLVACRQSKDGSNIDLGREASRVLLEIEPQNPVNYVLASNFHAATGMWEDTAKARTAMRQATEKKEAGRSWNIRNAGYVPLTEYALYDLEEENKEELLSYHTPVPNISGHTTLPDASLDMLVSLLADAWNFEVFGS

SEQ ID NO: 42872 - protein, 262 aa, Zea mays
  Coding DNA Sequence Number=SeqID_1093
MAAVAPTPSVSVISLLDSPASDRGEGVADADEAGPSMRPEVLVLEHTVLFLDDEVSWRRPLPSPSFVVSVASRTRYGARGACLIGQMSSLPRRASRQQISKRCARNLGTRPQRHSGRSLTEDLKDQQSEAQGLRNLVGELERDLDVSIETSQTLSQTVDEKIVALNALSEAVADFCQTFDAEDIPSGGSLPGYLLMRFGHTIKVPCVPVEEPTKSQVFSNLNPPFIDHKDLSEITQTAQRAGNTNFLRLSTRLKTLKRLLAV

SEQ ID NO: 42873 - protein, 87 aa, Zea mays
  Coding DNA Sequence Number=SeqID_1094
MASAALSTDELLRRVKGTVRKADYIVPVPMRPKQGYVSLGLRGAPNRPAPGPKGRGWTDGARVGRRGEEEERGEEAGPREEGDPQCY

SEQ ID NO: 42874 - protein, 381 aa, Zea mays
  Coding DNA Sequence Number=SeqID_1095
  Gene Ontology: Mol. function=protein serine/threonine kinase activity; Cellular component=nucleus; Biological process=protein amino acid phosphorylation
  Homolog annotation: Hit_ID=P51568; Match level="QueryCoverage=85%, HitCoverage=77%, E-value=1e-123, Identity=67%"; Hit description =Serine/threonine-protein kinase AFC3
  Pfam annotation: Domain name=Pkinase; Domain location=76-365; Score =127.0; E_value=5.2e-35; Accession=PF00069.15; Description=Protein kinase domain
  Pfam annotation: Domain name=Pkinase_Tyr; Domain location=127-378; Score=-149.5; E_value=0.0027; Accession=PF07714.7; Description =Protein tyrosine kinase
  Pfam module annotation: Pfam domain module=Pkinase::Pkinase_Tyr; Domain location=76-365::127-378
  Subcellular localization annotation: CTP_CleavageSite=45; ConfidenceScore=5.54e-01
MALTESPDPSPSTGDPFCSLPCGPQPATNPRSQSRLLRPRLSPSRVARGGASPPWREDDRDGHYVFDLGENLTRRYKILSKMGEGSGFLQSVVSSSGGYPRYYSNEEGYELGFRSIRKYRDAAMIEIDVLNRLAENEKYRSLSSSITSCVQIQRWFDYRNHICIVFEKLGPSLYDFLKRNRYRPFPVELVREFGRQLLESVAYMHDLRLIHTDLKPENILLVSSEYIKVPSTKKNSQDEMHFKCLPQSSAIKLIDFGSTAFDNQDHNSIVSTRHYRAPEIILGNLVILEGLGWSFPCDIWSVGCILVELCSGEALFQTHENLEHLAMMERVLGPLPEHMIRKSSSSAQKYFRRATRLNWPEGAVSRESIRAVKKLDRLKGS

SEQ ID NO: 42875 - protein, 156 aa, Zea mays
  Coding DNA Sequence Number=SeqID_1096
  Gene Ontology: Mol. function=cysteine-type peptidase activity; Biological process=proteolysis
AVAKWHKRNTNHVNATIYGCSIVIVIYYLDHLHHEATPENKYDTSRIKYFDKETIDALTKADRRKPRHAGETTDTCYVAAPKQPANDTFHIHVPRMKDLISSKVTCLPPPYRSSFDSLLKAHDKEVDKFKNPSSEILKKNNLASLMSTSPKTCTWV

SEQ ID NO: 42876 - protein, 719 aa, Zea mays
  Coding DNA Sequence Number=SeqID_1097
  Gene Ontology: Mol. function=unfolded protein binding; Cellular component=cytosol; Biological process=cellular protein metabolic process
  Homolog annotation: Hit_ID=Q9FW88; Match level="QueryCoverage=78%, HitCoverage=97%, E-value=0.0, Identity=74%"; Hit description =Putative cytosolic chaperonin, delta-subunit
  Pfam annotation: Domain name=Cpn60_TCP1; Domain location=83-620; Score=623.1; E_value=2.4e-184; Accession=PF00118.14; Description=TCP- 1cpn60 chaperonin family
  Subcellular localization annotation: CTP_CleavageSite=47; ConfidenceScore=5.44e-01
RSVALSKSPFPFPNPRAAAYSSLQRDLSPDQALNATALANLLSLRSMAAAVAAPAPSRKTETYTDTKRRDDVRGANIAAARAVADAVRTSLGPRGMDKMIASGDQAQEVIITNDGATILSRMALLQPAARMLAELSRSQDAAAGDGTTTVVVLAGSLLRRAQSLLSAGAHPTAAADALHRLATRAVEILHAMAIPIELSDRESLVKSASTALNSKVVSQYSTLLSPLAVDAALSVVDPAHPDLLDLRDIRIVKKLGGTVDDTELIPGLIFDKKASHAAGGPTRMENAKIAVIQFQISPPKTDIEQSVIVSDYAQMDRILREERNYILGMVKKIKAAGCNVLLIQKSILRDAVTDLSLHYLAKAKILVVKDVERDEMEFITKTLNCLPIANIEHFRTDKFGYADVVEEVSVGEGKVVKITGIKDMGRTATVLVRGSNQLVIDEAERSLHDALCVISRNQNGRDAVLGVDVASCETLCDASLKYWLDETHGTNARCLVSKRFLIAGGGAPEIEMSMQLAAWAKELRGMESYCIKEFAEALEVIPYTLAENAGLNPISIVTELRNRHARGEKNTGINVRKGQITNILEENVVQPLLVSTSAITLACECVRMILKIDDIVTVRSVVASYPPTPKRANVAAPFHPATSQALTSALFISLQVLSIEAAGEDHIADLPRSSSPSLSHPFLQDKPNVNHVRARISNLHVEGASSLGFDSHDASSLRG

SEQ ID NO: 42877 - protein, 90 aa, Zea mays
  Coding DNA Sequence Number=SeqID_1098
MAGGDQSSQDSRSALSELFTCSIVYAAVICHQKFREQILVENLLVHGAIAALLPICKMKNKPVNLRKILANLRVVDDECQKKGAVDAANV

SEQ ID NO: 42878 - protein, 226 aa, Zea mays
  Coding DNA Sequence Number=SeqID_1099
  Gene Ontology: Mol. function=ATP-dependent helicase activity; Cellular component=intracellular; Biological process=RNA processing
  Homolog annotation: Hit_ID=Q2HTA7; Match level="QueryCoverage=91%, HitCoverage=12%, E-value=4e-83, Identity=70%"; Hit description =Helicase, C-terminal; Argonaute and Dicer protein, PAZ; Type III restriction enzyme, res ...
  Homolog annotation: Hit description=subunit; Ribonuclease III, bacterial
MEAAVEEAALSSSKRTKWQFMGARDAGSRDELRLVYGVSERTESDGAANLIQKLRAINYALGELGQWCAYKVALSFLTALQNDERANYQLTEGAAMKSDSNDVEMHNSENPKPNELEEGELPDSHGEHVDEVIGAAVADGKVTPRVQALIKILLKYQHTEDFRAIIFVERVVTALVLPKVFAELPSLGFIRCASLIGHNNNQEMRSCQMQDTITKFRDGRWFYAIY

SEQ ID NO: 42879 - protein, 127 aa, Zea mays
  Coding DNA Sequence Number=SeqID_1100
MVGWDGCTPLAIEASDLSLGNWIWTDGARATAAQAAAGGRRHTLYRRVRARAIARALSFWPTSYLSLRFKNSGVEKLVVAIVVCMQVLVHGAERTKTKSVAYDSSARPGTCRLDGESVQIGFAATSR

SEQ ID NO: 42880 - protein, 177 aa, Zea mays
  Coding DNA Sequence Number=SeqID_1101
  Subcellular localization annotation: CTP_CleavageSite=83; ConfidenceScore=5.08e-01
MPSSPSANAASAPVVIGHLMATIGLIEVSLQTDRVILCRRVVVAPFPSGHMMPRGTGTSTLPLLVMAKPRGRLEVSRLVVRTSGMHIVGLQAWLTVVETELVELRREVDAVNRIIWAHGVTWLQCLLDMPSHARHVANYFHRGAIIAFVVAQFYTWVDLHAPMTPPGTPFVAFEILI

SEQ ID NO: 42881 - protein, 171 aa, Zea mays
  Coding DNA Sequence Number=SeqID_1102
MSSGPRRCAATHECGCLLRDCGSGVFVYVRVGECVAWPWGEDGEEGCHGEKMERGGGWRLCECATWVPKGAVWQLFLWGRAGGAKRRWCNRPLTRARWAQCGVGERPCASGLGEGIAGPVHEHRAACWVVRVWAHEREERVWDMHRWASQEKRGAGPHVLGRPRGSGPRAG

SEQ ID NO: 42882 - protein, 466 aa, Zea mays
  Coding DNA Sequence Number=SeqID_1103
  Gene Ontology: Mol. function=transferase activity, transferring glycosyl groups; Cellular component=membrane
  Homolog annotation: Hit_ID=Q337N1; Match level="QueryCoverage=88%, HitCoverage=63%, E-value=8e-55, Identity=32%"; Hit description =Xyloglucan galactosyltransferase KATAMARI 1, putative, expressed
  Pfam annotation: Domain name=Exostosin; Domain location=43-404; Score= 235.6; E_value=1e-67; Accession=PF03016.6; Description=Exostosin family
MARRLLLLLLPIILTSSATASKNKSSSLLPLPDGPDPCSGRRIHIRWLPARFNTHLLLYCATAFPLADPDSKSTPACASLANHGLGPRTHNGTRSWYRTDARLLEPFFHRRLLERACLVARPAQADAVFLPYYAALDALPYVLHPDLLNSSALHGLPLARYLARNQPRVLARRHGHDHFFLLAGTAWDYSQPHDAEPRMYGTTSLLRLPELANFTVLTLESRTWPWQEHAIPHPTSFHPSSLPRLRSWTARARRSRRTALMLYAGGVSRPSRPNIRGAILAECANRTSSKSNNVCIVVDCSAAACALNPVAYMRPMLRANFCLQPPGDSPSRRSTFDAIVAGCVPVFFEHAAARAHYGWHLPRGRYDQFSVTIPKDSVVMGDVRITDVLAAVPADEVARMRERLLEIAPRVVYRRHGSAADLRESTKDAVDLAVEGVLRRIRRRVSALEDGHPDAIYELEDDDGAH

SEQ ID NO: 42883 - protein, 547 aa, Zea mays
  Coding DNA Sequence Number=SeqID_1104
  Gene Ontology: Mol. function=oxidoreductase activity; Cellular component=intrinsic to endoplasmic reticulum membrane; Biological process=electron transport
  Homolog annotation: Hit_ID=Q336T9; Match level="QueryCoverage=77%, HitCoverage=87%, E-value=1e-140, Identity=58%"; Hit description =Flavin-containing monooxygenase family protein, putative, expressed
  Pfam annotation: Domain name=FMO-like; Domain location=118-522; Score= -217.6; E_value=6.4e-14; Accession=PF00743.9; Description=Flavin -binding monooxygenase-like
  Pfam annotation: Domain name=Pyr_redox; Domain location=296-375; Score=-1.0; E_value=0.018; Accession=PF00070.17; Description =Pyridine nucleotide-disulphide oxidor
  Pfam module annotation: Pfam domain module=FMO-like::Pyr_redox; Domain location=118-522::296-375
MTQDVAAVVPPVTRLMLRGLLPMYGWFIIGDRAILHHCIDAENIGGRADTGLAITEWGSATAITKAILELGRGLSSVGMAMRDPGHVRQFSSLPCRLRSRSASPSSAREPRGWPPRASCGARGHVPVVFERAHAVGGTWLYDHDDRHRSSSLYASLRTNLPREVMGFLDFPFAAVPDSADARRFPRHQEVLRYIQAFARRFHLDGLIRLRTEVLAVSKDNDEGSSGGWRVRWRRNAAGDESEQEQEEVFDAVVVCNGHYTEPRTAAADIPGLDAWPPGKQMHSHSYRVPAPFADQVVVIIGASNSGADISREIAGVAREVHMADRSAPTATCHTLPGYRNLWLRSMVERADQDGTTVVFRDGSSVRADVVMHCTGYTYSFPFLPTTAAPAGDGAVVSVDDNRVHPLYKHVFVPQLAPRLAFVGLPFKVIPFPMFQIQASWVAGALSGRIQLPSEEMMEDVSALYSELETVGWPVRYTHCMKHSQFEYDEWLAEQCGGGHAGRVEEWRKDMFDAAKRKKVQCPETYRDEWDDHHLLERAYQDFNNYSS

SEQ ID NO: 42884 - protein, 239 aa, Zea mays
  Coding DNA Sequence Number=SeqID_1105
  Gene Ontology: Mol. function=cysteine-type peptidase activity; Biological process=proteolysis
MGYNVVVHPLNIPPQPSFDKTPVAHGSSTELLVEVPPKDLPVFDETPVTEGFIDCVQSEHASHTPDPITDVIILDVNVGDILNIEEREQYNKDPQAFQISILSDYLARTLPSDYEFQKCKCLIVPMLRRGHWTLYVVNFHRRCIDILDSNLYGPSIGGTTWKQYHNEIITFEKKTYAWSRLMMSRLSMGMQLARSKAMLPKFGNFKDLSLENRATLLHYLTFHSLNKIKLLRADIRRFS

SEQ ID NO: 42885 - protein, 152 aa, Zea mays
  Coding DNA Sequence Number=SeqID_1106
  Gene Ontology: Mol. function=cysteine-type peptidase activity; Biological process=proteolysis
IYYLDHLHHEATPENKYDTSRIKYFDKETIDALTKADRRKPRHAGETYGHCHFCSRTDTCYVAAPKQPANDTFHIHVPRMKDLISSKVTCLPPPYRSSFDSLLKAHDKEVDKYCARLEHSHRKLVSNQLQLAEIFADMIDDVIRLGSQVQES

SEQ ID NO: 42886 - protein, 122 aa, Zea mays
  Coding DNA Sequence Number=SeqID_1107
MKDMSDSLRDLGKHVSDRMLILNLLCGLSWCYDHLKAFIKCSMPFPYFHDFRNKLLLKELTLDTKSSTSTSTLYGTSSTNQPPRPLSLRGLLHALMPPLLLKLLSRLQARKVVVDPIRAATE

SEQ ID NO: 42887 - protein, 324 aa, Zea mays
  Coding DNA Sequence Number=SeqID_1108
  Gene Ontology: Mol. function=sugar binding; Biological process =protein amino acid phosphorylation
  Homolog annotation: Hit_ID=Q6K3E9; Match level="QueryCoverage=90%, HitCoverage=96%, E-value=9e-84, Identity=57%"; Hit description=F-box family protein-like
  Pfam annotation: Domain name=F-box; Domain location=10-57; Score =26.5; E_value=9.7e-05; Accession=PF00646.23; Description=F-box domain
MESTAAPAACEIARLPDDLLSAALGRTGPLDACRAAAVSPAFRAAADADAVWSSFLPPDLPPLADGELPADATATKKQLFMRLSDPARPVLLADGLTSMWLDRATVAKCYMLSARKLTIIWGDTPQYWRWIPLTDSRFSECAELQHVCWLEIRGKIPCDMLSRNTTYAAYMVFKMSDESYGLDYPLQEAEVSIGATRSTRQVCLGYVDDDEDGEEVPQNYRSFGAVGTVFRPRIGRRNRRQPPGVHVLHPQTRAGGWMEMEMGEFRNEEGEDGEVSVSLMETRGGNWKRGLTVQGIEIRVKKATGAWASIAKTATEEKAITTDT

SEQ ID NO: 42888 - protein, 99 aa, Zea mays
  Coding DNA Sequence Number=SeqID_1109
  Subcellular localization annotation: CTP_CleavageSite=56; ConfidenceScore=5.74e-01
MTRKASSPVLPASGARTVQRTFPPHFTQKVPLRSLATCQLCPGLPFPSQPTPGHTRCAGVLARSDGGKGGRKIASPVTSPGSPVDFAIRHRADVPPVQL

SEQ ID NO: 42889 - protein, 156 aa, Zea mays
  Coding DNA Sequence Number=SeqID_1110
  Gene Ontology: Mol. function=glutathione-disulfide reductase activity; Cellular component=cytoplasm; Biological process =glutathione metabolic process
  Homolog annotation: Hit_ID=P48642; Match level="QueryCoverage=92%, HitCoverage=29%, E-value=1e-71, Identity=91%"; Hit description =Glutathione reductase, cytosolic
  Pfam annotation: Domain name=Pyr_redox_2; Domain location=2-156; Score=-32.0; E_value=0.026; Accession=PF07992.4; Description =Pyridine nucleotide-disulphide oxidore
DSKNFGWEINGDINFNWKTLLENKTKEIVRLNGVYQRILTSAGVTMIEGAGSLVDAHTVEVSQPDGSKQRYTAKHILIATGSRAQRVNIPGKDLAITSDEALSLEELPKRAVILGGGYIAVEFASIWRGMGAEVDLFYRRDLPLRRAAYQYIKKKG

SEQ ID NO: 42890 - protein, 266 aa, Zea mays
  Coding DNA Sequence Number=SeqID_1111
  Gene Ontology: Mol. function=glutathione-disulfide reductase activity; Cellular component=cytoplasm; Biological process =glutathione metabolic process
  Homolog annotation: Hit_ID=P48642; Match level="QueryCoverage=68%, HitCoverage=36%, E-value=6e-87, Identity=86%"; Hit description =Glutathione reductase, cytosolic
  Pfam annotation: Domain name=Pyr_redox; Domain location=67-146; Score= 11.4; E_value=0.0017; Accession=PF00070.17; Description=Pyridine nucleotide-disulphide oxidor
  Pfam annotation: Domain name=Pyr_redox_2; Domain location=19-192; Score=-13.0; E_value=0.0017; Accession=PF07992.4; Description =Pyridine nucleotide-disulphide oxidore
  Pfam module annotation: Pfam domain module=Pyr_redox::Pyr_redox_2; Domain location=67-146::19-192
MGRWGAGDIEKRCRGHWVTLVWVCVIRLGQATAEGTGGVTEQGIPGESKPAKDNVAVGSLEMFRNRKLVAMIDVDRKYGHTIINKLTCRGFDDEMRAIVASNLEGRGIKLHPGTNLSELSKTADGIKVVTDKGEELIADVVLFATGRTPNSQRLNLQAAGVEIDRVGAIKVDEYSRTSAPSVWAVGDVTNRINLTPVALMEATCFAKTVFGGQQVKPDHRDVPCAVFSIPPLSVVGLSEEQALEEANGDILVFISSFNPMKNSISK

SEQ ID NO: 42891 - protein, 358 aa, Zea mays
  Coding DNA Sequence Number=SeqID_1112
  Gene Ontology: Mol. function=acyltransferase activity; Cellular component=integral to membrane; Biological process=biosynthetic process
  Homolog annotation: Hit_ID=Q6K3E6; Match level="QueryCoverage=99%, HitCoverage=76%, E-value=1e-160, Identity=79%"; Hit description =Putative fatty acid elongase 3-ketoacyl-CoA synthase 1
  Pfam annotation: Domain name=ACP_syn_III; Domain location=56-131; Score=-21.5; E_value=0.1; Accession=PF08545.1; Description=3-Oxoacyl- [acyl-carrier-protein (ACP)
  Pfam annotation: Domain name=ACP_syn_III_C; Domain location=225-313; Score=47.3; E_value=5.1e-11; Accession=PF08541.1; Description=3 -Oxoacyl-[acyl-carrier-protein (ACP)
  Pfam annotation: Domain name=Chal_sti_synt_C; Domain location=162 -318; Score=-6.7; E_value=0.0065; Accession=PF02797.6; Description =Chalcone and stilbene synthases, C-te
  Pfam annotation: Domain name=FAE1_CUT1_RppA; Domain location=1-208; Score=286.5; E_value=5e-83; Accession=PF08392.2; Description =FAE1Type III polyketide synthase-lik
  Pfam module annotation: Pfam domain module=ACP_syn_III::ACP_syn_III _C::Chal_sti_synt_C::FAE1_CUT1_RppA; Domain location=56-131::225 -313::162-318::1-208
MDEFFADAVAGVLARTGVRARDVDLVVLNVGSFSPAPSLVSRLVRRFGMRDDVMAYNLSGMGCSAGLVAVDLARGVMLTRPRTMALVVTSESCAPNWYVGTDKSMMLGNCLFRCGGAAALLTNDRAFRARAKMELRCLVRANIGAHDDAHAAAVHREDADGRLGVSLSKALPKAAVRAFTENLQRLAPRILPARELARFASRLLLRKLLPAGTPRNKHAGGSPKIDFKAGVDHFCLHPGGTAVIEAVRKSLGLTAHDVEPARMTLHRWGNTSASSLWYVLSYMEAKRRLKRGDRVLMVTFGSGFKCNSCYWEVTRDLADAGAWEDCIDQYPPETLVNPYMDKFGWVNDVQGQGSGFVF

SEQ ID NO: 42892 - protein, 76 aa, Zea mays
  Coding DNA Sequence Number=SeqID_1113
  Gene Ontology: Mol. function=threonine endopeptidase activity; Cellular component=proteasome core complex (sensu Eukaryota); Biological process=ubiquitin-dependent protein catabolic process
  Homolog annotation: Hit_ID=O64464; Match level="QueryCoverage=85%, HitCoverage=51%, E-value=3e-16, Identity=47%"; Hit description =Proteasome subunit beta type 1
MAQLLSNTLYYKCFFPYYAFNVLGGLDSEDAVTPLSESEAIDLVKDVFASEPERDIYTSKYMLFVLPGAVRGYENN

SEQ ID NO: 42893 - protein, 214 aa, Zea mays
  Coding DNA Sequence Number=SeqID_1114
MSLCRAGLLVSQLQTLPVVVSAGFADHAEHLGAVVGSPDFPAARLRLTLATKADDFPTSPFSTRHCCRERNLAGIGVPPELSRSGSSTMPRRACLQPQYRVGCSDVLLIPHRRLAGAQIHREHSYAKSTSLVGEPRFLTLAVFLYLVNAAPSLIRGGLSTNFGLTTRGVRRDAAASRTGMLDCVADDVIVPCVFALGLASGCSGFLQGCSSRAS

SEQ ID NO: 42894 - protein, 76 aa, Zea mays
  Coding DNA Sequence Number=SeqID_1115
MDLDRTLFLLRSYLLLEKAFWRAVTTGMTKSLASSSRVDDVESPVLQRVGMCPRRQRHRPANSSLQIQTALGVTNL

SEQ ID NO: 42895 - protein, 105 aa, Zea mays
  Coding DNA Sequence Number=SeqID_1116
  Subcellular localization annotation: CTP_CleavageSite=39; ConfidenceScore=5.37e-01
MDFGCPISHTWTPRRHTQRKTRSKIDSLVPLSTSVGRLTAATVGGGSRLGMKNKAKAGKTNGTSGDGENDATAQVDVRAGVGQIRGGGACSHAIWREWGGAEAKA

SEQ ID NO: 42896 - protein, 51 aa, Zea mays
  Coding DNA Sequence Number=SeqID_1117
MTTPDVDESTTKDLLDGDHVLVLEALNKLKSQSDKDLEHSWNVDNLRKFYV

SEQ ID NO: 42897 - protein, 74 aa, Zea mays
  Coding DNA Sequence Number=SeqID_1118
MERVYEEKSPSNSGGDIQHSKEGSKAVRSRMLERNKAISDKSRWSFHRRSTRHRVLKKYDISEPEALRSCKAKG

SEQ ID NO: 42898 - protein, 369 aa, Zea mays
  Coding DNA Sequence Number=SeqID_1119
MEISDPRQESRKPNISNLHGGESSDGIVAGYRIAESAEAEEPRPASEPARMRSEPRRCVNGEPRQRGGEEEEPEGGHGKVAAAAAADVRRGAEVVPRPALVAEHTAERADEPRIGARGRIGPRIQLSGGRGGVEAAQEERTRASRHGRSAEPGGRFHLAPMWAQGVVQWEQIRGSRTQLCRDYHELGVEVSPFNKKGTNLDNWFLGWLEDELKSLPSVIKGLMSYSALVTHKGTMTALAHVGCRHFEPFGYINLDFNGAVYDVEEDLTLKLPVGVLFDWMWGPHNVSVVRESIDREVLMLGPMQEILDIVDTWKEPNDATVFVSLLNCRSSSVDSEELYMFFDSEESSDIEDELAYFVLLDEVSSIPLL

SEQ ID NO: 42899 - protein, 92 aa, Zea mays
  Coding DNA Sequence Number=SeqID_1120
MVAARFAPISIHVSDGLSGVGSEPHQVTGEALGAVPSQEDCRRPGNSPSLPVCAMARALCCTNQDHYVNWNMERPPGKTVLPQGFNGTPLAD

SEQ ID NO: 42900 - protein, 363 aa, Zea mays
  Coding DNA Sequence Number=SeqID_1121
  Gene Ontology: Mol. function=hydrolase activity, acting on acid anhydrides, catalyzing transmembrane movement of substances; Cellular component=integral to membrane; Biological process =metabolic process
  Homolog annotation: Hit_ID=Q8RW29; Match level="QueryCoverage=51%, HitCoverage=27%, E-value=6e-47, Identity=45%"; Hit description =Plasma membrane H+-ATPase
MTRDGVNDAPALKNADIGITVAYSTDAACSASDIVLSEPSLSVIIGVVLTSRAIFQRMKNYMFDFPPFMVLIIAILNDGTIMTVSKDIVKPSPQPEGEIFATRVVLSAYLATMTVIFFWDAYKTDFFPVWTSNCYSDYRIRQLGICYDQGHWMRLGRHIWLYNIISFFPPDIIQFLIRYALSRRAWNLVLEQREATTMNPSYKEPDPSHDIMEFSYNVSTTTIDTNSSDGGCWQQHLRIKVPREKGESIVAKLGGSPSLSKSTATTQSLKSRGVWFPGRDNEILAPIFTPPSVAEVDVEANLPQQALKDVHVHAYTAEETKEAFYVARLFFLLPLSRVLYRYCVPVLVNFPFILFVKFCTILR

SEQ ID NO: 42901 - protein, 116 aa, Zea mays
  Coding DNA Sequence Number=SeqID_1122
MALVLGGGTSSGCKDNYFNYGDPNHFIANYPKMKGQPKVSKHDYHFSYNKGKRDNLYNDFDNTSSSSSNDNLEVRVNNNMNRLCFFANTAGGFYAIALGEDAVGNNNKTSMTTLHL

SEQ ID NO: 42902 - protein, 108 aa, Zea mays
  Coding DNA Sequence Number=SeqID_1123
MGPSPPEKYKVVEQIDPEQAMDAEVVEQIDWAPTGFAAKAAALFAWASRHRLRGYKGTPVWEAEIQHRVVVENGGQGLEAGLAARVWGERWFLVDQTVGGTGRTDAQC

SEQ ID NO: 42903 - protein, 133 aa, Zea mays
  Coding DNA Sequence Number=SeqID_1124
  Gene Ontology: Mol. function=monooxygenase activity; Cellular component=integral to membrane; Biological process=electron transport
  Homolog annotation: Hit_ID=Q10S01; Match level="QueryCoverage=94%, HitCoverage=25%, E-value=8e-47, Identity=72%"; Hit description =Cytochrome P450 family protein, expressed
MGKANSLVYLHAALCESLRLYPPVPFERKTAVDADVLPSGKELMPGDSVLISNYCMGRMEGVWGKDCMEFRPERWFNDEGGLRYEPSYKFISNAGPRTCLGKEIAFVQMKTVAAALLWNFAVEVVPVIPKLQE

SEQ ID NO: 42904 - protein, 67 aa, Zea mays
  Coding DNA Sequence Number=SeqID_1125
MVAARFAPISIHVSDGLSGVGSKPHQVTGEALGAVPSQEDCRGPGNSPSLPVCAMARALCCTNQAPN

SEQ ID NO: 42905 - protein, 178 aa, Zea mays
  Coding DNA Sequence Number=SeqID_1126
MGGGSRLGRKNRAKAEKTNRMSDDGENDAAGRHSAALLLPPAVRRAVEAETETPSDHAPTPVPLCLLPLPSTLRSSALAAAAARAHADAPWAVASATQRPDRRRQRQQPRREEHPAGPVTGECRPPGPSPARRAELRLSARRSPDCVPTSTGFHPVGHGSRHTVDAHAATPIIVSKIR

SEQ ID NO: 42906 - protein, 291 aa, Zea mays
  Coding DNA Sequence Number=SeqID_1127
MASMAAVFGEAKPDKSNKDADALLRRPVLFHAHSQGGLRVVATDLHSFAWHRSLDLDGLRDLALLPCRGPRYSVHIFSILPCLAERLNLNAFAYCTMSYAGPDTAELVATKAKGLPRITLSLDRVAASALKDVIADFSLALYESYKTRQEHASREQERVSQLMENLDSERVCYPTITAYISTNLVLVLSFMLVLDEYSWEKNEVMQKQLEALSFLDKRKATKPKLVTDKFPSVSGAPPSSDQMIVAVQQQTPGCVLFFLSKLHGFFLMHTSKARVRGALLQDTEENADDNT

SEQ ID NO: 42907 - protein, 200 aa, Zea mays
  Coding DNA Sequence Number=SeqID_1128
  Gene Ontology: Mol. function=catalytic activity; Cellular component =mitochondrion
  Homolog annotation: Hit_ID=Q1LWU4; Match level="QueryCoverage=57%, HitCoverage=82%, E-value=4e-13, Identity=36%"; Hit description=Novel protein similar to vertebratethioesterase superfamily member 2
  Pfam annotation: Domain name=4HBT; Domain location=76-153; Score =63.3; E_value=7.6e-16; Accession=PF03061.12; Description =Thioesterase superfamily
MASDSGDFGGENKSLETARRLLEETFTSEAEAEALPSLPSGFYDAFVLRGIRVVQALQPGTLLCHFNVPSRLLNSGGFLHGGATASLVDLVASAAFATAGLRTRGSPLEMNISYLDAAFADEEIDIEAKVLRAGKAVGVAVVELKKKSGKIIAQARYSKYLGVSTRITAVIAVVTHDKYVTFRKALQEYENTYFQLTEDP

SEQ ID NO: 42908 - protein, 77 aa, Zea mays
  Coding DNA Sequence Number=SeqID_1129
  Subcellular localization annotation: CTP_CleavageSite=60; ConfidenceScore=5.04e-01
MGLRWWMIFFLLDGWVGTWILSQLKVTYLSWVTTAITAVILVPEPNSNSGAFGFRGPLPVANIVGRYMTSFTRSSFQ

SEQ ID NO: 42909 - protein, 90 aa, Zea mays
  Coding DNA Sequence Number=SeqID_1130
MAVGGLLRGLVSPPAWLPCHELFASWHHWLPSLPRLRPPASDGFKLLLVLLLFSAALAEVRYIASSSMAPTLRPGDRAVAEKCSRSTLPA

SEQ ID NO: 42910 - protein, 345 aa, Zea mays
  Coding DNA Sequence Number=SeqID_1131
  Gene Ontology: Mol. function=prenylcysteine oxidase activity; Cellular component=lysosome
  Homolog annotation: Hit_ID=P57681; Match level="QueryCoverage=52%, HitCoverage=37%, E-value=3e-23, Identity=35%"; Hit description =Probable prenylcysteine oxidase precursor
  Pfam annotation: Domain name=DAO; Domain location=146-339; Score= -62.3; E_value=0.084; Accession=PF01266.14; Description=FAD dependent oxidoreductase
MALKQGLHVPRTPSQPAAFPRRNCGQCGGSVESWRRSDFSEVWLRGEDDGADMVGSASQHADALSGMGARVTDNAGPSVSANRFVGCADHKPRNREADLVELTIGFTDQSSSSPNSHCIESGSMLPLSLFVSLLVLHLPHASADGDICIIGGGISGASTAFFLTSYTSTLGGAQLRVFERRQKVGGRLGTVTLAGDSFEAGGSIIHPRNLHARRFADLLGLAVKTGGDDWLGIWDGKSFVFQTARPPPVGSSWWRRKLHSLVNSLLLLRRYGLSLLKMDKFVQEMLRRFMLFYNGMESRPVFATVEEMLQWTGLYGLTRRTLEEELLDAGLNTRTIAELVTVCFS

SEQ ID NO: 42911 - protein, 63 aa, Zea mays
  Coding DNA Sequence Number=SeqID_1132
  Homolog annotation: Hit_ID=Q2QSF4; Match level="QueryCoverage=70%, HitCoverage=6%, E-value=7e-09, Identity=60%"; Hit description =Retrotransposon protein, putative, unclassified
MAALSSGTRLSSPWHGEAVTTVVSLLNRAPTKVVDNMTLYEDWHGHKPGVHFLRTSECVGRSL

SEQ ID NO: 42912 - protein, 448 aa, Zea mays
  Coding DNA Sequence Number=SeqID_1133
  Gene Ontology: Mol. function=DNA-directed DNA polymerase activity; Cellular component=nucleus; Biological process=DNA replication
  Homolog annotation: Hit_ID=Q9LRE5; Match level="QueryCoverage=92%, HitCoverage=95%, E-value=0.0, Identity=79%"; Hit description=DNA polymerase delta small subunit
  Pfam annotation: Domain name=DNA_pol_E_B; Domain location=176-387; Score=249.4; E_value=7.6e-72; Accession=PF04042.6; Description=DNA polymerase epsilon subunit B
MERKQAAYSNLVRILFFHRRGLLHSLVDHLWSQLNGCIGDCRMRVFKRVQANFFLHIAVTTVLGLEEGKDCIIVGTLYKHMKLKPSILDEYAKERSAIPLVKPHNFMHPDDHLILEDESGRVTLAGAIPPAAFVTGVVVALHGKETSAGNFLVEDVLEAGLPPQSALSSAEEDKYVVFISGLSVGSDTFNPLQFQLLIDHVTGHLGDENEQSIASNIVRIVVVGNSVHISPRFVNGQTVPSKDQSRIAEPIKELDIMLTQLVASLPVDMMPGCHDPANFSLPQQPLHRCLFSGASTYNTFSSCSNPHQFELDSVQFLGTSGQNIDDLYKYSDAKDKLEFMERTLRWRHLAPTAPNSLGCYPYTDKDPFLVESCPHVYFVGNQDKYETRLLEGQEKQKVRLISIPRFSESGVAVMKTSMYNVERHDHEGVFVLEQFFIRCMMMTLGFAK

SEQ ID NO: 42913 - protein, 182 aa, Zea mays
  Coding DNA Sequence Number=SeqID_1134
  Gene Ontology: Mol. function=transferase activity
  Homolog annotation: Hit_ID=Q10SB5; Match level="QueryCoverage=95%, HitCoverage=72%, E-value=6e-83, Identity=89%"; Hit description =Glycosyl transferase family 48 protein, putative, expressed
  Subcellular localization annotation: CTP_CleavageSite=41; ConfidenceScore=5.11e-01
MTSLSRTLSRGGPMQSPGARRIQRTQTAVNFGEPMFDSEVVPSSLVEIAPILRVANEVEMANPRVAYLCRFYAFEKAHRLDPTSSGRGVRQFKTALLQRLERENEPTLMGRGQKSDAREIQTFYHSYYKKYIQALQNASDQLDRAQLTKAYQTAAILFEVLKAVTQQHAVEVDHEESCASLN

SEQ ID NO: 42914 - protein, 738 aa, Zea mays
  Coding DNA Sequence Number=SeqID_1135
  Homolog annotation: Hit_ID=Q6Z1K3; Match level="QueryCoverage=22%, HitCoverage=34%, E-value=2e-16, Identity=32%"; Hit description=Zinc knuckle domain containing protein-like
  Pfam annotation: Domain name=zf-CCHC; Domain location=175-192; Score =16.3; E_value=0.0021; Accession=PF00098.13; Description=Zinc knuckle
  Pfam annotation: Domain name=zf-CCHC; Domain location=194-211; Score =13.0; E_value=0.007; Accession=PF00098.13; Description=Zinc knuckle
  Pfam module annotation: Pfam domain module=zf-CCHC::zf-CCHC; Domain location=175-192::194-211
MGQGHKRSTLAARQCSLSNDAGDEELEQRWSGGRSEQSRKVGRKWDVCNASETVRVCCDQKQPHLFRICTRAEEGRSKAQRWRGDASAGGSSPSSRSFKAALLSSSVCAAGLSPLASHVSPSPSPSALAAPVFPAKVSSEVTLPAVEGGWQVVDRRQRNRGVHLPRRGSRVDLRGRCYNCLSTSHRAATCRRPTRCFRCLCFGHRVADCSSLPADSQKQPVWQRLGIVKRCLPGSQDSSQRALVRPRTPVRPPVWQRLSGMDKVHSLGGARKTSVWRRLASSQDRAAMEPVMDLEKQPSLQPKRKRRRSRRGKGAAVVGNSQSPPADLVPLTSNLPSCVLELSTDMAGEEAALRRALFVTVTGTRPAVLGSEVLEEVGRRYCINIDDMSIHQSKPEDFLLFLPDEEVATRVLNEGKPFRGPLFSLVFKQWTRFAHASATSFSHLMDIEIRGIPAHAWGLNTAKTLLRGSCHILELHPASACKTDLSSLKLRAWCLDPKKLCREMDLHIIEREPFIQEARCLTYKISIAASPAPLQLPSDSSLSPSDENAFHGEEDGDVRGPSNPRFRQPRPLQRQPVHLRLGSHQGVGRERSVAVHGNRMVAPVLALEDGAAVCAGDGLLTSPGPSSPQHGCLAEPLEKARLSSPLPATHVPCMTTLENILAGPSGSAAVGSLDSVLPVSPQRHRTVAVAGSLEQAGANSPLPGDSSNAVAPLRVYSRCRFRSKHAPIQEGQLIQVVE

SEQ ID NO: 42915 - protein, 312 aa, Zea mays
  Coding DNA Sequence Number=SeqID_1136
  Gene Ontology: Mol. function=protein binding
  Homolog annotation: Hit_ID=Q00SR9; Match level="QueryCoverage=59%, HitCoverage=61%, E-value=1e-11, Identity=31%"; Hit description=[E] KOG2275 Aminoacylase ACY1 and related metalloexopeptidases
MRGRADNSKWAEFATRVSGEWDGFGADFTASGDPVELPEKVVPEAYREWGVQVVDWQTQCPTLADPGAPCALHYRLVRLLPTVGCEADAATVHTSHQRHASSAAAFAYAAAGSYVAAWPRGPALVLEVEHCVVRPDAPAEEAGRVRVVQTVALGREARLRGLKVFAEQWYGPFRDGEQLGGCAVGETPFAAGEKLDVAEVIGQWETTDAAAARFSGDLDPETGKFAELSPDQPRKLVRDAEGVVTLPKQLWSAFKELGDGEFLCEVGWALGGGGAVTSRCVLSKDGDVKARVPAVDRHAEWFSSQLQSEFRD

SEQ ID NO: 42916 - protein, 524 aa, Zea mays
  Coding DNA Sequence Number=SeqID_1137
  Gene Ontology: Mol. function=protein serine/threonine kinase activity; Cellular component=flagellin-based flagellum; Biological process=protein amino acid phosphorylation
  Homolog annotation: Hit_ID=P53684; Match level="QueryCoverage=71%, HitCoverage=89%, E-value=1e-117, Identity=78%"; Hit description =Calcium-dependent protein kinase, isoform 11
  Pfam annotation: Domain name=Pkinase; Domain location=212-473; Score =175.8; E_value=1e-49; Accession=PF00069.15; Description=Protein kinase domain
  Pfam annotation: Domain name=Pkinase_Tyr; Domain location=212-421; Score=-59.4; E_value=8e-09; Accession=PF07714.7; Description=Protein tyrosine kinase
  Pfam annotation: Domain name=efhand; Domain location=396-424; Score =25.0; E_value=0.00026; Accession=PF00036.22; Description=EF hand
  Pfam annotation: Domain name=efhand; Domain location=432-460; Score =18.9; E_value=0.018; Accession=PF00036.22; Description=EF hand
  Pfam annotation: Domain name=efhand; Domain location=468-496; Score =24.9; E_value=0.00028; Accession=PF00036.22; Description=EF hand
  Pfam module annotation: Pfam domain module=Pkinase::Pkinase _Tyr::efhand::efhand::efhand; Domain location=212-473::212-421::396 -424::432-460::468-496
AEAAERALLRSTGDAAAALCAAKAGTVTYGPQHVWDTRVCGLGWVWVGLVFLRLVAVTTLPLRKLGFRPRSGGPLPFVLCSDRARRAVGGSCEDSRSAALVSPYAVESAISLRSRFRVAVSKVWVSSLVVEAFRLEIFSKEHAVSGRNFLPSQRFADGCLEDDRYSDLKKFDKPWPEVNSFKPTAVGILKRGLDPTSITVLERKTADIREHYIIGRRLGQGQFGTTFLCTEISTGCEYACKTIPKRKLITKEDVEDVRREIQIMHHLSGHKNVVSIKDVYEDGQAVYIVMELCAGGELFDRIQEKGHYSEQKAAELIRIIISLVAMCHSLGVMHRDLKPENFLLWDKEDDLSIKAIDFGLSVFFKPGQVFTELVGSPYYVAPEVIAERLSEEEIAGLRQMFKAVDVQNRGVITFGELRQGLKRYGSELENREISDIMEVADNDNNVTINYEEFIAATVPLNKIEREEHLMAAFTYFDKDGSGYITVDKLQRACGEHDMDDTFLEEIILEVDQNNEKVAMVPYPE

SEQ ID NO: 42917 - protein, 160 aa, Zea mays
  Coding DNA Sequence Number=SeqID_1138
  Gene Ontology: Mol. function=DNA binding; Cellular component=integral to membrane; Biological process=induction of apoptosis
  Homolog annotation: Hit_ID=Q7XJ37; Match level="QueryCoverage=77%, HitCoverage=99%, E-value=5e-40, Identity=74%"; Hit description =Apoptosis-related protein
  Pfam annotation: Domain name=dsDNA_bind; Domain location=43-151; Score=132.8; E_value=9.3e-37; Accession=PF01984.10; Description =Double-stranded DNA-binding domain
MIWHKHEQFASIQYSQPYAFVGSLVLMELNNFVCQADPELEAIRQRRMRELQHGAANQQNAGQQKAQEDAKQEAEERRQMMLAQILSSEARERLSRIALVKPDKARGVEDVLLRAAQTGGISEKVSEERLISLLEQINSHTSKQTKVTIQRRRNVLDDDD

SEQ ID NO: 42918 - protein, 1026 aa, Zea mays
  Coding DNA Sequence Number=SeqID_1139
  Gene Ontology: Mol. function=zinc ion binding; Cellular component =membrane; Biological process=defense response
  Homolog annotation: Hit_ID=Q5N8I7; Match level="QueryCoverage=96%, HitCoverage=96%, E-value=0.0, Identity=60%"; Hit description=Zinc finger protein-like
  Pfam annotation: Domain name=DZC; Domain location=986-1021; Score =73.2; E_value=8.3e-19; Accession=PF08381.1; Description=Disease resistancezinc fingerchromosome co
  Pfam annotation: Domain name=FYVE; Domain location=603-671; Score =40.5; E_value=5.8e-09; Accession=PF01363.12; Description=FYVE zinc finger
  Pfam annotation: Domain name=RCC1; Domain location=278-327; Score =24.4; E_value=0.0004; Accession=PF00415.9; Description=Regulator of chromosome condensation (RCC1)
  Pfam annotation: Domain name=RCC1; Domain location=330-382; Score =23.0; E_value=0.0011; Accession=PF00415.9; Description=Regulator of chromosome condensation (RCC1)
  Pfam annotation: Domain name=RCC1; Domain location=385-434; Score =18.6; E_value=0.0068; Accession=PF00415.9; Description=Regulator of chromosome condensation (RCC1)
  Pfam annotation: Domain name=RCC1; Domain location=447-496; Score =21.8; E_value=0.0024; Accession=PF00415.9; Description=Regulator of chromosome condensation (RCC1)
  Pfam annotation: Domain name=RCC1; Domain location=499-548; Score =16.8; E_value=0.011; Accession=PF00415.9; Description=Regulator of chromosome condensation (RCC1)
  Pfam annotation: Domain name=RCC1; Domain location=553-600; Score =38.5; E_value=2.3e-08; Accession=PF00415.9; Description=Regulator of chromosome condensation (RCC1)
  Pfam module annotation: Pfam domain module=DZC::FYVE::RCC1::RCC1::RCC1 ::RCC1::RCC1::RCC1; Domain location=986-1021::603-671::278-327::330 -382::385-434::447-496::499-548::553-600
MQINASFHPNRAPRPSLVVLVPPRLAWSEDPSGLRLISSPAGPNVHLYAQLQDETSLVWYSHSKVKYLVLSSVSRIIPGQRTAVFRRFLRPEKDYLSFSLIYKNGQRSLDLVCKDQAEVEVWFSTLEALITSCRKSYSADGPSDRLSVSDEVSHYQDTFHDTTLDIASSITRTFNSAKTDVVSDRANMLRASTDSSRLSISSAPSSSSQGSGQDDIESLGDVYVWGEVWTDMIPAEGSANYLCSKADILIPKPLESDVVLDVQQIACGYRHIALTTRQGEVFAWGEELGGRLGHGTDADISRPKLVEALAVSNVEYVACGEFHTCAITASGDLYTWGDGYYNAGLLGHGAGTSHWLPKRVSGPLEGVQVLSVSCGSWHSALTTSSGKVFTFGDGTFGALGHGNRHTVAYPKEVETLSGFRTIKVACGLWHSAAIVETTNQAGVNVISRKLFTWGAGDKNPLGHGDKDARLVPTCVQSLIDYNFHQVACGHSMTIALSTSGHVFTMGSSSNGQLGNPKSDGKHPTPVQDRLAGELVEEISCGSCHVAVLTSRSEVYTWGMGANGRLGHGGVEDKKKPTLVEALKDRHVKSIACGSNFTTCICIHKWVSGADQSVCSGCRQPFGFTRKRHNCYNCGLVHCHACSSKKVLKAALAPTPGKPHRVCDSCFMKLKAAETSSNSSHSKRNAIARRSVDSKDRSERPEIRSSRLATGSTAEPLKQAELKAVRNEIKPDPMSTMRAPQVPSMLPFNNLAFGATFGGPASLKPMTMAPMPMAMPMSPAPLTKKPTPAAATPLCGKSDTDNLKMAKQVLNEDISKLQSQVNKLKQKCDAQEEQLQKAERRAEHSASTAAEESSRRNGVLEFIRFLDNELKSIADRVPSDAADGLKALQNHSERFLTEQGVRPLEATGMHRKCASIGNLVMSQDGSAGNASSSAASLASESPCHRIMENSSRANGDLAPKLGGTHGEVQLIEQFEPGVYVTLIQLRDGTKVFKRVRFSKRRFAEQQAEEWWRENQERVFRKYNHPAN

SEQ ID NO: 42919 - protein, 198 aa, Zea mays
  Coding DNA Sequence Number=SeqID_1140
  Gene Ontology: Mol. function=protein binding; Cellular component =anaphase-promoting complex; Biological process=regulation of mitotic metaphase/anaphase transition
  Homolog annotation: Hit_ID=Q9ZPW2; Match level="QueryCoverage=88%, HitCoverage=91%, E-value=3e-79, Identity=77%"; Hit description =Anaphase-promoting complex subunit 10
  Pfam annotation: Domain name=APC10; Domain location=4-197; Score =374.2; E_value=2.1e-109; Accession=PF03256.7; Description=Anaphase -promoting complex, subunit 10 (APC10)
  Pfam annotation: Domain name=DUF1000; Domain location=60-175; Score= -37.5; E_value=0.051; Accession=PF06201.4; Description=Domain of Unknown Function (DUF1000)
  Pfam module annotation: Pfam domain module=APC10::DUF1000; Domain location=4-197::60-175
MESDAEEAAAAAAVDPGAGRLKGSPELTVDADMREVAKRAAWSVSSFKDGNGVAALRDDNLDAYWQSDGAEPHLVNIRFQKKVQLQLVALYVDFKLDESYTPSKISIRAGDGFHNLKEIKTVELAKPVGWVHISLSGADPRETFIHTFMLQIAVLSNHLNGRDTHVRQIKIYGPRPSPVPHQPFHFISREFITYSTIR

SEQ ID NO: 42920 - protein, 124 aa, Zea mays
  Coding DNA Sequence Number=SeqID_1141
MEEADGNRRGEKGRIFRHEGEAESGGAWRAEDAEVAGVTPMGSCCAAEDTGQIGEYWTIRVAAARRLADSRRIGLDQAFCVAGLVAPQPLPCWLLRCNCSAPLNSKRKCATAAVPPAWQLCACA

SEQ ID NO: 42921 - protein, 308 aa, Zea mays
  Coding DNA Sequence Number=SeqID_1142
  Gene Ontology: Mol. function=kinase activity; Cellular component =spliceosome; Biological process=mRNA processing
  Homolog annotation: Hit_ID=Q6QP54; Match level="QueryCoverage=59%, HitCoverage=39%, E-value=3e-17, Identity=57%"; Hit description =Putative kinase
  Subcellular localization annotation: CTP_CleavageSite=42; ConfidenceScore=5.18e-01
RSGRRFAFAIMTAPKKGPGKGDTPKRILPREGTRLRASLLIRGSKAGPSEGFGSRLRSRGLYTHYWSEVRRPAPRKGSTAASGYSGSAPITDQGFEGWPPKGISPYEGLDHASPEPGLGQGQPTPEARTRAKPRKTANSAPPDPGLELGLSPERRQTPLRPTQGSDSGLAPEDDELRFARPQGSDSGSAPEDDELRFARPQGSDSAPTSAGELRSARPRARARARPQKTTNSASPDPRARTPPRHQLAISTSPDPRARTPPRHQPAISASPEPGARTRPRLRRSFHVAQPRAQTSHDNGRRHHHPTLN

SEQ ID NO: 42922 - protein, 311 aa, Zea mays
  Coding DNA Sequence Number=SeqID_1143
  Gene Ontology: Mol. function=translation initiation factor activity; Cellular component=transcription factor complex; Biological process =regulation of transcription, DNA-dependent
  Homolog annotation: Hit_ID=Q5KQD1; Match level="QueryCoverage=99%, HitCoverage=98%, E-value=4e-99, Identity=61%"; Hit description =Putative transcription initiation factor TFIIB
  Pfam annotation: Domain name=TFIIB; Domain location=121-196; Score =42.4; E_value=1.5e-09; Accession=PF00382.10; Description =Transcription factor TFIIB repeat
  Pfam annotation: Domain name=TFIIB; Domain location=226-295; Score =26.5; E_value=2.4e-05; Accession=PF00382.10; Description =Transcription factor TFIIB repeat
  Pfam annotation: Domain name=TFIIB_Zn_Ribbon; Domain location=7-50; Score=74.3; E_value=3.9e-19; Accession=PF08271.2; Description=TFIIB zinc-binding
  Pfam module annotation: Pfam domain module=TFIIB::TFIIB::TFIIB_Zn _Ribbon; Domain location=121-196::226-295::7-50
MADDEPNYCPDCHRTTEVVLDHATGDTICTECALVLEAHYIDEGSEWRNFADDGGGEDRDPSRVGGSSDPFLANMPLVTQIAYAGPQKAQGEGGHALPRLHVSASGGAGGEQTLVEGFHAIADMADRLGLVATIRDRAKDVYKRLGEARACPGRGKKRDAFYAACLYVACRNEGKPRTYKELATVTSDGAAAKKEIGKMTMLIKKVLGEEAGQVMDIGVVRPSDYMRRFCSRLGMGNREMRAAQEAARRLENGLDVRRNPESIAAAISYMVVQRTGAGKTVRDVSMATGVAEVTIKEAHKDLTPHAEKLFA

SEQ ID NO: 42923 - protein, 81 aa, Zea mays
  Coding DNA Sequence Number=SeqID_1144
  Subcellular localization annotation: CTP_CleavageSite=75; ConfidenceScore=5.20e-01
MDGWGVQVTKSGSPFGGSAPLVPFCLAWSLWGPDVALHTWTAGQVSRCSNTSMHAKFVDSWRSWHLAATQEFLGRAALSWV

SEQ ID NO: 42924 - protein, 34 aa, Zea mays
  Coding DNA Sequence Number=SeqID_1145
MDPARQWVFLTSQSPACSVLPTIERSREVQARVT

SEQ ID NO: 42925 - protein, 113 aa, Zea mays
  Coding DNA Sequence Number=SeqID_1146
MTSLLSSSSSSQRMMSAHQGTWRVQESGLQGWGSARKGSHGGSQWKLHLLEGPWTWGGCKDGQLDVDIQTWLLTTARVGRESGQDRREHLRRFSAGSGNSSNDARAAAEGSRT

SEQ ID NO: 42926 - protein, 296 aa, Zea mays
  Coding DNA Sequence Number=SeqID_1147
  Gene Ontology: Mol. function=isomerase activity; Biological process =cell redox homeostasis
  Homolog annotation: Hit_ID=Q5EUC1; Match level="QueryCoverage=89%, HitCoverage=89%, E-value=1e-144, Identity=98%"; Hit description =Adenosine 5'-phosphosulfate reductase 9
  Pfam annotation: Domain name=Thioredoxin; Domain location=55-155; Score=-20.0; E_value=0.0071; Accession=PF00085.10; Description =Thioredoxin
  Subcellular localization annotation: CTP_CleavageSite=60; ConfidenceScore=5.15e-01
MRCAAAALAVALIAVVAGATAPGSPAAGTCARRGALPFLDAVGSRCPFVRIEPSPPLEVRGEAVDTELNLRRRGASYSILFYAAWCPFSSKFRPIFETVSTMYPQVHHFAVEESSATPRYGVRGFPAILLVNETTMVRYRGSKDLNSLVDFYKETTGLDPVAYIDVVVQQESTASLSSVAPWDRSPLEMAKDEPPYLLVAVLFIILKAAARLVPAAMSHLRAFLAVRVQNLNLGIRRGSSQVLERALNALDVRRLCSKLGLSNRATDLRKGASNARAWASSFASVSLGEPSSSRQA

SEQ ID NO: 42927 - protein, 103 aa, Zea mays
  Coding DNA Sequence Number=SeqID_1148
MAKGDGVDREEQVGRTLATTPTSVQARDEGSKQPQQGAHNSQVLVGGGGGACGSYSYLLCVIAKDLQVWGEERPDNQEKESVKTLDEPMLKKTQTDRQTDRHK

SEQ ID NO: 42928 - protein, 353 aa, Zea mays
  Coding DNA Sequence Number=SeqID_1149
  Gene Ontology: Mol. function=acyltransferase activity; Cellular component=integral to membrane; Biological process=mitochondrial electron transport, ubiquinol to cytochrome c
  Homolog annotation: Hit_ID=Q6K3E6; Match level="QueryCoverage=51%, HitCoverage=39%, E-value=2e-62, Identity=68%"; Hit description =Putative fatty acid elongase 3-ketoacyl-CoA synthase 1
  Pfam annotation: Domain name=ACP_syn_III_C; Domain location=176-264; Score=22.5; E_value=6.6e-08; Accession=PF08541.1; Description=3 -Oxoacyl-[acyl-carrier-protein (ACP)
  Pfam annotation: Domain name=FAE1_CUT1_RppA; Domain location=46-161; Score=-208.0; E_value=0.012; Accession=PF08392.2; Description =FAE1Type III polyketide synthase-lik
  Pfam annotation: Domain name=UCR_14kD; Domain location=11-104; Score =95.9; E_value=1.2e-25; Accession=PF02271.6; Description=Ubiquinol -cytochrome C reductase complex 14kD subunit
  Pfam module annotation: Pfam domain module=ACP_syn_III_C::FAE1_CUT1 _RppA::UCR_14kD; Domain location=176-264::46-161::11-104
MSSMMNALSNWLVNPRRNPLARLHMHTVSSRLRKYGLRYDDLYDPYFDLDIKEALGRLPREVVDARIQRLKRAMDLSMKHQYLPEDLQRPRLRKIGSMSKTNPDVIHYRCKVADDCMSSEIKALPKAAVRAFTENLQRLAPRILPARELARFASRLLLRKLLPGPPRNKHAGCPKIDFKAGVDHFCLHPGGTVVIEAVRKSLRLTAHDVEPAGMTLHRWGNTSASSLWYVLSYMEAKWRLKRGDRVLMVTFGSSFKCNSCYWEVTRDLADAGAWEDCIDQYPPETLVNPYMDKRDEEDDGQGRENGRRSKTAAREAQQVPFRGYLSDMLALVKKENAEREALGALPLYQRTLP

SEQ ID NO: 42929 - protein, 216 aa, Zea mays
  Coding DNA Sequence Number=SeqID_1150
  Gene Ontology: Mol. function=electron carrier activity; Cellular component=anchored to membrane; Biological process=electron transport
  Homolog annotation: Hit_ID=Q84M48; Match level="QueryCoverage=50%, HitCoverage=48%, E-value=4e-39, Identity=72%"; Hit description =Putative phytocyanin
  Pfam annotation: Domain name=Cu_bind_like; Domain location=33-119; Score=134.5; E_value=2.9e-37; Accession=PF02298.8; Description =Plastocyanin-like domain
MGMKKGVLMLALGLAMAVTSSAVVYKVGDASGWTILGNVNYTDWTSKQNFRVGDTIGKVEFTYPPGIHNVLEVNKADYHSCTNSTPIATHTSGDDKIVIKSPGHRFFICGVPGHCAAGQKLSIRVLKTRSSDAPSPAPAARSASAASPSPSGSTSTDPSGAGASASPPASSTDSTPDATTTTAPAPDANGAGVSAGHRAVVAAMALAAAASMAMLY

SEQ ID NO: 42930 - protein, 331 aa, Zea mays
  Coding DNA Sequence Number=SeqID_1151
  Gene Ontology: Mol. function=hydrolase activity; Cellular component =integral to membrane; Biological process=aromatic compound metabolic process
  Homolog annotation: Hit_ID=Q9FN79; Match level="QueryCoverage=75%, HitCoverage=55%, E-value=3e-62, Identity=46%"; Hit description =Arabidopsis thaliana genomic DNA, chromosome 5, P1 clone:MVA3
  Pfam annotation: Domain name=Abhydrolase_1; Domain location=13-258; Score=77.0; E_value=5.8e-20; Accession=PF00561.10; Description =alphabeta hydrolase fold
TVFRESSCILDGCRLFAVDLLGFGRSPKPANCMYRVRDHVEAIERTLILAGDGESQSLMSSFHLVSHSMGCTIALALAAKHPTRVKSITLVAPPYFLPCEQRASQVALNRLAEKKLWPPLLFGSAVMSWYEHVGRTVCFLVCKNHLLWEWLFSLLNLNRGVDFRVRDLTKHTHHSAWHTMHNVICGGAALQDANLEAVAAAGIPVQVLHGADDQVVPVECGRHVKAKIPRAKLRVMERRDHSTVVLGRERGFAEELKAFWCASRSPVHVQDAEQQETLDISSPSKDSKIIQHDNTSVPTILARRLRIDLCISSLQQELRAIMQQVLEFPFA

SEQ ID NO: 42931 - protein, 125 aa, Zea mays
  Coding DNA Sequence Number=SeqID_1152
  Gene Ontology: Mol. function=trans-octaprenyltranstransferase activity; Cellular component=chloroplast; Biological process =isoprenoid biosynthetic process
  Homolog annotation: Hit_ID=Q75HZ9; Match level="QueryCoverage=73%, HitCoverage=22%, E-value=2e-38, Identity=85%"; Hit description =Putative polyprenyl diphosphate synthase
SGEFQPVVPVVKAEPLKNQWADEDVEEDDVVDDMLDFTQSAEQLGKPAASDLAKGNLTAPVIFALQSEPELREIIDSEFSDTDSLAAAIELVHRSGGIRRAHELAREKGDLAIQNLQCLPRSDFR

SEQ ID NO: 42932 - protein, 141 aa, Zea mays
  Coding DNA Sequence Number=SeqID_1153
  Gene Ontology: Mol. function=hydrolase activity; Biological process =aromatic compound metabolic process
MPTFPRAGRWSTSSTWPRKTAGAASTALAAVVFAVLDVADVILCFAYALLDGVLEDSPVRCYCHRSYDDGIREAAAGASVDGGGHEEVSDTLYACGRRSTVRDALLGLVRRVVPRTRRTRAPPDETVAPCKWRSPRWSDCA

SEQ ID NO: 42933 - protein, 151 aa, Zea mays
  Coding DNA Sequence Number=SeqID_1154
MVVMVSGSAAAAASNARTAQARYWEVRHPQRGTGWRIHGANLWLGARMVERTGWKGKISGYPPSVELGTARKGEISDDRRERCIARVEWICVVVGSGIVPFHGGVDCAYLPWRVGFAEVRPRGPARLLRVRASLPRRPRWSKNGWVGGGRA

SEQ ID NO: 42934 - protein, 532 aa, Zea mays
  Coding DNA Sequence Number=SeqID_1155
  Gene Ontology: Mol. function=zinc ion binding; Cellular component =nucleus; Biological process=regulation of transcription
  Homolog annotation: Hit_ID=Q84PD2; Match level="QueryCoverage=80%, HitCoverage=81%, E-value=1e-100, Identity=51%"; Hit description=AOBP- like protein
  Pfam annotation: Domain name=zf-Dof; Domain location=19-81; Score =140.5; E_value=4.6e-39; Accession=PF02701.6; Description=Dof domain, zinc finger
MAKTDQGGDVPSGEKVLKKPDKILPCPRCNSMDTKFCYYNNYNIKQPRHFCKSCQRYWTAGGSMRNIPVGAGRRKSKSSSASCRSVLIPVPGSSSVANPGGEASLFPLSVKANQAAVSFGPDSPLCTSMASVLKIGGGGEQVKSCSPASAAAQPRNGETQTQTCAPSSAATTPSDGPGNGLQKGAESAHQNQNQNQNGIIGHSNGVTPVHPIPFFPGPPFVYPWSPAWNGIPAMAAAVCAAPATAEAAISSEHGTASSTVQWNVPPAIVPVLPPGFCGPIPVPVIPPPSVWPLITPWPNAAWSAPWLGPSASVPPGSSRSSGSSTCSDSGCGSGSPVLGKHSRESRPQGDEKAERRCLWIPKTLRIDDPVEAAKSSIWTTLGIEPGDRGMFRPFQSKHGRQQELQASGAARALQANPAALSRSQSFQETTACPQHVGLEVIRFPAPIGHAFEIKQLDVIDYDDELDIINYGDEVTDALSIIDYGSSGVKGLGRPHVMTSQRLTFHLPCGEMTVTLQDCQKSLGLSIRARLVT

SEQ ID NO: 42935 - protein, 1500 aa, Zea mays
  Coding DNA Sequence Number=SeqID_1156
  Homolog annotation: Hit_ID=Q6Z4M4; Match level="QueryCoverage=31%, HitCoverage=79%, E-value=1e-105, Identity=48%"; Hit description =Fibroin heavy chain-like protein
MNIEFHRSVNCPLIMDSIGWVHGDSIVIGCVRLNEDDNEEGYLVQVIRTEESTFCESPGKTDVYTYNDFFHGIMDDVLPPGAGPNLLLGYLHRWGLMVASNKKSVDEHIALLKWPSAHDDEKTVTYLEMLEDKYSPRIDLQENGDDNVILGFGVENVSLFQKITVPVGPEQKEVAPQHILLCLTGEGKVAVYYLARISDPSDLPHATVSTNEDYGEKHISPATVSEKELTPSVAGSVYKSTLTEHGAEPSSAQTGSNQQESINVKNSSSASKEQETTDNSLFISSNKKPLDTKQVNVTGPPAALRSLALTGNTKPTIFSSFSTEGMNPTGGNAPNELASSLQPSSRSFGNNQTGKEGLDSVQSVGIFGGSQNSNKDGNVYGFKSSLFTSSGSVPAKIGERNEVGFGVPSLQTSYTADRKVFGAPVALSSVPSSSISPAKPSPIGYSSSGFRTANSEAPQSLRGSPPSQQSMGKSHNSRTQAPAEYSRNSKKGTGFDSEQDLSKKFYSINEMTKELDALLAYIEKDGGFRDACITIQQRPLSMFEDGLQNFLQLLQVFKGKVEEQCSKIEDLRNNMFQVSARQTYMKGIVSQSSDNQYWDIWNRQKLSPEFEVKRQNILRANQDLTNQLVELERHFNNLEMNRSSETGRVASNRRAVYSNKTSSSQTQLSSVYSALNSQLAAAEQLSECLSKQISVLNIGSPSRKQGMVTKKLFESIGLAHTTDATKFSGSTPKPVKRFPSVNEHSKGILGSSKGGEPETARRRRESLDMSLASLEPQKTTVKRITQQQRLKISSDLPFRSNKKIFDSQMAAISQEKSSDSSNSSIVESYVSRLRSLSEDVNDKLSGPQQNPLFKWVKESTGSSQTSEQKHFELPGQMKSTAQSSKLTPSSPPSFSYTRMGAQDSINPSSVPSFGTKHTVSKPNTLTFKTTISPKSNANTEPNILPSITAPKTSLSPLSVKTAGESGDLPTLTMKNRQDGQSMPSLGNIKGPGASLQNKGGIFRDLDKSSFNSEHSKPAALHEKTDQLSGVGDAVQNTVKDTSKMAPQPSAFLPAPVTQTNSYSLRPTVSSSATSGAKTSDVLSSSMQKVSPIVPGGTVSSSVPTPAKDSSTGLSQNASKPETLISKVTSTIVSASSTSVISVTESKPSVPPTTGASLPSTHVSAPQTAPTTSESVFTSTGKNVGPNTDTISTDEDDMEEEAPSASAELNLGALGGFGLGSQPSSSPQKSNPFGASFGTSGNKSSGTPFTLTTSPGQLFRPASLSIPSAQPAQPSQSTSSSSFSNSFSSGLTGFGQPAQIGSGQQSAFGKPAQIGAGQHAGFGQTAQIQSGFGQPAQIQSGFGQSAQIGTGQQSGFGKPAQIGAVQSGFGQPAQFAAQQTLGSVLGSFGQPPQLGGIGSGGFGGFSSASTSAGFSSLSSGNAGFAGAASGGGFSAPTASAGGGFAAAATGGGFAALASKSGGFVGAASSGGGFGGASQGGGFGSGEISEVVFCFEQILTFG

SEQ ID NO: 42936 - protein, 63 aa, Zea mays
  Coding DNA Sequence Number=SeqID_1157
MAKPVLGLVVVQGTIEGVAFCGIRKGQLADAELGRGGVCSEAEPASGLVRVNMQKGCRDDQVD

SEQ ID NO: 42937 - protein, 352 aa, Zea mays
  Coding DNA Sequence Number=SeqID_1158
  Gene Ontology: Mol. function=sequence-specific DNA binding; Cellular component=nucleus; Biological process=regulation of transcription, DNA-dependent
  Homolog annotation: Hit_ID=Q10M28; Match level="QueryCoverage=73%, HitCoverage=86%, E-value=1e-51, Identity=44%"; Hit description =Homeobox domain containing protein, expressed
  Pfam annotation: Domain name=Homeobox; Domain location=16-77; Score =47.2; E_value=5.5e-11; Accession=PF00046.19; Description=Homeobox domain
MEGGLSPERHAAAEPVRSRWTPKPEQILILESIFNSGMVNPPKDETVRIRKLLERFGAVGDANVFYWFQNRRSRSRRRQRQLQAQAAAAAAASSSSSGSPPTSGLAPGHATASSTAGMFAHGATYGSSASASWPPPPSCEGMMGDLDYGGGDDLFAISRQMGYASGGGSGSASSAAIAHHEQQQQQLYYSPCQPAASMTVFINGVATEVPRGPIDLRSMFGQDVMLVHSTAGLLPVNEYGVLTQSLQMGESYFLSHQALSIHPSGWHRTACRAHSAASGDLTARAGQMEATACLLPRPLSLPTDRPPARPPASAISNQLEADNTQQSEQQLPTLFILHRTVVAIDRHQFKHK

SEQ ID NO: 42938 - protein, 102 aa, Zea mays
  Coding DNA Sequence Number=SeqID_1159
  Subcellular localization annotation: CTP_CleavageSite=41; ConfidenceScore=5.31e-01
MPRGVASSSSSSSIPVPGMQPAPARPSCHAYAGDTDGRTVSQSKVAAGNRQPYPSHWGRQTDGISAPSAEWKRGRCAWGRQADSGQPEKELASFVCPCQASA

SEQ ID NO: 42939 - protein, 448 aa, Zea mays
  Coding DNA Sequence Number=SeqID_1160
  Homolog annotation: Hit_ID=UPI000065F62C; Match level="QueryCoverage =19%, HitCoverage=7%, E-value=3e-18, Identity=51%"; Hit description =Homolog of Homo sapiens "BRD1 protein
  Pfam annotation: Domain name=Bromodomain; Domain location=122-209; Score=91.0; E_value=3.7e-24; Accession=PF00439.15; Description =Bromodomain
  Subcellular localization annotation: CTP_CleavageSite=46; ConfidenceScore=5.62e-01
MAKTRKPPAPPSPPPPPAETPSPQRRRKKKGRPSLLDLQRRSLRLQAQNPSPAASPTRRDPNPSDDDEDGTGSGRRRQKRLKSVLSGVVKEEQGEGKKDAAKATGKEDAASDGGPTGTPLPDKKLLLFILDRLQKKDTYGVFSEPVDAEELPDYFDIIDHPMDFSTIREKLLNDSYSKLEQFEDDVFLLTSNAMSYNSADTIYFRQARSIEALAKKDFENLRQPSDEEEPKPPARRGRPPKNPKTEGDVSPDLSNVKANKPEDNVDTFRKRSTGDRTRNTNTPMKDLSSFHDTFGSFSAKRTDKIGDYSGSSKWGKKPVSLDDDRRSTYDQHYSRNSSLFAALDDERKLLVPVGVQQPHAYARSLARFASKLGPVGWDVAANRIRRALPPGTSFGPGWVVDGEPPQNSQWAPAASTNPSSEPTAPPNMPSKNDVLDHKSGPSSNGDVT

SEQ ID NO: 42940 - protein, 797 aa, Zea mays
  Coding DNA Sequence Number=SeqID_1161
  Gene Ontology: Mol. function=hydrolase activity; Cellular component =intracellular; Biological process=metabolic process
  Homolog annotation: Hit_ID=Q10S36; Match level="QueryCoverage=99%, HitCoverage=100%, E-value=0.0, Identity=73%"; Hit description =Pentatricopeptide, putative, expressed
  Pfam annotation: Domain name=PPR; Domain location=189-223; Score =22.4; E_value=0.0016; Accession=PF01535.11; Description=PPR repeat
  Pfam annotation: Domain name=PPR; Domain location=291-325; Score =33.9; E_value=5.6e-07; Accession=PF01535.11; Description=PPR repeat
  Pfam annotation: Domain name=PPR; Domain location=392-426; Score =26.6; E_value=8.6e-05; Accession=PF01535.11; Description=PPR repeat
  Pfam annotation: Domain name=PPR; Domain location=493-527; Score =47.0; E_value=6.3e-11; Accession=PF01535.11; Description=PPR repeat
  Pfam annotation: Domain name=PPR; Domain location=564-598; Score=4.0; E_value=2.5; Accession=PF01535.11; Description=PPR repeat
  Pfam annotation: Domain name=PPR; Domain location=630-664; Score =18.3; E_value=0.027; Accession=PF01535.11; Description=PPR repeat
  Pfam annotation: Domain name=PPR; Domain location=88-122; Score=22.1; E_value=0.0021; Accession=PF01535.11; Description=PPR repeat
  Pfam module annotation: Pfam domain module=PPR::PPR::PPR::PPR::PPR::PP R::PPR; Domain location=189-223::291-325::392-426::493-527::564 -598::630-664::88-122
  Subcellular localization annotation: CTP_CleavageSite=10; ConfidenceScore=5.32e-01
MATPLLLPSRAAHAASATTCASQHLKATTSKEPPPRARPKHGEGGAPRPVPVPSSAPRPKSLVLSHIAAGRMDEAADAFAGVSSPGAFLHNVMIRGFADAGLPLDALAAYRAMLAASARPDRFTFPVVVKCCTRAGALGEGRAAHAAVIKLGLGADMYTANSLVALYAKLGLVGDAERVFDGMPARDIVSWNTMVDGYVSNGMGALALACFRDMNDALRVRHDGVGVIAALAACCLESALAQGREIHGYAIRHGLEQDVKVGTSLVDMYCKCGNVLYAENVFATMLLRTVVTWNCLIGGYALNERPVDAFDCFMQMRAEGFQVEAVTAINLLAACGQTESSLYGRSVHAYVVRRHFLPHVVLETALLEMYGNVGKVESSEKIFGQMTEKTVVTWNNMIAAYIYMEMYQEAIALFLELLNQPLYPDYFTMTTVVPAFVLLGSLRQCRQMHSYIIKLGYGDSTLIMNAVMHMYARCGDIVASREIFDKMPGKDVISWNTIIIGYAIHGQGKTALEMFDEMKCNGIEPNESTFVSVLTACSVSGLETEGWKEFNSMQHEYGMVPQIEHYGCMTDLLGRAGDLREVLRFIENMPIAPTSRIWGSLLTASRNKNDIDIAEYAAERIFQLEHNNTGCYVVLSSMYADAGRWEDVERIRSLMKEKGLRRTEARSLVELNAEECSFVNGDMSHPQSEKIHELSDILSRNIGEDLDSPTNLRDSDPFASGKTVLPNKHSVRLAVAFGLISSEPGTPILVKKNVRVCNHCHRALKLISKYSRRKIVVGDTKIYHIFSDGSCCCGDYW

SEQ ID NO: 42941 - protein, 379 aa, Zea mays
  Coding DNA Sequence Number=SeqID_1162
  Gene Ontology: Mol. function=heat shock protein binding; Cellular component=integral to membrane; Biological process=protein folding
  Homolog annotation: Hit_ID=Q10S35; Match level="QueryCoverage=78%, HitCoverage=100%, E-value=7e-96, Identity=64%"; Hit description=DnaJ domain containing protein, expressed
  Pfam annotation: Domain name=DnaJ; Domain location=94-161; Score =61.9; E_value=2.1e-15; Accession=PF00226.21; Description=DnaJ domain
  Pfam annotation: Domain name=RRM_1; Domain location=272-332; Score =14.5; E_value=0.0065; Accession=PF00076.12; Description=RNA recognition motif. (a.k.a. RRM, RBD, or
  Pfam module annotation: Pfam domain module=DnaJ::RRM_1; Domain location=94-161::272-332
MVTSGEAGICLRLETLGEMPRVRRYLSCFPLESDEARQEFGSPGRDGQTALVVPQLGNSPSAHPDLGFVHPPLTRLPTKQLPMAATGQEGDDVDHYEVLCLPSGEEGAALTIEHIEKAYRTQSRLRHPDKRPDDPNATADFQLLSSSYKLLRDESLRRQFDARLRGRREAAARAAATGVKRRKAVSDLEERERAAAAGHPADPEELAKREAQRMAADIERELAAFRAAKQASAFGATSTSAHGDKKGGTPQDGVKTDKGKILKVSWDGSADSYSAAKLEEIFQKFGKVEDIVIKTRKSRSKGSAIVVMGSKEAALLAIQNHFSLFPLNVAPVQESGGLSTRPTETYESRTNNTDGTGFNDLEASVFRKLREAQKRKHFG

SEQ ID NO: 42942 - protein, 284 aa, Zea mays
  Coding DNA Sequence Number=SeqID_1163
  Gene Ontology: Mol. function=glutathione transferase activity; Cellular component=cytoplasm; Biological process=auxin mediated signaling pathway
  Homolog annotation: Hit_ID=Q9FQA8; Match level="QueryCoverage=81%, HitCoverage=100%, E-value=1e-107, Identity=85%"; Hit description =Glutathione S-transferase GST 31
  Pfam annotation: Domain name=GST_C; Domain location=151-253; Score =41.1; E_value=3.8e-09; Accession=PF00043.15; Description=Glutathione S-transferase, C-terminal domain
  Pfam annotation: Domain name=GST_N; Domain location=56-129; Score =66.0; E_value=1.2e-16; Accession=PF02798.10; Description=Glutathione S-transferase, N-terminal domain
  Pfam module annotation: Pfam domain module=GST_C::GST_N; Domain location=151-253::56-129
MTHATGPSLWGCQGCRRTGPPKIEGPVATDMSRLTTTETVVLPVELSELGKKMSEAAVRVIGLWPSPFVIRVLIALKLKGVEFEFVEEVVGRKSELLLRSNPVHKKIPVLLHHGKPISESLIIVQYIDEVWSSGAPAFLPVDAHARAVQRFWAQYVDDKLPWAIRILKGTDDGGMEQAAGQLSAALQLLEEAFAQLSQGKRYFGGDSVGYLDIALVSHVGWVKAVEKIAGVTLLDKAKVPNLVAWADRLCAHPAVVDAIPDADKFVEFSVTYGSFSKPINAPAK

SEQ ID NO: 42943 - protein, 147 aa, Zea mays
  Coding DNA Sequence Number=SeqID_1164
  Gene Ontology: Mol. function=4 iron, 4 sulfur cluster binding; Cellular component=mitochondrion; Biological process=metabolic process
  Homolog annotation: Hit_ID=Q10S34; Match level="QueryCoverage=99%, HitCoverage=17%, E-value=1e-71, Identity=78%"; Hit description =Aconitate hydratase, cytoplasmic, putative, expressed
  Pfam annotation: Domain name=Aconitase_C; Domain location=1-104; Score=133.1; E_value=7.5e-37; Accession=PF00694.9; Description =Aconitase C-terminal domain
MARGTFANIRLVNKFLKGEVGPKTIHVPSGEKLAVFDAAMKYKNEGHDTIILAGAEYGSGSSRDWAAKGPMLQGVKAVIAKSFERIHRSNLAGMGIIPLCYKAGEDADTLGLTGHERYTVHLPTNVELAYYDHGGILPYVARKIAEQ

SEQ ID NO: 42944 - protein, 66 aa, Zea mays
  Coding DNA Sequence Number=SeqID_1165
MSRETEPGAAEPFAVWINSPMGTEMGEKNLPMNVHGTDIGNCWDENGVPFTDGEFCIAISLSDLVG

SEQ ID NO: 42945 - protein, 490 aa, Zea mays
  Coding DNA Sequence Number=SeqID_1166
  Gene Ontology: Mol. function=inorganic phosphate transporter activity; Cellular component=integral to membrane; Biological process=phosphate transport
  Homolog annotation: Hit_ID=Q1KSA4; Match level="QueryCoverage=98%, HitCoverage=90%, E-value=0.0, Identity=85%"; Hit description =Putative phosphate:H+ symporter
  Pfam annotation: Domain name=MFS_1; Domain location=29-481; Score =69.2; E_value=1.3e-17; Accession=PF07690.6; Description=Major Facilitator Superfamily
  Pfam annotation: Domain name=Sugar_tr; Domain location=24-490; Score=- 10.3; E_value=1.5e-06; Accession=PF00083.14; Description=Sugar (and other) transporter
  Pfam module annotation: Pfam domain module=MFS_1::Sugar_tr; Domain location=29-481::24-490
MAGGQNMQVLSALDGAKTQRYHFTAIVVAGMGFFTDAYDLFCISLVTKLIGRIYYTVDGSPRPGSLPPHVSAAVNGVAFVGTLSGQLFFGWLGDRVGRKSVYGMTLLTMVVCSVASGLSFGRSPACVMATLCFFRFWLGFGIGGDYPLSATIMSEYANKRTRGAFVAAVFAMQGFGILAGGAVAIGVTALFRSRFPAPPYDVDPAASTPAEADLVWRIILMFGAVPAALTFYSRMKMPETARYTALVARNAERAAADMSRVLQVDIGNKEQPGAEEEATTGTEARLRGEQEEATTGPPFGLFSREFAHRHGLHLVGTASTWLLLDIAYYSQNLFQKDIFSAVGWIPAAETISALDELFHIARAQTLIALCGTVPGYWFTVAFIDIVGRFAIQAVGFLMMTAFMLGLAVPYRQWTRPGNQTGFVVMYALTFFFANFGPNATTFIVPAEIYPARLRATCHGISAASGKVGAIIGSFGFLYLAQSQDPAKTAH

SEQ ID NO: 42946 - protein, 71 aa, Zea mays
  Coding DNA Sequence Number=SeqID_1167
TLGSGSWSTANWLVAASLRTGWLLAASWSTTHWLVSGGWSTAHWLGARATAGALLHWAAAPGPEAMAPWRL

SEQ ID NO: 42947 - protein, 78 aa, Zea mays
  Coding DNA Sequence Number=SeqID_1168
MDDGRVRMGKGKVGRRVTDIRWITDTRRVRVPTSVNGYGYGFGFISWIWSEPYIRVLPARLPSLSLPSVDILSSIHVY

SEQ ID NO: 42948 - protein, 217 aa, Zea mays
  Coding DNA Sequence Number=SeqID_1169
  Homolog annotation: Hit_ID=Q9XHE1; Match level="QueryCoverage=79%, HitCoverage=28%, E-value=2e-65, Identity=69%"; Hit description =CENPCA protein
MCKDMVAGSTVIRPWIHLSVEKKTWKDDEDKSSQLLEMPQEDINPLNQAQMHGGSTKKSAPDLSPTKQKKQQAVQERKRKQQSKRGKKWLKQTITSSTPSPNGAKGQKRAQRRNQTKKRNQRKILGDADLACQPGVRKSSRTRSRPLEYWLGERLLYGPIHDNLHGAIGIKAYSPGQDGKRSLKVKSFVPEQYSDLVAKSASVMAHAVKVSCGVIVS

SEQ ID NO: 42949 - protein, 1215 aa, Zea mays
  Coding DNA Sequence Number=SeqID_1170
  Gene Ontology: Mol. function=magnesium chelatase activity; Biological process=chlorophyll biosynthetic process
  Homolog annotation: Hit_ID=Q10M50; Match level="QueryCoverage=74%, HitCoverage=99%, E-value=0.0, Identity=81%"; Hit description =Magnesium-chelatase subunit H family protein, expressed
  Pfam annotation: Domain name=CobN-Mg_chel; Domain location=591-1215; Score=452.7; E_value=4.8e-133; Accession=PF02514.7; Description =CobNMagnesium Chelatase
  Pfam annotation: Domain name=DUF689; Domain location=7-245; Score =228.5; E_value=1.5e-65; Accession=PF05093.4; Description=Protein of unknown function (DUF689)
  Pfam module annotation: Pfam domain module=CobN-Mg_chel::DUF689; Domain location=591-1215::7-245
FDSMSAALAVTDEVALPIRAVGDLAAAAEVSREEVAVITQCAALVIKNVESLREQLVAEIRRVLKAGGRVLVQSPAPSSSQKPNTDIERKLLMGGFAEVQSSAASSQDSVQSVTVKAKKASWSMGSSFPLKKTTKALPKIQIDDDSDLIDEDSLLTEEDLKKPQLPVGRATKPVNLVQLPKKACKNCTCGRAEAEEKVGKLELTAEQINNPQSACGSCGLGDAFRCGTCPYRGLPPFKPGEKPGCLFLIETKDVDTDNLYIFPPPALPCSLLLLSLLCFRGTAAAKNNCPATSQEQAPYSSAMSSSLVSTPFAAAAQKQLLAAPVPLHSFLLSSRRQQPRRAGAIRCAVAGGNGLFTQTKPEVRRVVPADPRGLPRVKVVYVVLEAHSSTLTRAAPRRSRSWATFRADLADVNVFIGSLIFVEELALKVKAAAEKERDRMDAVLVFPSMPEVMRLNKLGSFSMSQLGQSKSPFFQLFKRSKSNSSNFADSMLKLVRTLPKVLKYLPSDKAQDAWLYILSLQFWLGGSADNLQNFLKMIAGSYLPVLRGAGIKYDDPVLYLDSGIWHPLAPTMYEDVKEYLNWLKDPNAPVIGLVLQRSHIVTGDDGHYVAVIMELEARGHIVWGAKVIPIFAGGLDFSGPTQRYLVDPITGKPFVNAVVSLTGFALVGGPARQDHPKAIAALQKLDVPYIVALPLVFQTTEEWLNSTLGLHPIQVALQVALPELDGKSHALHRRVEQLCTRAIRWAELKRKTKEDKKLAITVFSFPPDKGNVGTAAYLNVFSSIYSVLSDLKKDGYNVEGLPDTPEALIEEVIHDKEAQFNSPNLNVAYRMNVREYQALTSYASLLEENWGKPPGHLNSDGENLLVYGKQYGNVFIGVQPTFGYEGDPMRLLLSKSASPHHGFAAYYTFVEKIFQADAVLNFGTHGSLEFMPGKQVGMSDACYPDSLIGNIPNIYYYAANNPSEATVAKRRSYANTISYLTPPAENAGLYKGLKQLAELISSYQSLKDTGRGPQIVSSIISTAKQCNLDKDVPLPEEGEELPPSERDLIVGKVYAKIMEIESRLPPCGLHVIGEPPTAIEAVATLVNIAALDRPEDGIISLPGILAATVGRDIEDVYRGSDKGILADVELLRQITEASRGAITAFVEKTTNSKGQVVNVANNLSNILGFGLSEPWVQYQDNELGSGRGYWETSEENLDRLRELYSEVEDKIEGID

SEQ ID NO: 42950 - protein, 335 aa, Zea mays
  Coding DNA Sequence Number=SeqID_1171
  Gene Ontology: Mol. function=binding; Cellular component=thylakoid; Biological process=photosynthesis
  Homolog annotation: Hit_ID=Q60D20; Match level="QueryCoverage=63%, HitCoverage=81%, E-value=3e-32, Identity=36%"; Hit description =Putative TPR domain containing protein, identical
  Pfam annotation: Domain name=TPR_1; Domain location=163-196; Score =5.8; E_value=1.1; Accession=PF00515.18; Description=Tetratricopeptide repeat
  Pfam annotation: Domain name=TPR_1; Domain location=197-230; Score =25.0; E_value=0.00026; Accession=PF00515.18; Description =Tetratricopeptide repeat
  Pfam annotation: Domain name=TPR_2; Domain location=163-196; Score =14.0; E_value=0.55; Accession=PF07719.7; Description=Tetratricopeptid e repeat
  Pfam annotation: Domain name=TPR_2; Domain location=197-230; Score =30.1; E_value=8e-06; Accession=PF07719.7; Description=Tetratricopepti de repeat
  Pfam annotation: Domain name=TPR_4; Domain location=127-152; Score =13.5; E_value=0.79; Accession=PF07721.5; Description=Tetratricopeptid e repeat
  Pfam annotation: Domain name=TPR_4; Domain location=197-222; Score =8.6; E_value=3.5; Accession=PF07721.5; Description=Tetratricopeptide repeat
  Pfam module annotation: Pfam domain module=TPR_1::TPR_1::TPR_2::TPR _2::TPR_4::TPR_4; Domain location=163-196::197-230::163-196::197 -230::127-152::197-222
  Subcellular localization annotation: CTP_CleavageSite=34; ConfidenceScore=5.48e-01
MAMAMPMAVARVTSLACAPRQAQHRRRHSLAPPCASGAVEVRVCTNRTCARQGGREVLAALAGLAPPAVDVASCGCLGRCGAGPNVAASVPGSAAVFGHVGTAARGAQLLEHLLGPAEFDAALGLTALATREKAEAALEKGNADEAEALLTEVIGFNACGGLHLVYMSRSKARLEIGDIPGALGDAEEAIRIAPRFPQAHLLRGDALFAMGEYSVAEDAYADALDLDPSIRRSKSFRVKVTEMQHGYCLALSRCYIHFFVYEGCPSSKLHISDFRCTLPQLPLTVKQCLVGGMIPPFGAVWSVYVKRGLDSRLTLFLKDLFVLIIHVLVCSSSIA

SEQ ID NO: 42951 - protein, 303 aa, Zea mays
  Coding DNA Sequence Number=SeqID_1172
  Gene Ontology: Mol. function=hydrolase activity; Cellular component =membrane; Biological process=metabolic process
  Homolog annotation: Hit_ID=Q6ZDS0; Match level="QueryCoverage=85%, HitCoverage=81%, E-value=1e-124, Identity=84%"; Hit description =Putative CfxY protein
  Pfam annotation: Domain name=Hydrolase; Domain location=50-267; Score= 94.7; E_value=2.7e-25; Accession=PF00702.16; Description=haloacid dehalogenase-like hydrolase
  Subcellular localization annotation: CTP_CleavageSite=40; ConfidenceScore=5.69e-01
MPSTSLAVPTGAVGVAGSRRYPFISNRSASSAPRLRRAPRLVMVSASASLEALIFDCDGVILESEHLHRQAYNDAFANFGVRCPPGSADLLYWDEAFYDNLQNRIGGGKPKMRWYFGENGWPPSKIFETPPSTDSDKEKLVDIIQDWKTERYKEIINSGTVKPRPGVLQLMDEVKDAGIKLAVCSAATKSSVIMCLENLIGLERFNGLDCFLAGDDVKLKKPDPTIYITASEKLGVESKNCLVVEDSVIGLQAAKGAGMSCIITYTPSTASQDFKDAIATYPDLNNVRLEDLKLLLQKTLVTG

SEQ ID NO: 42952 - protein, 559 aa, Zea mays
  Coding DNA Sequence Number=SeqID_1173
  Gene Ontology: Mol. function=signal transducer activity; Cellular component=membrane; Biological process=response to light stimulus
  Homolog annotation: Hit_ID=Q7XIJ3; Match level="QueryCoverage=85%, HitCoverage=96%, E-value=5e-47, Identity=28%"; Hit description =Putative phototropic response protein family
  Pfam annotation: Domain name=NPH3; Domain location=182-417; Score =262.1; E_value=1.1e-75; Accession=PF03000.5; Description=NPH3 family
MCAFSGRLRTLVKQEKKKKKGGGRKEAVSINLAGGFPGGADGFELVARFCYNDGRVLLCTSNLPLLHCAAVSLEMTEEVCACNLLAQAEAFVNGLYYWTWGDVLAAVRSCEPFAAAADASGLLDRLISALFSKITGATPGPGPGTPNRSSSSCSSSPDTAGLRRSSSSANKTPDSMRPCAGREWWFDDMTSLSPPTVEKVMRVLGCYGVENKNLILTRFLLHYLRAATRRPPALEREGAALAGLAETAVHGVALVGGTAFSCRGLFWVLRIVSAVGLSRECRHKLERLMGLMLDQATLDDLLVSGDDGGGVYDVNLVMRLVRVFVASEEEADAPSERMRKVGRLVDKYLGEISPDQGLKVSKFLAVAESLPDSARDCYDGVYRALDIYLESHPALSLEERTTLCRCLNYEKLTLEACKDLAKNRRIPPGVAVQALASQQCKLHISEPGPGGSATAAAGKERRPDPSSCSQSQTPRRRVARRATRSVDLGRRSGGDDDEKELLRLNLQRMQSRVVELERACKEMKGQMSRMAKGKSLSLSFGSGAASCHQTGGRGLPRLC

SEQ ID NO: 42953 - protein, 189 aa, Zea mays
  Coding DNA Sequence Number=SeqID_1174
  Gene Ontology: Mol. function=hydrolase activity, hydrolyzing O -glycosyl compounds; Biological process=carbohydrate metabolic process
  Homolog annotation: Hit_ID=Q54NG8; Match level="QueryCoverage=24%, HitCoverage=18%, E-value=4e-08, Identity=64%"; Hit description =Hypothetical protein rsc43
  Pfam annotation: Domain name=DUF689; Domain location=1-189; Score =55.5; E_value=1.8e-13; Accession=PF05093.4; Description=Protein of unknown function (DUF689)
ASVGAVLAVIKNVESLREQLVAEIRRVLKAGGRVLVQSPAPSSSQKPNTDIERKLLMGGFAEVQSSAASSQDSVQSVTVKAKKASWSMGSSFPLKKTTKALPKIQIDDDSDLIDEDSLLTEEDLKKPQLPVGRATKPVNLVQLLGDCEVGAAKKACKNCTCGRAEAEEKVGKLELTAEQINNPQSACGS

SEQ ID NO: 42954 - protein, 178 aa, Zea mays
  Coding DNA Sequence Number=SeqID_1175
  Homolog annotation: Hit_ID=Q6R3K4; Match level="QueryCoverage=45%, HitCoverage=11%, E-value=2e-14, Identity=63%"; Hit description=Metal- nicotianamine transporter YSL8
  Subcellular localization annotation: CTP_CleavageSite=67; ConfidenceScore=5.65e-01
MKTPVKFFFAFFSGSTPPAGCGFMSFPTLGQWASRPRGRKGRLMVWYLADLKPSSRSSSGIVSYRVRKQETVGKIQVQPGFLQIHPSNPPPTSRWALAMAMAIPFYLGPYFVIGSLVRLVWDRLDPGRVKALVPPVASGLICCGDGIWTLPQSVLAAWRSAARRRQASHLHEVPVPQT

SEQ ID NO: 42955 - protein, 216 aa, Zea mays
  Coding DNA Sequence Number=SeqID_1176
MASARVPAGARKRRGLALAAWLPSSAMSLAHPWAESQTEGGQRRGPRVLGYGATAGYRPVPLRSGRCLPPAGAATTPPATASPVARGGGSGLVNFSVRVAWLLGCEFRLLFFVSLRVSWLLGCVPSFPGSCTVSTNAFALPRFPRRRRYEDAVRSHWMDSREFLVPGKLSDFVLLRPEADRQACRAASLKRLHAFPLSCSCTAAPVRIHPYMKKTC

SEQ ID NO: 42956 - protein, 192 aa, Zea mays
  Coding DNA Sequence Number=SeqID_1177
MTYHDQEMGIPPEIRCTPSSSSSWITHSTQSLKDQQEVDERNTLSFRFGRGRDGGSRVRRRGAGDGRGRGSVGAAAARRNDVEGVRGRARSRGPGVAAGRGARARWSGEGAAGECTAAATRESERARARRAGAGEGAAGQGRGVAGEGSAGEGRGAGEGAAGKGRGAVGEGGQGRSGRGRSGGGVESSGGGA

SEQ ID NO: 42957 - protein, 591 aa, Zea mays
  Coding DNA Sequence Number=SeqID_1178
  Gene Ontology: Mol. function=transferase activity; Cellular component= membrane; Biological process=protein metabolic process
  Homolog annotation: Hit_ID=Q7PC76; Match level="QueryCoverage=99%, HitCoverage=98%, E-value=1e-160, Identity=86%"; Hit description =Cellulose synthase-like A1
  Pfam annotation: Domain name=Glycos_transf_2; Domain location=80-265; Score=33.4; E_value=7.9e-07; Accession=PF00535.16; Description =Glycosyl transferase
MDALPEAWSQVRAPVIVPLLRLAVAVCLTMSVLLFLERVYMAVVISGVRLLRLRPDRRYRCDPLPEDDPELGSSAFPVVLVQIPMFNEREVYQLSIGAVCGLSWPADRLVVQVLDDSTDEVIKEMVRMECERWARKGINITYQIREDRKGYKAGALRAGMRHAYVRDCEYVAIFDADFQPDPDYLKRTIPYLVHNPEIALVQARWRFGQSDANATDSPCGAPGCLLPRARALLSRPDRRTATGDGTPHFLGYCAAVRLLLRPVLTLSAQRSGGGVAYSLVPRQMQMRRQRQRDEEVEMSLDYHFTVEQEVSSSVCAFFGFNGTAGVWRISAVNEAGGWKDRTTVEDMDLAIRASLKGWKFVYLGDVQVKSELPSTFKAFRFQQHRWSCGPANLFRKMLMEIVTNKKVTIWKKIHVIYNFFLIRKIIAHIITFSFYCVIIPATIFVPEVRIPKWGCVYIPSAITLLNSVGTPRSFHLLFFWVAFENVMSLHRTKATLIGLLEAGRANEWVVTAKLGSAMKMKSANKAGLRKQFMRIWERLHVTELGVAAFLFSCGWYDLAYGRDHFFIYLFFQSVAFFIVGVGYVGTIVPQS

SEQ ID NO: 42958 - protein, 132 aa, Zea mays
  Coding DNA Sequence Number=SeqID_1179
MTRSRTSSPALLVAIESLWLAAFRPASLAPCLRQSPGPTNRRSSFGDQMIQLFEFYKVEDPEHLFGEGKNWGVVRFAVVPLMGLGVCGSLCQEMFGLQAVMRMMVFYYDYGNGKEGVEADLQEFQDFDEFED

SEQ ID NO: 42959 - protein, 64 aa, Zea mays
  Coding DNA Sequence Number=SeqID_1180
MANPRACCHCVFTGSSGMMVGGLGPPDRKPCPWRHYALTCAAAPSLLRRPGVWVKKTSSRSLDV

SEQ ID NO: 42960 - protein, 52 aa, Zea mays
  Coding DNA Sequence Number=SeqID_1181
MTRLSISSFYKTGDKEGGKCTGACLIAGEDLKPFYSGKQLDETPPLDQQALK

SEQ ID NO: 42961 - protein, 124 aa, Zea mays
  Coding DNA Sequence Number=SeqID_1182
MAGIEAELEGDVAGAYRPSWGFTASSEGAETRANWRLGGQALGIGSAEQGGRSFGEMGRAEEVPRRIRAREKLGAAARRSMGRKMSRDGRAQAPRSHGRESEPEGAAHSSRRGTKRDHGSEPGA

SEQ ID NO: 42962 - protein, 111 aa, Zea mays
  Coding DNA Sequence Number=SeqID_1183
MARVHEVVSRDLGRAIRIGRRRCSCSSAVKSPELGRVWATGVLRSARIGEAKPTNTLVGFWPRERGSEMGEQWRESSGWVEGNTDEESRPRGEAIECNRVRSSFGGGRGVL

SEQ ID NO: 42963 - protein, 216 aa, Zea mays
  Coding DNA Sequence Number=SeqID_1184
  Subcellular localization annotation: CTP_CleavageSite=67; ConfidenceScore=5.28e-01
MVVGRLFVDGRTGQSGRRPRSRAGRVAHSRRLALELVRAGRQGAGAPPSRGGSSRARRAGEQRRLCRAGATPPSRGAKAALVTVALAQGRRAQSCRGCFGRAVAVALELGASWPPGRLRRRLDGDGTRPHGTGARGLDILGFLGNGPRLRPIRRGQVRCRPAAAEAVEAAISGLFVPVNGPFRVCLNGPGSCPPVGLGVGPSLAVTCQQSTGITCI

SEQ ID NO: 42964 - protein, 164 aa, Zea mays
  Coding DNA Sequence Number=SeqID_1185
  Subcellular localization annotation: CTP_CleavageSite=53; ConfidenceScore=5.47e-01
MENNIQEFGGSVGVPRHRTAIAKRLRRSTASKKVAGEKCKRSSSPPSSSSSTRSTAPDPKRTRVVEQRCADIIDVVHGAFQPVNSPVINEMNHALVEIEDLAKDLDHLALEKDWEVDHMDHSENVESSDADDELLIDYDSELNNDDIIDYDDGRDYSTDDTYPY

SEQ ID NO: 42965 - protein, 427 aa, Zea mays
  Coding DNA Sequence Number=SeqID_1186
  Gene Ontology: Mol. function=molecular_function; Cellular component =membrane; Biological process=auxin mediated signaling pathway
  Homolog annotation: Hit_ID=Q5JNG4; Match level="QueryCoverage=85%, HitCoverage=87%, E-value=1e-134, Identity=68%"; Hit description =Putative MtN21
  Pfam annotation: Domain name=DUF6; Domain location=16-143; Score =60.2; E_value=6.6e-15; Accession=PF00892.11; Description=Integral membrane protein DUF6
  Pfam annotation: Domain name=DUF6; Domain location=196-328; Score =29.0; E_value=1.6e-05; Accession=PF00892.11; Description=Integral membrane protein DUF6
  Pfam annotation: Domain name=EIID-AGA; Domain location=63-268; Score=- 167.6; E_value=0.096; Accession=PF03613.5; Description=PTS system mannosefructosesorbose family IID component
  Pfam module annotation: Pfam domain module=DUF6::DUF6::EIID-AGA; Domain location=16-143::196-328::63-268
MGKSCVPPVAMVLVQLGFAGMNVVSKLALDAGMSPYVLIAYRNLIAAAVISPVAYLLERRSGATITKKVLLQIFVSSIFGATLNQVLYFVGLKSTSPTVACALTNTLPALTFVMAAALKMESVRPGTPAGQAKLVGTAVCVGGSMVIPFYKGPVLGLWASPLHWRFVADHAPSPAAAAAHSGAAVLGDVLIIASCVAWAVWFILHTKMSEGFSAPYTSTAIMCLMAGVQCAGVSAAMDRSLDVWKLGCDIRLYSVLYIGIVGSGIGFTLMSWCIQVRGPLYVSMFSPLLLVVVAIIGWAILGEKIRVGTYVDHQLTSQSVHGEILIKLMSSSSAPSILHTLPAYSAVGSVLIVAGLYMVLWGKGREMDRPDLDNDDDIADEETAVGLVGFSGKGGGAVAIASSRVEAISLPVSFSTTSPKRLQHIHG

SEQ ID NO: 42966 - protein, 136 aa, Zea mays
  Coding DNA Sequence Number=SeqID_1187
  Subcellular localization annotation: CTP_CleavageSite=36; ConfidenceScore=5.03e-01
EIYEIEPTNRAPMPPLACLHRAQRAPSRTTNLTHSRGSLDTVASRLPLPPPCSPWSHATVRLPTLDAHPPHPRPSATRSSSPTTSTASSPTCTATAARDAPRLGLQQRRRERCPYYLRRHVLGCRLRVDAIAEIDL

SEQ ID NO: 42967 - protein, 435 aa, Zea mays
  Coding DNA Sequence Number=SeqID_1188
  Gene Ontology: Mol. function=protein serine/threonine kinase activity; Cellular component=membrane; Biological process=protein amino acid phosphorylation
  Homolog annotation: Hit_ID=Q6I5Q6; Match level="QueryCoverage=78%, HitCoverage=74%, E-value=1e-109, Identity=54%"; Hit description =Putative serine/threonine protein kinase
  Pfam annotation: Domain name=Pkinase; Domain location=56-326; Score =115.0; E_value=2.2e-31; Accession=PF00069.15; Description=Protein kinase domain
  Pfam annotation: Domain name=Pkinase_Tyr; Domain location=56-328; Score=85.6; E_value=1.5e-22; Accession=PF07714.7; Description =Protein tyrosine kinase
  Pfam module annotation: Pfam domain module=Pkinase::Pkinase_Tyr; Domain location=56-326::56-328
MGCFGCFAPEVDEDLRPSKHDDSSGADARRKVAPDVASGYAHSFTFKDLLVATGYFNEANFIGEGGFGKVYKGKINGQMVAVKQLARDGVQGRNEFLVEVLMLTVLNHRNLVSLVGFCAQGDERLLVYEYMPFGSLESHLFDVPLGKKPLDWNTRVRIAVGVAEGVSYLHNVADPPVIYRDMKAANILLGEDFSPRLSDFGLAKVGPVGDRTHVSTRVMGTYGYCAPDYVVSGKLTMKSDIYSFGVLLLELITGRRIYDASRPKPEQSLLTWSRPFLHDKRKFYRLADPALLGCYPSSALNQLVVISIMCLQDQPHVRPIISDVVIGLNHVASQPYTAERPPPASAVYIGSVSSVGGSWDVHHQFTSHVQSCHGWPVDAIRSSPGFKLKRHITCWSSVVFLSSALGNLLRLRLETQSLMPEAVPWPGTSSDPCGL

SEQ ID NO: 42968 - protein, 536 aa, Zea mays
  Coding DNA Sequence Number=SeqID_1189
  Gene Ontology: Mol. function=oxidoreductase activity; Cellular component=nucleus; Biological process=protein modification process
  Homolog annotation: Hit_ID=Q10S80; Match level="QueryCoverage=75%, HitCoverage=72%, E-value=1e-149, Identity=69%"; Hit description =Ubiquitin family protein, expressed
  Pfam annotation: Domain name=UBA; Domain location=493-533; Score =45.7; E_value=1.6e-10; Accession=PF00627.21; Description=UBATS-N domain
MPWAPRCDWHRYGCSARTAESRHQGVEHVCRQDAEGRALRTLGWGRQTRWTGRWALASGDLAVGVETDHTIHMVRGAAPPPASTAPAANQEPTTAAPASSPAAGLGGLLQNLGATGAAANSGGLGLFGSGLPELDHMQQQLAENPNLMREIMNMPLMQNLMNSPELIRSIIMNNPQMRELIDRNPDLAHVLNDPSIMRQTFEAVRNPELMREMMRNTDRAMSNIESSPEGFNMLRRMYETVQEPFLNATTMGSEGDRNSNPFAALLGNQGSNQARDSAANGTTTASDTTSGAPAPNTNPLPNPWGPNAGSAQGAARSPPATNTRSTTAGGPGGLGSADFGSTLGASGGGSDATFLTQVLQNPTMMQMMQNIMSNPQSMNQLLNMNPNVRNMMESNTQMREMIQNPEFIRQLTSPETLQQLISFQQSLMSQLGQQQTGQERTQSASGAGNVNLNTLMNMFSGLGAGGGLGVPNAPNGFLINKVMSKFAVPPEELYATQLAQLQEMGFFDTQENIRALAATAGNVHAAVERLLGNMGQ

SEQ ID NO: 42969 - protein, 128 aa, Zea mays
  Coding DNA Sequence Number=SeqID_1190
  Subcellular localization annotation: CTP_CleavageSite=57; ConfidenceScore=5.60e-01
MGAGRRGMEQDVPGRSCSSAATARVRSRGGQFSLGLCCARRGRGATSARRRSGWAPVQSAARARRDSTASVAGDRLQRYTAHYNRKKKGWERENERAHLEPPCAGTSASARFGSKEGDERLCDVTLVI

SEQ ID NO: 42970 - protein, 148 aa, Zea mays
  Coding DNA Sequence Number=SeqID_1191
  Subcellular localization annotation: CTP_CleavageSite=54; ConfidenceScore=5.02e-01
MYTGSMFEEAGVVHVDTLCLLAPPAPCHAASSRRCSRSRRCARGGGVAPGPLVRAWAPQATAWGSREQGGDPRATANIASALDKDQQSVFGIDSVDPTTDSPFFSEEKIKNCGFNLIRKTYRSIVYRNRKLLHNTVRLGLRTYQLDGE

SEQ ID NO: 42971 - protein, 847 aa, Zea mays
  Coding DNA Sequence Number=SeqID_1192
  Gene Ontology: Mol. function=RNA binding
  Homolog annotation: Hit_ID=Q69N36; Match level="QueryCoverage=60%, HitCoverage=53%, E-value=1e-48, Identity=30%"; Hit description =Agenet domain-containing protein / bromo-adjacent homology (BAH) domain-containing protein-like
  Pfam annotation: Domain name=Agenet; Domain location=371-454; Score =64.5; E_value=3.4e-16; Accession=PF05641.3; Description=Agenet domain
  Pfam annotation: Domain name=BAH; Domain location=165-281; Score =25.7; E_value=0.00016; Accession=PF01426.8; Description=BAH domain
  Pfam module annotation: Pfam domain module=Agenet::BAH; Domain location=371-454::165-281
MAREEDGPQFVRWREEFVSQERGSRVVHYYLEDAAGVSHLAVIGTERSLRHMLYVVSEDFNAAWGCGGSADGGGAPPVFARKWRSRREVVDWLGSFLPVKALDSKFSKYGSFADNDIGSDGYGETNGFLHQNLGKDCSSDITWSGSFWTCSKQLRHYQAFCRNGTTISTHTFVLVLSEEQNRYLAYLEDMYEDKKGQKKIKVRWFHQNQEIACAIPPPPHPCEVFITPFTQVISVECVDDIATVLTRDHYEKCSHAMSIMTGIRFCSRQYSKNKFKYFDLRTLRGYFSQAVVRSMKFPAESEKDSEYCTPGKAKFPKQLERLYSKCLGTKICRSPQADSIPSYQILSNEQPPGKHLSIKFIVPQNQLKPTYNTGDRLEILSQDSGIIGCWFRCTVLKSCTNHNRLKVQYDDLQNADDSGRLEEMVPASALALPDKLGLRHQDRLRIRPRPQENSFVDGAALLPGTAVDVWQFSGWWEGVVVSLDNIVADSLQVYFPGENFFRACQLRNIRISKDWVKNRWVDIETKSDVLSQIPSDSIQAKQTDNHALSVGVTGSSSSAMPEQEIAATQANSNGDAAVPKQELTVAQANSNGDQPVPKQELAATQANSNGDKSVPDQELAAIQANSSGDKPVPKQELAATRANSNGDKPVPDQELAAIQANSSGDKPVPEQELPATQANSNGDKPVPEQELPATQANSDGDKPVPEQELPATQANSSGDKPVPKIELAATQANSNGDKPVPEFTATQATSNGNNRQIEASKQSEVSMTDEASPLAEDDKRTILGKRPRDVSMTDEGSALVEDGKRTIIGKHPRDEAAHVDLKVLQNESIFSLPKPCAIYLWHLAYWI

SEQ ID NO: 42972 - protein, 650 aa, Zea mays
  Coding DNA Sequence Number=SeqID_1193
  Gene Ontology: Mol. function=RNA-directed DNA polymerase activity; Cellular component=mitochondrion; Biological process=RNA-dependent DNA replication
  Homolog annotation: Hit_ID=UPI00004C1733; Match level="QueryCoverage =86%, HitCoverage=41%, E-value=0.0, Identity=84%"; Hit description =UPI00004C1733 related cluster
  Pfam annotation: Domain name=RnaseH; Domain location=182-309; Score =2.4; E_value=3.5e-05; Accession=PF00075.14; Description=RNase H
  Pfam annotation: Domain name=rve; Domain location=424-583; Score =114.2; E_value=3.8e-31; Accession=PF00665.16; Description=Integrase core domain
  Pfam module annotation: Pfam domain module=RnaseH::rve; Domain location=182-309::424-583
MGCLAALSRFISRLGERGLPLYCLLRKVECFTWTPEAEEALGNLKALLTNAPILVVSVAIVVERQEEGHALPVQRPVYFISEVLSETKIRYPQVQKLLYAVILTRRKLRHYFESHPVTVVSSFPPGEIIQCREASGRIAKWAVEIMGETISFAPRKAIKSQVLADFVVEWVDTQLPTVPIQPELWTMFFDGSLMKTGAGAGLLFISPLGKHLRYVLCLHFPASNNVAEYEALVNGLCIAIELGVRRLDARGDSQLVIDQVMKNSHCRDPKMEAYCDEVRRLEDKFYGLELNHIARCYNETADELAKIASGRTTVPPDVFSRDLHQPSVKIDDTSEPEAPSAQPEVPSAQSEAPSAHSEAPSAQPEAPSARPEAPSVQPEVPSAPEGFYWPTAVADTTRIVRTCEGCQFYARQTHLPAQALQTIPITWPFAVWGLDLVGPLQKAPGGYTHLLVAIDKFSKWIKVRPLNSIRPEQAVAFFTNIIYRFGVPNSIITDNGTQFTGRKFLDFCEDHHTRVDWAAVAHPMTNGQVERANGMILQGLKPRIYNDLNKFGKRWMKELPSVVWSLRTTPSRATGFTPFFLVYGAESILPTDLEYGSPRTRAYADQSNQASREDSLDQLEEARDMALLHSTRYQQSLRRYHARGVRSRDL

SEQ ID NO: 42973 - protein, 358 aa, Zea mays
  Coding DNA Sequence Number=SeqID_1194
  Homolog annotation: Hit_ID=Q852E9; Match level="QueryCoverage=18%, HitCoverage=27%, E-value=3e-21, Identity=67%"; Hit description =Expressed protein
MADKRSRTYKPQSELRYGHSRNLIGVSFGSLVRTQPEGQRISTIVLKVDLECERCYRKIRKVLCKIQDKMNIKTISFDEKSNAVTISGPFDADTVCNKLCCKAGRVIKAMDVKGKDKDGGKAGKEGGGDKPKDAGKPAAAEKDAGKAGKEGGAKAEKKEEKAEKKKEEKADKKEGGKGDKEAKPAEKGNKDGKAEAKKVKFAEVPAADAKPGKAMPPGMTKADLGPLLEKMMAAKAGSEPQPIAPPPGAAQGVAVPSVWPAPAGSVSGYGYGYNPGYEAPPPPSYYAAGAGGGYGCGCGGYNGYCRCGKPAAPGPGGYYGVPVYDSQGWYYGGGGGARQPYYPQQHCCEDPNAGCSVM

SEQ ID NO: 42974 - protein, 101 aa, Zea mays
  Coding DNA Sequence Number=SeqID_1195
MPQYQMGPTERALGKVETCLAGAWSFVPPRRLVQQRHGRYIGQREVYGPRLGYPFPGYTIASPSLRVTPWSRSKAFLLGVRSPECTQAHQYDVAPEPPSHT

SEQ ID NO: 42975 - protein, 170 aa, Zea mays
  Coding DNA Sequence Number=SeqID_1196
MKVSQEVRETTEAEARKISLAYDGAIAAQIQAETSVKERSTELQGLRQLMGEVCNRLSPPPSTEVPLAKRLRALPRHVVRVVLEGMYLRSSIALGQMVSHFDEIDVIMIVEGYAAGWSEEELDAIEEQVSPHVCSLARQNDVKLLLTSPLNAEAPPATLLRVSWTIFICL

SEQ ID NO: 42976 - protein, 86 aa, Zea mays
  Coding DNA Sequence Number=SeqID_1197
MGGAVRRSFDAFAILRSTMGRLRHLVSAGEPPLNVLTRTMPLRCRAIAVGNLLGAVANTDEQATVESEVQQVEIAEQELIEGKLCP

SEQ ID NO: 42977 - protein, 108 aa, Zea mays
  Coding DNA Sequence Number=SeqID_1198
  Subcellular localization annotation: CTP_CleavageSite=46; ConfidenceScore=5.25e-01
MPLRCRAIAVGNLLGAVANVLDAYTGSRSITNLARFGTESPVCRTPAMASPACARRRSPLSELSRGGFGRWMTNGWPRLDQDEQATVESEVQQVEIAEQELIEGKLCP

SEQ ID NO: 42978 - protein, 130 aa, Zea mays
  Coding DNA Sequence Number=SeqID_1199
MACNEVVTPQRGPCAPDPLPPSSLQIDERCRFRFGSGVRSGLLASPGPHRGGWGAWWAGGGGKEQRRRMAKLDLIAVALQESSDGEHELERPNNITPDRRSLAMEIVLERKKGFEGVHAHHTWPMSMRLS

SEQ ID NO: 42979 - protein, 113 aa, Zea mays
  Coding DNA Sequence Number=SeqID_1200
  Homolog annotation: Hit_ID=Q9LJX0; Match level="QueryCoverage=42%, HitCoverage=3%, E-value=2e-13, Identity=77%"; Hit description =Multidrug resistance protein 11
MGYIGDKVNQGEQMNWQVLLDNVDVKTLQLKQLRDQTGLMNQEPALFASTILENILDGKPDATISLKEKIQLHFTSLLFMEQIGTDELMWSWDLTQHAAGEFSFAMVQANDVL

SEQ ID NO: 42980 - protein, 854 aa, Zea mays
  Coding DNA Sequence Number=SeqID_1201
  Gene Ontology: Mol. function=protein serine/threonine kinase activity; Cellular component=integral to membrane; Biological process=protein amino acid phosphorylation
  Homolog annotation: Hit_ID=Q4U3Z9; Match level="QueryCoverage=83%, HitCoverage=88%, E-value=1e-138, Identity=40%"; Hit description=Wall- associated kinase 1
  Pfam annotation: Domain name=Pkinase; Domain location=511-780; Score =159.9; E_value=6.6e-45; Accession=PF00069.15; Description=Protein kinase domain
  Pfam annotation: Domain name=Pkinase_Tyr; Domain location=511-781; Score=119.7; E_value=8.6e-33; Accession=PF07714.7; Description =Protein tyrosine kinase
  Pfam module annotation: Pfam domain module=Pkinase::Pkinase_Tyr; Domain location=511-780::511-781
MPVKEIHENHATIHVQQRPESRLANDSLAVPCMPSRSPACRPRGRNRRSAADAVARPLALALILVSTLPRAAHSQDLALPPVQPRGVRRTMTCDNIPEPFGTRSRGASRLPGFEVTCGPNREAMLSIGGDAYMIDFVSVSGSYVVVFAEPITQVCYDGKGKPTPDTGTGAKSSEGTTTTFTWSLEGTPFTFSKSNKLVNFGCNRTLMANFFIVPGDSSPLYTSCTTTCNTLQISGSCLGEACCEAPMDQVNGAKAFSLSFERTTANGTGEEDGTCSAAFFLDKDETVFTFSGDEVRPLKTALLPPGERRMVLDWAIGSTSCEQTQSYTFEKLCKYGTCVDAPTGAGYLCKCPSGYDGNPHIQKIREVIDTFLSALTSSNVQGINFYMKVSPSQQPQGINVCDHPEKNPCTYIKYCIDLEGVVSCACPEGMSGDGRKNGVSLVLMVTTTTAASCYCWAVKKRELGRKRAELFRKNGGLLLQQRFSTITSQGEDQYSSKIFSAEELKAATDNYSESRILGRGGQGTVYKGILPDQTVVAIKKSKVFDESQVEQFVNEIAILSQIDHPNVVKLLGCCLETQVPLLVYEFISNGTLFQHIHNRNATRPLTWEDCLRIAAETADALAYLHSASSIPIIHRDIKSSNILLDGNFVAKIADFGASRSVPFDQTHITTLIQGTIGYLDPEYFQSSQLTEKSDVYSFGVVLAELLTRQKPISAARPEDSCNLAMHLVVLFNKGRLLQEIEPHILAEAGEDQCYAVAELSVRCLNVKGEERPAMVVVASVLQELRRSFTIDQAVGIKDESIQENSEQEEKHLHESRSIPSLQSSENEGFKDMLSQPLVYTDVRDTETLAATTKN

SEQ ID NO: 42981 - protein, 89 aa, Zea mays
  Coding DNA Sequence Number=SeqID_1202
  Subcellular localization annotation: CTP_CleavageSite=36; ConfidenceScore=5.25e-01
MEGSSASTDPSLGLRRGRHHVRSRPRPPLRPREEVSASPDLGLGLSFGLGRRSPPRPTLASASGEVTTSLETASDRLREQGNHHYPTPS

SEQ ID NO: 42982 - protein, 226 aa, Zea mays
  Coding DNA Sequence Number=SeqID_1203
  Homolog annotation: Hit_ID=Q9SI32; Match level="QueryCoverage=34%, HitCoverage=20%, E-value=2e-35, Identity=79%"; Hit description =Expressed protein
  Pfam annotation: Domain name=Scramblase; Domain location=72-224; Score=-40.9; E_value=8.1e-08; Accession=PF03803.6; Description =Scramblase
MRWLPRLLSHSIEVGRASAAGRSNPSLVKAGSHGFASGGWDGSPAVPREWLRKLWVDVLKKQKEDARRWGIGASPGNAGSGAEPSLCAFANSVEAAGATREAPSRSYQYEYRGLAGPFWWINSSIYAEVDGKEIGVVHRRWHLWQRIYDLYLGNRQFAVVENPGFWNWTFSLVDEDDKLLAQIDRNWRGIGFEPFIQYWALPLPDDTAMMVLSHKSQQIHVAVRFI

SEQ ID NO: 42983 - protein, 779 aa, Zea mays
  Coding DNA Sequence Number=SeqID_1204
  Gene Ontology: Mol. function=hydrolase activity, acting on acid anhydrides, catalyzing transmembrane movement of substances; Cellular component=integral to membrane; Biological process=proton transport
  Homolog annotation: Hit_ID=Q2R471; Match level="QueryCoverage=85%, HitCoverage=88%, E-value=1e-130, Identity=45%"; Hit description=E1 -E2 ATPase family protein, expressed
  Pfam annotation: Domain name=Cation_ATPase_N; Domain location=5-72; Score=16.4; E_value=8.1e-05; Accession=PF00690.16; Description =Cation transporterATPase, N-terminus
  Pfam annotation: Domain name=E1-E2_ATPase; Domain location=119-336; Score=-37.8; E_value=3.3e-07; Accession=PF00122.10; Description=E1 -E2 ATPase
  Pfam module annotation: Pfam domain module=Cation_ATPase_N::E1-E2 _ATPase; Domain location=5-72::119-336
MAALDDKAMTDLETLEEEEVLRRLGTAEEAGLTDNEAARRLRLHGPNVVVLSHHEGSMLHGFLMALFSLWGWDHVFPKYNNMVRVILNSMSWVTVLTIVVSLAITSAGQRSCELAIIIFVVATCLIACFTAMLVLEYAKAPLEAKAHAPRAKVLRDGNWRDVHAANLVPGDIIFLKVGDIVPANARILRFQKIDTMTCWAKRSVDCAHGFLLYYAWTVSCGQGTAVVIATGRGIPRSTLRLYPQRYARPGQLKEGAMLTGCFCASLVLVGTFAEIVLRFLFQKQNYRGMPLDAHFMPLIGGIPMAMPTFFYLALALGSVRLCFLGIASRGTVALEDLASVDVILFNMTGTLTCNQPCFVRDKIEMFADSVNKDHAIVLAARASRSQHELYIEPIDAAILSLLDDPEQVAHHCGSSKEVKEKISMIMDELALDGYQAIAVGHQVDSCWDFIALLPYTDDLRSDSADVVDSLIDLGLDIRVLTESPLSTTKQVYLYLLCTSCKVLFLQVLVTILLSSYLSTEDKSDIIFTISSTVHLDPAGLTPILIVMKFGVRVILHLWNFDLSNILAFMITACNYCTSFAMLFERVELNKSPDKWRVQKIITSGAAFGSYIVLTTAIFYRVATTANPFAISTVNQAIALFVHSDGCCIIRWPGPFVTFAFVVSQTVATQKVVHGDLNFALTKGIGCVRAGLIWLYNLVLLLALVLVCRKWRHAKMTSEKLLTICLRSAILHIVLTWFLSLVPCSVCQAVKGSTVGLALEGTDRRQKEIEIGKGNDQGLI

SEQ ID NO: 42984 - protein, 223 aa, Zea mays
  Coding DNA Sequence Number=SeqID_1205
MSGAPAWPWVAMLLCSLSACQCSVRMVRTKNVTPVGGGDDQDPICPFRLDKGKYVYLEQQGGKKKRKMDRASRAAVAAATTERAEQGGQLRICSNQITFRVCRLSSQTRSTPARFDPSSPVTTTTPPSSTTPASATPVPITTIATPTASTTPTSTILTPSTTPPIPPPRFRERDKIEVRPLAEDPRLSDLQRATAAKVCRFRRFVLALSSLHLCVLLLCCALV

SEQ ID NO: 42985 - protein, 58 aa, Zea mays
  Coding DNA Sequence Number=SeqID_1206
MAKELEADVQECSKEKNEVRLHRQKHDNVRVTGPGWAMLLEGANSLPQDDRQMVSYVD

SEQ ID NO: 42986 - protein, 477 aa, Zea mays
  Coding DNA Sequence Number=SeqID_1207
  Gene Ontology: Mol. function=citrate transporter activity; Cellular component=integral to membrane; Biological process=citrate transport
  Homolog annotation: Hit_ID=Q10SY9; Match level="QueryCoverage=98%, HitCoverage=99%, E-value=0.0, Identity=76%"; Hit description =Transmembrane protein, putative, expressed
  Pfam annotation: Domain name=ArsB; Domain location=14-473; Score= -180.6; E_value=0.0011; Accession=PF02040.6; Description=Arsenical pump membrane protein
  Pfam annotation: Domain name=CitMHS; Domain location=16-421; Score =367.2; E_value=2.6e-107; Accession=PF03600.6; Description=Citrate transporter
  Pfam module annotation: Pfam domain module=ArsB::CitMHS; Domain location=14-473::16-421
  Subcellular localization annotation: CTP_CleavageSite=44; ConfidenceScore=5.01e-01
MALASVAKVVLGSIAFCVFWVLAVFPSVPFMPIGRTAGALLSAVLMIVFHVISPDDAYASVDLPILGLLFATMVVGSYLKNAGMFKHLGTLLAWRSQGGRDLLCRVCVVTALASALFTNDTCCVVLTEFVLELAAERNLPAKPFLLALASSANIGSSATPIGNPQNLVIAFNSKISFPKFLLGILPAMLAGMAVNMVMLLCMYWKDLDGSGSGMDLDGKRMEAVEEGAVVVVEPSPKQQQQQLGGSNGYMSPLMTENISTKHPWFMQCTEQRRKLFIKSFAYVVTVGMVIAYMVGLNMSWTAITTAIALVVVDFRDAEPCLNTVSYSLLVFFSGMFITVSGFNKTGLPAAIWNFMAPYSKVNSVGGISVLSVIILLLSNLASNVPTVLLMGGEVASAAALISPAAVVRSWLLLAWVSTVAGNLSLLGSAANLIVCEQARRAQRNAYDLTFWNHIVFGVPSTLIVTAIGIPLIGKINI

SEQ ID NO: 42987 - protein, 115 aa, Zea mays
  Coding DNA Sequence Number=SeqID_1208
MAKGYRRIRATRSDPDGLDYLAVLPEPAEANVRGVFLPVVVPCSPQTAMNCGSVAIDGADEKLGQHQRLLPLVSASMIIDVLRGSPLTRACASNDDGTQFPRRRRLFLTIRDGEG

SEQ ID NO: 42988 - protein, 50 aa, Zea mays
  Coding DNA Sequence Number=SeqID_1209
MAPKRKTANSSAAVIPAIDPNSQLPFAAAERQGLSGISLPRAGRLNPSYQ

SEQ ID NO: 42989 - protein, 111 aa, Zea mays
  Coding DNA Sequence Number=SeqID_1210
MAYGSDDDCTMVARLDDCRRCAACGVTRSTATGVRSRSRVGPSGDVAAGGMDLLHCRALEHSFFVALDMLHVPSRLCLVICSTVLASQPQQAVPGLNAIYVLDESGPNQLI

SEQ ID NO: 42990 - protein, 94 aa, Zea mays
  Coding DNA Sequence Number=SeqID_1211
MENAVVLREWFDRVDAGRTGNITAAQLQSFWLLTNSYRRGRGFLSLEEVYQALIKLGFSLDSPAFYTVCEVRKRIQLPSTLAHGESCLVKGSSS

SEQ ID NO: 42991 - protein, 370 aa, Zea mays
  Coding DNA Sequence Number=SeqID_1212
  Gene Ontology: Mol. function=nucleotidyltransferase activity; Biological process=RNA processing
  Homolog annotation: Hit_ID=Q10S77; Match level="QueryCoverage=93%, HitCoverage=71%, E-value=1e-101, Identity=51%"; Hit description =PolyA polymerase family protein, expressed
  Pfam annotation: Domain name=PolyA_pol; Domain location=1-94; Score= -27.2; E_value=0.0008; Accession=PF01743.10; Description=Poly A polymerase family
MLKKNIFRRSRIVGKRFPICLLKMRDSVIEISSFRTVANYGNRSEVVDYVAELNGSDVRDILRWKDSMRRDFTINGLFFNPMNCKIYDYVNGVCTVIPAHISFMEDPAAPSVRLLRKYGLLDILLPFQSAYLSEQMKGGSSDRHLMLMWLKGSFFGKLLSNLDRLLSADRPCHSSLWLALLAFHSTLVIYPQDTLVIRAFAAVLYFGTWETTVKFLREEVGAEVPFAPETMGPSRTKLDCLKEQTSHLASLVNSSVDILTCPHDLEQSLARFSEPLQFSGVVVASNNDRKKLSAVFEGLASDLHSYDGRRGMRGIDYSSLKLGDLAEVRFVLGKVIMDTMYDKLPCESTEDEGAAADVAGGSLPPLSALF

SEQ ID NO: 42992 - protein, 141 aa, Zea mays
  Coding DNA Sequence Number=SeqID_1213
  Gene Ontology: Mol. function=nucleotidyltransferase activity; Biological process=RNA processing
  Homolog annotation: Hit_ID=Q10S77; Match level="QueryCoverage=71%, HitCoverage=17%, E-value=2e-10, Identity=42%"; Hit description=PolyA polymerase family protein, expressed
  Subcellular localization annotation: CTP_CleavageSite=31; ConfidenceScore=5.81e-01
MTTPRRHADPSPSPSPSSPPQLLSRLRSGASSFLARQYSTGKGGDNTGPSKPKGGGSSAPRHLRPGFVDPSSWKHFDSRAVGIKPGAIHTDAWAVLKKLRREDSKSCMDLGAGAVLHKAMIQRWHNVVDSFVGRHYARRQI

SEQ ID NO: 42993 - protein, 503 aa, Zea mays
  Coding DNA Sequence Number=SeqID_1214
  Gene Ontology: Mol. function=transferase activity, transferring glycosyl groups; Cellular component=membrane
  Homolog annotation: Hit_ID=Q8H038; Match level="QueryCoverage=97%, HitCoverage=88%, E-value=1e-140, Identity=48%"; Hit description =Xyloglucan galactosyltransferase KATAMARI1 homolog
  Pfam annotation: Domain name=Exostosin; Domain location=101-450; Score=398.9; E_value=7.4e-117; Accession=PF03016.6; Description =Exostosin family
MERTGAHSGKRWLPGLLVLAATSWLFVIYFHLAVFRGPPIVSAPRGPLAEDASGGGGGGGDGQRFLLLHHEERLRKVKAPPATRGDALRTARDDDCQGRYVYIHDLPPRFNADILANCRHWYPWMDMCVYLENGGLGRPVDNADGVFADEGWYATDHFGLDVIFHSRMRQYECLTGDSSRAAAVFVPFYAGFDVVQHLWGVNSTAREKDALALDLADWLTRRPEWRAMGGRDHFFLSGRTAYDHQRQTDSDSEWGNKLLRLPAVQNMTALFVEKLPWTSYDFAVPYPTYFHPASDAQVAEWQRRMRATRRDWLFSFAGGARGDPYSIRHQLIGQCASSSFCRLVRCGKNQRNCLVPSTFMRVFQGTRFCLQPTGDTMTRRSAFDAIMAGCVPVFFHPDSAHTQYRWHLPDAHDTYSVLIPEAHVRAGNVSIEETLRAIPQDVAERMTETVIGLIPRLVYADPRSKLETLRDAVDVTVEAVIGRVNKLREEMGRGQGHLLQMQT

SEQ ID NO: 42994 - protein, 63 aa, Zea mays
  Coding DNA Sequence Number=SeqID_1215
MGWIQQRMNTSILWMNKKIFRDLHDALVERNKLELVEEEDVPYASTVIDPVNDSLKYHYEDVS

SEQ ID NO: 42995 - protein, 549 aa, Zea mays
  Coding DNA Sequence Number=SeqID_1216
  Gene Ontology: Mol. function=protein serine/threonine kinase activity; Cellular component=ubiquitin ligase complex; Biological process=protein amino acid phosphorylation
  Homolog annotation: Hit_ID=Q9SW11; Match level="QueryCoverage=88%, HitCoverage=59%, E-value=1e-123, Identity=46%"; Hit description =Putative Ser/Thr protein kinase
  Pfam annotation: Domain name=Pkinase; Domain location=188-449; Score =132.1; E_value=1.6e-36; Accession=PF00069.15; Description=Protein kinase domain
  Pfam annotation: Domain name=Pkinase_Tyr; Domain location=188-451; Score=86.3; E_value=9.6e-23; Accession=PF07714.7; Description =Protein tyrosine kinase
  Pfam annotation: Domain name=U-box; Domain location=474-545; Score =44.6; E_value=3.3e-10; Accession=PF04564.6; Description=U-box domain
  Pfam module annotation: Pfam domain module=Pkinase::Pkinase_Tyr::U -box; Domain location=188-449::188-451::474-545
MWLYERLEVGRAKQMTLSLGKLPSEGLRCVTFVLPGEGGGTFTFSAATTTALAADNANFELEKLRIKLEHMKGVCKLVQDESTSASQQMIDLVERRAQEEARLAEVRQRINITTEAARKEREQRYAIEAQARHVRDLAKEEALKKQNLQLRLSREADNVQKLEKLLELGGKSYTVFTWEEMESATSSFSEALKIGSGAFGTVYKGKVHHKTVAIKVLKSDDSHIAKHFEKELEILGKTRHRHLLLLLGACLDRACLVYEYMENGSLEDRLQCKGDTAPLPWYHRFRIAWEITLALIFLHSSKPKPIIHRDLKPANILLDRNFTSKIGDAGLATFLPLRDTSSTHTIRKSTDLVGTLFYLDPEYQRTGQVSAKSDVYALGMVFLQLLTAKSPIGLADTAERAMEEDHLIDILDQRAGNWPVREAHELTQLGLRCLEMRSKDRPDLKSKVLVVLERLNNLASTVYHSVQPIPTAPPSHFICPILKRVMQDPCIASDGYSYERVAIEMWLNENDVSPLTKARLPDKNLVPNLALICLINSWKGEVGATGPIR

SEQ ID NO: 42996 - protein, 290 aa, Zea mays
  Coding DNA Sequence Number=SeqID_1217
  Gene Ontology: Mol. function=protein serine/threonine kinase activity; Cellular component=ubiquitin ligase complex; Biological process=protein amino acid phosphorylation
  Homolog annotation: Hit_ID=UPI000034F113; Match level="QueryCoverage =52%, HitCoverage=18%, E-value=1e-22, Identity=38%"; Hit description =ATP binding / kinase/ protein kinase/ protein serine/threonine kinase/ ...
  Homolog annotation: Hit description=protein-tyrosine kinase/ ubiquitin-protein ligase
  Subcellular localization annotation: CTP_CleavageSite=77; ConfidenceScore=5.17e-01
MATQEETMVTESSPSSDSSITIGLAVSSSKSSKYAVNWALKNFGTRQRIRFMLIHVRQKVTLVPTPMGNYVPVDQVRDDIASAYEKEVECEAQNMLLMYKNMCDGKVEAEVLVVKGDDVAETISGVVLACQIHKLFVGVSSHSNFIRKFKGTRMFSRICKCVPSFCMVYAISKESDNSSKILQVNESSNSELYSDKSSVSVTTRVVVWSLLVFVKLSLQEHLSRSTSSTIGKDQRISPCTDGSSNLGILDKTPTMSRALQELMLLEDEELPCQTSISVSPISYLQCFQVA

SEQ ID NO: 42997 - protein, 437 aa, Zea mays
  Coding DNA Sequence Number=SeqID_1218
  Gene Ontology: Mol. function=nucleotide binding; Biological process =fatty acid biosynthetic process
  Homolog annotation: Hit_ID=Q8LBB2; Match level="QueryCoverage=96%, HitCoverage=97%, E-value=1e-115, Identity=53%"; Hit description=SNF1- related protein kinase regulatory subunit gamma 1
  Pfam annotation: Domain name=CBS; Domain location=276-414; Score =90.9; E_value=4e-24; Accession=PF00571.18; Description=CBS domain
  Pfam annotation: Domain name=CBS; Domain location=71-253; Score=31.3; E_value=3.3e-06; Accession=PF00571.18; Description=CBS domain
  Pfam module annotation: Pfam domain module=CBS::CBS; Domain location =276-414::71-253
MQAVRTRAEQRGAEAEATPHGSARSWSPEAEIGMRVEDIWDSLDVQQRQLSHGDKLNSCFDSIPVASFPHAFDGAQLVEIPSDATLAEAVDILSRNRIISAPVRNVDAPEDASWIDRYIGIVEFPGIASEAAATAEVGADELAAKLGTVTLEGAAAAAAAAAVTSKAAAEPEGAIAEVFGALPSSDLFNKTKVKDISGSFRWAPFLALQSSDTFLTMLLLLSKYRMKSLPVVDIGEGTISNIITQAAVVHMLSECVGLHWFEEWGTKTLSEIGLPIMRLSKIVKVREDEPALKAFRLMRRKGVGGIPVVDDSGRAVGSIMIKDVKHLLTASETNRDYRSETAACRTLTAKEFIANARQSSGERQMSIITCKRGDSVKDIILKLDAEKRQRIYVINEEGNLDGLITLRDIIAKLVYEPPGYFGDFFNGVIPLPSNSRV

SEQ ID NO: 42998 - protein, 115 aa, Zea mays
  Coding DNA Sequence Number=SeqID_1219
MTMERGGRDSCGWEGEEIRAPMKGRYGAGPYLEGRGAWGRTRTWKGVNGRAMSEGEDCGALWSSRDAKAWVVRRRWKGAVGEDLGASEDFGVGCGCADGGYALARRERFSGAECA

SEQ ID NO: 42999 - protein, 375 aa, Zea mays
  Coding DNA Sequence Number=SeqID_1220
  Gene Ontology: Mol. function=DNA binding; Cellular component=nucleus; Biological process=regulation of transcription, DNA-dependent
  Homolog annotation: Hit_ID=Q6YZE8; Match level="QueryCoverage=34%, HitCoverage=27%, E-value=8e-31, Identity=51%"; Hit description=SBP -domain protein-like
  Pfam annotation: Domain name=SBP; Domain location=80-158; Score =170.4; E_value=4.7e-48; Accession=PF03110.5; Description=SBP domain
MDWDAKMLPAWDLGTVVVPIGGGGGALDLKLGAPTSSRAAVATAAPTLPSANPPPPPPPPSSSAPPKRPRPGHAQQAAPACSVQGCDADLSQCRDYHRRHKVCVAHSKAPFVTVAGQQQRFCQQCSRFHLLEEFDEVKRSCRKRLDGHNRRRRKPQPDPLSPAGLFGDHHHGGVTRFTSYPHRFTTSIAKPEWGAVVKTETDAFQDQYYPAVHLNGAGAGALFHDKDRKHLPFLTNHNNGCQPFTVTTTASSESSSKHSNGNCALSLLSDNPTPAQAQTATIPTAQPLVATASQYGRLPGGDDDDVSLAGMSYMRVGDSRQASNLTTSSPGPATAAATQQHLQYHHGYYYHVSGGEQGNNSPDGAAIQALPFSSW

SEQ ID NO: 43000 - protein, 444 aa, Zea mays
  Coding DNA Sequence Number=SeqID_1221
  Gene Ontology: Mol. function=zinc ion binding; Cellular component =nucleus
  Homolog annotation: Hit_ID=Q2R448; Match level="QueryCoverage=65%, HitCoverage=75%, E-value=5e-54, Identity=43%"; Hit description=MYND finger family protein, expressed
  Pfam annotation: Domain name=Sel1; Domain location=189-221; Score =3.6; E_value=6.2; Accession=PF08238.2; Description=Sel1 repeat
  Pfam annotation: Domain name=Sel1; Domain location=222-260; Score =17.8; E_value=0.04; Accession=PF08238.2; Description=Sel1 repeat
  Pfam annotation: Domain name=Sel1; Domain location=261-296; Score =16.8; E_value=0.079; Accession=PF08238.2; Description=Sel1 repeat
  Pfam annotation: Domain name=zf-MYND; Domain location=380-421; Score =43.3; E_value=8.5e-10; Accession=PF01753.9; Description=MYND finger
  Pfam module annotation: Pfam domain module=Sel1::Sel1::Sel1::zf-MYND; Domain location=189-221::222-260::261-296::380-421
MRTRSGSRYSNGGGEDALVGQKRKRAASAVAGECACCERRKRPADGPDYLDALPDDLVLSILTKVAADSSAPADLLSVHLTYVCPGTTRFFINSSCSIGWRTLPLPPRRVGGEFEAVLRFTENVRDKADAKDRALADVLGVCRCKRLNELGSHDMVFAKASPASLSVKAAAWSEAAQRFLKRSADAGNLEACYILGMIRFYCLGSRSGGAALLAKAAVGGHAAALYSLAVIQFNGSGGAKSDRDLRAGAALCARAAALGHVDALRELGHCLQDGYGVRRDPAEGRRLLVSANARELTLALSAAASRHAAGVVVGGGGGGGCPLLSDFGWSLPEAEPHAANQFMVDWWWASDRCAAQAGGKITGESGVDGDGAELRLCSHVRCGRRETRRHEFRRCSVCGAANYCSRACQALDWKRAHKVQCVPVDRWLLGAVGDAQDQQQQQPQ

SEQ ID NO: 43001 - protein, 109 aa, Zea mays
  Coding DNA Sequence Number=SeqID_1222
MKLWKETSRSSKITTSSRCGLAATPSRLPVKAAVIYVSFPHFDLLWLDLDTLHESQSSPSYPPALLSVRFAVPWPDSPATWRDYTTACVRSRSDDDRSSRALPSRSTRR

SEQ ID NO: 43002 - protein, 242 aa, Zea mays
  Coding DNA Sequence Number=SeqID_1223
  Subcellular localization annotation: CTP_CleavageSite=80; ConfidenceScore=5.07e-01
MVFAESKTLGTGTHSAKKQYLITGVHYPLGARFCHTPPPRFASLPLLVEGRNSRMPPRPPRHPRTRPAHLRKGAIPGNTYAAAPPSSPPPAPTIHKGGTMPPLLSPPRHPCPARARTSRKGAPSPAPVVSAQGPVVSQGRPFPCPRRLRAILGSGVRSGCLASQGPHHARSGSMVGGEDREEQRSRARTTAEQELPQRRRMAPWYWARASVPRMLEFAERAPSSSDASRFHKREISQARLQK

SEQ ID NO: 43003 - protein, 125 aa, Zea mays
  Coding DNA Sequence Number=SeqID_1224
MAPPSLTRVTVYAQLELEERVAIEAPCRPSYRPHWHHPYRATTSSSSSASVATLMGTASSRSYARSITLSWRAHRRSGLDESRPSPTWVMTGTRAWQRGRDEVVVAAQSRGCGVVRGGVAGRRGW

SEQ ID NO: 43004 - protein, 356 aa, Zea mays
  Coding DNA Sequence Number=SeqID_1225
  Gene Ontology: Mol. function=binding; Cellular component =intracellular; Biological process=RNA processing
  Homolog annotation: Hit_ID=Q10RZ6; Match level="QueryCoverage=96%, HitCoverage=97%, E-value=6e-86, Identity=55%"; Hit description =Expressed protein
  Subcellular localization annotation: CTP_CleavageSite=67; ConfidenceScore=5.06e-01
MLVRSASTPVLGALHPSGCHSPAVSSPAVHFAESPASAAYHAPPISCHLGGPGSGSDHERSRSRGAGAGMRRTCSEDNLASLAGGRADDHDHHHLLLPPSGKGAPRARPVPLETIQSFRGPHASTDDEEEEDDDDEDAYEVERELRFGQFSFAGGAYSQEHPLFLARGLGIDRLGSGLLSADGGGGFGGSDGSGSGGGGGNLVTSGNGGDRSGIETHYKKMIEEDPCNGLFLRNYAQFLYQASSSSSSISFSPSTVKGDYRRADEYYSRAILADPDDGELLSEYAKLVWEVHRDEDRASSYFERAAKASPQNSHVLAAHAAFLWDTDDEEGGADALSYAAFAQPAHSSLASATATT

SEQ ID NO: 43005 - protein, 646 aa, Zea mays
  Coding DNA Sequence Number=SeqID_1226
  Gene Ontology: Mol. function=glutamate-tRNA ligase activity; Cellular component=cytoplasm; Biological process=tRNA aminoacylation for protein translation
  Homolog annotation: Hit_ID=Q9LIZ8; Match level="QueryCoverage=99%, HitCoverage=99%, E-value=0.0, Identity=56%"; Hit description =Putative multifunctional amino acid-tRNA ligase
  Pfam annotation: Domain name=tRNA-synt_1c; Domain location=207-477; Score=201.4; E_value=2.1e-57; Accession=PF00749.11; Description=tRNA synthetases class I (E and Q), catalytic domain
  Pfam annotation: Domain name=tRNA-synt_1c_C; Domain location=425-621; Score=185.9; E_value=9.5e-53; Accession=PF03950.8; Description=tRNA synthetases class I (E and Q), anti-codon binding domain
  Pfam module annotation: Pfam domain module=tRNA-synt_1c::tRNA-synt_1c_ C; Domain location=207-477::425-621
MEAALSFSKDSPPISIICAAKIVGLPLTINHSLAAGSAPTLQFASGESLHGVNPIILYIARGASIASLSGKNDIEFGHVVEWLEYAPTFLSGSEFENACLFVDGFLASRTFLVGHGLTIADIAVWSNLAGIGQRWESLRKSKKYQNLVRWFNSIDSEYKEALNEVVAAFVGKRGIGKSPAPSLKEKVHDSKDPSAPEVDLPGAKVGKVCVRFAPEPSGYLHIGHAKAALLNKYFAERYQGRLIVRFDDTNPSKESNEFVENLLKDIETLGIKYDAVTYTSDYFPKLMEMAESLIKQGKAYIDDTPKEQMRKERMDGIESRCRNNTVEENLSLWKEMVNGTERGMQCCVRGKLDMQDPNKSLRDPVYYRCNTDPHHRVGSKYKVYPTYDFACPFVDALEGGASKNLNLMEWDKLWTINKKIIDPVCARHTAVLKDQRVIFTLTNGPEEPFVRILPRHKKFEGAGKKATTFANRIWLDYADAAAISKGEEVTLMDWGNAIVKEIKVESGVITELVGELHLEGSVKTTKLKITWLADIEELVPLSLVEFDYLISKKKKDSLFLGKLMLNYSVGGIWQLEEDEDFLDNLNPCTRREIPALGDANMRNIKRGEVIQLERKGYYRCDAPFIRSSKPVVLFAIPDGRQQASLS

SEQ ID NO: 43006 - protein, 64 aa, Zea mays
  Coding DNA Sequence Number=SeqID_1227
MAGIASTCSYCLYDRSSNKVKTTSIVLSAHRWRTVGAPDSPVPLPDRWLGHVSRADRAADRWPG

SEQ ID NO: 43007 - protein, 253 aa, Zea mays
  Coding DNA Sequence Number=SeqID_1228
  Homolog annotation: Hit_ID=Q2QNV4; Match level="QueryCoverage=42%, HitCoverage=9%, E-value=7e-11, Identity=33%"; Hit description =Pentatricopeptide, putative, expressed
MLAVAASLRASASAVAEAGGDPAVLHAVLIKTASSSRAAYNLLFSRYHPSLSLHLLSHLPFCFRPTAGSLTSSLSSLSASSPASALPLLRRVLGMSPALLCDGPLSSLLRSMPPSIAPHVHALAFKLALSSSPYSASCLITLYSRARSPACARHLFDEIPVANRDSVCYSSTIVGLAQNGWVDMAESMGQRLLEINPKDDSAYVMLANVYSTAGKTNEEAEAWTAMRDHGVRKEGGRSWIEWCCTIRKGVENS

SEQ ID NO: 43008 - protein, 142 aa, Zea mays
  Coding DNA Sequence Number=SeqID_1229
MDVIPTPKAGHDCHQEVCPLLCCVGINTLDAATAATDRQATCAWLRQTITSMGTLKHDLIVDTCKLCLRGNGHPFGGLTVTIRPTLPPPTAASNRVLQKDKVSDENETLNNEMKGEKPIDSGSGKKEDGKKEAHQEDRLLRQ

SEQ ID NO: 43009 - protein, 95 aa, Zea mays
  Coding DNA Sequence Number=SeqID_1230
MNHVLVKKNNESDRMQALFALMSGDFPEGRHGLLDSKICPTKVLLKSGPLFPKGLRVAPCVVTLLAQARGLAMKLVSLGVESITQTYFKKDQASK

SEQ ID NO: 43010 - protein, 795 aa, Zea mays
  Coding DNA Sequence Number=SeqID_1231
  Gene Ontology: Mol. function=translation elongation factor activity; Biological process=transcription
  Homolog annotation: Hit_ID=Q1RY74; Match level="QueryCoverage=89%, HitCoverage=56%, E-value=6e-65, Identity=28%"; Hit description=Bromo adjacent region; Transcription elongation factor S-II, central region
MDLLGDREDALSLVSWCRSEEKEDPWRPGERVERLVTLPKLSLPPFLFLLFVASPFARPVCAFAFLSPPTTKKRSRGEVSSMGQDAGFKREDHSGLGSGPQTLKVSCCTSEENESRNRRYHQLKCSESNSRQLHLDYVPNFHCRSLPTRSRKTNAEQSTVGKRGSMYQSSSEISRIRKIQEGRRKIDSAFDGDAFLSFDIVDASSRPSTSGAYLHSHQNRRSGAKPSVDTAKRASKDFLDLQFREHPDENFKLDRPRLDSTLLKNDDGFLEISLEKEIAKGGPCRNAAPILLNTGSGKCTDLQKMNGCPSENNCGDKGRDSASSSKSTPVKVSSFDGSCQSDGAQHHITENNTKARSSPFKKMLDPIMKSKSPRSPSIMERGGSNSATGPGSRKNSVSRKSLLGDFSRSEQASNCQPNGQTQKRVNKSALSPAHLQAVLRLDSKNGVQVFEFCVDGPGESISARNWKNGDELSSIYTFHSGGKRSSAAGRISKDGGWDLPPIVGQVQVSSYLCSEVGKDGTVNNSVVTEFVSYDIGHARRIVEEKTGALQQPQRTSLTEENKTGRNNSDVSTSCPWSEEDLHPYLEIAATVIEVPFSRYKSEEVKNGSSPCTVKVVAPSGLHGSPSDDEAGGPSPLLDRWRYGGGCDCGGWDMACPIDVIGNTYDNSWAESIATNVKHPMELFVQGSKEELPVLSMKENGRGQFVVDFHGRLSALQAFSVCISLLHCSEASIAISLKKGKQKLYSSSLKLLLEEDVRHLIEAVTAEEKKKKKRSREKAPPPSVLLDPPFSPIGRV

SEQ ID NO: 43011 - protein, 71 aa, Zea mays
  Coding DNA Sequence Number=SeqID_1232
MGKGKRGRGSPHRVGDKRKHNPSPPLEDFGDSEYSKEEVSSEFEGSLALASPLTLSDDSDDSQGLDTECPT

SEQ ID NO: 43012 - protein, 671 aa, Zea mays
  Coding DNA Sequence Number=SeqID_1233
  Gene Ontology: Mol. function=signal recognition particle binding; Cellular component=signal recognition particle, endoplasmic reticulum targeting; Biological process=SRP-dependent cotranslational protein targeting to membrane
  Homolog annotation: Hit_ID=Q1SSS8; Match level="QueryCoverage=91%, HitCoverage=100%, E-value=0.0, Identity=64%"; Hit description=GTP -binding signal recognition particle SRP54, G-domain
  Pfam annotation: Domain name=SRP-alpha_N; Domain location=80-368; Score=163.0; E_value=7.8e-46; Accession=PF04086.4; Description =Signal recognition particle, alpha subunit, N-terminal
  Pfam annotation: Domain name=SRP54; Domain location=471-671; Score =199.8; E_value=6.6e-57; Accession=PF00448.13; Description=SRP54-type protein, GTPase domain
  Pfam annotation: Domain name=SRP54_N; Domain location=364-452; Score =13.9; E_value=0.01; Accession=PF02881.9; Description=SRP54-type protein, helical bundle domain
  Pfam module annotation: Pfam domain module=SRP-alpha_N::SRP54::SRP54 _N; Domain location=80-368::471-671::364-452
VPVHSIAKGPRLLYLGIHLPLVFPLPLRGYKAPSQGQSPLSITTGTGRGRVATMLEELLIFTRGGLILWSSCRALGAAALKGSPIDALIRSCLLEERSADASFSQDNYALKWTFHNDLGLVFVAVYQKILHLLYVDDLLAAVRKEFSQIYDPKRTSYDDFGDIFRQLHREAEARTEEMKKSKQALSSRPQPALTQKKPGPKGRGGDSRGGAANKGGSGAKDDSDGDGYGNQDHRTLANGAFKGQENGVRKENSSHGRTVVVKGKENGAPKDEGAFDVSKLQKLRANKKNGATDNGTKKLTKPDIKKKGKQDRVWDDKPSNKKLDFTDPADERGDEVADNVAVIEGESMMDKDEDLSSDSEDEEVEDGPKKKGWFSSMFQSISGNNVLEKSDLQPALKALKDRLMAKNVAEEIAEKLCESVAASLEGKKLGSFTRISSTVQTAMEDALLRILTPRRSIDILRDVHAAKERGRPYVIVFVGVNGVGKSTNLAKHNLSVTLAACDTFRSGAVEQLRTHARRLQIPIFEKGYEKDPAVVAREAIQEATRNKSDVVLVDTAGRMQDNEPLMRALSKLINLNSPDLVLFVGEALVGNDAVDQLTKFNQKLADLSAVPTARLIDGILLTKFDTIDDKVGAALSMVYISGAPVMFVGCGQSYTDLKKLNVKSIVKTLLK

SEQ ID NO: 43013 - protein, 212 aa, Zea mays
  Coding DNA Sequence Number=SeqID_1234
MEPSSGKPSIGWQREPQNRWKGHHHFVNVIKGEKLCIKAYLDHHHFVNVTKKFYIKAYLNLREKLILRGKCHTHHGLILYTMHPTGEMNMDNGHHKLSKGGHCLCETRKEARQTLRYRVHGRRSRRLRYLKPGVKKKTCKVKSLALEVIPGEANKSKKNKDKEKKMKNISSTLDQRTTARTPRRRSVKARTARTLGGGYLLLQQWHLSIKLK

SEQ ID NO: 43014 - protein, 202 aa, Zea mays
  Coding DNA Sequence Number=SeqID_1235
  Pfam annotation: Domain name=zf-CCHC; Domain location=85-102; Score =23.5; E_value=0.00013; Accession=PF00098.13; Description=Zinc knuckle
MATERGIHLSKRENETEDMDEEEIRKFYTHLNKVDKMLLMKLLRTNKEQGVTLLRLEETLIKTNDGLDKVTKEHEELSKKRIRKSGCFRCKELGHFIASCPHMENKILASPRMTFTNNKCHVRLSDASATNMVSKVISRWFVLRSCMNKQKEAFNWYQQVPSNSYCLKNEPQVIQTKVCGAPLVLKMLDVLVQVIQKFDAHL

SEQ ID NO: 43015 - protein, 85 aa, Zea mays
  Coding DNA Sequence Number=SeqID_1236
  Subcellular localization annotation: CTP_CleavageSite=45; ConfidenceScore=5.15e-01
MATMWAPSGNRRPGRRGRHPVVSVARPTWLWGKRKEGKSLAPPFMAAQGVRESRSCGSTPTDARIAMASAVFGFAVGDEADEVGP

SEQ ID NO: 43016 - protein, 607 aa, Zea mays
  Coding DNA Sequence Number=SeqID_1237
  Gene Ontology: Mol. function=protein binding; Cellular component =membrane; Biological process=defense response
  Homolog annotation: Hit_ID=Q6K4U3; Match level="QueryCoverage=92%, HitCoverage=51%, E-value=1e-84, Identity=36%"; Hit description =Putative LZ-NBS-LRR class RGA
  Pfam annotation: Domain name=NB-ARC; Domain location=1-229; Score =23.6; E_value=8.6e-12; Accession=PF00931.13; Description=NB-ARC domain
MTSSSGGGLSPYLTDGHEKRDPNQAQDCSGSSTLNPEILSRYFIVIDDVWDEEIWKLFEYALVDNSCGSRVIVTTRNFRVAKLCATPVAGALFELEPLSNADSKRLFYKRVFGKDGGNHNQLDEIAGRILKKCGGVPLAIITTASLLASKPKSINEWYRVYRSLGSGLEKDNTDIKRMHDILSLSYYELPSYLRPCLLYLSLFPEDCRIDKDSLVRRWVAEGLVVDEQGGGNLYELYDRGEKYFIELVNRSFIQPLDIDGVDGIPNACSVHDLILDLLISLSVEDNFGLRLDSQNFTTSTDSEVNIRRLSLQDNEVEVSVPETVDLSHVRSVIAFGDAFNWAPPLSRFKFLRALDLEGFPRKNNHPKELRRLHHLRYLQLRGYLQKEVLEEIGNLQHLKMLDLSHAYVSQLPVSITRLRNLQSLLVGSDVKMPQGIGSLSKLEEMSWIEVEPNTAAELGKLTEMRVLCVHGLGYDEAGDQAFLQSLSNLRNLLGLFITESEMCSLDDLPDPGQAPVGLRFFRGTETTFQQMPRWFSWLSELSGLTITVNNLTQDDIDMLGALPELRLLQLEVAENGTIAQEQLSIGSDKLFQSLEAFKFKHCARCWL

SEQ ID NO: 43017 - protein, 345 aa, Zea mays
  Coding DNA Sequence Number=SeqID_1238
  Gene Ontology: Mol. function=protein binding; Cellular component =nucleus; Biological process=ubiquitin cycle
  Homolog annotation: Hit_ID=Q84QP7; Match level="QueryCoverage=82%, HitCoverage=92%, E-value=1e-75, Identity=56%"; Hit description =Putative speckle-type POZ protein
  Pfam annotation: Domain name=BTB; Domain location=164-281; Score =83.5; E_value=6.6e-22; Accession=PF00651.21; Description=BTBPOZ domain
  Pfam annotation: Domain name=MATH; Domain location=18-141; Score=9.4; E_value=0.013; Accession=PF00917.16; Description=MATH domain
  Pfam module annotation: Pfam domain module=BTB::MATH; Domain location= 164-281::18-141
MATRCRSSGFIEIKVDFAGSISRPAIDHTVRSDDFSAGGHIWSVEFHLTGDTTGNGVYFSLSLQLVNESKSKSVKAITDAFLLGRGGTPSSSHGKRWVHVYPTPDGSPSSRNYLKFVKRSVLESGYYVTDGYITFMVGVIVLGVGDSPIPVPSSDIADHLGHLLDHADSSNDVTFSVGLKTFGAHRAVLAARSPVFKAQLFGSMADAEMRCITLHGIRPETFRILLRFIYTDALTAGDDCDGDEMQSSSDIDLFQDLLAAADMYQLDRLKLMCARKLWGCVSVETVAKILGCAELYNCSELKSECLDFFLLEKNFKIAVLTDGWFQLMQSFPSVIDEIRARVPQT

SEQ ID NO: 43018 - protein, 65 aa, Zea mays
  Coding DNA Sequence Number=SeqID_1239
MAPRFFYPASTAANVFFEVKMHHVIMIIVSNLQGTCKFLLILIKLSQVKESKGIERRLRRERVGI

SEQ ID NO: 43019 - protein, 62 aa, Zea mays
  Coding DNA Sequence Number=SeqID_1240
MGYRFLVRSIMPVHTGNVESQPEKRRVILPGSNQRDGGRWNKQGAHDHMMPCPSLLSGVTSV

SEQ ID NO: 43020 - protein, 100 aa, Zea mays
  Coding DNA Sequence Number=SeqID_1241
MTAPTQRLSALPEQRSMSGYALNGAASEAGRARRVRTAPVPWSGQHPHAKKRQARDVPWPHSGWVPNLRPSCARWRLAIAGYNQTAMTETARWRVKVRAH

SEQ ID NO: 43021 - protein, 100 aa, Zea mays
  Coding DNA Sequence Number=SeqID_1242
  Gene Ontology: Mol. function=aminoacyl-tRNA ligase activity; Cellular component=mitochondrion; Biological process=cysteinyl-tRNA aminoacylation
  Homolog annotation: Hit_ID=Q10RX2; Match level="QueryCoverage=66%, HitCoverage=12%, E-value=8e-19, Identity=68%"; Hit description =Cysteinyl-tRNA synthetase, putative, expressed
MDIGGGPEVCVSVSHLTLFLISVVIGLVLKQLKDKALKRAGLTEETLQEQIEQRNVARKNKQFEISDGIRKNLATKGIALMDEPSGTVWRPCEPEGSEES

SEQ ID NO: 43022 - protein, 683 aa, Zea mays
  Coding DNA Sequence Number=SeqID_1243
  Gene Ontology: Mol. function=protein-methionine-S-oxide reductase activity; Cellular component=membrane; Biological process=protein metabolic process
  Homolog annotation: Hit_ID=Q8LIY0; Match level="QueryCoverage=99%, HitCoverage=100%, E-value=0.0, Identity=73%"; Hit description =Putative CSLC9
  Pfam annotation: Domain name=Glycos_transf_2; Domain location=229 -404; Score=29.2; E_value=4.3e-06; Accession=PF00535.16; Description =Glycosyl transferase
MVQWWGREASGGRGTSVVVKMESPEWTIPAESEVAAGGKAGRGKNARQITWVLLLKAHRTAGKLTGAASAVLSIAGAAWRRVAAGRTDEDEDEDAGAAPPGESPALRSRFYGFLRASLVLSVLLLAADVAAHLQGWHLAVDVPDLLAVEGLFAAGYASWARVRLEYLAPALQFLANACVVLFLVQSADRLILCLGCLWIKHRGIRPVPKAGGKGSDDVEAGTGNFPMVLVQIPMRNEKEVYQQSIGAVCGLDWPRPNFLVQVLDDSDDAATSTLIKEEVEKWQREGVRILYRHRLIRDGYKAGNLKSAMNCSYVKDYEFVVIFDADFQPQPDFLKRTVPHFKGNEDVGLVQARWSFVNKDENLLTRLQNINLCFHFEVEQQVNGIFLNFFGFNGTAGVWRIKALEDSGGWMERTTVEDMDIAVRAHLKGWKFLFLNDVECQCELPESYEAYRKQQHRWHSGPMQLFRLCFVDIIKSKIGFWKKFNLIFLFFLLRKLILPFYSFTLFCIILPMTMFIPEAELPAWVVCYIPATMSLLNILPAPKSFPFIVPYLLFENTMSVTKFNAMVSGLFQLGSAHEWVVTKKSGRSSEGDLVVEKQPRQQRAGSASNLGSLAKEPSSSLRKDSQRKKHNRIYRKELALSFLLLTAAARSLISVQGIHFYFLLFQGVSFLVVGLDLIGEQVE

SEQ ID NO: 43023 - protein, 96 aa, Zea mays
  Coding DNA Sequence Number=SeqID_1244
  Pfam annotation: Domain name=Pcc1; Domain location=15-89; Score=71.0; E_value=3.7e-18; Accession=PF09341.1; Description=Transcription factor Pcc1
MKNSQRTTDISFGSNLEVDYGSEENASIVYRTLAVDKELQPDKVKREMTLSGSKLAVHFAAVEARFLRASFSSFVDLMGLVTKLVEEYGVANAGHS

SEQ ID NO: 43024 - protein, 100 aa, Zea mays
  Coding DNA Sequence Number=SeqID_1245
MAVQPRTGQGTAVNSIRSAQRNRNSKLAEQGSYVPKQYANLTASAHCRPGIEGRETGRRAGREDSPAPRVRVFEAEAALGVGGAVGEWRWVVPKPLPQFP

SEQ ID NO: 43025 - protein, 970 aa, Zea mays
  Coding DNA Sequence Number=SeqID_1246
  Gene Ontology: Mol. function=homocysteine S-methyltransferase activity; Cellular component=nucleus; Biological process =keratinization
  Homolog annotation: Hit_ID=Q8LIX8; Match level="QueryCoverage=95%, HitCoverage=96%, E-value=0.0, Identity=56%"; Hit description =Putative nuclear matrix constituent protein 1
MASPRSAGGDEAIWMKLREAGFDEDAVRRRDKAALIGYISRLESEIYEYQHNLGLILLERKELTSKYEQLKASFEATEIILKRERASQQSALSETRKREENLKKNLAIQKECISNLEKALHDMRGETAEIKVSYEAKLAESLQMMETAQKKFDEAEEKLLTAKSLEADCIRTRNTSLRRLQDIEDREDQLRRYQTSFELENASKEKEINLLRKSLDDTKKILHEKEQCLLKEQVLLNQRDDSILERLAYITSSEKRLEEEKLNLEDERKVLLEEKNKLDLNMQAIISREEAIIQKESILDKRESELLILQETIASKERAEIERLRQEEEIALVRRRQEFDTDMEIKLTSFEEEIDARKALLDQRETTINEKEDAVAQREQNLNLRFAELANKEESLVKKSDELREEEKRLSSERETLHIDLQKEKEEIHNMKLDLEKEKSFFEEEKREAIQAQENLAITQNEREDLQSLQVKLKDEIDSLRAQKVDLMADAERLLSEKERFEIEWELIDEKKEELQKEAARIAEERRVIDEHLKSEFDIIKQEKEDLRVQLKISTESLAHEHAEFMNKMQQEHASWLSRIQLEREDLKKDIDIQRTELLNSAKARQMEIDSYLREKEEEFEQKKSKELEYINSEKETISSKLEHVRLELQKLEEERKRSMLERERREEELSETKKTIDALNEQREKLQEQRKLLHSDRKSITQQMQLLNELEELKIESENRQLSLRQCGKSKHAGVENLEDNGVHLSPDEDQNASPKQTTVKKLEVSPSVSTPISWVKKCAQVIFKRSPEKSADPNNDIPPKLGNVNDCTSLATAYSDGLFACHLENGAEKVPQAIDGLKVGKKRLNNALSHGDSEISQPKRKQQKSATQILRVIGGEIDSNCSPSVLEEKCSKNEHDAVPVGLCGKGPQNPQAEHSEDISVSASEPSNGPGVVDSEDKDGADEESDDEGEDEEEEKTSSAKKLWRFLIT

SEQ ID NO: 43026 - protein, 103 aa, Zea mays
  Coding DNA Sequence Number=SeqID_1247
MANARTWRGPHMKPLPEIDIIGWKKTLSVPSDAGGPRAEVQNSMNEGLQGAAFFDMKKQTHTSNEELTYFSTSHARCRRTIQIASDHYIVRKWKMTHKLLRKH

SEQ ID NO: 43027 - protein, 460 aa, Zea mays
  Coding DNA Sequence Number=SeqID_1248
  Gene Ontology: Mol. function=RNA-directed DNA polymerase activity; Cellular component=mitochondrion; Biological process=RNA-dependent DNA replication
  Homolog annotation: Hit_ID=UPI00004C1731; Match level="QueryCoverage =97%, HitCoverage=30%, E-value=1e-177, Identity=73%"; Hit description= UPI00004C1731 related cluster
  Pfam annotation: Domain name=RnaseH; Domain location=1-123; Score= -7.5; E_value=0.00029; Accession=PF00075.14; Description=RNase H
  Pfam annotation: Domain name=rve; Domain location=189-361; Score =106.9; E_value=6e-29; Accession=PF00665.16; Description=Integrase core domain
  Pfam module annotation: Pfam domain module=RnaseH::rve; Domain location=1-123::189-361
MFFDGSLMKTGAGAGLLFISPLGKHLRYVLRLHFPASNNVAEYEALVNGLRIAIELGVRRLDARGDSQLVIDQVMKNSHCRDPKMEAYCDEVRRLEDKFFGLELNHIARRYNETADELAKIASGRTTVPPDVFSRDLHQPSVKLDDAPEPEVPPAQPEVPSAQPEVPSAQPEVPSAPEGGALNIEEGQSGATPDQDWQAPYLQYLRRGELPLDQAEARRKAPGGYTHLLVAIDKFSKWIEVRPLNSIRSEQAVAFFTNIIHRFGVPNSIITDNGTQFTGKKFLDFCEDHHIRVDWAAVAHPMSNGQVERANGMILQGLKPRIYNDLNKFGKRWMKELPSVVWSLRTTPSRATGFTPFFLVYGAEAILPTNLENGSPRARAYTKQSNQASREESPDQLEEARDRALLHSARYQQSLRRYHARGVRSRELQVGDLVLRLRQDARGRHKLTPPWEGHSSSPKF

SEQ ID NO: 43028 - protein, 74 aa, Zea mays
  Coding DNA Sequence Number=SeqID_1249
MQRAPRTRRDFNVYPLLLRLPGVRINYYLIGKGAIAQLFDVGKEECSTVFLWCCPCCDTVANGVQVTRAVSYQF

SEQ ID NO: 43029 - protein, 180 aa, Zea mays
  Coding DNA Sequence Number=SeqID_1250
  Gene Ontology: Mol. function=transferase activity; Cellular component= membrane
  Homolog annotation: Hit_ID=Q657X7; Match level="QueryCoverage=55%, HitCoverage=19%, E-value=9e-30, Identity=63%"; Hit description =Pectin-glucuronyltransferase-like
MVGKRARVGRCTAARRERAGGRVGPAKPLSSQRTHAWAAFNVAASCLPTMSSDVNGEYVMDTKYVLMPEVPLWSTIADEELIYAKKEITNAPLILDDLDLYAPLFQNVSIFKRSYELMERLLKVFIYHDGENPIFHSPELKGFYTTKLHGKLWKYTIKALCNADKIFPFQKHFLNHQEDL

SEQ ID NO: 43030 - protein, 419 aa, Zea mays
  Coding DNA Sequence Number=SeqID_1251
  Gene Ontology: Mol. function=DNA-directed DNA polymerase activity; Cellular component=nucleus; Biological process=DNA replication
  Homolog annotation: Hit_ID=Q9LRE5; Match level="QueryCoverage=99%, HitCoverage=96%, E-value=0.0, Identity=79%"; Hit description=DNA polymerase delta small subunit
  Pfam annotation: Domain name=DNA_pol_E_B; Domain location=176-387; Score=249.4; E_value=7.6e-72; Accession=PF04042.6; Description=DNA polymerase epsilon subunit B
MERKQAAYSNLVRILFFHRRGLLHSLVDHLWSQLNGCIGDCRMRVFKRVQANFFLHIAVTTVLGLEEGKDCIIVGTLYKHMKLKPSILDEYAKERSAIPLVKPHNFMHPDDHLILEDESGRVTLAGAIPPAAFVTGVVVALHGKETSAGNFLVEDVLEAGLPPQSALSSAEEDKYVVFISGLSVGSDTFNPLQFQLLIDHVTGHLGDENEQSIASNIVRIVVVGNSVHISPRFVNGQTVPSKDQSRIAEPIKELDIMLTQLVASLPVDMMPGCHDPANFSLPQQPLHRCLFSGASTYNTFSSCSNPHQFELDSVQFLGTSGQNIDDLYKYSDAKDKLEFMERTLRWRHLAPTAPNSLGCYPYTDKDPFLVESCPHVYFVGNQDKYETRLLEGQEKQKVRLISIPRFSESGVAVMILLCI

SEQ ID NO: 43031 - protein, 448 aa, Zea mays
  Coding DNA Sequence Number=SeqID_1252
  Gene Ontology: Mol. function=translation elongation factor activity
  Homolog annotation: Hit_ID=Q00WW9; Match level="QueryCoverage=61%, HitCoverage=78%, E-value=1e-64, Identity=45%"; Hit description =Homology to unknown gene
  Subcellular localization annotation: CTP_CleavageSite=48; ConfidenceScore=5.03e-01
MVACSRGLAWPPFDLTTARGAASWPRRRAAIRCCCAGADAQPQRRLSRAAAVAPERAEEWRIDGNKPSAAAPGRRRTSLTAMPPLPFPAPRSRRQVKQPDFYPRCTPRGSAPQSRDTPPKRDTGIASEKEWGINLLDEAVKESGINEDGSTWYRESGDDIGENGYRCRWARMGGQSHDGSTEWKETWWEKSDWTGYKELGAEKSGRNAEGDSWWEKWKEVLYQDEWSQKLEQSHLRGSDIVYLVEYSNLARIERSAEKQAKSGIENAGWYEKWWEKYDAKGWTEKGAHKYGRLNEQSWWERWGEHYDGRGFVLKWTDKWAETDLGTKWGDKWEEKFFAGIGSRQGETWHVCPGGERWSRTWGEEHFGNGKVHKYGKSTTGERWDLVVDEETYYEAEPHYGWADVVGDSTQLLSIQPVERPPGVFPAIDFSSAPPPKDAPPGMPPSPLD

SEQ ID NO: 43032 - protein, 645 aa, Zea mays
  Coding DNA Sequence Number=SeqID_1253
  Gene Ontology: Mol. function=catalytic activity; Cellular component =nucleus; Biological process=metabolic process
  Homolog annotation: Hit_ID=Q8H8C9; Match level="QueryCoverage=84%, HitCoverage=99%, E-value=0.0, Identity=79%"; Hit description =Putative AMP-binding protein
  Pfam annotation: Domain name=AMP-binding; Domain location=136-562; Score=350.9; E_value=2.1e-102; Accession=PF00501.18; Description=AMP- binding enzyme
MRAAAASAIRRLLPRYSISSGGGLHRHSQSQNQSGYCFNPHWDYTNRLARPRALLDFSPCHPRWSSPSSPRSVASPQFFCSLSGTEEEEAVVLDMDAGTVRCAANHAPLSPISFIERAAAVYGARPAVVYGDRRHTWAETRGRCLRVAAALATRFGIARGDVVAVLSPNVPAMYELHFAVPMAGAVLCTLNTRHDAAMVSVLLKHSGAKVFLVESNLLDVGRAAMKRLAESNSAAALPVLLTISDDTDSDDYEDLVRNGPARFDIRWPADELDPIALNYTSGTTSRPKGVVYSHRGAYLNTIATVLAYDITAMPTYLWTVPMFHCNGWNLPWGVAMQGGTNVCLRHFTGEVIFDSITRHGVTHMGGAPTVLNMMANARTATAERKPLPWPVRVMTGGAPPPPPRVLFAVEELGFVVYQIYGLTETYGPATVCTWMPEWDALPAEERARLKARQGFHHVAMQDVDVMNPSTMESVPHDGQTVGEVMFRGNTVMSGYYKDLKATKESMAGGWLHTGDLAVRHPDGYIQIKDRAKDIIISGGENISSIEVESVIFSHPAVLEAAVVARPDHHWGETPCAFVKLKDGASATEAEIINFCREKLPHYMAPKTVVFEDLPKTSTGKTQKFVLRDKARAMGSLTKVACSSKM

SEQ ID NO: 43033 - protein, 103 aa, Zea mays
  Coding DNA Sequence Number=SeqID_1254
  Gene Ontology: Mol. function=nucleic acid binding
MADSGQSPAMAGDGGVIRPDTEGVVDGKLMVTPPPVLMGPIIDEISNGEEGEHRIRPPMSNISSREMDTPQVLHSHQTTIDLNIFPTIEMTFKDIDDAYKFYK

SEQ ID NO: 43034 - protein, 63 aa, Zea mays
  Coding DNA Sequence Number=SeqID_1255
MNNIDKVTDKRGIALGEIEKDKIMVAKAYNKKVKAKSFQIEDLVGEAPGTWSLHDGGTETPRG

SEQ ID NO: 43035 - protein, 49 aa, Zea mays
  Coding DNA Sequence Number=SeqID_1256
MAEPRVRNHLIESAYPRHHVGLLFHGVGEQAAQDSGKIGEMNLENEFPI

SEQ ID NO: 43036 - protein, 204 aa, Zea mays
  Coding DNA Sequence Number=SeqID_1257
  Subcellular localization annotation: CTP_CleavageSite=59; ConfidenceScore=5.00e-01
QAGSSLRAWLHQAWGGIEDGRTAWAMAGPKRARARPAANQRHRPQRDASTTAPRAVPNRAAMARRPMASSTARGLWSDASACARPAGRAGGTERNPAARGRANRGSACAPVPVPLSCRAATEVVRALLGMEANKEIGRAEAVESGAAASATHGDGALPLELDRTHRNPRFHVKMLEENTQTLALPRRICPTDPSLALPQTAGAP

SEQ ID NO: 43037 - protein, 34 aa, Zea mays
  Coding DNA Sequence Number=SeqID_1258
MGLERLCVSLPEYLGKLVSVPLHGKYYVGTRIIA

SEQ ID NO: 43038 - protein, 78 aa, Zea mays
  Coding DNA Sequence Number=SeqID_1259
MAPAQTRWHPGMDAWSWHGDPFGLQHCKVGVLAMEILDGAKAELAASQMIGYPASTSLYNSRLPTSFAIRTPGALTIT

SEQ ID NO: 43039 - protein, 243 aa, Zea mays
  Coding DNA Sequence Number=SeqID_1260
  Gene Ontology: Mol. function=oxidoreductase activity, acting on paired donors, with incorporation or reduction of molecular oxygen, 2-oxoglutarate as one donor, and incorporation of one atom each of oxygen into both ...
  Gene Ontology: Mol. function=donors; Biological process=protein metabolic process
  Homolog annotation: Hit_ID=Q10SL2; Match level="QueryCoverage=81%, HitCoverage=77%, E-value=1e-100, Identity=89%"; Hit description =ABR017Cp, putative, expressed
MDPAAGGAGQQRQNKASAGKKVKKGGGSGGRWPAVKPKKDLQINRLKGTHLLTIPDFFTSAEAKAFIDIAESMGFTHQGSLGPLKGEAYRDNERISVTDPLLAQAIWESGINRIFTDISVSGKVATGLNPNIRFYRYTEGQRFGRHIDESVSLGDGSKTYYTLLIYLSGKGSAKDSSGQALVGGETVFYDQRGGVVAEVAPVQGMALLHLHGAKCMLHEARAVKKNAKSTRLGHNGSGAGKYF

SEQ ID NO: 43040 - protein, 76 aa, Zea mays
  Coding DNA Sequence Number=SeqID_1261
MAFRTEAQPNPLAYGNHSSITAWRPMMKRVPATVAASAADRHHELRTDEKTALGLRYMRLVRLQQLEQLTGYSEVV

SEQ ID NO: 43041 - protein, 380 aa, Zea mays
  Coding DNA Sequence Number=SeqID_1262
  Gene Ontology: Mol. function=transcription regulator activity
  Homolog annotation: Hit_ID=Q5Z9E5; Match level="QueryCoverage=91%, HitCoverage=94%, E-value=6e-34, Identity=33%"; Hit description =Putative mature anther-specific protein LAT61
  Pfam annotation: Domain name=DUF822; Domain location=22-177; Score =183.8; E_value=4.3e-52; Accession=PF05687.4; Description=Plant protein of unknown function (DUF822)
MNGGEGEGGGAGSGAAAGGAGAGTPRVPTWRERENNRRRERRRRAIASKIFTGLRAHGNYALRRHCDNNDVLKALCEEAGWTVEPDGTTYRKARGCKPPGSRDPYTAAFIPGGMVSCPVSPRAYNGLSYPSSPSHVGGRGSSFFYGGAGSSRGVVIGGGVGGLPWLNNLSRYSDDASYADDYSFSAPVTPQNGSPPRRKMARWASGNAAAGSNVQSPWAASPGPSRYASLPVTMPHTPVHGEAVAADPVSLLTGLQISAAAANKPPAYSMFDFDAGSYSSRPGQSSDGAAWAAASSRGAAGDGDAQVAPHGFSFGWSGGPAFSAWEGEKASVAFNAWEGEKASGAFSAWEGEKVSDEYVDEGDLELTLGNSRAGAGADRA

SEQ ID NO: 43042 - protein, 352 aa, Zea mays
  Coding DNA Sequence Number=SeqID_1263
  Homolog annotation: Hit_ID=Q1KSC3; Match level="QueryCoverage=33%, HitCoverage=56%, E-value=3e-31, Identity=64%"; Hit description =Putative cyclin-dependent kinase inhibitor 3
MALPVDVAPESEPWGRAERSFVVFRVLARVRALGSGGAEFAVFRVLARVRALGSGGAEFAVFRVLARVRALGSGGAEFAVFRVLARVRALGSGGAEFAVFRVLARVRALGSGGAEFAVAALSFCQTGQWSGGVTAVTSALPGARVRMKLYADGGYQLRIRRLEACSASEPSPSLPHYSQDSPCDCTTPHPNPPTASAPLSSESGARTGPDDQAMGKYMRKGKVSGEVAVMEVPGGALLGVRTRSRTLALQRAQRPLDKGDAEDAAAEYLELRSRRLEKPHKEHPSPPATATKRGAGRKAAAAAAVQHVLMQDEVEVEVSFGDNVLDLDTMERCDSSASSVLVQVVPFAREIG

SEQ ID NO: 43043 - protein, 324 aa, Zea mays
  Coding DNA Sequence Number=SeqID_1264
  Gene Ontology: Mol. function=zinc ion binding
  Homolog annotation: Hit_ID=Q10RT9; Match level="QueryCoverage=50%, HitCoverage=87%, E-value=4e-33, Identity=39%"; Hit description=CHY zinc finger family protein, expressed
  Pfam annotation: Domain name=zf-CHY; Domain location=180-241; Score =42.0; E_value=2e-09; Accession=PF05495.3; Description=CHY zinc finger
MGGRGRPRQRQSGVGSTWHPWDPSRIAEWHWVGSTPLHTVTRATARRGAARGASAEREQATAVRRAGHGAAPCFAPSPVRSRLTQLCSSLSLSHARAFWTGGRTAALLLQAPGRGREADAEEVHASTYGILVWDQKRTQQQQRRKARAMDGDAGPEQHGHCHNEAKVKSRVASVMLHPNAHSFTPVDSLEVSVHDRHVLPRHDIKLVICSLCNKEQDVQQDCANCGACLGKYFCAKCNFFDDDDWWRREFLSLWQMWFSCPVCLRSACNMSDIWQKLDQQVWILCNDCGVTSNVQFHILAHKCPGCSSYNTRQTRGDPAACSRV

SEQ ID NO: 43044 - protein, 135 aa, Zea mays
  Coding DNA Sequence Number=SeqID_1265
MAGGSLRETGGCHSPPDARGRKGSSGRRFAFAVITAIKKQGPGKGDTPKRILPREGTRLRASLLIRGSKAGPRRVRQPPQIVWALHPLLVRGSKADPPKGSTAASGYSGSASITDQGFEGWPPKGSQSPQTPSEG

SEQ ID NO: 43045 - protein, 125 aa, Zea mays
  Coding DNA Sequence Number=SeqID_1266
MARGEGELTGGAQGQGCALEQVSGESGCWIRSERLRSSARGLTVATDVVSSVTAKSLEPRQARSLGTLRSPELDRTGEGVPDELDCRVPALRTGLGAREWREGRSGWVGATPKTNLGTGRGNRVR

SEQ ID NO: 43046 - protein, 735 aa, Zea mays
  Coding DNA Sequence Number=SeqID_1267
  Gene Ontology: Mol. function=binding
  Homolog annotation: Hit_ID=Q2QPI5; Match level="QueryCoverage=98%, HitCoverage=97%, E-value=1e-167, Identity=46%"; Hit description =Expressed protein
MDRRVSLATRSVRVLIPDQLPTLFEPQKAVMTPHVRASVVDDAAPPERRLTMLALQLAVLEKAASRLGTLGFIWATVVLLGGFAITLGQIDFWCITTLLLVEGARILGRSHELEWQHETTGRAPVSWAVGRVFHWLQLLSASSCAALSLVRLVHQRYGGSEEAHVNRHSALDIFYGLALAEALLFLVEKALWQWRVGHHRLLERVAADCHLNTACGAVAVRRFFYDSYSRCLNGSIFEGLHMDLVSYADDLLTAGSHDEQRLGASILAALVESDRFADATLRKIGTSGPTIERLIEMLSWKNASEKDVRRSAAVVVFMLTGRKLNALRVTGIPGAMESVASLLYADLDELNLLGLSILNKLARDHDNCDKIGRTRGLLDRIISYAGIVANGPATGPPTDMRLKAVKQSLRVVKRLASTTGTTGKLLRRELSDIVFTVSNIREVLQLQQQHDEKDVSELHRLAIEILTNLAMDEEAREMIGGTGGVVSTLVSMFLPEEQEAEPAPDRHKDAVRVEAGEALAMLALDSRRNCGAIIMAFGGGVDRLVETLSDPVVVISAARILRNLCTYAGEEYHLTLRGVTAGATKVLRNIMVEKTKLLNISIGLAAQMLRFMQPGKLRASLATAGVTDAALARTLVLVLREYSHPSLVLPRIRLHTLELAIALMRSDARFVALFVELGMEAEQRRVAETTSGLECFNVFSGSVGLSRRVVSVGSLVESAMELMRQQACTSQSQKR

SEQ ID NO: 43047 - protein, 131 aa, Zea mays
  Coding DNA Sequence Number=SeqID_1268
MATHEARGSSERHGRREIRAAMIARDILRSSAVWAARVTTYICARVIDDILRPLPPSFRVFFSIIVFYAYHIRGEGGAPDNLIESGLLEFIASTDWSHARLDIKRHCGEHLDPHLMNPFVSVSFCGVKPEF

SEQ ID NO: 43048 - protein, 242 aa, Zea mays
  Coding DNA Sequence Number=SeqID_1269
  Gene Ontology: Mol. function=cysteine-type peptidase activity; Biological process=proteolysis
MKYVDHPPSNPKKITIKSSQEVFTVEIPRPRNNANKPRQSIAPDVDTPKQMKQLYVRRNTKRSAGRGKNKLTIDMSDLMRNQCLLSDNRHIYYLDHLHHEATPENKYDTSRIKYFDKETIDALTKADRRKPRHAGETYGHCHFCSRTDTCYVAAPKQPANDTFHIHVPRMKDLISSKVTCLPPPYRSSFDSLLKAHDKEVDKYCARLEHSHRKLVSNQLQLAEIFADMIDDVIRLGSQVQES

SEQ ID NO: 43049 - protein, 135 aa, Zea mays
  Coding DNA Sequence Number=SeqID_1270
  Pfam annotation: Domain name=zf-CCHC; Domain location=77-94; Score =23.5; E_value=0.00013; Accession=PF00098.13; Description=Zinc knuckle
MATERGIHLSKRENETEDMDEEEIRKFYTHLNKVDKMLLMKLLRTNKEQGVTLLRLEETLIKTNDGLDKSKKRIRKSGCFRCKELGHFIASCPHMENKILASPRMTFTNNKCHVRLSDASATNMVSKVISRWFVL

SEQ ID NO: 43050 - protein, 145 aa, Zea mays
  Coding DNA Sequence Number=SeqID_1271
YSCVDCLYGALLGILIVYSVSYASRFDSLHYAPHRQLDKPRKEARQTLRYRVHGRRSRRLRYLKPGVKKKTCKVKSLALEVIPGEANKSKKNKDKEKKMKNISSTLDQRTTARTPRRRSVKARTARTLGGGYLLLQQWHLSIKLK

SEQ ID NO: 43051 - protein, 141 aa, Zea mays
  Coding DNA Sequence Number=SeqID_1272
  Gene Ontology: Mol. function=protein dimerization activity
  Homolog annotation: Hit_ID=Q53M47; Match level="QueryCoverage=76%, HitCoverage=10%, E-value=3e-32, Identity=62%"; Hit description=HAT family dimerisation domain, putative
MNIVIPNMDDTIPIRGRSRCRGTKLVSYYHHFHNGFFIVAFDQVLVEFNNRFPERSTQLLGCIACLDPRDSFANFDLEKLIELSKIYDADFSDYERTCLIDQLLLFIVERDMFVDIQDEKILKHFQGLRTQKINLPRSINS

SEQ ID NO: 43052 - protein, 70 aa, Zea mays
  Coding DNA Sequence Number=SeqID_1273
MDKFLVKNQKKDASNSKTIGTNEGRVEQKRPRIELDMNDIVADPGLRKLIDEFPHEIRDDAKRAYLQMGS

SEQ ID NO: 43053 - protein, 202 aa, Zea mays
  Coding DNA Sequence Number=SeqID_1274
  Pfam annotation: Domain name=Tryp_alpha_amyl; Domain location=47-127; Score=2.0; E_value=0.052; Accession=PF00234.12; Description=Protease inhibitorseed storageLTP f
MASFKCMCVFLVSLMLALIVNNAQEERTLPPFPCIPGQPRPPWLPPCPPAPAECYTSVSGLMPCADFLTHIGLPPAPPTTACCDGLRSLVTNAPICMCHVVNGDINKLLPAPMIPVRMVALPRLRPCATDEPSISTTDSVKIITAKITTVDSTRGITTRTTSSIATGTTIDATIGITVDSTTDTNGDATGITTLDSTARITI

SEQ ID NO: 43054 - protein, 362 aa, Zea mays
  Coding DNA Sequence Number=SeqID_1275
  Gene Ontology: Mol. function=DNA binding; Cellular component =mitochondrion; Biological process=DNA integration
  Homolog annotation: Hit_ID=UPI00005A975E; Match level="QueryCoverage =84%, HitCoverage=18%, E-value=1e-171, Identity=95%"; Hit description= PREDICTED: similar to Retrovirus-related Pol polyprotein from transposon 297
  Pfam annotation: Domain name=rve; Domain location=74-233; Score =116.0; E_value=1.1e-31; Accession=PF00665.16; Description=Integrase core domain
MHFHRRRSGALTRDTLGACGHHAAPRTLVGNAFQQGFYWPTAVADATRIVRTCEGCQFYARQTHLPAQALQTIPITWPFAVWGLDLVGPLQKAPGGYTHLLVAIDKFSKWIEVRPLNSIRSEQAVAFFTNIIHRFGVPNSIITDNGTQFTGRKFLDFCEDHHIRVDWAAVAHPMTNGQVECANGMILQGLKPRIYNDLNKFGKRWMKELPSVVWSLRTTPNRAAGFTPFFLVYGAEGILPTDLEYGSPRMRAYADQSNRANREDSLDQLEEARDMALLHSARYQQSLRRYHARGVRSRDLQVGDLVLRLRQDARGQHKLTHPWEGPFVIAKVLKPGTYKLSNSQGEVYRNAWNIQQLRRFYP

SEQ ID NO: 43055 - protein, 313 aa, Zea mays
  Coding DNA Sequence Number=SeqID_1276
MTHETDDLKGIYPYYSLREFCRRPHIRFCLHPDLALSLSTTQHQAPCPPAISAAPNRGIRLRYGRRSPLLRPNSRLASSSASWLSVLRPRCPWKEIENHGPRPGSKWMEIEESASAAPWHPLRPPPLPHLPARETIAIVPLPRAARDDPLPRDSRVFATHGVSLCADLLLHLVSDHLLCLDLSEKIINLYWSVYCAEGIGTSSGSQEWKANLSWVLAALAPRRSSSGCFMLPDTDEFRTDNNSGLGIEEYRIPRLSYGTDDHSLRDEFAKYGEVVEGIKLIAALGGLLKNGLSYGTDDHSLRVEFAKYGEVVE

SEQ ID NO: 43056 - protein, 52 aa, Zea mays
  Coding DNA Sequence Number=SeqID_1277
MAAPFEAAIRGPAEPSLFTVLFASRIALAQGIVAEGRGDGLPRQKATRRRIR

SEQ ID NO: 43057 - protein, 447 aa, Zea mays
  Coding DNA Sequence Number=SeqID_1278
  Gene Ontology: Mol. function=DNA binding; Cellular component=1, 3-beta- glucan synthase complex; Biological process=DNA integration
  Homolog annotation: Hit_ID=Q8S5U9; Match level="QueryCoverage=41%, HitCoverage=10%, E-value=2e-76, Identity=80%"; Hit description =Putative glucan synthase
MLIIFPQHGSILESSHGGSYQKHDGTTTWDKEYQLFQPSGAIKFPLQVTTTDAWLEKIKRLELLLTVKESAMDVPSNLEARRRLTFFTNSLFMDMPDAPKVRNMLSFSALTPYYNEPVLFSIKELEEENEDGVSTLFYLQKIYPDEWKNFKERVGLEEELKESEESEELKEELRLWASYRGQTLARTDVETGSKLSEYTRRQPLGEDVSELRPRGQVAENANITGGDTLADEVKVDLHVLRALMLHRIGRCGAGLIVRHGSRLQDVECVLALVEEETLRPSFGGDLEEVVEKSQVLHRELALRSDNRALKKGITRRCDHDVIDMNKVVFDFASMKSREGQVEGEATVRSPQRLLEVVQRAIQPTDQIRASRVDETGGLAVVDRLCQSAVEEDILDVLLMDRPVPGEGERVDGLNVGELDDGAEGLNVVHSGTPSEALKDPTGLVALE

SEQ ID NO: 43058 - protein, 1125 aa, Zea mays
  Coding DNA Sequence Number=SeqID_1279
  Gene Ontology: Mol. function=1,3-beta-glucan synthase activity; Cellular component=1,3-beta-glucan synthase complex; Biological process=1,3-beta-glucan biosynthetic process
  Homolog annotation: Hit_ID=Q8S5U9; Match level="QueryCoverage=52%, HitCoverage=48%, E-value=0.0, Identity=76%"; Hit description =Putative glucan synthase
  Pfam annotation: Domain name=Glucan_synthase; Domain location=354 -904; Score=-52.7; E_value=0.00023; Accession=PF02364.6; Description =1,3-beta-glucan synthase component
  Pfam annotation: Domain name=MFS_1; Domain location=648-987; Score= -49.0; E_value=0.055; Accession=PF07690.6; Description=Major Facilitator Superfamily
  Pfam module annotation: Pfam domain module=Glucan_synthase::MFS_1; Domain location=354-904::648-987
MKYLGLPLSLKRLTKAQLQPLMDKLADLLPAWKVDLMTRAETLLNHVFEDLRKPKVPNSGLGISDLQCLNWALRVRWLWLNKTDSSKPWADLPLWLMGQRLEDLASHVHALVPFRIANKRTVVEAFDDMSWVRDLRSSVTWEIISDFLTLWAAISDVVLHAGVPDKHVWRFSSSCQYSVKSAYELLFSGSTSFGAYERIWKTWVPAKCGFLWLVMHNRCWTADRLAKRGLPHPAFLPIHHLLVSCVFSRQFWFLLLQKLGLPTLSPGNDESNFDEWWSKAAGMVHGDFKAGSNSLMVLGAWCIWRHRNDCVFNGVRPSISKALILAEDDFRLCLYEVHLGHVVAFGGCFNLLGPSLRVEVEACTVKSKLLRQGMWLGNDDVERPPFFVGLFASKMRHLAEAGRWINVLEVSLVKNRSCLEWGFSWLGNDGAPQSSFSSAVRGMMYYKKALNLEAFLDMAKREDLMEGYKAAESVNDEQWKIHQRSLFAQCEAVADMKFTYVVSCQQYGNDKRAALANAQDILQLMRNYPSLRVAYIDEVEDRVGDKKMETAYYSTLVKVALTKDSESADPTQNLDQDNYLEESLKMRNLLQEFLTEHGDAFMLLHNRGVLFQYTVYVFLYGRLYLALSGLEEGLSQGRLIHNHPLQIALASQSLVQLGFLMALPMMMEIGLERGFGQALSDLIMMNLQLATVFFTFSLGTKTHYYGRMLLHGGAQYRGTGRGFVVFHAKFAENYRLYSRSHFVKGIELMILLIVYQLFGQSYRSTIAYIFITFSMWLLVLTWLFAPFLFNPSGFEWAKIVDDWSDWNKWISNRGGIGVSPDKSWESWWEVEQDHLKYSGTIGRFVEIILAIRFFIYQYGLVYHLHVTHNKSILVYLISWLVIVAVLLVMKTVSVGRRTFSADFQLFFRLIKFLIFVAFIAILIVLIVLLHMTFRDIFVCFLAFLPTGWGILLIAQACKPLARHVGLWGSVRALARAYEIIMGGDLSVIEYYRKMKDMSDSLRDLGKHVSDRMLILNLLCGLSWCYDHLKAFIKCSMPFPYFHDFRNKLLLKELTLDTKSSTSTSTLYGTSSTNQPPRPLSLRGLLHALMPPLLLKLLSRLQARKVVVDPIRAATEVMSLPMVDLL

SEQ ID NO: 43059 - protein, 1056 aa, Zea mays
  Coding DNA Sequence Number=SeqID_1280
  Gene Ontology: Mol. function=protein serine/threonine kinase activity; Cellular component=integral to membrane; Biological process=protein amino acid phosphorylation
  Homolog annotation: Hit_ID=Q6Z8Y3; Match level="QueryCoverage=93%, HitCoverage=95%, E-value=0.0, Identity=57%"; Hit description =Putative CLAVATA1 receptor kinase
  Pfam annotation: Domain name=LRRNT_2; Domain location=50-91; Score =49.8; E_value=9.1e-12; Accession=PF08263.3; Description=Leucine rich repeat N-terminal domain
  Pfam annotation: Domain name=LRR_1; Domain location=119-138; Score =2.5; E_value=96; Accession=PF00560.23; Description=Leucine Rich Repeat
  Pfam annotation: Domain name=LRR_1; Domain location=143-165; Score =16.0; E_value=0.14; Accession=PF00560.23; Description=Leucine Rich Repeat
  Pfam annotation: Domain name=LRR_1; Domain location=167-189; Score =11.4; E_value=2.1; Accession=PF00560.23; Description=Leucine Rich Repeat
  Pfam annotation: Domain name=LRR_1; Domain location=191-213; Score =7.2; E_value=13; Accession=PF00560.23; Description=Leucine Rich Repeat
  Pfam annotation: Domain name=LRR_1; Domain location=215-237; Score =11.6; E_value=1.9; Accession=PF00560.23; Description=Leucine Rich Repeat
  Pfam annotation: Domain name=LRR_1; Domain location=239-261; Score =11.0; E_value=2.5; Accession=PF00560.23; Description=Leucine Rich Repeat
  Pfam annotation: Domain name=LRR_1; Domain location=263-285; Score =11.5; E_value=2; Accession=PF00560.23; Description=Leucine Rich Repeat
  Pfam annotation: Domain name=LRR_1; Domain location=287-309; Score =7.8; E_value=10; Accession=PF00560.23; Description=Leucine Rich Repeat
  Pfam annotation: Domain name=LRR_1; Domain location=311-333; Score =16.8; E_value=0.08; Accession=PF00560.23; Description=Leucine Rich Repeat
  Pfam annotation: Domain name=LRR_1; Domain location=335-357; Score =11.0; E_value=2.5; Accession=PF00560.23; Description=Leucine Rich Repeat
  Pfam annotation: Domain name=LRR_1; Domain location=359-381; Score =15.3; E_value=0.22; Accession=PF00560.23; Description=Leucine Rich Repeat
  Pfam annotation: Domain name=LRR_1; Domain location=383-405; Score =6.8; E_value=15; Accession=PF00560.23; Description=Leucine Rich Repeat
  Pfam annotation: Domain name=LRR_1; Domain location=407-429; Score =12.8; E_value=1.2; Accession=PF00560.23; Description=Leucine Rich Repeat
  Pfam annotation: Domain name=LRR_1; Domain location=431-453; Score =8.6; E_value=6.9; Accession=PF00560.23; Description=Leucine Rich Repeat
  Pfam annotation: Domain name=LRR_1; Domain location=455-477; Score =14.0; E_value=0.55; Accession=PF00560.23; Description=Leucine Rich Repeat
  Pfam annotation: Domain name=LRR_1; Domain location=479-501; Score =8.0; E_value=9; Accession=PF00560.23; Description=Leucine Rich Repeat
  Pfam annotation: Domain name=LRR_1; Domain location=503-525; Score =2.2; E_value=1.1e+02; Accession=PF00560.23; Description=Leucine Rich Repeat
  Pfam annotation: Domain name=LRR_1; Domain location=527-549; Score =15.3; E_value=0.22; Accession=PF00560.23; Description=Leucine Rich Repeat
  Pfam annotation: Domain name=LRR_1; Domain location=551-573; Score =11.9; E_value=1.7; Accession=PF00560.23; Description=Leucine Rich Repeat
  Pfam annotation: Domain name=LRR_1; Domain location=575-597; Score =14.4; E_value=0.43; Accession=PF00560.23; Description=Leucine Rich Repeat
  Pfam annotation: Domain name=LRR_1; Domain location=599-622; Score =9.6; E_value=4.5; Accession=PF00560.23; Description=Leucine Rich Repeat
  Pfam annotation: Domain name=LRR_1; Domain location=95-117; Score =5.5; E_value=27; Accession=PF00560.23; Description=Leucine Rich Repeat
  Pfam annotation: Domain name=Pkinase; Domain location=734-1021; Score= 130.0; E_value=6.7e-36; Accession=PF00069.15; Description=Protein kinase domain
  Pfam annotation: Domain name=Pkinase_Tyr; Domain location=734-1021; Score=76.1; E_value=1.1e-19; Accession=PF07714.7; Description =Protein tyrosine kinase
  Pfam module annotation: Pfam domain module=LRRNT_2::LRR_1::LRR_1::LRR_ 1::LRR_1::LRR_1::LRR_1::LRR_1::LRR_1::LRR_1::LRR_1::LRR_1::LRR_1: LRR_
  Pfam module annotation: Pfam domain module=Pkinase_Tyr; Domain location=50-91::119-138::143-165::167-189::191-213::215-237::239 -261::263-285::287-309::311-333::335-357::359-381::383-405::407 -429::431-453::455-477::...
  Pfam module annotation: Domain location=479-501::503-525::527 -549::551-573::575-597::599-622::95-117::734-1021::734-1021
EVAEGVKEKGTAEEPSMTSATPRLGSTPHLFFPFSFSLAFLCCIAVCNAAGDEAAALLAVKASLVDPLGKLGGWNSASASSRCSWDGVRCNARGVVTGLNLAGMNLSGTIPDDILGLTGLTSIILQSNAFEHELPLVLVSIPTLQELDVSDNNFAGHFPAGLGALASLAHLNASGNNFAGPLPADIGNATALETLDFRGGYFSGTIPKSYGKLKKLRFLGLSGNNLGGAIPAELFEMSALEQLIIGSNEFTGTIPAAIGNLANLQYLDLAIGKLEGPIPPEFGRLSYLNTVYLYKNNIGGPIPKEIGNLTSLVMLDISDNTLTGTIPVELGQLANLQLLNLMCNRLKGGIPAAIGDLPKLEVLELWNNSLTGPLPPSLGSTQPLQWLDVSTNALSGPVPAGLCDSGNLTKLILFNNVFTGPIPAGLTTCASLVRVRAHNNRLNGTVPAGLGGLPRLQRLELAGNELSGEIPDDLALSTSLSFIDFSHNQLRSALPSNILSIRTLQTFAAADNELTGGVPDEIGECPSLSALDLSSNRLSGAIPASLASCERLVSLNLRSNRFTGQIPGAIAMMSTLSVLDLSSNFFSGVIPSNFGGSPALEMLNLAYNNLTGPVPTTGLLRTINPDDLAGNPGLCGGVLPPCGAASSLRASSSETSGLRRSHMKHIAAGWAIGISVLIASCGIVFLGKQVYQRWYANGVCCDEAVEEGGSGAWPWRLTTFQRLSFTSAEVLACIKEDNIVGMGGTGVVYRADMPRHHAVVAVKKLWRAAGCLEEVATVDERQDVEAGGEFAAEVKLLGRLRHRNVVRMLGYVSNNLDTMVLYEYMVNGSLWEALHGRGKGKMLLDWVSRYNVAAGVAAGLAYLHHDCRPPVIHRDVKSSNVLLDTNMDAKIADFGLARVMARAHETVSVFAGSYGYIAPEYGSTLKVDLKGDIYSFGVVLMELLTGRRPVEPDYSEGQDIVGWIRERLRSNSGVDELLDASVGGRVDHVREEMLLVLRIAVLCTAKSPKDRPTMRDVVTMLGEAKPRRKSSSATVPATIVDKDKPVFTTSPDSSYL

SEQ ID NO: 43060 - protein, 218 aa, Zea mays
  Coding DNA Sequence Number=SeqID_1281
  Gene Ontology: Mol. function=acetylglucosaminyltransferase activity; Cellular component=membrane
  Homolog annotation: Hit_ID=Q337V3; Match level="QueryCoverage=64%, HitCoverage=31%, E-value=8e-17, Identity=37%"; Hit description =Secondary cell wall-related glycosyltransferase family 14, putative, expressed
  Pfam annotation: Domain name=Branch; Domain location=72-218; Score =7.8; E_value=1.7e-08; Accession=PF02485.11; Description=Core-2I -Branching enzyme
  Subcellular localization annotation: CTP_CleavageSite=62; ConfidenceScore=5.75e-01
MQSAAAAAPSSLPLSVFPKDSRPLPCLLLTSLLLLLTLHFLSSSPTPSPPPPQPRLAPLPSTASAGPAPSALAFLLTGSAGDADRLQRLLLATYHPRNVYLLLLDRAASAADRARLARSARAAPGRDNVHVVGDPGFANPRGASALAATLHGAALLLRVDQGWDWFVHLDADEYPLVTPDGGKITSSIKAYSYLLHVFSYLPKDLNFIQHTSYIGWKE

SEQ ID NO: 43061 - protein, 85 aa, Zea mays
  Coding DNA Sequence Number=SeqID_1282
MAYAANSLLTQEDNDDDKKSVLAANDVHDAMLLHERDNRCPEPTCLGCCSSEHSKSSPCRPRPSRQQLHPMYLIFTRHDIAYAVQ

SEQ ID NO: 43062 - protein, 179 aa, Zea mays
  Coding DNA Sequence Number=SeqID_1283
  Subcellular localization annotation: CTP_CleavageSite=93; ConfidenceScore=5.60e-01
MAGPKRARARPAANQRHRPQRDASTTAPRAVPNRAAMARRPMASSTARGLWSDASACARPAGRAGGTERNPAARGRANRGSACAPVPVPLSCRAATEVVRALLGMEANKEIGRAEAVESGAAASATHGDGALPLELDRTHRNPRFHVKMLEENTQTLALPRRICPTDPSLALPQTAGAP

SEQ ID NO: 43063 - protein, 277 aa, Zea mays
  Coding DNA Sequence Number=SeqID_1284
  Gene Ontology: Mol. function=serine O-acetyltransferase activity; Cellular component=cytoplasm; Biological process=cysteine biosynthetic process from serine
  Homolog annotation: Hit_ID=Q10S58; Match level="QueryCoverage=88%, HitCoverage=70%, E-value=1e-99, Identity=76%"; Hit description =Serine O-acetyltransferase family protein, expressed
  Pfam annotation: Domain name=SATase_N; Domain location=76-180; Score =212.6; E_value=8.7e-61; Accession=PF06426.4; Description=Serine acetyltransferase, N-terminal
MTSCGCLMLEKVEGDASAKTRVKAAPGAGAGAWCGSCAGDWRGRSEAIFPIYVMGSSRESTVAAARGIVDSPEDPIWVAVKAEAKSEAEKEPILSSFLYASVLSHDCLERALSFVLANRLEDPTLLATQLIDIFNDVMLNNKDICRSIRLDAQAFKDRDPACAQYSWALLYLKGYQSLQSYRIANILWNQGRKVLALALQSRISEVFAVDIHPAAKIGEGILLDHGTGLVIGETAVVGNWVSLMQGANPVLEAPTWVGFGEGINRDKLFPANAERLL

SEQ ID NO: 43064 - protein, 39 aa, Zea mays
  Coding DNA Sequence Number=SeqID_1285
MDASSICSSAMLRVRRWQRVRDALEDLVGGVEDLTVPHI

SEQ ID NO: 43065 - protein, 88 aa, Zea mays
  Coding DNA Sequence Number=SeqID_1286
  Gene Ontology: Mol. function=nucleotide binding; Cellular component =intracellular; Biological process=small GTPase mediated signal transduction
  Homolog annotation: Hit_ID=Q6ZHA3; Match level="QueryCoverage=74%, HitCoverage=33%, E-value=3e-31, Identity=100%"; Hit description=Rac -like GTP-binding protein 6
  Pfam annotation: Domain name=Ras; Domain location=18-88; Score=-36.0; E_value=1.4e-06; Accession=PF00071.12; Description=Ras family
MRLRIGAHLFVTLFPVRVRDYVPTVFDNFSANVVVDGNTVNLGLWDTAGQEDYNRLRPLSYRGADVFLLAFSLISKASYENVSKKARH

SEQ ID NO: 43066 - protein, 507 aa, Zea mays
  Coding DNA Sequence Number=SeqID_1287
  Gene Ontology: Mol. function=glutamate-tRNA ligase activity; Cellular component=aminoacyl-tRNA synthetase multienzyme complex; Biological process=tRNA aminoacylation for protein translation
  Homolog annotation: Hit_ID=Q6YUS0; Match level="QueryCoverage=99%, HitCoverage=99%, E-value=0.0, Identity=74%"; Hit description =Putative glutamate-tRNA ligase
  Pfam annotation: Domain name=tRNA-synt_1c; Domain location=48-309; Score=329.1; E_value=7.9e-96; Accession=PF00749.11; Description=tRNA synthetases class I (E and Q), catalytic domain
  Subcellular localization annotation: CTP_CleavageSite=38; ConfidenceScore=5.57e-01
MAASALLTGSPWLRMRLLPDAPARPFRHLHLRRSFSVRASGADGSPAPVRVRFAPSPTGNLHVGGARTALFNYLFARSKGGRFVLRVEDTDLERSTRKSEEAVLADLAWLGLDWDEGPDVGGDFGPYRQSERNSLYKQYAEKLLDSGAVYRCFCSSEELEQMKEVAKQRQLPPVYMGKWASASDAEVQQELEKGTPYTYRFRVPKEGSLKISDLIRGEALGFAMPSFAHVSLILAPDRSKLSKRHGATSVGQYKNMGYLPQAMVNYLALLGWGDGTENEFFTIDDLVQKFTINRVNKSGAVFDATKLKWMNGQHLRSFPHDELIKAFEDRWTDTGILQESESGFAKEAAELLKDGIDLITDADAALTNLLSYPLHTTLSSEEAKPVVQDKISEVAWSLISAYDSGELGQALAEGRDGWQKWVKGFGKSIKRKGKGLFMPLRVLLTGKLHGPDMGGSIALIHKAGVCCAVTPQSNFVTLDERFRMLKDVDWESLAKEQETPAVPAAAS

SEQ ID NO: 43067 - protein, 752 aa, Zea mays
  Coding DNA Sequence Number=SeqID_1288
  Gene Ontology: Mol. function=DNA binding; Cellular component =intracellular; Biological process=DNA integration
  Homolog annotation: Hit_ID=O24587; Match level="QueryCoverage=94%, HitCoverage=73%, E-value=0.0, Identity=94%"; Hit description=Pol
  Pfam annotation: Domain name=RVT_2; Domain location=332-587; Score =537.3; E_value=1.6e-158; Accession=PF07727.4; Description=Reverse transcriptase (RNA-dependent
  Pfam annotation: Domain name=rve; Domain location=2-119; Score=80.1; E_value=6.8e-21; Accession=PF00665.16; Description=Integrase core domain
  Pfam module annotation: Pfam domain module=RVT_2::rve; Domain location=332-587::2-119
DKSETQGTLKRFLRRAQNEFELEVKKIRSDNGSEFKNLQVEEFLEEEGIKHEFSAPYTPQQNGVVERKNRTLIDMARTMLGEFKTPECFWSEAVNTACHAINRVYLHRLLRKTSYELLTGNKPNVSYFRVFESKCYILVKKGRNSKFAPKAVEGFLLGYDSNTKAYRVFNKSSGLVEVSSDVVFDETNGSPREQVVDSDDVDEEDVPTAAIRTMAIGEVRPQEQDERDQPSSSTTVHPPTQDDEQVHQKETCDQGGAQDDHVMEEEAQPAPPTQVRAMIQRDHPVDQILGDISKGVTTRSRLVNFCEHYSFVSSIEPFRVEEALLDPDWVLAMQEELNNFKRNEVWTLVPRPKQNVVGTKWVFRNKQDEHGVVTRNKARLVAKGYAQVAGLDFEETFAPVARLESIRILLAYAAHHSFRLYQMDVKSAFLNGSIKEEVYVEQPPGFEDERCPDHVCKLSKALYGLKQAPRAWYECLRDFLIANAFKVGKADPTLFTKTCDGDLFVCQIYVDDIIFGSTNQKSCEEFSRVMTQKFEMSMMGELNYFLGFQVKQLKDGTFISQTKYTQDLLKRFGMKDAKPAKTPMGTDGHTDLNKGDSDYAGCKVDRKSTSGTCQFLGRSLVSWNSKKQTSVALSTAEAEYVAAGQCCAQLLWMRQTLRDFGYNLSKVPLLCDNESAIRMAENPVEHSRTKHIDIRHHFLRDHQQKGDIEVFHSRRRIEREKVDLDHERLPLHSDERALTGIDVGVGDEGGGL

SEQ ID NO: 43068 - protein, 619 aa, Zea mays
  Coding DNA Sequence Number=SeqID_1289
  Gene Ontology: Mol. function=calcium ion binding; Cellular component =cell cortex; Biological process=epidermal growth factor receptor signaling pathway
  Homolog annotation: Hit_ID=Q10S92; Match level="QueryCoverage=96%, HitCoverage=57%, E-value=0.0, Identity=66%"; Hit description=EF hand family protein, expressed
  Pfam annotation: Domain name=efhand; Domain location=41-69; Score =17.0; E_value=0.069; Accession=PF00036.22; Description=EF hand
  Pfam annotation: Domain name=efhand; Domain location=421-449; Score =15.3; E_value=0.23; Accession=PF00036.22; Description=EF hand
  Pfam annotation: Domain name=efhand; Domain location=455-483; Score =23.0; E_value=0.001; Accession=PF00036.22; Description=EF hand
  Pfam annotation: Domain name=efhand; Domain location=7-35; Score =17.5; E_value=0.049; Accession=PF00036.22; Description=EF hand
  Pfam module annotation: Pfam domain module=efhand::efhand::efhand::efh and; Domain location=41-69::421-449::455-483::7-35
MAAGTEAFEAYFRRADLDQDGRISGQEAVAFFQGANLPQPVLAQVWMHADQNKTGFLGRPEFFNALRLVTVAQSGRQLTPDIVQSALYGPAAARIPAPKIAAGAARSQMGAAGAPRPQGSAAMTPGQVGAAQMNPAGTPRPQGSGMMPTSTQVSMLQVNPGAAPRPQGISSMMPAASQGGALQATQFAAPRAMQPQPPNLGITQQQPSSTGFMRPPQVGTPAASFQAQAPGINQGLVHGGSMEGSISWQGGNAASVGGIPRAIPGAAPSQTTRGFGPGLPSTMGMVPGQQVQAMSSSPLPPQSNSAVLPQNSKALVLSGNGPASSSGSSTDIFSALTQPKPSLSAPQTSSIPSSSSFMATPTGSQNLTNLTQFGSLQGSSQPQQTQPIVKSIPAPATPVVSAGISNSASQWPKITQPDIQKYMKVFGDVDRDRDGKITGAEARTLFLSWRLPREVLKQVWDLSDQDNDGMLSLREFCIALYLMERHRAGIPLPPALPDSLRHDETLLRATGLPSTAYNSPSWQHNQGGLPQRGPGAPGVPAGGVRPPLPSHLHSQTDGASRQGQPRSHMPGMDNHVVIQGNKDDKSALNQAAQEVVDAPKKVGSGFEVWIIMCVISGLV

SEQ ID NO: 43069 - protein, 36 aa, Zea mays
  Coding DNA Sequence Number=SeqID_1290
MNDAHESGVPSGIVPILQSFSLCHMLLRRSHTGSTP

SEQ ID NO: 43070 - protein, 174 aa, Zea mays
  Coding DNA Sequence Number=SeqID_1291
  Gene Ontology: Mol. function=RNA polymerase II transcription factor activity; Cellular component=transcription factor TFIID complex; Biological process=transcription initiation from RNA polymerase II promoter
  Homolog annotation: Hit_ID=P26356; Match level="QueryCoverage=98%, HitCoverage=73%, E-value=2e-45, Identity=55%"; Hit description=TATA -box-binding protein 1
  Pfam annotation: Domain name=TBP; Domain location=85-171; Score =137.5; E_value=3.7e-38; Accession=PF00352.12; Description =Transcription factor TFIID (or TATA-binding protein, TBP)
NIVSTVNLECKVDLQHVANSARNAEYNPRSQRDPDTYLTAFCCGYHEDKGAQDNDTDICFREDVRIYPPLQFARIVQKLGSPARFKDFKVQNIVGSCDLKFPIRLEGLALASGLSATYEPEIFPGLVYRMVDPKVVILVFVSGKIVLTGAKVREEICAAFEKIHPMLVQFRKRS

SEQ ID NO: 43071 - protein, 134 aa, Zea mays
  Coding DNA Sequence Number=SeqID_1292
  Homolog annotation: Hit_ID=Q2QM94; Match level="QueryCoverage=45%, HitCoverage=30%, E-value=2e-13, Identity=72%"; Hit description=CCAAT- box transcription factor complex WHAP5, putative, expressed
  Pfam annotation: Domain name=CBFB_NFYA; Domain location=20-64; Score =10.1; E_value=0.098; Accession=PF02045.6; Description=CCAAT-binding transcription factor (CBF-BNF-YA) subunit B
MGTRYPDGYGFGQNLKPVMGTGFLMGIDIFHGTDSVHIYDVHPYLHEPHHQHALKRARGAGDRFLNSKSDDKEVTKRNRTELRPTRVANYQPHRLPTVYRQLIRQTVVNGDSKLTTEEILAPELDVATVMYRKN

SEQ ID NO: 43072 - protein, 58 aa, Zea mays
  Coding DNA Sequence Number=SeqID_1293
MATDIFCPWVKALPIVLWMFLVFSMSINNSQVKTLSLFEHLDSQILRNGFGGFTFLKV

SEQ ID NO: 43073 - protein, 156 aa, Zea mays
  Coding DNA Sequence Number=SeqID_1294
MTNRTERNRMPTFLVRDRRFFSLLDRGADQFTISAQHFLEHQSSVRDFHAEVVEEHEHQELGVAIGDKHHEVHLANVILSRRPPVVTRLLPLDHAACVVLPMARTRSLVMVTTSSVPWAGAGTGKAARPSSSASSNDFDDDNEQARERMEGVGVRD

SEQ ID NO: 43074 - protein, 287 aa, Zea mays
  Coding DNA Sequence Number=SeqID_1295
  Gene Ontology: Mol. function=nucleoside-triphosphatase activity; Cellular component=membrane; Biological process=proteolysis
  Homolog annotation: Hit_ID=UPI0000660386; Match level="QueryCoverage =72%, HitCoverage=97%, E-value=5e-17, Identity=33%"; Hit description =Homolog of Homo sapiens "Probable UPF0334 kinase-like protein
  Pfam annotation: Domain name=DUF265; Domain location=66-218; Score =163.9; E_value=4e-46; Accession=PF03266.5; Description=Protein of unknown function, DUF265
  Subcellular localization annotation: CTP_CleavageSite=40; ConfidenceScore=5.22e-01
MAAVPSGFLLITGPPGVGKTTLVMRVFETLRGSHPNLNIRGFYTRTALPRLLELRRGERGRRKDRVRGCHARRYDKPLLLALALSTVTVIIFPNPFHQASIPESVRWPTVGKYKVDVASLESLAVPELQVKEETDLFIIDEVGKMELFSSAFFPAVMRVIESNIPVLATIPIPRQGRDIPGVARLRNHPGAAVFTLDTGNRDTMRDTICSQLRSLLQRLFNGEDIMQCYGSQSAESSGSPLSSQFPLSLSPSGKAPLNANAASFVSMKAESARANLTGDTLATPFFV

SEQ ID NO: 43075 - protein, 110 aa, Zea mays
  Coding DNA Sequence Number=SeqID_1296
MQPRQQDRPDSRTRAQRERREKRREEKRRETDLRVALLGVGGESGKKMQADEQLCVEEETELWSASWFMDEAAQGVRPARLGRSNPHRTPDVGTLQDMDRTCNISAYAQP

SEQ ID NO: 43076 - protein, 171 aa, Zea mays
  Coding DNA Sequence Number=SeqID_1297
  Subcellular localization annotation: CTP_CleavageSite=38; ConfidenceScore=5.42e-01
MGARQACNTCVQASSKKSTQQPAHCTRTSVSIPAGTIRASGFGPNEYELKYCEFRASGSDFMPRFRWYAKLYRLRLSRCSEYVSPRCRSSWIHRLLVVELSAPEDGCSSRLESATNTNSAPEYLGSESSQLSESVRSPSSNNCYGGYRATMQIGSNRSETPDAEVIVGVKC

SEQ ID NO: 43077 - protein, 150 aa, Zea mays
  Coding DNA Sequence Number=SeqID_1298
MAVDPSDRVGALRPSAPPRPAGVLGVSREASAHVHALSSGPLTSSAMALDAHQALLHIRLCRALTAGMWSPWAPAPPSLPACSGAPHCRALSLTQLVCDGSSLSVALPWLPVATLGEAKPDDILAIDPRCSSAVVMEVTRTGGNFLPIYQ

SEQ ID NO: 43078 - protein, 303 aa, Zea mays
  Coding DNA Sequence Number=SeqID_1299
  Gene Ontology: Mol. function=binding; Cellular component=trans-Golgi network; Biological process=protein transport
  Homolog annotation: Hit_ID=Q8RZX0; Match level="QueryCoverage=87%, HitCoverage=24%, E-value=1e-110, Identity=79%"; Hit description =Putative adapter-related protein complex 4 epsilon 1 subunit
MLVAAAETTSKFLKSDSHNLKYMGIDALGRLIKINPDIAEEHQLAVIDCLEDPDDTLKRKTFELLYKMTKSTNVEVIVDRMIEYMINITDHHYKTEIASRCVELAEQFAPSNQWFIQTMNRVFEHAGDLVNIRVAHNLMRLIAEGFGDEDERADSQLRSSGSTIEPILSISSLLDLPVPITFFTAKENTSFVLKQVDSYVRIVGEPKLPSSFLQIICWVLGEYGTADGKHSASYIIGKLCDVAEAHLTDDTVKGRRAGVVRKGASFRRSVKNYSRTVDFGIINAKLKLYVQFNIYLIPEKLQF

SEQ ID NO: 43079 - protein, 109 aa, Zea mays
  Coding DNA Sequence Number=SeqID_1300
MGDNRESARHRGEQGVNWVELSQGASANEKPYADHGKRAVELEEQGRGAAALGACRRDAGRREAREGARALRRWAHGATTEKKMARARARKKQIRTSGKKSGEKKSGVG

SEQ ID NO: 43080 - protein, 83 aa, Zea mays
  Coding DNA Sequence Number=SeqID_1301
  Subcellular localization annotation: CTP_CleavageSite=45; ConfidenceScore=5.57e-01
MPTPARPHRRLALTTCAVTTVVPVRRTRPPPPCPHPPTAGVPARRARLRPPPPPQPPDTFPTRRRLTPYLRFWKPPRIGERFS

SEQ ID NO: 43081 - protein, 201 aa, Zea mays
  Coding DNA Sequence Number=SeqID_1302
MEKLPGAAASSDDVDLVVVASTHHAAALVDLIFGAPPHGVPARPPPPSPRRPNRPPPRGSVPRLRRHEDARAPPHSVPVRPPPPAPRRPNRPPPRVPSVPRLRRHELLLSVSPHLRSTPLPRRALATALFAVADALCVGAAAAMLLEDAGWAAIAGLGFRGAVLGAIFVTRYFGRRRWLLQFSVVREDLEGFYRWFVRSRI

SEQ ID NO: 43082 - protein, 172 aa, Zea mays
  Coding DNA Sequence Number=SeqID_1303
MATNNEEVHPGDRDLFWSHIDEATGATSLHGYNFPRMTRTYTHQNGVAAVVSTSPDPSSTTTTISEQEQGLGEEEEAEIDFVAHVKDNYGQALTTDDEVVAIASDEDGYGGSMSGGGRSRTMTLALGCCRHRVRAAGWERCGEQYLWRTVGAEEKHEQEYLPASERASSRVG

SEQ ID NO: 43083 - protein, 350 aa, Zea mays
  Coding DNA Sequence Number=SeqID_1304
  Gene Ontology: Mol. function=protein binding; Cellular component=SCAR complex; Biological process=cortical actin cytoskeleton organization and biogenesis
  Homolog annotation: Hit_ID=Q10RW4; Match level="QueryCoverage=93%, HitCoverage=27%, E-value=1e-170, Identity=90%"; Hit description =PIROGI, putative, expressed
MGTIRADHDDFSIRFASAMDQMIRLKSSDGVYNDWSRDIKGNMYDIVVEGFQLLSRWTGRIWEQCAWKFSRPISDSQQNSMTCFDYEKVVRYNYTAEERRALLELIGYIKSIGLMMQHCDTLVSEALWETIHMEVQDFVQDKLDTMLRTTFRKKKDLSRILSDMRTLSADWMASTSKADPEQHSLHQETEEMRQNTFYPRPVAPTAAQIHCLQFLICELVSGGNLRKVGGLFGNSGSGIPVEDLKQLETFFYKLSFFLHILDYTATIGTLTDLGFLWFREFYLESSRVIQFPIECSLPWMLVGHVIESEDAGLLESILIPFDLYNDSAQHALTSLKQRFLYDEIEAELSC

SEQ ID NO: 43084 - protein, 88 aa, Zea mays
  Coding DNA Sequence Number=SeqID_1305
  Homolog annotation: Hit_ID=Q10RW4; Match level="QueryCoverage=98%, HitCoverage=6%, E-value=6e-26, Identity=76%"; Hit description=PIROGI, putative, expressed
MAIPVEEAIAALSTFSLELYSKFQDEQPDVQGLAVLLSSERYATNSPIEYSDVAAYRLSLGEDTKAINQLCFQVGKSSRQGTDLVTSR

SEQ ID NO: 43085 - protein, 47 aa, Zea mays
  Coding DNA Sequence Number=SeqID_1306
  Homolog annotation: Hit_ID=Q7XCE9; Match level="QueryCoverage=77%, HitCoverage=7%, E-value=7e-09, Identity=78%"; Hit description=Pollen- specific kinase partner protein, putative, expressed
MQRRASPWDVGQAILESYSRVLESLAYNIVTCVDDVLFADEAARKIA

SEQ ID NO: 43086 - protein, 136 aa, Zea mays
  Coding DNA Sequence Number=SeqID_1307
MTAMSAVQRSRRIATGALPELLAFRGPAGAVDGRAAAATGKRKEAPQWRMWGQPRRPCLTQSDAEHAGRQNHGDITDAKGGRGTGRTADHDRRSCVRRGLPPQRGNQCRLLPRLVPSLPGIHGMDDDGTGGCVAFF

SEQ ID NO: 43087 - protein, 77 aa, Zea mays
  Coding DNA Sequence Number=SeqID_1308
MASCWGRFGAAALWRRLRRRVSLVRRRRRRGRSLLGGLNYDPLSYAQNFDDGCLEEREPDFSASRSAPLEESRVAGS

SEQ ID NO: 43088 - protein, 130 aa, Zea mays
  Coding DNA Sequence Number=SeqID_1309
  Gene Ontology: Mol. function=hydrolase activity, acting on acid anhydrides, catalyzing transmembrane movement of substances; Cellular component=integral to membrane; Biological process=copper ion transport
  Homolog annotation: Hit_ID=Q6JAH7; Match level="QueryCoverage=95%, HitCoverage=12%, E-value=4e-48, Identity=79%"; Hit description =Putative ATP dependent copper transporter
  Pfam annotation: Domain name=HMA; Domain location=67-128; Score=35.4; E_value=2e-07; Accession=PF00403.16; Description=Heavy-metal -associated domain
  Subcellular localization annotation: CTP_CleavageSite=12; ConfidenceScore=5.09e-01
MVATTRRALFLSCFHGGSEMSPRLSLRPRYPSMPRRPKGVAAAGGGGNGDLEAAVGTGDDEEEKVAVFSVSGMTCAACAGSVEKAVKRLPGIHDAAVDVLWGRAQVVFYPAFVSTLDQLLDAPEDDPKDT

SEQ ID NO: 43089 - protein, 149 aa, Zea mays
  Coding DNA Sequence Number=SeqID_1310
MEPARGGRVVFLLGRFLKMRMQLFIWQSANNTAPWPSIPSPGVYPPLRVSASSTPPVGGHGRLCRAAAPPCVQRCAQALHLSRPPTCVPASVPLACLATSRRQSGELIRCPGHQRTAHSHAFLGIARAAPSPACSSHPSAPAAGCSSEA

SEQ ID NO: 43090 - protein, 464 aa, Zea mays
  Coding DNA Sequence Number=SeqID_1311
  Gene Ontology: Mol. function=identical protein binding; Cellular component=cytoplasm; Biological process=negative regulation of enzyme activity
  Homolog annotation: Hit_ID=Q8RVC2; Match level="QueryCoverage=99%, HitCoverage=60%, E-value=1e-121, Identity=52%"; Hit description =Putative serine protease
  Pfam annotation: Domain name=PA; Domain location=71-170; Score=102.7; E_value=1.1e-27; Accession=PF02225.12; Description=PA domain
  Pfam annotation: Domain name=Peptidase_S8; Domain location=26-292; Score=-76.6; E_value=0.011; Accession=PF00082.12; Description =Subtilase family
  Pfam module annotation: Pfam domain module=PA::Peptidase_S8; Domain location=71-170::26-292
DSIAIGTFGAVEKGVFVSWRPATPAPEDSTLSNDAPWMLTVAAGTMDRLISAQVRLGNGSTFDGESVFQPNISTTVTYPLVYAGASSTPDANFCGNGSLDGFDVKDKIVLCDRGNRVDRLDKGAEVKRAGGFGMILANQIADGYSTIADAHVLPASHVSYVTGVAIKEYINSTANPVAQIIFKGTVLGTSPAPAITSFSSRGPSIQNPGILKPDITGPGVSVLAAWPFQVGPPSPGPTFNFESGTSMSTPHLSGIAALIKSKYPDWSPAAIKSAIMTTADPDDRSGKPIMNEQYVPANLFATGAGQVNPDKALDPGLVYDIAPAEYIGFLCSLYTSQEVSVIARRSIDCSTITVIPDRILNYPSITVTLPSTTNPTAPVVVSRTVKNVGEAPAVYYPHVDLPGSVQVKVTPSSLQFAEANQAQNFTVSVWRGQSTDVKIVEGSLRWVSENDKYTVRSPVSISFV

SEQ ID NO: 43091 - protein, 228 aa, Zea mays
  Coding DNA Sequence Number=SeqID_1312
  Gene Ontology: Mol. function=identical protein binding; Cellular component=cytoplasm; Biological process=negative regulation of enzyme activity
  Homolog annotation: Hit_ID=Q8H047; Match level="QueryCoverage=93%, HitCoverage=30%, E-value=2e-52, Identity=47%"; Hit description =Putative serine protease
  Pfam annotation: Domain name=Subtilisin_N; Domain location=26-101; Score=56.2; E_value=1.1e-13; Accession=PF05922.7; Description =Subtilisin N-terminal Region
MESFKLSLLPILFLAVAAAVSGDELRTFIVHVQPHKSHVFGTTDDRTAWYKTFLPEDERLVHSYHHVASGFAARLTEQELDALSAMPGFVTAVPNQVYKLLTTHTPKFLGLELPQSGRNYTSGFGEGVIIGVLDSGVYPFHPSFSGDGMPPPPAKWKGRCDFNASACNNKLIGARSFESDPSPLDKDGHGTHTSSTAAGAVVPGAQVLGQGAGTASGMAPRAHVAMYK

SEQ ID NO: 43092 - protein, 75 aa, Zea mays
  Coding DNA Sequence Number=SeqID_1313
MAWSKLKCFFMASLPLRLWVKDKSRNDDCAFTPCHNPKSLKITPNWLPARVVDLLDCNPLAYLNPNAPEMEKIKG

SEQ ID NO: 43093 - protein, 485 aa, Zea mays
  Coding DNA Sequence Number=SeqID_1314
  Gene Ontology: Mol. function=identical protein binding; Cellular component=proton-transporting two-sector ATPase complex; Biological process=negative regulation of enzyme activity
  Homolog annotation: Hit_ID=Q8RVC2; Match level="QueryCoverage=98%, HitCoverage=61%, E-value=1e-123, Identity=53%"; Hit description =Putative serine protease
  Pfam annotation: Domain name=PA; Domain location=83-186; Score=85.5; E_value=1.7e-22; Accession=PF02225.12; Description=PA domain
  Pfam annotation: Domain name=Peptidase_S8; Domain location=38-328; Score=-68.8; E_value=0.0043; Accession=PF00082.12; Description =Subtilase family
  Pfam module annotation: Pfam domain module=PA::Peptidase_S8; Domain location=83-186::38-328
  Subcellular localization annotation: CTP_CleavageSite=53; ConfidenceScore=5.39e-01
MSIGGVSKPFYQDSIAIATFGAIEKGVFVTMSAGNSGPNVSSVTNEAPWMLTVAASTMDRSIRSTVRLGNGFVFHGESLYQPHAWTPTFYPLVYAGASGRPYAELCGNGSLDGLDVRGKIVLCELGGGPGRNITRVLKGAVVQSAGGAGMVLLNRFAQGYSTPADAHVLPASHVDYAAASAIKSYVNSTSNPTAQILFEGTILGGTAPPAPSIVFFSSRGPSLENPGILKPDITGPGVNVLAAWPFQVGPPSSAPLLPGPTFNVISGTSMSAPHLSGVAALIKSKHPRWSPAAIKSAIMTTADATDRAGNPILDEQRVAADWFATGAGHVNPEKAADPGLVYDIAASDYVGYLCSMYNSQNVSVIARRPVDCSAVTLIPESMLNYPSISVAFQQTWNRSAPAVVERTVKNVGEAPSVYYAAVDIFDDDVTVAVYPRELVFTQVNQERSFKVVVWPRQNGAPLVQGALRWVSDTYTVRSPLSISFA

SEQ ID NO: 43094 - protein, 144 aa, Zea mays
  Coding DNA Sequence Number=SeqID_1315
  Gene Ontology: Mol. function=identical protein binding; Cellular component=cellulose and pectin-containing cell wall; Biological process=negative regulation of enzyme activity
  Homolog annotation: Hit_ID=P93204; Match level="QueryCoverage=81%, HitCoverage=15%, E-value=8e-18, Identity=40%"; Hit description=SBT1 protein
  Pfam annotation: Domain name=Subtilisin_N; Domain location=30-106; Score=46.9; E_value=6.9e-11; Accession=PF05922.7; Description =Subtilisin N-terminal Region
MQSFNFSMLTTLVPFLLLAAVAVVARDELTTFIVHVQPLQENRMLATDDDRNAWYRSFLPEDGRLVHGYHHVASGFAARLTRQEVDALSSMPGFVTAAPEQIYELHTTHTPQFLGLDAREARKSYPVAERGAGVIIGVLDTGVV

SEQ ID NO: 43095 - protein, 110 aa, Zea mays
  Coding DNA Sequence Number=SeqID_1316
  Gene Ontology: Mol. function=identical protein binding; Biological process=negative regulation of enzyme activity
  Homolog annotation: Hit_ID=Q8H4X8; Match level="QueryCoverage=90%, HitCoverage=14%, E-value=5e-16, Identity=50%"; Hit description =Putative subtilisin-like serine protease AIR3
  Subcellular localization annotation: CTP_CleavageSite=48; ConfidenceScore=5.04e-01
MDMLVSNLAVVDINWTRDTETLSIATDSFVPRASLFGTAKGDASPPPRSASRWSASPPTSSRFESTIHDGADIISVSFGQDAPLTDDAKSLFHEPVTLDSLHVVRRMLHW

SEQ ID NO: 43096 - protein, 373 aa, Zea mays
  Coding DNA Sequence Number=SeqID_1317
  Homolog annotation: Hit_ID=Q10S07; Match level="QueryCoverage=93%, HitCoverage=92%, E-value=6e-90, Identity=52%"; Hit description=CCT motif family protein, expressed
  Pfam annotation: Domain name=CCT; Domain location=291-318; Score =20.0; E_value=0.0023; Accession=PF06203.4; Description=CCT motif
MPPPPFSHYTRKWIESHFSLLKEEISSPIAAHILNFYDGGLGDDLFEAATTASGPFHATDDDVSSSTTTTPPICGYSDDAPAAAGATAYSPLPSLDATLTALLEQEQHHGLDTGDLPQINGLSEVAYYPTATDEASIGQFNQMGLPDTLAEQMLPMQMNSSASALMPLTSDYDECFTAALAEGFMGLDGAMYHPQTGAILPGCDAEASQQGFFNSASSNGLVMIGEYQKMMEGEGLTTTYDDTDSMKGAFNTNAEMQVGGNDQHLVNGCNGNPELSGLEDSTFKVVRLSPEEKKEKIHRKTLADSRPRVRGRFAKNDELCEAAAQSGSLNYGHYEQTDHMKEEAMLDTSDILAHLSELNSYNYKYKCTIESWM

SEQ ID NO: 43097 - protein, 313 aa, Zea mays
  Coding DNA Sequence Number=SeqID_1318
  Subcellular localization annotation: CTP_CleavageSite=62; ConfidenceScore=5.52e-01
MAAASTSRLAIQIRVPFVPWPFPFPPRLATLAVSTRTRLASYGLCLPTRPAGMPPLAEHELAAAAATSALGVAFGVRLLVALSRSRALKPLAAATSAAAAALRTPRALATASSPVAAILAASKAASKSYKAARTLGPAAARLPSLPSSKRLKAALAAASLLRLAAAAPAGLHAASPAGVAVLAVLKSSYKLSKNTSKVVEGFLGLQLHKGFRNGIDALGVVVKVAVIVSEVAVWVGARFWGYGRARCVMFLGFTRPTGLVLLGCSKSEPQVALFDPVIVGMDAQGCELEERGLSELFSLAVPVPQATTLMTMS

SEQ ID NO: 43098 - protein, 42 aa, Zea mays
  Coding DNA Sequence Number=SeqID_1319
MAMTVNGEDWNPGPECVVTGGADNRAMALRVHGCDQFDAYYS

SEQ ID NO: 43099 - protein, 1046 aa, Zea mays
  Coding DNA Sequence Number=SeqID_1320
  Homolog annotation: Hit_ID=Q7XDI4; Match level="QueryCoverage=97%, HitCoverage=97%, E-value=0.0, Identity=54%"; Hit description =Expressed protein
  Pfam annotation: Domain name=DUF810; Domain location=50-1046; Score =1487.0; E_value=0; Accession=PF05664.2; Description=Protein of unknown function (DUF810)
MGRLQYQHRSRSDSSFARSSETTAADLDARSLGSTAAAETVECPFGHIDGLSRAELREAAYEVFFMSCRAGGGRGGGAGGGGGLNYYPAGGDGGGDGGSPTIGAGPRGGTGINVVSSRLKKALGLKARRSSQPTILRSSMNPSSAPGSPGRMRGVRDQAPGSPGKPRRPMTSAEIMRQQMRVPEQTDARLRKTLMRALIGQVGKKADTIILPLELLRQLKPADFADGGEHHQWQRRQLKLLEAGLIHHPSLPLDRLNAPVLRFREIMQVADARAIDTGKASDTMRAICDAVLALAWRCAPGTGSPGEACHWADGYPLNVLLYVSLLQAIFDLKEETVVLDEVDELLELMRRAWQTLGIDKMIHNVCFAWVLFQQYVATGQIEPDLAGAALTVLGDVAADAKQEHRDPVYTQVLSSVLGSIHDWSEKRLLDYHEWYGKGMAATGAGAMVIPLSLALSTSKIIAESVPGMGIDLADSEHDGIGSFAGNRVDHYVRCSMRNAFAKALENELGQGNSMVIQRDDDPSETMARLAKDTEQLAQFELENFSPVLKRWHPFPGASAVATLHSCYGVLLKQYVAKATCLTNELVHVLHAAGRLEKALVPMMVEDVADSDDGGRSLVREVVPYDVDSLVARFLRTWIEERLRVARECLLRSKDTESWIPKSKGEPYARSAVELMKLAKATVDEFFGIPVTARDDMVQNVADGLGAIVQEYISFLASCGTKQSYLPPLPPLTRCNQDSTIIRLWKRAATPCREAGTNPRGRAHHGQSESISGGNNPRPSTSRGTQRLYIRLNTLHYLLSHIQALDKSLSFFSHGGCASPASVSNRQLAPSGRFDRARAAAQSAIVHVAEVAAYRLVFLDSHHSFYGGLYVGGVADARIRPALRALKQNLSLLVSILVDRAQPVAVREVMKASFQGFLIVLLAGGSDRSFTVEDHAMVEEDFRSLKRAFCTRGEGLVSEQVVEAEARAAEGVVALMALTAEQLVEEFGIAAYECTEAVSERQRLPLPPTTRRWSRSEPNTILRVLCHRDDEVASHFLKRTFQLPKRR

SEQ ID NO: 43100 - protein, 64 aa, Zea mays
  Coding DNA Sequence Number=SeqID_1321
  Subcellular localization annotation: CTP_CleavageSite=15; ConfidenceScore=5.03e-01
MTTGSCPPHRTRRPVAQRASRARENANAALLNLVGAQVFFLPDDRVSFRQPSVPLQPRAPGAAP

SEQ ID NO: 43101 - protein, 149 aa, Zea mays
  Coding DNA Sequence Number=SeqID_1322
MELDLAFDRSRYGVSGGFDLACAVIDTPLTLSAGTSYRDEADLLLLEEAEAEQLSSTAAASRWPWARGRLAASSASPPGSRQQQGAPAPKQAAQQHTAACGRATVGTMAGNGNGEHEHCRERKRGAAEQGCTTWREEARFIDLAVFGPG

SEQ ID NO: 43102 - protein, 346 aa, Zea mays
  Coding DNA Sequence Number=SeqID_1323
  Gene Ontology: Mol. function=protein kinase activity; Cellular component=integral to membrane; Biological process=protein amino acid phosphorylation
  Homolog annotation: Hit_ID=Q8L4U4; Match level="QueryCoverage=91%, HitCoverage=40%, E-value=5e-99, Identity=43%"; Hit description =Putative receptor-like protein kinase
  Pfam annotation: Domain name=LRR_1; Domain location=121-143; Score =2.1; E_value=1.2e+02; Accession=PF00560.23; Description=Leucine Rich Repeat
  Pfam annotation: Domain name=LRR_1; Domain location=145-165; Score =1.2; E_value=1.7e+02; Accession=PF00560.23; Description=Leucine Rich Repeat
  Pfam annotation: Domain name=LRR_1; Domain location=169-190; Score =8.6; E_value=7.1; Accession=PF00560.23; Description=Leucine Rich Repeat
  Pfam annotation: Domain name=LRR_1; Domain location=193-215; Score =9.1; E_value=5.7; Accession=PF00560.23; Description=Leucine Rich Repeat
  Pfam annotation: Domain name=LRR_1; Domain location=217-239; Score =6.5; E_value=17; Accession=PF00560.23; Description=Leucine Rich Repeat
  Pfam annotation: Domain name=LRR_1; Domain location=24-46; Score =14.1; E_value=0.51; Accession=PF00560.23; Description=Leucine Rich Repeat
  Pfam annotation: Domain name=LRR_1; Domain location=241-264; Score =13.4; E_value=0.81; Accession=PF00560.23; Description=Leucine Rich Repeat
  Pfam annotation: Domain name=LRR_1; Domain location=266-288; Score =7.9; E_value=9.6; Accession=PF00560.23; Description=Leucine Rich Repeat
  Pfam annotation: Domain name=LRR_1; Domain location=290-312; Score =13.1; E_value=1; Accession=PF00560.23; Description=Leucine Rich Repeat
  Pfam annotation: Domain name=LRR_1; Domain location=48-71; Score=8.2; E_value=8.2; Accession=PF00560.23; Description=Leucine Rich Repeat
  Pfam annotation: Domain name=LRR_1; Domain location=73-95; Score =13.5; E_value=0.75; Accession=PF00560.23; Description=Leucine Rich Repeat
  Pfam annotation: Domain name=LRR_1; Domain location=97-120; Score =3.9; E_value=53; Accession=PF00560.23; Description=Leucine Rich Repeat
  Pfam module annotation: Pfam domain module=LRR_1::LRR_1::LRR_1::LRR _1::LRR_1::LRR_1::LRR_1::LRR_1::LRR_1::LRR_1::LRR_1::LRR_1; Domain
  Pfam module annotation: Domain location=290-312::48-71::73-95::97-120
ESVSLFGNALAGGVPPGFRALAPTLRKLNLSRNALAGEIPPFLGAFPWLRLLDLSYNHFAGGIPAGLFDPCLRLRYVSLAHNDLTGPVPPGIANCSRLAGFDFSYNRLSGELPDRVCAPPEMNYISVRSNALSGQISNKLTSCGGIDLFDVGSNNFSGAAPFALLGSVNITYFNVSSNAFEGEIPSIATCGTKFSRLDASGNRLTGPVPESVVNCRGLRFLDLGANALGGAVPPVIGTLRSLSFLRLAGNPGISGSIPPELGGIEMLVTLDLAGLALTGEIPGSLSQCRFLLELNLSGNKLQGAIPDTLNNITYLKAYTRKSTDEDMKEEEEQELAIKVRRLGNWN

SEQ ID NO: 43103 - protein, 446 aa, Zea mays
  Coding DNA Sequence Number=SeqID_1324
  Gene Ontology: Mol. function=zinc ion binding
  Homolog annotation: Hit_ID=UPI0000DB7962; Match level="QueryCoverage =14%, HitCoverage=5%, E-value=1e-08, Identity=38%"; Hit description =PREDICTED: similar to remodeling and spacing factor 1
  Pfam annotation: Domain name=PHD; Domain location=212-260; Score =20.0; E_value=0.00057; Accession=PF00628.19; Description=PHD-finger
MTPKWSACSSNSYRELPSHENGECKSTLTESVPSPTSCFGLHTANTMCSLSSQKKDGNVYKRRKMDKDSNSPITFEDAKEMATQSCTISDDHSSLLLPIISSEALLLNSTAGMAGPILDCEEPADVPLEPNSGTDDRCFISNMSPTSMTPDKKNAAECSSSNIGPTESITEHISPRDLCIAILMKDGLINESRTRMAHKEEFTDNDANPLLACNNCGCLEHSLKMLICDSCEAGFHLSCCIPCIKELPTDEWYCAPCLCKKPKSLYGKLSEGRINPSRNTNTRPHGMSHIEYMLKDAEPYVTGVRLGRDFQAEVPEWSGPSSSSDVYFDEPCAIDSAELTTFNLCKMSNQSHSSIGNWIQCRETLNPGDSDKQVVCGKWRRWFGYIQRKPLEAPMRSGILRRDINGKRGHPYMLYSQIIGIVFVVFFGIQSMLIVLFHSQLSNVSW

SEQ ID NO: 43104 - protein, 73 aa, Zea mays
  Coding DNA Sequence Number=SeqID_1325
MGVQEVEGVTCSAYRARTPDTGHPVGRQKQSNKPIRYASSIIIRAGRPGQAVAKDRRNVQSSGGDTPATGHPE

SEQ ID NO: 43105 - protein, 411 aa, Zea mays
  Coding DNA Sequence Number=SeqID_1326
  Gene Ontology: Mol. function=protein dimerization activity; Cellular component=nucleus; Biological process=regulation of transcription, DNA-dependent
  Homolog annotation: Hit_ID=Q8S5V5; Match level="QueryCoverage=89%, HitCoverage=85%, E-value=1e-111, Identity=62%"; Hit description =Putative bZIP transcription factor
  Pfam annotation: Domain name=bZIP_1; Domain location=259-322; Score =17.3; E_value=0.002; Accession=PF00170.11; Description=bZIP transcription factor
  Pfam annotation: Domain name=bZIP_2; Domain location=262-312; Score =12.8; E_value=0.035; Accession=PF07716.5; Description=Basic region leucine zipper
  Pfam module annotation: Pfam domain module=bZIP_1::bZIP_2; Domain location=259-322::262-312
  Subcellular localization annotation: CTP_CleavageSite=36; ConfidenceScore=5.06e-01
MVQQTLGMSLPMAAFVPEQGSANRLTRPPGLPPLPQAFAAQQRGDVCMEAVDPAAGPRKAHRRSRSDVPFGYFPPAGHHQLPPPKVEAGWGGHLPAGGGGGGDDDLFNAYLNLEGLDGLNSSDDRLDDGDSRGSSMRTNGADSSENESEECAADSRAGIRLCAAAADRREGLKRAAAAPVARHARSLSMDSLIGKLNFSAGATGAASGVIPGPNRFSLEFGTGEFSPVEMKKIMADEKLAEMALADPKRVKSFGLIELRCGSSLARVLANRQSAARSKERKMRYIGELEHKVQILQTEATTLSAQLTLLQRDSAGIATQNNELKFRLQAMEQQAQLRDALNEALTAEVQRLKVATAELGDSCSSSNLAQQIQISVQDQMFQLHQQQATPIPFYQLQQAQQNGAGKKHEPTE

SEQ ID NO: 43106 - protein, 722 aa, Zea mays
  Coding DNA Sequence Number=SeqID_1327
  Gene Ontology: Mol. function=protein binding; Cellular component =membrane; Biological process=defense response
  Homolog annotation: Hit_ID=Q6K4U3; Match level="QueryCoverage=90%, HitCoverage=59%, E-value=2e-97, Identity=36%"; Hit description =Putative LZ-NBS-LRR class RGA
  Pfam annotation: Domain name=NB-ARC; Domain location=1-229; Score =23.6; E_value=8.6e-12; Accession=PF00931.13; Description=NB-ARC domain
MTSSSGGGLSPYLTDGHEKRDPNQAQDCSGSSTLNPEILSRYFIVIDDVWDEEIWKLFEYALVDNSCGSRVIVTTRNFRVAKLCATPVAGALFELEPLSNADSKRLFYKRVFGKDGGNHNQLDEIAGRILKKCGGVPLAIITTASLLASKPKSINEWYRVYRSLGSGLEKDNTDIKRMHDILSLSYYELPSYLRPCLLYLSLFPEDCRIDKDSLVRRWVAEGLVVDEQGGGNLYELYDRGEKYFIELVNRSFIQPLDIDGVDGIPNACSVHDLILDLLISLSVEDNFGLRLDSQNFTTSTDSEVNIRRLSLQDNEVEVSVPETVDLSHVRSVIAFGDAFNWAPPLSRFKFLRALDLEGFPRKNNHPKELRRLHHLRYLQLRGYLQKEVLEEIGNLQHLKMLDLSHAYVSQLPVSITRLRNLQSLLVGSDVKMPQGIGSLSKLEEMSWIEVEPNTAAELGKLTEMRVLCVHGLGYDEAGDQAFLQSLSNLRNLLGLFITESEMCSLDDLPDPGQAPVGLRFFRGTETTFQQMPRWFSWLSELSGLTITVNNLTQDDIDMLGALPELRLLQLEVAENGTIAQEQLSIGSDKLFQSLEAFKFKHCARCWLVLSQGVMTRLQKLELYFEVRKRDDGAIDVGLENLTSLKHVTVEVDCYGANIRQVEDVETKLRDALDAHPKNPTLELSRVATHCMERDEHSSGRHQSFGRPADDDDYSDNDSDASK

SEQ ID NO: 43107 - protein, 66 aa, Zea mays
  Coding DNA Sequence Number=SeqID_1328
MEHARKVGMDGKREQARYFVHFCPGRHSGTAQGREAFTDYVGESLTTNPPAVKPVLACTLLCFSWD

SEQ ID NO: 43108 - protein, 82 aa, Zea mays
  Coding DNA Sequence Number=SeqID_1329
  Subcellular localization annotation: CTP_CleavageSite=39; ConfidenceScore=5.01e-01
MPLHQHVSKSQHLSPTPSVLPRLLAPARLLHGRALVDAPAMVLAGRDSHPISVLEVAHVSNINLMSSNQQQEYHRPYDSGQF

SEQ ID NO: 43109 - protein, 124 aa, Zea mays
  Coding DNA Sequence Number=SeqID_1330
MAQREARAADKAVAAGGGETRDASHVALEMGGGVGELRAGQSATATAWACGAAAAGVGLAGAGALVWWALAFRPARQQTWMVPVGLVLLGTPLLAWLSLSASGACRWLSRLRGHQPPVRPAPER

SEQ ID NO: 43110 - protein, 123 aa, Zea mays
  Coding DNA Sequence Number=SeqID_1331
  Subcellular localization annotation: CTP_CleavageSite=58; ConfidenceScore=5.08e-01
MANGGGYVWALAAGFNAALAAISAKFIATLPLKYGTVILFNVTMWGCYVNSLKALSSLQATVTNFAANFLSSGLAGYFLFEEPLPSKSFLPGRRTKHSTISQEGVKKHFLCDDEPHDKKIFSI

SEQ ID NO: 43111 - protein, 212 aa, Zea mays
  Coding DNA Sequence Number=SeqID_1332
MPTRRARWDPVLWLHGDAERFGTDSGKGVPHVVGLPRMLSVFGPDYALWGSPHSAFWDDDDIDRYSMIAGGRGRWKMKLPIDLMEYPFFVGEALKKKYLQKAKIKECAFPASFSDLDHDSDDSSSSSSDEELERQVEDKLNGPCFFTNTMRGLCTMTLGEDVVGNGDQDIDDDSTSEVFPSANDLTVEVDELTTTLASEDKLLRLAAHKKKE

SEQ ID NO: 43112 - protein, 367 aa, Zea mays
  Coding DNA Sequence Number=SeqID_1333
  Gene Ontology: Mol. function=DNA binding; Cellular component=nucleus; Biological process=regulation of transcription
  Homolog annotation: Hit_ID=Q8S5V6; Match level="QueryCoverage=96%, HitCoverage=93%, E-value=1e-103, Identity=60%"; Hit description =Putative NAM-like protein
  Pfam annotation: Domain name=NAM; Domain location=5-141; Score=243.4; E_value=4.7e-70; Accession=PF02365.6; Description=No apical meristem (NAM) protein
MESCVPPGFRFHPTDEELVGYYLRKKLRPACSDPACRSELLAMILNFLLWLALLSISQGHCGIGYEEQNEWYFFSYKDRKYPTGTRTNRATMAGFWKATGRDKAVHDKSRIIGMRKTLVFYKGRAPNGHKTDWIMHEYRLETDENAPPQASSISFTEEGWVVCRAFKKRTAYPARMAWGDPSYAYREISAMGAAAAAFVDPNAASYAQIRRQQSNKSARFKQEAELDGGAAAALLQYSSSHLVELPQLESPSAPANKSQAASASDEVVDAADSGRRPGKKARADEVATDWRALDKFVASQLSPAAECGLEAAAASSTAAASNVGSQLDHVEDDDMAALLFLNSDGRDEAERWTGLLGPAAGDDGDFG

SEQ ID NO: 43113 - protein, 81 aa, Zea mays
  Coding DNA Sequence Number=SeqID_1334
MATDREVKPIDEPYEVAKPSKPAGAQRRQAAAAPAVTESSMHRWWYLIAAAAEGMDQRRYACVKDGCTADEKLLPAAVTRP

SEQ ID NO: 43114 - protein, 74 aa, Zea mays
  Coding DNA Sequence Number=SeqID_1335
MTDLKLIIKRAYISSDDEWFMNVYLLSSLRHQCFTHTTLELAYLDSNVDIVIIHGIVLLDVLDKELITYAIRVR

SEQ ID NO: 43115 - protein, 746 aa, Zea mays
  Coding DNA Sequence Number=SeqID_1336
  Homolog annotation: Hit_ID=Q7XC65; Match level="QueryCoverage=69%, HitCoverage=92%, E-value=1e-152, Identity=53%"; Hit description =Expressed protein
MPPGADASSLAAAVLDAGTPPAAAAATSRVLDYLSRHADDQPRAFFADAFPSLLYRLFVSAPSSPSFIDLAAADPALGDLILSLIYPTGPLLAAAAAADRLTLIRYVFPSERLPDWLRLALASPPSTDLASPLLSRRVASELHLSVFEYYLFWFAYYPVSSASSAAPAASASNPRLTSRARLETWVSTLATTAIRKSGQKPENSLYLRLLYAYLREFVPTRTPPVNMSGGGTLLHRAPSHGVDAIDSFARAEFFLHTLVHFWLVGDDFSPLPKQTCHALGLRLPSRAHADLSERPPSPGLGDAVKLLVMYLNCCDGRALADACVPSPQGLSVSNGLCDTQVGFWNPLIQRPLYRFVLRTFLFCPIGTAIKNASQVFSVWLAYMEPWKVTQQELDRYGKQQGGDEKEPQTTKMVYNSSWRTYVLSNYLFYNSMVVHFLGFAHKFIHSDVASVLLMVHKVLEVLSSSPELLGLLHKVDAACHSRLVASSPASDHVLKYVPSIREQLKDWEDGLSESDADGSLLHEHWNSDLRLFSYDENGAYNLLQLLLVRAESEILRLPGETQQALQTLDSIKSQMKTAFQGHIERINGNTSLEESHNQQHQVRGEVFTPKHPSLRKGSWADVKYKGEWMKRPISEAEVAWLARILIRLSDWLNDALGLECADAEGSPAGATYIQFDGNTTVGGPRDAARMALGAVCSFMVLVGQAVLKLMRSHRVKISLRVFASKKLLSAAVVLYAVVAVTRNVSR

SEQ ID NO: 43116 - protein, 206 aa, Zea mays
  Coding DNA Sequence Number=SeqID_1337
  Gene Ontology: Mol. function=nucleic acid binding
  Homolog annotation: Hit_ID=Q10Q23; Match level="QueryCoverage=84%, HitCoverage=54%, E-value=2e-59, Identity=67%"; Hit description =Targeting protein for Xklp2 containing protein, expressed
  Pfam annotation: Domain name=TPX2; Domain location=84-141; Score =54.9; E_value=2.6e-13; Accession=PF06886.2; Description=Targeting protein for Xklp2 (TPX2)
SSESLRSSWNKKLKVTSQHPFKLRTEQRGKFKEQQFVQKVQEMLAEEEKKRIHIAQGLPWTTDEPECLIKPAVKERTEPIDLVLHSDVRALERAEFDQHVLDRNKFAEQQRLEWERQQELDEEERIRQLRRTELIPKAQPMPYFDRPFIPKRSTKPPTVPMEPKFYLRPEKLSCFAWIALPPSSVNRWLCASDAIPPRFEICRSRN

SEQ ID NO: 43117 - protein, 203 aa, Zea mays
  Coding DNA Sequence Number=SeqID_1338
MSPENKEPKLRLVRGPPHESFPNSVSPELPRKGLPKPPPRPAPCLGGLGNVTGPSTSTSALSGNRAGPSQQQAQDHAIYRIHKTSSHSTQPIPVLQEVPLEPINMTVYDFSREAGQEGQASPAPPVDWGTVGIQSLQVQLRPPRRPIYDEHLHQPVRAAPGISEYESPKTEDDLGLGLDFFGLHDPKAMCHLSIASECLVSND

SEQ ID NO: 43118 - protein, 98 aa, Zea mays
  Coding DNA Sequence Number=SeqID_1339
  Gene Ontology: Mol. function=chromatin binding; Cellular component =chromatin; Biological process=chromatin assembly or disassembly
  Homolog annotation: Hit_ID=Q2QSH9; Match level="QueryCoverage=92%, HitCoverage=5%, E-value=9e-23, Identity=56%"; Hit description =Retrotransposon protein, putative, unclassified, expressed
  Pfam annotation: Domain name=Chromo; Domain location=26-80; Score =55.2; E_value=2.2e-13; Accession=PF00385.14; Description='chromo' (CHRromatin Organisation MOd
LKPFHPNYTPVFKVLPRVADLTKTDIVPVAILDRRLVRKGSHAVPQVLIQWSDVPTEAATWEDYYVVKTRFPDAIAWGQADSEAGGNVTAEAVSLVNP

SEQ ID NO: 43119 - protein, 64 aa, Zea mays
  Coding DNA Sequence Number=SeqID_1340
MDLSNLAYAPVNLKPVDSPDPHREEVVPMGTEMKNAFSSTSLFTRRERIFPCLHPSEEDHIPIL

SEQ ID NO: 43120 - protein, 334 aa, Zea mays
  Coding DNA Sequence Number=SeqID_1341
  Subcellular localization annotation: CTP_CleavageSite=48; ConfidenceScore=5.04e-01
MEITIKAVAALGHRCGSPRPCRRGSSSPACACGLHQRTAYQGGRAAPPAAVRPPGTAARARPAPPPPPGTGAGARFLARMGAAPGGACVAALAASAGRPPAARLRRPLLPGGAGHVSRRGRSRRCASPSRLVAPPRPDASAATPTPARARRFRPKRDPAAAGVASPDPSGSGTRRPWPRWPGAAPSAPAALGGFAAAVPERDPAAAGGRVLPGSAIAYGGGASAARARHPGRSGLRPDRRAQPAHSAARGWVGLGPDGRVRPMQASASPMARTARSSTQRPSLARGRGPRQSGHAAPPTRRHAAQWRVAPDGDDNGSPYAQTPAKRSLDADAAR

SEQ ID NO: 43121 - protein, 330 aa, Zea mays
  Coding DNA Sequence Number=SeqID_1342
  Homolog annotation: Hit_ID=Q6L4H5; Match level="QueryCoverage=25%, HitCoverage=16%, E-value=5e-24, Identity=67%"; Hit description =Putative threonine synthase
  Subcellular localization annotation: CTP_CleavageSite=39; ConfidenceScore=5.66e-01
MVDTAPAWSSPREPPAPAANHPPATRPPSPFAKHSRILRSSTLPSSSVARGFCPARHAFTIAQHQPPPLSLQALLPNPSPPSSQPAAPCPCTLALLATDTAVLFPAVTTKHQHTTDENICEETWQPAPKQGLSAWYEPFPPAPNVDPNERYSLDEIVYHSSLGGLLDVWPDTVALARFSGAYWRDLFDSCPECSRHYHLLDHMALGYFPYAELAAAPTKCSMMVLNCGAYSVPNPSQASPVGFIQSTPSSPAPVPSTAASSLLPAAAPTRGDGVVLQLVQEIQDTLARGHGGVSDLLRNGAAVGAHLVLRQLDPLLTITEIIATDASPNS

SEQ ID NO: 43122 - protein, 98 aa, Zea mays
  Coding DNA Sequence Number=SeqID_1343
MVLWELTAITAYFLGLRRTYRLALRIQRRLIPPNHPRIRDFVYRYCLRRAPLPCVRAQDAVDSDSIRVWGRGRLDSMVNIQPRKGRGGEIGMKSLFLS

SEQ ID NO: 43123 - protein, 176 aa, Zea mays
  Coding DNA Sequence Number=SeqID_1344
MLVVLCPYSIINGAYRKGLLEAFISFTFASPCSFSMSVHKNIQQRDIEVGRNLGNAILRWLDRMKPSAEIRPRLPGPPNGSTAEQFRHVSSASRGAGAQKTSSSSKASPHDSSGKMLFSRLNIGPKHFPVLPTLAQPNRISASSQCRRFSYSYAPFPSVTARRKGVFREDIAQLMV

SEQ ID NO: 43124 - protein, 381 aa, Zea mays
  Coding DNA Sequence Number=SeqID_1345
  Gene Ontology: Mol. function=nucleoside-triphosphatase activity; Cellular component=nucleus; Biological process=regulation of transcription from RNA polymerase II promoter
  Homolog annotation: Hit_ID=Q6ZLD7; Match level="QueryCoverage=93%, HitCoverage=75%, E-value=0.0, Identity=96%"; Hit description =Putative RuvB-like protein 1,49-kDa TATA box-binding protein- interacting protein
  Pfam annotation: Domain name=TIP49; Domain location=43-365; Score =737.6; E_value=8.4e-219; Accession=PF06068.3; Description=TIP49 C -terminus
MTKTLLQKQHYSYLANRETWDGGRSEVYSSEVKKTEVLMENFRRAIGLRIKENKEVYEGEVTELSPEEAESTTGGYAKSISHVIISLKTVKGTKQLKLDSSIYDALIKEKVAVGDVIYIEANSGAVKRVGRCDSFATEYDLEAEEYVPIPKGEVHKKKEIVQDVTLHDLDAANAQPQGGQDILSLMGQMMKPRKTEITEKLRQEINKVVNRYIDEGIAELVPGVLFIDEVHMLDIECFSYLNRALESPLSPIVILATNRGICNVRGTDMTSPHGIPVDLLDRLVIIRTETYGPTEMIQILAIRAQVEEIDMDEESLAYLGEIGQQTSLRHAIQLISPASVVSKTNGREKICKADLEEVSGLYLDAKSSARLLQEQQERYIT

SEQ ID NO: 43125 - protein, 550 aa, Zea mays
  Coding DNA Sequence Number=SeqID_1346
  Homolog annotation: Hit_ID=Q9FK80; Match level="QueryCoverage=82%, HitCoverage=66%, E-value=1e-30, Identity=26%"; Hit description =Arabidopsis thaliana genomic DNA, chromosome 5, P1 clone:MRA19
RELDRVSKERNELKNECTALKKDRTKKDLQIKAKEAEIQNLKKANVSSMKDVCSAGMNIDQSFHAPANEALHTGVSSRRTDKMSGKDKDAHSLRDDLYLKQGHQTDLLEALELRRRTMIDNGMSTSGVVSLEEDTHFEPRNATCKEIKAIGVQTDNTSDNEHLDCKKLLVERISGNLRAMWGMSPNSLSSRNLISKINVSCSEEILSLLQHTRLSDNCEPSSQAISSMNEAISQLYDTFIKFIKMNSGKMSIQTFLEALLNLCAFDDAAIVSRTLRVFLKVLQHLLQHGAKSSERNNVSVEPYVNVLMENNHKDCSTLLRPVDAEDSLRLHNMFLPFTFWSSLFTGMLQIGVKYSQETIRTDALSIMILIVRTTDPIEERQKFGFTSVMTRLHLLLQKENGLLVKKHSVRLLFLLLNCPVMLKLLCSGGKDGSKQMGSEACESNRSQEVISSVLVDLSDCLTCGETCSLGIELCRLVIILLAYIASSGKLGYEVLLVPMFGDERSSYPAKPAGITRKLFETNLGSADEKQVMRDLDDRCCEPAAPYVDGK

SEQ ID NO: 43126 - protein, 80 aa, Zea mays
  Coding DNA Sequence Number=SeqID_1347
MDPHIRRTDGANDVGLRLFDAGVSQSSTNHDARPSCVEALVDRVGEAATMRRMSCCGSWRGQRRGYRRDSRGCEGERSVA

SEQ ID NO: 43127 - protein, 46 aa, Zea mays
  Coding DNA Sequence Number=SeqID_1348
MGRLEPRAEWESRLVGKVYNLCRVLETGGEAGNMEDFEEFQDYDEF

SEQ ID NO: 43128 - protein, 714 aa, Zea mays
  Coding DNA Sequence Number=SeqID_1349
  Homolog annotation: Hit_ID=Q9FK80; Match level="QueryCoverage=63%, HitCoverage=66%, E-value=1e-30, Identity=26%"; Hit description =Arabidopsis thaliana genomic DNA, chromosome 5, P1 clone:MRA19
MDGGLDDEWEASFLDEVIRATDEAEAVVSRNPNPTPTPAPAPIPTYYPLAAAPVSYLPASSVSYIPAASHLRSAISFSPPRDLSQRPPLPPPTAATSTRDALATGADVGRDFSPPPQLSQRPAADEGSLVAFAASSSASDRRFISTGCGEAGAKREAREIERLKRELDRVSKERNELKNECTALKKDRTKKDLQIKAKEAEIQNLKKANVSSMKDVCSAGMNIDQSFHAPANEALHTGVSSRRTDKMSGKDKDAHSLRDDLYLKQGHQTDLLEALELRRRTMIDNGMSTSGVVSLEEDTHFEPRNATCKEIKAIGVQTDNTSDNEHLDCKKLLVERISGNLRAMWGMSPNSLSSRNLISKINVSCSEEILSLLQHTRLSDNCEPSSQAISSMNEAISQLYDTFIKFIKMNSGKMSIQTFLEALLNLCAFDDAAIVSRTLRVFLKVLQHLLQHGAKSSERNNVSVEPYVNVLMENNHKDCSTLLRPVDAEDSLRLHNMFLPFTFWSSLFTGMLQIGVKYSQETIRTDALSIMILIVRTTDPIEERQKFGFTSVMTRLHLLLQKENGLLVKKHSVRLLFLLLNCPVMLKLLCSGGKDGSKQMGSEACESNRSQEVISSVLVDLSDCLTCGETCSLGIELCRLVIILLAYIASSGKLGYEVLLVPMFGDERSSYPAKPAGITRKLFETNLGSADEKQVMRDLDDRCCEPAAPYVDGK

SEQ ID NO: 43129 - protein, 58 aa, Zea mays
  Coding DNA Sequence Number=SeqID_1350
MAAAAHALYMGRARDTDTSISMLRMLGHAGVVGWQWHYFEADLDLADHGAQRYFESYR

SEQ ID NO: 43130 - protein, 396 aa, Zea mays
  Coding DNA Sequence Number=SeqID_1351
  Gene Ontology: Mol. function=transferase activity, transferring glycosyl groups; Cellular component=chloroplast; Biological process =histidine biosynthetic process
  Homolog annotation: Hit_ID=Q10S55; Match level="QueryCoverage=90%, HitCoverage=86%, E-value=1e-132, Identity=69%"; Hit description=ATP phosphoribosyltransferase family protein, expressed
  Pfam annotation: Domain name=HisG; Domain location=88-291; Score =202.8; E_value=8e-58; Accession=PF01634.9; Description=ATP phosphoribosyltransferase
  Pfam annotation: Domain name=HisG_C; Domain location=292-379; Score =78.7; E_value=1.8e-20; Accession=PF08029.2; Description=HisG, C -terminal domain
  Pfam module annotation: Pfam domain module=HisG::HisG_C; Domain location=88-291::292-379
MAEQTLSLLKVRRSFPMGASVAGFESFNCMFELPVVGEAAQPAAVHCRYPAGDVLSPIFSHLSDFNYFLPNLSGRQPVAIPNLEVWFQRPKDIVRKLQSGDLDLGVVGFDIVSEYGNGNEDLVVVHDALEFGHCRLSLAVPKEGIFENIHTMEDLLKMTEWTEERPLRVVTGFGYLGNKFLREKGFKHVRFLSADGALESYPPLASCCVKRLSRLIHVANFLPPVKMGMADAIVDLVSSGTTLRENNLKEIDGGVVLESQATLVASRKSLHKRKGVLEVTHELLERLEAHLRATAELMVTANMRGNSAEEVAERVLSQTSIWGLQGPTVSPVYRRRDGKVDVEYYAINVVVPQKLLYKSIQQLRSIGGSGVLVTKLTYIFDEETPRWRNLLSELGL

SEQ ID NO: 43131 - protein, 205 aa, Zea mays
  Coding DNA Sequence Number=SeqID_1352
  Subcellular localization annotation: CTP_CleavageSite=49; ConfidenceScore=5.52e-01
AHLSPLASGSAAPDPTSRRRRHSPQFHTHTTLRTTLSNRHPRTAVTVVHAGIRPPHLSPPHPPVIPDTGDPSEAVGRGGDGPTVHGFVVCGGSKLPLALPPGDGPSPQPPATSCDHLQEPGWYTVEVQISVSLPYILQVLEVIHLDHANVSKAELKERLAKMYKPTAAQSGCTGQCPVVHRTVSGAPGWALANWPLWEFVGGVRL

SEQ ID NO: 43132 - protein, 133 aa, Zea mays
  Coding DNA Sequence Number=SeqID_1353
MAVETSPGPQLLATDDGRTAAATGPEKRTGTSTGEEEERWGKKEWPNVERGRREIETVAMSLKPSVRRCAGGWRDIHVRPDDDRPGLFNSLASHGCVRAMPPAVVASGDVTAPPTQDASVFDAAGPDLAFGLV

SEQ ID NO: 43133 - protein, 56 aa, Zea mays
  Coding DNA Sequence Number=SeqID_1354
MSRDSVPVGEPPPRAASPVGRGRGAAEPDRHGASQLGPPTTDMVALPLASQNADGQ

SEQ ID NO: 43134 - protein, 88 aa, Zea mays
  Coding DNA Sequence Number=SeqID_1355
MGKDEEGARALLRALSGVGERPAQQARLPRMAGQRRPRNGGGGSNSIGDFGGGIHGKARHFSRSPTSTLSVSFPLHAYCSIARYGGGG

SEQ ID NO: 43135 - protein, 209 aa, Zea mays
  Coding DNA Sequence Number=SeqID_1356
  Homolog annotation: Hit_ID=Q0GPG4; Match level="QueryCoverage=87%, HitCoverage=56%, E-value=5e-45, Identity=48%"; Hit description=BZIP transcription factor bZIP109
  Pfam annotation: Domain name=DUF1664; Domain location=89-209; Score =123.1; E_value=7.9e-34; Accession=PF07889.3; Description=Protein of unknown function (DUF1664)
MAMQTGVATSKVLILVGAGMTGSILLRNGRLSDVLGELQEIMKGVNQGTSSGPYDIALIQAQIRNLAQEVRDLTLSKPITILNGKSDSGGSLSSYILPAAAVGAMGYCYMWWKGLSLSDVMFVTKHNMANAVQSMSKQLEQVSSALAATKRHLTQRLENLDGKMDEQVEVSKAIRNEFLKSTITIQETMLLPWNSAYFEIHHYVCLETT

SEQ ID NO: 43136 - protein, 199 aa, Zea mays
  Coding DNA Sequence Number=SeqID_1357
GNDGPSCDVVGPSPWSGEAEAPPRSRSSLSSEVEVESEPLGRARRRPSAEARAEPWGRARRSSSSSGAEAESKPWVGRGGVRRLPGPRPSPSPGVGRGGASYGARGRTWLLSASLCRVAQQSEWRRQRCLLAILALNAPAIRSVGVAIRPRLLLGEGWVSGEPKPRSAQSGCTGLSGGAPDSVRCARLALANSSLSGVD

SEQ ID NO: 43137 - protein, 65 aa, Zea mays
  Coding DNA Sequence Number=SeqID_1358
MARIRSARPSTDRRQRVVCHLNTDARWLTPDPAADAIADDPHTASHQAIRRLLSKYETIYSIPMS

SEQ ID NO: 43138 - protein, 113 aa, Zea mays
  Coding DNA Sequence Number=SeqID_1359
  Subcellular localization annotation: CTP_CleavageSite=49; ConfidenceScore=5.17e-01
MTNAGDGRDNQNTADTMINRLRRGFSLAVTGSTIRTSHQTVSGSEIVIVATTISRRKEEAASDGAGADELRACASLTWNWSLARVHERHSEVLASSVSPSLPCPHLPPWTQIT

SEQ ID NO: 43139 - protein, 310 aa, Zea mays
  Coding DNA Sequence Number=SeqID_1360
MPGPSRVHGRTGYVSERTRPRTAATHASELLLRTCRRRAATRRAGRHEQAARAATDELGRQGARHATTSRASHASRPPSRAGLRTAPKPRRGHDRMPAARAGLHTAPKPRQGHGRAAAARAGLRRTPGRGSRRGRTTSRGGGSRARAARRAKNARAGADRGRGGCAGCQGAAPGATAELRPPWPSRAIRPNRAGANRGQARGPRRAGAGQGDAGAGPSRARTSRVATPWPRARPRHGRDVRRAERDEVENEEEKGRGERSGTGSPRGATATRPGAGRRFSCGQAMGEERGVGGAICAREREEREFVGERR

SEQ ID NO: 43140 - protein, 712 aa, Zea mays
  Coding DNA Sequence Number=SeqID_1361
  Homolog annotation: Hit_ID=Q8S2J3; Match level="QueryCoverage=99%, HitCoverage=100%, E-value=0.0, Identity=49%"; Hit description =Selenium-binding protein-like
  Pfam annotation: Domain name=PPR; Domain location=466-500; Score =32.0; E_value=2.1e-06; Accession=PF01535.11; Description=PPR repeat
  Pfam annotation: Domain name=PPR; Domain location=537-571; Score=2.6; E_value=3.7; Accession=PF01535.11; Description=PPR repeat
  Pfam module annotation: Pfam domain module=PPR::PPR; Domain location =466-500::537-571
MAAMVGARRALLAARFSPRGTIAASAAPAPLYRPMDSPLRVILKAWFFYLAGFQLKEFVYSLGFHIEGLVPLHLKGLMKIISVSGDKTKQRDVTSAGSTTGTHKNKGVDGVGGSSEQHYRSGGSYGFQNNHQPYTGTRANNERYNASQPYRGSGPYSQQGLDGHFSNDRQQYNGTEANSTYSSGYYTQSKQKIYEGEGANNGQYGYGPSGQPCPNPVGNSQRVQKQQYVDHRSGGSYPDRSGHHPSQYVNPTHSRKEHVAGFQQGNNSNFGYNASQAYQSPYFTRQADTHSTSQGYSMYLNTDVQRLSHGVHQEKHSHAQSAGSFGNHVNSAPHEYGKYHQSLQGNPSNVGSPYEVPSEAGSKHKCTVEELEKFCDDGNVKEALEVLAMLKENRIVLHAPQYFRLMQACGDATALSEARLIHSQISESSLTVDTDFQNKIMEMYARCGSMEDAKKIFSSMDHHNLTSWNTMISGFVHNVLGEEAIDFFERFKQTGDKPDHGMFRHVFLACGILGSVNEGMLHFESMQKDFGIHPTTEHYASIVTMLGQSGYIVEAYEFVERMPVEPSIEILQRKRKGKRQVSPKLGARSMNTELATDLTPDTPKIYEELRYLLAHMKEAGYIADTRFVLHDVDQETKEDALLAHSERLAISYGLITSAPRSPIRVIKNLRSCGDCHTAFKIISKLVGRQIIARDAKRFHHFENGVCSCKDYW

SEQ ID NO: 43141 - protein, 434 aa, Zea mays
  Coding DNA Sequence Number=SeqID_1362
  Gene Ontology: Mol. function=catalytic activity; Cellular component =cytoplasm; Biological process=positive regulation of fibroblast proliferation
  Homolog annotation: Hit_ID=Q6J6P6; Match level="QueryCoverage=93%, HitCoverage=98%, E-value=1e-108, Identity=48%"; Hit description =Farnesyltransferase beta subunit
  Pfam annotation: Domain name=Prenyltrans; Domain location=109-152; Score=53.0; E_value=9.7e-13; Accession=PF00432.11; Description =Prenyltransferase and squalene oxidase re
  Pfam annotation: Domain name=Prenyltrans; Domain location=160-203; Score=33.4; E_value=7.8e-07; Accession=PF00432.11; Description =Prenyltransferase and squalene oxidase re
  Pfam annotation: Domain name=Prenyltrans; Domain location=208-251; Score=6.2; E_value=0.83; Accession=PF00432.11; Description =Prenyltransferase and squalene oxidase re
  Pfam annotation: Domain name=Prenyltrans; Domain location=342-386; Score=30.1; E_value=8e-06; Accession=PF00432.11; Description =Prenyltransferase and squalene oxidase re
  Pfam module annotation: Pfam domain module=Prenyltrans::Prenyltrans::P renyltrans::Prenyltrans; Domain location=109-152::160-203::208 -251::342-386
MDPSPQSTPPTGDDPAAAADPDLPRLTVTQVEQMKVEARVGDIYRSLFGAAPNTKSIMLELWRDQHIEYLTPGLRHMGPAFHVLDANRPWLCYWMVHPLALLDEALDDDLENDIIDFLARCQDKDGGYSGGPGQLPHLATTYAAVNTLVTIGSERALSSINRGNLYNFMLQMKDVSGAFRMHDGGEIDVRASYTAISVASLVNILDFKLAKGVGDYIARCQTYEGGIAGEPYAEAHGGAGWLFVKEWNADFKDELINWLMVATPFGRNLVCDQGAAIAFTQKLITIVDKQLKSSYSCKRPSGEDACSTSSYGCTAKKSSSAVDYAKFGFDFIQQSNQIGPLFHNIALQQYILLCSQVLEGGLRDKPGKNRDHYHSCYCLSGLAVSQYSAMTDTGSCPLPQHVLGPYSNLLEPIHPLYNVVLDKYHTAYEFFSEE

SEQ ID NO: 43142 - protein, 104 aa, Zea mays
  Coding DNA Sequence Number=SeqID_1363
MTYCRVLSGIRVNVEILVLRSPTIGVDWPHETVVIHLRPYAGTFNRVDSDLPAPSVRRMYVRTWLKDDTSCHSQCGSIVLGWELRLVELLGLSWSAAPPRRVAW

SEQ ID NO: 43143 - protein, 105 aa, Zea mays
  Coding DNA Sequence Number=SeqID_1364
MAAAAPAPTPTEEGTHAAHPGSPGGDNKSWDTTLVPPATPILSRQNSQIFRSYMLPSLWVPLRGPLSLATTSSLAVVKDDDHEATTRPRPSSGRTHGHDSLEAIP

SEQ ID NO: 43144 - protein, 301 aa, Zea mays
  Coding DNA Sequence Number=SeqID_1365
  Gene Ontology: Cellular component=endoplasmic reticulum
  Homolog annotation: Hit_ID=Q8S2K0; Match level="QueryCoverage=99%, HitCoverage=100%, E-value=1e-104, Identity=68%"; Hit description =Putative 24 kDa seed maturation protein
  Pfam annotation: Domain name=Reticulon; Domain location=123-299; Score=325.7; E_value=8.3e-95; Accession=PF02453.8; Description =Reticulon
MADHKEEPVPESVMDKITEKFHGGDSSSSSSDSDDEKKGSSLASAAEAMKAKIYRLFGRERPVHSVLGGGKRTVVASGRGKGRREEENGSHLLGASSCSIVVVVAIAVDILFTMDSAAPATEREMKISGGVLAGATAIWLLFEVMEYHLLTLVCHCLILSLAILFLWSNASTFINKSPPNIPEVKIPEDVAVNVALSLRYEINRGFATLREIGHGRDLKKFLIVIAGLWLLSVLGSCCNFLTLFYIVFVALYTVPVLYEKYEDKVDAFGEKAMTELKKYYAIFDEKCLSKIPKGPLKDKKH

SEQ ID NO: 43145 - protein, 112 aa, Zea mays
  Coding DNA Sequence Number=SeqID_1366
  Subcellular localization annotation: CTP_CleavageSite=29; ConfidenceScore=5.72e-01
MAAAAGGVRRALAALRSGSPSTISATLSRQAAARSLELAAASLPRASRRRLAISRVPVAALGGVQASLMPMHNATASALLTSMLGLKPGSWGWLSEGPFGMVIEDRLETKDT

SEQ ID NO: 43146 - protein, 688 aa, Zea mays
  Coding DNA Sequence Number=SeqID_1367
  Pfam annotation: Domain name=PAN_2; Domain location=352-418; Score= -14.1; E_value=0.039; Accession=PF08276.2; Description=PAN-like domain
MNEGSASRKKVVPSISENQACCATTFCNERSWETNAWRARLVKAVCQKESILPTNTENPILPSSIGISCDAVEFSGKLVGSQGKFQSLGVSSNALEIHSHDNCQDPVLHESHKDEPVIARGESASGVNIVARCESVPGVDSSNFVRGKEKVMYNDSNCGNNTREGDDSNESIESCTSTKAPKRKHAQCCAATMPSSGNKRFRREDNESSCSGLLQKCGTSFFNWMSSLTNGLPMLDGATAAVPLEQKFSASTGDGSAAPSQPLQNNRSVPMQFFGFNSLFQSLYTRNVMITSGDNCRQPESNCAGHVFNRLTLELNDSNSMLNKEIGMGRETLDLATQTSAAEGFQMISGGCRGNVQSQIDIFQMRPERNMKLPSSSKFSSRSLEEKQNQCTAACSNDATQNKGGLRESLWVTRLLPKASVELMEATPCNVENAVSPQAVGDKLCCPPLQNFNLEKELNNIQYFTGRGSSDGVTSSKCPATPPEEPKQSETMASVFAKRLDALRHANTSAVSLAIACEHGSPKLRNHKTNSFVVSYSSHDKVEAGHENHKSSSGNGRIVLWVGDKGKEPMCLNNEELRGNFISEREHQHHGGNTAGKLATQHNLELNILAEDTDRSQVELKGGVLDFMAGPSDNKQIVPYGTMSNDESSVIFGALHRLRLSRSDILRYSTGFLDHLNFVPSRKHVYFL

SEQ ID NO: 43147 - protein, 107 aa, Zea mays
  Coding DNA Sequence Number=SeqID_1368
MAMVAHKWLPTPSVLRVVVVAACDNCWFCQLLQKLNSPLTKRTLVYCDNATTALMFSLPQVQSVGCVSGATVDELKAWWSAAMKGEWKLPSKEELGVKLREKELLRS

SEQ ID NO: 43148 - protein, 64 aa, Zea mays
  Coding DNA Sequence Number=SeqID_1369
MSFKPKLRKLEKLSKRWFLRIHDKSVHDEKSMIVTKIVVAPKLQARELRLIRGKRNRLKGEKAI

SEQ ID NO: 43149 - protein, 1204 aa, Zea mays
  Coding DNA Sequence Number=SeqID_1370
  Homolog annotation: Hit_ID=Q2QMP1; Match level="QueryCoverage=90%, HitCoverage=89%, E-value=4e-93, Identity=40%"; Hit description=MATH domain containing protein, expressed
  Pfam annotation: Domain name=MATH; Domain location=62-203; Score =52.3; E_value=1.6e-12; Accession=PF00917.16; Description=MATH domain
MILSAFDSELSVRVSEYQWDASLAPRVGDYSGKTVRVRGTQGVSRGADNGQYPLRVALADEEEDSGNVTPPDNGSRRMQARGTGLWALHGGDQTAGTWVAERLTPRSHRYILVYPQGCDVSNHLSLFLCVANHEELLPGWGHFAQFTIAVGNLDPKKVKYSDTLHKFWKKEHDWGWKKFMELSKIQDGFLVDDVLEIIAQVQVIRRKLIRLIEDKMRWSSFRAFWLAIDPTTKHRMSREKSDIILKMVVKNFFVEKDVTSTLVMDALYTGLKALEACSNGKKGMVTSIDLEELSASMVHVDMDMFVLAGDFITLIERAALEPLSCQSLSPKGDKCSQTRAKDGGTGEINKVPIEHQERRLTELGQKILEIFVLSHIFRAAPGKWKGELGCRSPFGWGLGAWRPIRGLAVSMGSAGVGTEPPPAAGKVATRKESWGRRSPLGWGARRREADHDSGDGEGTRCRCEAECGLEGRVCEEVEQRHGGPRVGHGKAERGTSDVESTHRRREDGRGRGAKQKKNNRKVKDKEREERSDSKFLERGKDVSTNHDREDSKQVGQSAVEADNFGQRALDVSDNLSGSTGVCQTDTCDKITEPVTVNAMNDVGIEMNNSQTWKDDSTVDIETLKEIEGRELLKAHLEKKAAAEAAVDSSLASSSNSLEKTPQVLKGPDQSSVIVGDAKINAPLPKAVPVAISDDNNGVIPATATYTINTKPVLVSPTPSKLEPVLCEEHVSSSIQQTNKAILMPSRSPLVDNEANPTPPKSPVPQADTVAKATPAPPKSPMLQIDTIAKATAAPTKSSTSQLDKVANIQAAPKSPAPQPDEVASHHNSVSGQILSTSISKPREDTVSKRAAVVTVPGTPTPMSRPTSAPLLQVPKSTMLPTPSVQVSPMLSRSWTMSAQVPPMLSRSRTVSERPNNEPSPTAPMYVTQTYRNAILGKGHLDTTPASLEQSTSVSPNTAASQPWSAYAMATSVMAPPFERNGQLPGKQGFMFGPSRAETLDNWHSWKGNTDVNRNTWKHDFPNQQMTNCDAHLHHLKDISYQQLSSIGTEQHRLGGLQCREFLQREIPAATFVSRQQYGSVGEEFPHIDIINDLLDEDQNSAHMTVSPLHEYHTFGLPFSSGGNVADSEIPSVSSSVRFDMTDPYYGEGYRRAYNTQNALHRLDGYPNERLDSTAPPKRWAYSHPNPAVNLAYNSNVFPQQMGDY

SEQ ID NO: 43150 - protein, 926 aa, Zea mays
  Coding DNA Sequence Number=SeqID_1371
  Homolog annotation: Hit_ID=Q5ZC01; Match level="QueryCoverage=99%, HitCoverage=99%, E-value=0.0, Identity=51%"; Hit description=IFA -binding protein-like
  Pfam annotation: Domain name=DUF593; Domain location=648-741; Score =154.2; E_value=3.4e-43; Accession=PF04576.6; Description=Protein of unknown function, DUF593
MPIFPRLSSALSTALLEWILMLLLFIDAVYSFLVTRFARLCRLPAPCPFCSRLDHFLGNEKPCFYRDLICKTHKSEISSLAFCSLHQKLAGARNMCEGCCGEVAGDDKTDETDSNQRIGDAFNSPREKVCSCCGQHFKRRSVALSSRETAELEPTRAFGSPKTYTEYSVVCQVDEPLEPKDIYHQSDYRSNEPDGLLQMTSDSETEVPCAIDVRSSQSREADVKGEDLQEDPACEQPVLPSPVVIKKSEIVVRKEPSVEDTCITSSACPAVDDHPNSGGGVDQMEEKESLSRKWAPQHDPVLVIENSGLQDAGISQIMPSDELPQVSGETEPSQSTNEGNTDPYKSQFTILEEHYAVSEEGNIKYNCGDIRVSQVGAGSKTSGEVEDYTKKIEPTGDMGEHELVVQDPSGSAPKDLIVKDYVDEPHVSTTTMRSSGEVPQDHSATEENPKTIDSIVERRPSLSSQISITLRSSGEVLQDHSATEENPKTSESIVERRPSLSSQISITLRSSGEVLQDHSATEENSKTSESIVERRPSLSSQISMNEAYRLAIGNKGSLTSPTLTDVILGKDSTSSINEELRLLLSQISASRGLEAPWADPGPSPRAYGRGDELVVQNITNRLSLERNASGLESLDGSIVSEMEGESTIDRLRRQIDLDRKSIHLLCRELEEERNASAIAASQALAMITKLQDEKAAMQMEASHYQRMMEEQAEYDSEAVAKANELLTEREQLIEELEVELENYRRQYGGGSTQRRGNRVAFKQENRDTTMLDGGGLEDPLINTQQGINSLVGLEEERAYIATGLRKLEQKLQFYSNNSVSVELPSPDVKDDLSDKVYVTEDFSLHCQESSMESKEAGSSTTSGEVDLVAVQEEIAKLNRRLKTLEGDRSFLEHSINSLRNGDEGLMFIQEIACNLRELRAIAIGKK

SEQ ID NO: 43151 - protein, 108 aa, Zea mays
  Coding DNA Sequence Number=SeqID_1372
  Subcellular localization annotation: CTP_CleavageSite=62; ConfidenceScore=5.14e-01
MAGGLVGSSEHPKRSVWSIPSPRKEPKTKAGRGGGGAQDGGVAMPVTGRGLARTGQRREPVSAERRGAVVELSVRLQTWTGGRVGRMRLALQIGDVDGWMDGEAGMSE

SEQ ID NO: 43152 - protein, 441 aa, Zea mays
  Coding DNA Sequence Number=SeqID_1373
  Homolog annotation: Hit_ID=Q9LK80; Match level="QueryCoverage=83%, HitCoverage=71%, E-value=2e-77, Identity=43%"; Hit description =Arabidopsis thaliana genomic DNA, chromosome 5, TAC clone:K23F3
MQWFGHFAVTGESTHRKGAKALSQFAFVNRDRCWEELEWKGKHGQSPAVVATKPHYFRDLDVLETVENFLEYVPDFWSSDELANSIKDGEILQIDEEYFVDQFLYLMYEENSKDAWHVVEDFLMDEQFSSLCQHLLIHLDEERLLGFLNSLGKLINPTMQCKELTFPCCWLEVLLSGHYDHISLDDLVFLNCVIAKGRQLWRLMNDEEQHEEWGQMEELLKGGNHLTDADHFALMKELVETELPGVLKWVGIQSWIIFCELSKECKSGDSCESFFSHNKIEFHKADDYSLVRNYGFSISHMPDIDVEDLTRSSHKRRKRNRRKRHRYESDEDKFDELLELGSSDGKNGVESQRGSWRLSTDGFSASWDIMHSGIAERCMRSRTTLFSWDAEGIEYGPGISLKPIWTLELVVENSGDARKYESLLTLPVILRKRWLLKQLKK

SEQ ID NO: 43153 - protein, 224 aa, Zea mays
  Coding DNA Sequence Number=SeqID_1374
  Gene Ontology: Mol. function=endoribonuclease activity; Cellular component=lysosome; Biological process=RNA catabolic process
  Homolog annotation: Hit_ID=Q5N865; Match level="QueryCoverage=81%, HitCoverage=68%, E-value=3e-88, Identity=78%"; Hit description =Putative S-like RNase
  Pfam annotation: Domain name=Ribonuclease_T2; Domain location=37-216; Score=136.4; E_value=7.8e-38; Accession=PF00445.9; Description =Ribonuclease T2 family
MATKAACVLAVWVLVASGLSDLGSARAPLGSKPQREFDYFALSLQWPGTICASTRHCCATNGCCRSEPLQTFTIHGLWPDYDDGTWPSCCRRTQFEMDKILPLKEVLDKYWPSLYCSKSGTCFSGKGLFWAHEDELQYFTLALDLYFKYNVTEMLSSGWIQVSNGKEYALSDVIDTIKHAFGGSPQIVCKRGSIEELRLCFDKELKQQQQQQQQQSLFVPSTLG

SEQ ID NO: 43154 - protein, 370 aa, Zea mays
  Coding DNA Sequence Number=SeqID_1375
  Gene Ontology: Mol. function=endoribonuclease activity; Cellular component=lysosome
  Homolog annotation: Hit_ID=Q5N850; Match level="QueryCoverage=85%, HitCoverage=86%, E-value=1e-103, Identity=66%"; Hit description =Putative ribonuclease NGR2
  Pfam annotation: Domain name=Ribonuclease_T2; Domain location=57-292; Score=135.7; E_value=1.3e-37; Accession=PF00445.9; Description =Ribonuclease T2 family
METRRPRRGWNKRFVLPLALLCLAVLLPGALLPPSASASSSSPAAGGGSRKRRWVGFDYYVLALQWPGTICRETSNCCDTNGCCRSQPLKWFTIHGLWPQYNYGGWPSCCRPTRFNINKVSVSNFLQNEMSEPLQILMLMPILEKYWPSLYCGSSSTCFGGRGPFWVHEGITHMLSADPIISFVLCACAGGLPDLVQWETHGTCAYPEIQDEYDYFSTALYLYSKYNVTKALRKARIRPTSGRKYAVGHIVAVIEYAFGAMPSLVCKNGSVQELRLCFHKDYQPRDCTLEAGSAPNGRSYCPRYITFPSYKPSGCTAAPHRGRELSPDLSWLCRCTTLIGHCDCDCSGGQYYGGDQQPIQWRGSELHAYV

SEQ ID NO: 43155 - protein, 81 aa, Zea mays
  Coding DNA Sequence Number=SeqID_1376
MANEAVIDDDGKVHRAAKASREALRLEELIAPLSPPPKLYIPKNDPELKDALVVLEVAHKIIDEVVDETLNDAAGKVLRGE

SEQ ID NO: 43156 - protein, 236 aa, Zea mays
  Coding DNA Sequence Number=SeqID_1377
  Homolog annotation: Hit_ID=Q10MS1; Match level="QueryCoverage=56%, HitCoverage=54%, E-value=7e-70, Identity=93%"; Hit description =Pentatricopeptide, putative, expressed
  Pfam annotation: Domain name=PPR; Domain location=118-152; Score=5.7; E_value=1.6; Accession=PF01535.11; Description=PPR repeat
  Pfam annotation: Domain name=PPR; Domain location=153-187; Score =16.8; E_value=0.076; Accession=PF01535.11; Description=PPR repeat
  Pfam module annotation: Pfam domain module=PPR::PPR; Domain location =118-152::153-187
MQILPHFYLSLNGIGPSSIGGKEPQTYTSSLLGRWSQGVKPLQKEPCCTLSNIKGIIQFENEYMGNLTWLRPWLVLDPEVLGCLVLLVHSYKVSGSIGSRNMIYGVVRKEIWYRPDMYFYRDMLYMLARNKKINETRQVWADLKSEDVLFDQHTYGDIVRAFCDADLIDLAMEIYDDMRSSPDPPLSLPFRVILKGLVPYPELREKIKQDFLELFPDMIVYDPPDTLSDIDEEFKF

SEQ ID NO: 43157 - protein, 82 aa, Zea mays
  Coding DNA Sequence Number=SeqID_1378
MAEKLEQELGADGPRQWSRASGVAINKPTSPHDDMEWIISFKRDQVDACVASPLEMEWNAQGNNIFVEHFFAGLRLSREEFD

SEQ ID NO: 43158 - protein, 891 aa, Zea mays
  Coding DNA Sequence Number=SeqID_1379
  Homolog annotation: Hit_ID=Q9LHJ0; Match level="QueryCoverage=81%, HitCoverage=100%, E-value=1e-152, Identity=45%"; Hit description =Arabidopsis thaliana genomic DNA, chromosome 3, P1 clone: MMP21
MAAEREASSSRGRAISLFPPRPAQIRSLKEIAPTGPSPRCAPPLAACAAATPSRGLAAMLGVEPESGGAASSSAAENFDAGQYAFFGKEPLEGFELGGLEEAGSDGNGGGFSGPDEGLYRLNSVGDEMQYLKMQVALVSTFELITFEADVLLEIDDQSNLSDIDDLASTFAKLNRSISGIRNPGVIGDRRSISRGSSLTLDWPEDVEFSNWVDQDVFENEEFQESKRWWSSNSSVQQGDSNSRPLSRTSSYPQQPLQHRSSEPIVLPKTSSFTSFPPPVAGGGRAPYPAQGLTRHGSIPSIGAGLQMGSPSMSLSASPYHMVGPSHGLPYTGGMPYGALNLPVNNPVQNDWSNHVNPFTGEHLNLLPNLLHKQLSLPNSPMSSLLFSQHQQRLAQVQSSHQNYLNIMPHVLYPHHSAEITSRFGSVGSSHSSRDKRSRSGKGKHNIRFSQLPSDTGSQNGDSGGIKFRSKYMSSEEIESILRMQHSASHSSDPYIVDYYHQACMAKRGATSKQKTNFSPTSMKDVPSKSRSSSDQHTYLQVDALGRVSFSSIRRPRSLLEVDHPSSADGSHDQKSTVRPLEKEPMLAARVTVEDALCLVLEVDDTDRLLQSSQSQDNIFELKRRRQVLLEGLAASLQFVDPLGPSKSGHSSGSALKDDVIFLRIVSLPKGRKFLARYLRLLVPGSELTRIVCMAIFRHLRFLFGGLPSDSSAAETTVALAKTVSSCVHHMELGALSACLAAVVCSSEQPPLRPLGSSAGDGASLVIKSVLDRATELLTDRHAAASYTVPNRALWQASFDAFFGLLTKYCVSKFESIQQMFVTQTPSSGIGPEASKATSKEMPVELLRASLPHTNEQQRQRLLDFAQRSMPVTGFNPSGARGGHITSESVPG

SEQ ID NO: 43159 - protein, 147 aa, Zea mays
  Coding DNA Sequence Number=SeqID_1380
MKHREDGFGSITTLLHPLVKASGVLGGPSSGVGTVFQSGSVDLGHLPKLNFPVFDEENPKLWIRRSHNDYFELYVVDQLSNNNGEGICRSISRGGGRARTQKLLSRTVDGVAQRGLLGSWRSALADNFSQSRCTPGDQQSGGQRGRG

SEQ ID NO: 43160 - protein, 66 aa, Zea mays
  Coding DNA Sequence Number=SeqID_1381
MGMAFVAADSDGRSNGRDCRIGRGKRGGEWDEHPFIIMVGANGFQSSTERSRYKRQNGSLEQDFSP

SEQ ID NO: 43161 - protein, 401 aa, Zea mays
  Coding DNA Sequence Number=SeqID_1382
  Gene Ontology: Mol. function=receptor activity; Cellular component =nucleus; Biological process=regulation of transcription
  Homolog annotation: Hit_ID=Q7XIS2; Match level="QueryCoverage=82%, HitCoverage=48%, E-value=1e-27, Identity=31%"; Hit description =Receptor-like kinase-like
  Pfam annotation: Domain name=F-box; Domain location=9-56; Score=40.6; E_value=5.6e-09; Accession=PF00646.23; Description=F-box domain
MDGLERSSLSVDQLPDDALVQILSRLGAKSLCRSKCVSKPWRDLIADRLYCKDLPQSLQGFLYFDVGRRGDGHDAAAANAYGGDLAGSRDGMLLRHGHGRFIDLLGKPMPLLDPSFAFLKEQPGVNAIELLDSCNGLLLFGHRRVSDTYDSLGYIVCNPVTEQWVAIPSSGWTPTPAEEIVDEHVKDPRPFIIFDPSLSSNFDIVQFWQDGTVDDVEGFLNYRVRLLICNHRDMVVVTSFLHTYSSVTGLWNDRSSEWMRWEQGGGWGKWGGYAEIIKPPYGRAFVNGMLHFLVFLFRTEEYVIVAVDGQGNTCRVLPWPYDFFPAVGFIGQSQGRLHCITRLVECNRFSDPGLSIWVLEDYDTEEWVLKHSLSLFASWSKQQILNTILTILLLSFIQIGI

SEQ ID NO: 43162 - protein, 380 aa, Zea mays
  Coding DNA Sequence Number=SeqID_1383
  Gene Ontology: Mol. function=nucleoside-triphosphatase activity; Cellular component=protein complex; Biological process=protein catabolic process
  Homolog annotation: Hit_ID=Q9SSB5; Match level="QueryCoverage=99%, HitCoverage=100%, E-value=0.0, Identity=84%"; Hit description=26S protease regulatory subunit 7
  Pfam annotation: Domain name=AAA; Domain location=204-345; Score =137.8; E_value=2.9e-38; Accession=PF00004.19; Description=ATPase family associated with various cellular activities (AAA)
  Pfam annotation: Domain name=AAA_2; Domain location=200-327; Score= -45.9; E_value=0.028; Accession=PF07724.4; Description=ATPase family associated with various
  Pfam annotation: Domain name=AAA_5; Domain location=204-344; Score= -20.7; E_value=0.067; Accession=PF07728.4; Description=ATPase family associated with various cel
  Pfam module annotation: Pfam domain module=AAA::AAA_2::AAA_5; Domain location=204-345::200-327::204-344
MAPEPEDDIMNEKNPRPLDEDDIALLKTYGLGPYSTSIKKVEKEIKEMAKKINDLCGIKESDTGLAPPSQWDLVSDKQMMQEEQPLQVARCTKIISPNTDDAKYVINVKQIAKFVVGLGDKVSPTDIEEGMRVGVDRNKYQIQIPLPPKIDPSVTMMTVEEKPDVTYNDVGGCKEQIEKMREVVELPMLHPEKFVKLGIDPPKGVLCYGPPGTGKTLLARAVANRTDACFIRVIGSELVQKYVGEGARMVRELFQMARSKKACIVFFDEVDAIGGARFDDGVGGDNEVQRTMLEIVNQLDGFDARGNIKVLMATNRRSGSHIALLVAPGADIRSVCTEAGMYAIRARRKTVTEKDFLDAVNKVIKGYQKFSATPKYMVYN

SEQ ID NO: 43163 - protein, 69 aa, Zea mays
  Coding DNA Sequence Number=SeqID_1384
MWRCDVARFGGSPDGLLSTNSLTTFQFPQRLLTKQEWYYLRMEQYALLEERYDVKHQVERTKQGEVCMY

SEQ ID NO: 43164 - protein, 309 aa, Zea mays
  Coding DNA Sequence Number=SeqID_1385
  Homolog annotation: Hit_ID=Q2HUD0; Match level="QueryCoverage=96%, HitCoverage=26%, E-value=1e-68, Identity=47%"; Hit description=WD40 -like
MYLAYGWPQSIPLDPDNSDRVVLLRLLGRFLLAVCPASLHLWSAAQHRVRLARSDRSPESLSAHGYNAHAVWSPDAKTVAVLTSSFYLYVYKVQHLGKQLIVGGKQVPGLCLASISLIITEKVPLANGVAITSNFVCDNKSMLLGLSNGHVQVMSWNAEFSDSFKLGCSVCSSEKPTAVIDALVFDPASLRDNTNARPAPCCTGNSSIVHVELSVKLRLLVALYSGCRIALCTIGKKGLRQPGSIRVERWLDTDDAMCTSVASEQQILAVGCSRGVVELYDLAENTRHIRTISLYDWGYSALEIDIGIG

SEQ ID NO: 43165 - protein, 1165 aa, Zea mays
  Coding DNA Sequence Number=SeqID_1386
  Gene Ontology: Mol. function=protein-tyrosine kinase activity; Biological process=protein amino acid phosphorylation
  Homolog annotation: Hit_ID=Q6K9J0; Match level="QueryCoverage=77%, HitCoverage=99%, E-value=0.0, Identity=71%"; Hit description=Protein kinase-like
  Pfam annotation: Domain name=PB1; Domain location=34-122; Score=78.2; E_value=2.5e-20; Accession=PF00564.15; Description=PB1 domain
  Pfam annotation: Domain name=Pkinase; Domain location=831-1094; Score= 205.0; E_value=1.7e-58; Accession=PF00069.15; Description=Protein kinase domain
  Pfam annotation: Domain name=Pkinase_Tyr; Domain location=831-1094; Score=265.8; E_value=8.6e-77; Accession=PF07714.7; Description =Protein tyrosine kinase
  Pfam module annotation: Pfam domain module=PB1::Pkinase::Pkinase_Tyr; Domain location=34-122::831-1094::831-1094
MAPSAAVPGGSEVEGSPRMAKFLCSFGGSILPRPLDGCLRYVGGETRIVMLPRDISYADLAARMRELYKDADIIKYQQPDEDLDALVSVVNDDDVVNMMEEYDKVIATGEAFTRLRIFLFSQHLDDDAASVDVHYNVDERETERRYVDALNSLGDVKSPSSPVSVEQLFGIGGNDSGIPDFAGLRHLNVPRPTHSQRYGEMDSPWSPAYVSPGQYGVHDPRDFPISPSSARFQVGAEDFDERTPDDFVRQSPKYRHYEAHSPSHMDNLVWLPPGAVIQQNAGFPGNLSRSNNFLDGSNGCDHCRSPFHKVQGSVNDPIYMNPRWTRPVQQHFDQPSMINDYPGHHANSCPDYCRPGDHYVGGQDVRLENGVYVKEQNGGHPPMFYNESHPHDRVWHVHTKQSHQRYEDPRLHHPANGRVIEPYIMDANKVYEVHSASLARSSHESPHYYHGSSEVINDTYHNQQVGGSGSYVQPAGFEESPSHHYNHSSAYGADSFYQMQQNLPPIQSLRRRANSPVHTASPYDSPHLPISNGTINTNFVRNTGDVSPRIPGLPGYDRMPNTWTPPNGSIPYRVVGHDVHAASMENTSAFGPRSNPTAAQYVQHFIAPESIQHQPGAPLREVHPERSYPEPMPSSYVDGKVAVSALPLTDQLSRLDTNTIKKPEGPDDVNSTQNVNETTPLHAVDEPSTLPHHVVVVHEVDTKQGKPTEHESRQKQHEAGATALQECGDISEDRLNFLPELIASVKKAALEDAAETRIAQSDANGAVSPVPDDDDDNEKKLDAAAAGTTDANQDPDLQGSIDRQKSSKIESTTAEAEALSKGLQTIKNDDLEEIRELGSGTYGAVYHGKWRGCDVAVKRIKASCFVGRPSERERLIADFWKEALILSSLHHPNVVSFYGVVRDGPDGSLATVTEFMINGSLKQFLRKKDRTIDRRKRVILAMDAAFGMEYLHGKNIVHFDLKCENLLVNMRDPQRPICKIGDLGLSKVKQHTLVSGGVRGTLPWMAPELLSGKSNMVSDKIDVYSFGIVMWELLTGEEPYSGMRAAEIIGGIVNDSLRPQIPSWCDPEWKGLMESCWSSDPAERPSFTDISQRLRKMAAAMNVNIAVDDPTPSDNLTSADFMGENLCHGDSKACLMFSFNPGVNRLPFAFRRKQRGCIESRTLAR

SEQ ID NO: 43166 - protein, 69 aa, Zea mays
  Coding DNA Sequence Number=SeqID_1387
MAAEGETVALEFIPIAERCLQYLGKLKKKAVKEGAPFLLIFALTLITGGQEDCMPLGIMVYGYEKHLNN

SEQ ID NO: 43167 - protein, 140 aa, Zea mays
  Coding DNA Sequence Number=SeqID_1388
  Subcellular localization annotation: CTP_CleavageSite=84; ConfidenceScore=5.52e-01
MNDGFVSSRRWGHSPATSPQPPLQPVGAGWRSRSAVASPEQIRHCVSPPISPLHRSTTPGARSRRALRQLSRCYGGPCFDEAPRASAAAIAVWALPTDLAARSRSRRALRLLSRCYGGHCFDEGPRGAAAAMRSGRSPPI

SEQ ID NO: 43168 - protein, 1004 aa, Zea mays
  Coding DNA Sequence Number=SeqID_1389
  Homolog annotation: Hit_ID=Q2RB06; Match level="QueryCoverage=33%, HitCoverage=40%, E-value=2e-32, Identity=34%"; Hit description =Expressed protein
  Subcellular localization annotation: CTP_CleavageSite=47; ConfidenceScore=5.13e-01
MASGALGDVRKYTALSLQQQANFTAVVRSHHVVKKRHLLLLTTQFIGLKRKSCTSLVFLYLEYSGLFGSTSFRDVLDYLSTPKYMLGSLLPRQIPPGIRDLGPDVDCPKRSCSCAQVTNRPTLCKNRSMAAIDFSEQSCTVLKAALYGPSSWVVVVNCRDLRVRRQGRIQLKAGGEEPKMGLDATNALLHIKSALRSSARLACQSASEYPVALGVGTLLLFLHRLCPALLALLLSSSPVFLLTALLLGALLSYGEPGDGAPATGDGEGPSPPDAVAVAVAVAVAVSTPSVAESCPAVAVEVQRVAAVAHMPRSSSASPVVRAEETTSGTTFFHEAHRDEGSIVASVSADDALRRAEVVVVEREEQPATKEICENVQLRQFRSSAGEGVPIEVDSKASGAVSLDARWVAMESSSFHRDNGAIAEGEGEEDEHVKEICQQAESAVAGRCGGYGVCSQYQFGELMSSCWQPVTRQDPCSESESDSSESSSDASISDIIPMLDELNPPVDLGAGHPSSAFREKLSAGSSDDEDGSEEDNNLSSDEDGEEEEEEEEKGDGNNWKGSVDPNSLEAEEKNGSSESLMARRRAKNALVFDLDRRLMDLQAADAVSKMEAASRFRVQVPSISTPRRPGPSDDPAEGDTVELPQIPGSAPPSVLLPRRKPSDDAPFDDQIVDRDRRLQETWTPPRSGFPSSAQGSRTPDTGSLFVRPSSSPRHGSGVVEVEAEEPGLSGAKDAADDHSESESGSEEEPPLPLGSNGRLFGSLEPRIGDEIRILGAAVSDVCVLELEANLGRSNGGSAGSIDAADSSHVQKPVSSSGSDDADDSASADAGNARSVVLRPLSEEEEEDGGAEEHVVVDEEGEEGSMSEATSLFKCRMEQVLVQSVSEAGVGQPLAVGPGRERLSLSDALLPPATPLVVTGEARPSAKELLSSRLAQVDGEEALAPVMPAAAGSPESELMCAVGCGVLGRDAEPASEDDANDPTTTTHVPSSIGGRGGGDIAGDGQV

SEQ ID NO: 43169 - protein, 357 aa, Zea mays
  Coding DNA Sequence Number=SeqID_1390
  Pfam annotation: Domain name=VQ; Domain location=251-281; Score=21.8; E_value=0.00019; Accession=PF05678.4; Description=VQ motif
MEKWRNPGAAQVRRTLGRRRLWRNGGGPRNPREAPQVSVMEKWLATGSVRGHRENRRREMDPGVVTDGMKESGKWTVASDDRAHADPNTATVFSSYGPTQVGMQGAAVKNSKCMRCSTLYQSSHAKRKVGVAFKIASSLVASAHRTACVQSIVLAPALNDTFRMRMAAAATYMHRDSTHPSPSSRSIISSPPWRPDVPFPTHQLHQAAAGLYDPDLAATPLPPAPPRNNHHHLRPGAARRPSSRRRPRPSRRLPTTYINADPASFRRMVHQATGAAEDLPPPLAPPHEATLCRPAPSRAATLDTSALLLGGGSAPRTLEVDLGTGGGVGVGVGLGLGFGGCFPTLESWDALSCTSHR

SEQ ID NO: 43170 - protein, 379 aa, Zea mays
  Coding DNA Sequence Number=SeqID_1391
  Gene Ontology: Mol. function=catalytic activity; Cellular component =integral to membrane; Biological process=response to nematode
  Homolog annotation: Hit_ID=Q2QXJ5; Match level="QueryCoverage=81%, HitCoverage=99%, E-value=1e-128, Identity=73%"; Hit description =Transporter, putative, expressed
  Pfam annotation: Domain name=TPT; Domain location=203-346; Score =147.8; E_value=2.9e-41; Accession=PF03151.7; Description=Triose -phosphate Transporter family
MTALLLPNLILMLALLGELGWLHHTALIIFMISHLAPCSSSFGFPDPTPPVSLGECNPASVELKAAQVEMSTLKKSDKKAALDFAAWSFNVTTSVGLIMVNKALMATYGFSFGLSQPSHLPLADLVKFVIFSNLSIVGMNVSLMWNSVGFYQIAKLCMIPASCLLEVVFDHVHYSRDTKLSIMVVLIGVAVCTVTDVSVNARGLIAAVIAVWSTALQQYYVHFLQRKYSLNSFNLLGHTAPAQAGSLLLVGPFADYLLTGKRVDQFSLSSLALFFLALSCFIAIGVNLSQFICIGRFSAVSFQVLGHMKTVLVLSLGFLFFGKEGLNLQVVLGMVLAVLGMIWYGNASAKPGGKERRSILPVRSASLKGSSEEKAGAEK

SEQ ID NO: 43171 - protein, 94 aa, Zea mays
  Coding DNA Sequence Number=SeqID_1392
MADSVEMRVVATGSRLRRRQARRVCRNQPEMDDRTDDRGPHHSGPRGKPRVDTVQGQCCGSAGRGGPRGGFGKYVGQQGEGKKWAVGREIQSKT

SEQ ID NO: 43172 - protein, 251 aa, Zea mays
  Coding DNA Sequence Number=SeqID_1393
MELRLRRRRGVHAPDPSVEWGQIPRGVPHGDKFPDGYEDGRKSSPSSKGLQLQLHNFLEHLMISSTNSTKNSGAQVVPNKVHKPQHKPRKKFSCGHNQNWEQDIKVCCQVAHRTVSGAPSPRPNEQATLGKSMGTLRYNSPDCPVCTGLSDHAKSDIVTGDKPTGSRKTPSRESDNKNKEESSSSIKSHQRGDKKKEKMKRVVYYETDSSTPSTSGTESSTTSKRHECKKYSRCPYAIPVFPSTLLYFPFP

SEQ ID NO: 43173 - protein, 91 aa, Zea mays
  Coding DNA Sequence Number=SeqID_1394
  Homolog annotation: Hit_ID=Q9LV14; Match level="QueryCoverage=94%, HitCoverage=16%, E-value=8e-21, Identity=58%"; Hit description =Arabidopsis thaliana genomic DNA, chromosome 5, P1 clone:MRG21
MKTTKGGKAMNPTDAFRKEQRKKELKRNKKERKKVREVGILKKDPDAIREQIEKLEKMKADGALDKARKHKKRQLEDTYNLIVKKRKCHGN

SEQ ID NO: 43174 - protein, 196 aa, Zea mays
  Coding DNA Sequence Number=SeqID_1395
  Gene Ontology: Mol. function=transcription factor binding; Cellular component=intracellular; Biological process=regulation of transcription, DNA-dependent
  Homolog annotation: Hit_ID=Q6ZKZ4; Match level="QueryCoverage=91%, HitCoverage=94%, E-value=5e-73, Identity=72%"; Hit description =Putative ras-related protein
  Pfam annotation: Domain name=Arf; Domain location=1-154; Score=-92.1; E_value=0.012; Accession=PF00025.11; Description=ADP-ribosylation factor family
  Pfam annotation: Domain name=MMR_HSR1; Domain location=16-109; Score=- 12.6; E_value=0.014; Accession=PF01926.13; Description=GTPase of unknown function
  Pfam annotation: Domain name=Miro; Domain location=17-109; Score =31.9; E_value=2.2e-06; Accession=PF08477.3; Description=Miro-like protein
  Pfam annotation: Domain name=Ras; Domain location=17-156; Score =267.1; E_value=3.6e-77; Accession=PF00071.12; Description=Ras family
  Pfam module annotation: Pfam domain module=Arf::MMR_HSR1::Miro::Ras; Domain location=1-154::16-109::17-109::17-156
MAAPPSRSRGDYDHLIKLLLIGDSGVGKSCLLLRFSDDTFTTSFITTIGIDFKVRTVELDGKRVKLQIWDTAGQERFRTITTDIRNWIRNIEQHASDNVNKILVGNKVDMDAKRVVSTAQGQKLADEYGIKFFETSAKTNRNVEQVFFAMARDVKQRLTETVAAAAEPPTIQISRPDPDQADAASSRRWSSSCCNT

SEQ ID NO: 43175 - protein, 119 aa, Zea mays
  Coding DNA Sequence Number=SeqID_1396
  Gene Ontology: Mol. function=DNA binding
  Homolog annotation: Hit_ID=Q9LGH0; Match level="QueryCoverage=85%, HitCoverage=29%, E-value=3e-15, Identity=42%"; Hit description=NAM -like protein-like
MGEGEGADGWGRAASERDVDLSEADVPQRPMGKKKSKDALRRGGIDACKEALNILWAKKIEDDAEKEMKRKEGLHLEKEKIAPEREKVSNEANTSYLKRIAEEETIMTIDLKSLNGMQQ

SEQ ID NO: 43176 - protein, 40 aa, Zea mays
  Coding DNA Sequence Number=SeqID_1397
MAQRDVLLSIVRLIQANNSDKLDSGDTSMGDKGVGGQFFN

SEQ ID NO: 43177 - protein, 230 aa, Zea mays
  Coding DNA Sequence Number=SeqID_1398
  Gene Ontology: Mol. function=transmembrane receptor activity; Cellular component=membrane; Biological process=regulation of transcription, DNA-dependent
  Homolog annotation: Hit_ID=Q7XIJ6; Match level="QueryCoverage=60%, HitCoverage=70%, E-value=3e-45, Identity=66%"; Hit description=TIR/P- loop/LRR disease resistance protein-like protein
  Pfam annotation: Domain name=TIR; Domain location=70-192; Score=39.7; E_value=9.4e-09; Accession=PF01582.10; Description=TIR domain
  Subcellular localization annotation: CTP_CleavageSite=15; ConfidenceScore=5.12e-01
MSSSGSKAAARLNASADAATGSSNASAAAVLVAQSEESSSYAGADELEEAEVSGSSGCARSPPPPPPYDVFINHRGADTRHTVARLLHDRLLQASGGRVRTFLDSVSMRPGDRLVERINQGMGQCKVAVAIFSERYLDSEFCLHELAALVEARKAIVPIFYGVKPSALVLPQAVVDAHAPRDVERLRAALRQAKYTVGLAYDPATGDLAELVSAAAKTVMERIEQIDSMR

SEQ ID NO: 43178 - protein, 74 aa, Zea mays
  Coding DNA Sequence Number=SeqID_1399
MADDAKGKGKVTNEKETLNNEPKGEKSVDSGFGKKVGKKKKCIKKIVYYDNDTSSSSPKDNDSDYENYNDTHMQ

SEQ ID NO: 43179 - protein, 619 aa, Zea mays
  Coding DNA Sequence Number=SeqID_1400
  Gene Ontology: Mol. function=aminoacyl-tRNA ligase activity
  Homolog annotation: Hit_ID=Q84T06; Match level="QueryCoverage=98%, HitCoverage=81%, E-value=1e-139, Identity=50%"; Hit description =Unknow protein
VFRPLLNITGDFTAEELEVALITPNEILDDVHMPLLKSIPPVTRMAMGRGTWVTVLCRKLKDWWHWVAEGDLPIVASHGTEIETYKTIEPAIRLLILKAICDIRVEQEDIRNFIDSSLKHGQNFSTFRKDRIGGDSLGISYWYEDDEILGHRLYREIRRVEQVKKEPGKRSRGKGGSSAISVVSYQWETVASTFDEFDDVAEKLFSSRNRTEVSLGKKLKIEYLPEIEKIHKKKERLLKKQQREALLLDSYLTSDGLTTGRSLRDRKPVTYTFGLNLSYNADDYDRSINEAIKITKKREENSAEPVATTANRRVLPPRAEAASNGKLNNGPSPTTNDSDDGNSSKSDDDRDSDGEQENEALDRSNRRRKRSQRYTQDFVEAVSDIDPNFDSDDDIMGEAVYDEEYLRSRKQNKTSSASEEDEEFRLEEDGEDDDEEEEYSLSTSEDLEEPQRHKKLETRGRRGTKLRSVDEIQTGLRRSKRSSRPRINYHQYDFSDSDTGPGKAKKSDASDSEAGSDAENDMELSTSSQEGEEEEDDSHDEENGNNVNDKMDEDHTVAENKVEPEEEEQKEQPPIEKMDAPSTESRRVGRTFLDLNELAPGGGFDESPSLTVKDDIDNI

SEQ ID NO: 43180 - protein, 102 aa, Zea mays
  Coding DNA Sequence Number=SeqID_1401
MGGSGGGEKGKNGIPRRRGERRGAGWEKATRGGRGVKPSTNVRRWSRAGSRSRLSWLACPSDTILFFKSLNNSAMAKFESSVPKKTEEKEYSSPFSPACLLA

SEQ ID NO: 43181 - protein, 170 aa, Zea mays
  Coding DNA Sequence Number=SeqID_1402
AKSRTHARQRDITQITQPANAAREERETGGGSRTESWQPALLLAAVPDVETSLDGSSSDDAAASRRGLLRLLEPPPERAAAVTTDEARRWWYGGRQNSAATDEAGSMRRLRGGELGQIGRWLEARGSGGVGAESEAQRSEKTGGRDPMRCVQLPLASRDRENNNLKFWWA

SEQ ID NO: 43182 - protein, 295 aa, Zea mays
  Coding DNA Sequence Number=SeqID_1403
  Gene Ontology: Mol. function=oxidoreductase activity, acting on paired donors, with incorporation or reduction of molecular oxygen, 2-oxoglutarate as one donor, and incorporation of one atom each of oxygen into both ...
  Gene Ontology: Mol. function=donors; Cellular component=cytoplasm; Biological process=protein metabolic process
  Homolog annotation: Hit_ID=Q84T01; Match level="QueryCoverage=81%, HitCoverage=71%, E-value=1e-100, Identity=73%"; Hit description =Putative oxidoreductase
  Pfam annotation: Domain name=2OG-FeII_Oxy; Domain location=148-270; Score=59.0; E_value=1.6e-14; Accession=PF03171.10; Description=2OG -Fe(II) oxygenase superfamily
MRLRGVLRLVLALLLAATAIVPVLLLSENGGGGVAPAPPFNSSRVKAVSWHPRIFVYKGFLSDAECDHLVTLAKKKIQRSMVADNESGKSVKSEVRTSSGMFLDKRQSVADSNVVFLSSCSARSVAQDPVVSRIEERIAAWTFLPQENAENMQVLRYEPGQKYEPHFDYFHDRVNQARGGHRYATVLMYLSTVREGGETVFPNAKGWESQPKDATFSECAHKGLAVKPVKGDAVLFFSLHADGTPDPLSLHGSCPVIRGEKWSAPKWIHVRSYEDEPQAVLVLPEETDGARYSDN

SEQ ID NO: 43183 - protein, 145 aa, Zea mays
  Coding DNA Sequence Number=SeqID_1404
MHDILKRQRSSYVTELAESSSTYAGQRQLCCSSLPSGDGGPRPSFSYEAPRSTINAYRRHAQASPQDRSRDEGEDLLREADRVGPHVSICPTRELPTLDLEAGAVEAGKRSAVQAASGKEPVQAAQRLCLPRADGCKTHGRVSDA

SEQ ID NO: 43184 - protein, 147 aa, Zea mays
  Coding DNA Sequence Number=SeqID_1405
MVWSSGGNCASPEAGLSLETNSVSPKPSLVYMSPVNPAGGHSFNSNLHNYQPQIGLGNGLGKTFALPEHGFGLDVANKRMPDVTRSRRADLCIGSTNIQLRVDRKVEYFKILLPSSMWYGNEWFYIKNVAGYAPPFTGREPVLTKKW

SEQ ID NO: 43185 - protein, 721 aa, Zea mays
  Coding DNA Sequence Number=SeqID_1406
  Gene Ontology: Mol. function=protein serine/threonine kinase activity; Cellular component=membrane; Biological process=protein amino acid phosphorylation
  Homolog annotation: Hit_ID=Q5JN60; Match level="QueryCoverage=66%, HitCoverage=66%, E-value=1e-172, Identity=66%"; Hit description =Putative receptor protein kinase PERK1
  Pfam annotation: Domain name=APH; Domain location=302-483; Score= -14.1; E_value=0.058; Accession=PF01636.13; Description =Phosphotransferase enzyme family
  Pfam annotation: Domain name=Pkinase; Domain location=300-572; Score =98.0; E_value=2.8e-26; Accession=PF00069.15; Description=Protein kinase domain
  Pfam annotation: Domain name=Pkinase_Tyr; Domain location=300-572; Score=113.5; E_value=6.3e-31; Accession=PF07714.7; Description =Protein tyrosine kinase
  Pfam module annotation: Pfam domain module=APH::Pkinase::Pkinase_Tyr; Domain location=302-483::300-572::300-572
MATEVGEAAAAACRAVFSPHVAAPASDAAVAYSLRQAKSTGKRGGRLIVAQARGAARRRHVVSSANVAGYAVSTTTGSGTAHAVPAAADSGAGTAHASAGTTNSRAGAAHASADSAYPRAGAAHAYAVPSSSVSVATTAGDAVPTAASDRTDAIPTSTGISSTTDRANAITNATSISSTTGDRANANTSSTCVAVGAVVLIGLAVGLIYCFAGRKRRRRSPLPSQGFPGEFYDPRRGPMTPLHMSHVQSTTPSSTPPLMHSWQQSSHGLSESPLPPLNPSPAITGGTFAYDDLAAATDGFSDANLLGQGGFGHVYRGTVAGQEVAIKKLRAGSGQGDREFRAEVEIISRVHHKNLVSLVGYCLHGEQRLLVYEYVPNKTLEFQLHGSGRPTLDWPRRWKIAVGSAKGLAYLHEDCHPKIIHRDIKAANILLDYNYEPKVADFGLAKYQAAEVTSVSTRVMGTFGYLAPEYAATGKVNDRSDVFSFGVMLLELITGRKPIMTSSEYQPETLVSWARPLLTRAVEEENYDELIDPRLETNYDAYDMARLVACAAAAVRQTARSRPRMSQVRLLLQNVSHTLGAAVAASVTLVSPFPNGQVVRYLEGELSVEDLNAGVMPGQSAMQRSSGGTTDQINRLRRMAFGPGAGGSTGTGAITEYTSSEFSDPTTEYGLNPSSEYTASSAGDTGEVAAGAQGQQQWHGRRAPGDTERMSRRTTGRRTQS

SEQ ID NO: 43186 - protein, 928 aa, Zea mays
  Coding DNA Sequence Number=SeqID_1407
  Gene Ontology: Mol. function=cellulose synthase (UDP-forming) activity; Cellular component=membrane; Biological process=cellulose biosynthetic process
  Homolog annotation: Hit_ID=Q67BC8; Match level="QueryCoverage=94%, HitCoverage=86%, E-value=0.0, Identity=94%"; Hit description =Cellulose synthase catalytic subunit 11
  Pfam annotation: Domain name=Cellulose_synt; Domain location=112-922; Score=2072.7; E_value=0; Accession=PF03552.5; Description=Cellulose synthase
MESAAAQSCAACGDDARAACRACSYALCRACLDEDAAEGRTTCARCGGDYAAINPELNDESGKPIWKNRVESWKEKKNEKKASAKKTAAKAQPPPVEEQIMDEKDLTDAYEPLSRVIPISKNKLTPYRAVIIMRLIVLGLFFHYRITNPVNSAFGLWMTSVICEIWFGFSWILDQFPKWYPINRETYVDRLIARYGDGEESGLAPVDFFVSTVDPLKEPPLITANTVLSILAVDYPVEKISCYVSDDGSAMLTFESLAETAEYARKWVPFCKKYAIEPRAPEFYFSQKIDYLKDKIHPSFVKERRAMKRDYEEYKVRINALVAKAQKTPDEGWIMQDGTPWPGNNPRDHPGMIQVFLGETGARDFDGNELPRLVYVSREKRPGYQHHKKAGAMNALVRVSAVLTNAPYILNLDCDHYVNNSKAVREAMCFMMDPTVGRDVCYVQFPQRFDGIDRSDRYANRNVVFFDVNMKGLDGLQGPVYVGTGCCFNRQALYGYGPPSLPALPKSSICSWCCCCCPKKKVERSEREINRDSRREDLESAIFNLREIDNYDEYERSMLISQMSFEKSFGLSSVFIESTLMENGGVPESANPSTLIKEAIHVISCGYEEKTEWGKEIGWIYGSVTEDILTGFKMHCRGWRSIYCMPVRPAFKGSAPINLSDRLHQVLRWALGSVEIFFSRHCPLWYGYGGGRLKWLQRLSYINTIVYPFTSLPLVAYCCLPAICLLTGKFIIPTLSNAATIWFLGLFMSIIVTSVLELRWSGIGIEDWWRNEQFWVIGGVSAHLFAVFQGILKMIAGLDTNFTVTAKATDDTEFGELYLFKWTTVLIPPTSILVLNLVGVVAGFSAALNSGYESWGPLFGKVFFAMWVIMHLYPFLKGLMGRQNRTPTIVVLWSVLLASVFSLLWVKIDPFVGGTETVNTNNCNTIIC

SEQ ID NO: 43187 - protein, 327 aa, Zea mays
  Coding DNA Sequence Number=SeqID_1408
PVEHQLRVHWTLSGALVGSEINSLLSGIAKDAAAKIHRTVRIIYSPPLSALKWHYGTEAQFESKGIEPMVPCLSPLPKYVIIRVERNWKREDEAKTSAARRKRRLTRKKEKKVTRLARGAWEEHYPIHRHGGHDLYCVQGMDVLTLEGGPSHLRDAESDDDEGGATLVASHPPAPLVTSGCRAGKEPVSVLLPPYASSDGCTSCDASSVIANTDGLCVIEVSLWEKYGGGSLSRAFCGRAEEDNHGEALLQGILPLSAVVAVGQFGLASSSMEVIGSQVCPPPTVVASTSARVVSYVVHEGSREGLPLPLEGLEARETKVEEWQCIG

SEQ ID NO: 43188 - protein, 151 aa, Zea mays
  Coding DNA Sequence Number=SeqID_1409
  Homolog annotation: Hit_ID=Q6QP51; Match level="QueryCoverage=33%, HitCoverage=30%, E-value=1e-14, Identity=80%"; Hit description =Putative growth-regulating factor 1
MQVVCNRTTGTHPFDFDASSMEAQAHTSCNRRAGYYVRETAPPLAPMSRLLDCGTSAATRGNPAHGPIVSIEHIGHGDRERGYFERDPSPRRKRTPSPPTDQGFEGWPPGRVRQPPQSTRASGSLLIRGSKAGPSEGFDSRLRALGLRAHY

SEQ ID NO: 43189 - protein, 88 aa, Zea mays
  Coding DNA Sequence Number=SeqID_1410
MLIEALKEIKMRVTIVLGDGDVPVDKVTEGYVEVEGVGLTTADGVLLNGNLGLTSNVRGLVDDVLQLDDDGAKDLGKDDVVHPAPRRL

SEQ ID NO: 43190 - protein, 132 aa, Zea mays
  Coding DNA Sequence Number=SeqID_1411
MGTDVVEACVAAIEDDTLASPVANAGTAGLGATSFPVLPLYLPSSVLLWCDGALPSAAVGHYPLDDVVAASVAAKFVVAIAWEHERATSLALEQECATTDVLAHQLAEADQKLEGVVVSDSFPEFNDIEVFY

SEQ ID NO: 43191 - protein, 552 aa, Zea mays
  Coding DNA Sequence Number=SeqID_1412
  Homolog annotation: Hit_ID=Q33B99; Match level="QueryCoverage=75%, HitCoverage=63%, E-value=8e-29, Identity=27%"; Hit description =Expressed protein
  Pfam annotation: Domain name=DUF639; Domain location=87-547; Score =237.8; E_value=2.3e-68; Accession=PF04842.3; Description=Plant protein of unknown function (DUF639)
MLQLQPPGFLPIPRRRVTARGRRARPVIAFNSQWKIPDVDTDAVRERVRSWMSLARGAIADAGRAAREGGRHKEEPEGGKKKQRKEVTVEEQAFVAVPEVTVEPRVPQGWLSLDAVVSIEQFARLNGLTGRQVQRIFESLAPEHLHNDARSLVEYSCFRYLAKDNSDFHPNLKGRLVGEDAFARIAPAVAGVADVSTAHYLFRALVGAEKGLSFDLWTTYLAELLNKKRPVLKWEENTAWPGNLTLTDKALYFEAIGLSGTKKPMRLDLTNQNSRAEKTKVGPFGSKLFDSAVSVSSGSMSDEWTLEFVDFSGEMRRDVWLAFISEIISVYRFIREYGPGGDDPAIHNVYGAYKGKKRAVSSAANSIARLQSLQFIRRLYEDPAKLVQFSYLSNAPFGDVVLQTLAVNFWGGPLTTKARSANHRSTQWHRSSEDPSSGRTHVYDIDGSVYLRKWMTSPSWTSSHSANFWRNSSVKYGIILSKSLVVADKNLVEKAMVDCKEKSKVVERTQATIVAATIEGIPSNIDLFKVSYFSMSYFFLSHPEKSNIDPLY

SEQ ID NO: 43192 - protein, 36 aa, Zea mays
  Coding DNA Sequence Number=SeqID_1413
MAVIDSTSKKMYLYQVKRSWERVVRGALDKDNCRWA

SEQ ID NO: 43193 - protein, 134 aa, Zea mays
  Coding DNA Sequence Number=SeqID_1414
  Homolog annotation: Hit_ID=Q5JMK6; Match level="QueryCoverage=22%, HitCoverage=11%, E-value=2e-07, Identity=96%"; Hit description =Putative transcription activator RF2a
  Pfam annotation: Domain name=bZIP_1; Domain location=59-128; Score =9.0; E_value=0.016; Accession=PF00170.11; Description=bZIP transcription factor
MNAVVTSHLPVCLYSAAVAEFGALCPLPQIQPVFCTEFWWPLATDQLFHESCKRNFDRSALRGTATRILVNRQSAQRSRVRKLQYISELERSVTTLLSCSKDAYDVWEPTQINTSKEKLERGKRANKSSENQSE

SEQ ID NO: 43194 - protein, 82 aa, Zea mays
  Coding DNA Sequence Number=SeqID_1415
MDNDYVELDVLNLETTNGTKDKDKRNFEGLSAQEKVKKTEESPPKSSIQKEKDWRRKGLKKGCLGTLDSLQGRSGGARDPLQ

SEQ ID NO: 43195 - protein, 58 aa, Zea mays
  Coding DNA Sequence Number=SeqID_1416
MVKRVVFLKQLKSGLLLRLGVIATQGILKHEVEYEIREVEAYVFLLPAGVFVAIMPKL

SEQ ID NO: 43196 - protein, 133 aa, Zea mays
  Coding DNA Sequence Number=SeqID_1417
  Homolog annotation: Hit_ID=Q7XBD3; Match level="QueryCoverage=99%, HitCoverage=26%, E-value=2e-61, Identity=85%"; Hit description=Zeon1 gag protein
MPPKKASATGAAALQPLDPNQETLSLREARSQKKKATSPTPQEDDLDQEIRNMEMLHQQVQRKKEKMARLADLQRQIDEASEEVRHLMQDEQNQRPQYKELHQEGFVNEDDWYEDFHHGNFAFDDASPLSVEL

SEQ ID NO: 43197 - protein, 103 aa, Zea mays
  Coding DNA Sequence Number=SeqID_1418
MKIRALEISKERRKDLRHCGSGCARVNWRKDRPRDHRDTIFPFLDTVEHEFSALRGQPSPADAGHGQSEQQGGRRRARRCQGSFLEKKHKTEDLSVNVRETRE

SEQ ID NO: 43198 - protein, 199 aa, Zea mays
  Coding DNA Sequence Number=SeqID_1419
MVQCGRVAPDDGMSTLIGVELQKKIQSQGVVAEAAVQDRAYSIQGPCKTVFYFIASLLECPNVLAICEGIERIIGIETIEGEARAEVGSDMNRPGTEMVIIVAIGLTVLVLIMTGNVTDTVALLYLKAPVIAEVVLLVGHLMKEYLASPEMAALHVLEALDPELWLNITQLLLDSLRHLSSSHHLYFLTKMAFVLVQVE

SEQ ID NO: 43199 - protein, 73 aa, Zea mays
  Coding DNA Sequence Number=SeqID_1420
  Subcellular localization annotation: CTP_CleavageSite=47; ConfidenceScore=5.20e-01
MEEVLNFAAVTMDASRTSCRSLPTSSVTPAALKAYMWEVLASGTVTMAAVKTSRRSSPRNSDATHLWRQQDCK

SEQ ID NO: 43200 - protein, 77 aa, Zea mays
  Coding DNA Sequence Number=SeqID_1421
MGLGVCGLLYRGWIAPLGRSAMMMRIMLVSIVIMIMVMVSGILSVWKWLPLVQCSGKEEEGVEADLQEFQDFDEFKD

SEQ ID NO: 43201 - protein, 159 aa, Zea mays
  Coding DNA Sequence Number=SeqID_1422
MPNRAKALAVGIASPPPLHFNQSYAPEYKRRQGREREEGRGAQFPSSSQSYAQGEVMRVLSRAGGKLESGWCPCQWQLLAGGVKLRQATFRRGPARPSLNPLVRHPLRNPCFDSISRTTVGMLSLEQANLVARGWGSPLWGGPLCPWCLGEEETVWAVG

SEQ ID NO: 43202 - protein, 554 aa, Zea mays
  Coding DNA Sequence Number=SeqID_1423
  Gene Ontology: Mol. function=protein binding
  Homolog annotation: Hit_ID=Q6K649; Match level="QueryCoverage=65%, HitCoverage=95%, E-value=1e-178, Identity=81%"; Hit description =Kelch repeat-containing F-box protein-like
  Pfam annotation: Domain name=F-box; Domain location=216-263; Score =21.8; E_value=0.0025; Accession=PF00646.23; Description=F-box domain
  Pfam annotation: Domain name=Kelch_1; Domain location=305-354; Score =44.9; E_value=2.7e-10; Accession=PF01344.15; Description=Kelch motif
  Pfam annotation: Domain name=Kelch_1; Domain location=356-402; Score =60.2; E_value=6.8e-15; Accession=PF01344.15; Description=Kelch motif
  Pfam annotation: Domain name=Kelch_1; Domain location=404-451; Score =35.3; E_value=2.2e-07; Accession=PF01344.15; Description=Kelch motif
  Pfam annotation: Domain name=Kelch_2; Domain location=305-354; Score =18.9; E_value=0.018; Accession=PF07646.5; Description=Kelch motif
  Pfam annotation: Domain name=Kelch_2; Domain location=356-402; Score =33.3; E_value=8.2e-07; Accession=PF07646.5; Description=Kelch motif
  Pfam annotation: Domain name=Kelch_2; Domain location=404-451; Score =17.8; E_value=0.041; Accession=PF07646.5; Description=Kelch motif
  Pfam module annotation: Pfam domain module=F-box::Kelch_1::Kelch _1::Kelch_1::Kelch_2::Kelch_2::Kelch_2; Domain location=216-263::305 -354::356-402::404-451::305-354::356-402::404-451
MAPPVDVVGPRPRLGDVEAPPRSRSSLSSVAEVESEPLGRARRRPSAEARAKSEPWVRRSGVRRLPGLSPSPSPGSGGADSRSGAGGAVLLSGRSVEWRSDCGHFGSVDWRTRVRIKLCADGGYQLRIRSLEGAKVFFGSFAGDQQHQILGPCVRAEAVPTASIRGVLLVLPGRSIPQPLKDLIILARARMQLKPPARPKLYSGLMPQEDLDPYRDLIPGLPEDLAKICLALVPRAHFPAMGAVSKRWMSFLESKELVAVRKEVGKLEEWVYVLVPDAGAKGSHWEILECSGQKQSPLPRMPGLTKAGFGVVVIGGKLFVIAGYAADHGKDCASDEVYQYDSCLNRWTVLAKMNVARCDFACAEVNGVIYVAGGFGPNGESLSSVEVYDPEQNKWTLIEGLRRPRWGCFGCSFEGKLYVMGGRSSFTIGNSRSVDVYNPNSHAWGQVKNGCVMVTAHAVLGKRLFCIEWKNQRSLAIFNPADDSWQKVPVPLTGSSSTRFSLVVHEDKLLLFPLEEEPGYQTLMYDPAAPMGSEWCTSKLKPTGSCLCSVTIKA

SEQ ID NO: 43203 - protein, 36 aa, Zea mays
  Coding DNA Sequence Number=SeqID_1424
FAIVPNEKGVQQIQLNHHPKDYILKHNLTISYTFTH

SEQ ID NO: 43204 - protein, 420 aa, Zea mays
  Coding DNA Sequence Number=SeqID_1425
MQELYNSLTASNELVRVLANVLGPAGALNPTAASVLAALRSELDAARQLVKQQRRRGVDGEERLLRRQLAEEVRAWKCRHREKAAAAARLVASELDGERRARRRAERVGTKLAEALAGAEASLRAATRELGLERAARARLEKVCDELASRDVGGGTEAEAEDDDGLRREAAATALEELEREREMLQVADELREERVRMKLAEARLHFEEKNAAVDRLRQELEAFLGNERREQTPAHHEMAKEEEEEDHQLQIVLASEFGVHGIDPLVTEKSGQEENAEAGDDDDDSEGSDIELNMDGNSWSYTTTSRSRDTTAKNATSAHGSLSDRATECGADAGAFDRRSEATRDAPEQDWAADGCSDGGTTGRDEDEDAERYEAIKNLREQMLTGHAFLFLSKGEADDDSDRRRRGFASHFEEDGDLW

SEQ ID NO: 43205 - protein, 289 aa, Zea mays
  Coding DNA Sequence Number=SeqID_1426
  Gene Ontology: Mol. function=3-oxoacyl-[acyl-carrier-protein] reductase activity; Cellular component=chloroplast; Biological process=fatty acid biosynthetic process
  Homolog annotation: Hit_ID=P28643; Match level="QueryCoverage=80%, HitCoverage=75%, E-value=2e-75, Identity=62%"; Hit description=3 -oxoacyl-[acyl-carrier-protein] reductase, chloroplast precursor
  Pfam annotation: Domain name=AdoHcyase_NAD; Domain location=45-198; Score=-36.0; E_value=0.056; Accession=PF00670.12; Description=S -adenosyl-L-homocysteine hydrolase, NAD binding domain
  Pfam annotation: Domain name=KR; Domain location=70-244; Score=21.8; E_value=1.3e-08; Accession=PF08659.1; Description=KR domain
  Pfam annotation: Domain name=adh_short; Domain location=70-227; Score= 142.5; E_value=1.2e-39; Accession=PF00106.15; Description=short chain dehydrogenase
  Pfam module annotation: Pfam domain module=AdoHcyase_NAD::KR::adh _short; Domain location=45-198::70-244::70-227
  Subcellular localization annotation: CTP_CleavageSite=57; ConfidenceScore=5.61e-01
MAAATAAAAALASPAGLSTSLARRGLVSFAPALRPGPDRSSRAVALLGVRTHVTAVDQAIVKGDTKLEGPVVVVTGASRGIGKATALALGKAGCKVLVNYARSSKEAEEVSKEIEASGGQAITFGGDVSKEADVESMIKVAVDTWGTIDVLVNNAGITRDTLLMRMKKSQWQDVIDLNLTGVFLCTQGRIINIASVVGLTGNAGQANYAAAKAGVIGFTKTVAREYASRNINANVIAPGFIASDMTAELGEELEKKILSTIPLALRKARFESETSVEVGDGKRLAQRYL

SEQ ID NO: 43206 - protein, 247 aa, Zea mays
  Coding DNA Sequence Number=SeqID_1427
  Gene Ontology: Mol. function=prolyl aminopeptidase activity; Cellular component=intracellular; Biological process=protein metabolic process
  Homolog annotation: Hit_ID=Q6K669; Match level="QueryCoverage=99%, HitCoverage=44%, E-value=1e-87, Identity=64%"; Hit description =Leucine aminopeptidase 2, chloroplast precursor
  Pfam annotation: Domain name=Peptidase_M17; Domain location=1-239; Score=335.3; E_value=1e-97; Accession=PF00883.11; Description =Cytosol aminopeptidase family, catalytic domain
MGSYLAVAAASETNPPYFIHLCYKPRGGDVRRKLALVGKGITFDSGGYNIKAVPVATIELMKKDMGGAAAVFGAAEVLGQIKPPGVEVHFISAASENMISGSGMRPGDIVTASNGKTIEIIDLATLTGAIRVALGPSIAGILTPSDELAEEFAAAYEVSGEKFWRLPMEESYWESMESSIADMLCAGPLQPQAGAITAALFLKHFVDDKVQWMHIDIAGTVWSNKKRAGTGFGVTTLVEWVLSNSSS

SEQ ID NO: 43207 - protein, 74 aa, Zea mays
  Coding DNA Sequence Number=SeqID_1428
  Homolog annotation: Hit_ID=UPI00004C1732; Match level="QueryCoverage =98%, HitCoverage=8%, E-value=3e-23, Identity=52%"; Hit description =UPI00004C1732 related cluster
MPSIPRDVAEQSLDIRAGARPVKQPLRRFDEEKRRAIGEEIHKLMAAGSSKRYSIPNGATYQRCMNHVFGEHIG

SEQ ID NO: 43208 - protein, 204 aa, Zea mays
  Coding DNA Sequence Number=SeqID_1429
  Gene Ontology: Mol. function=nucleic acid binding; Cellular component= intracellular
  Homolog annotation: Hit_ID=Q6K653; Match level="QueryCoverage=63%, HitCoverage=31%, E-value=5e-23, Identity=51%"; Hit description =Ubiquitin-associated (UBA)/TS-N domain-containing protein-like
NSTIECAINWLSEHQEDADIDEMPLVPANSKTEVNKPSLTPEEMKIKAQELRERARKKKEEEERRMEREREKERVRIGKELLEAKRIEEQNERKRMIELRRLEKEEEKRAREKIRQKLEEDKAERRRKLGLPPEDPAAAKPSAPPPVEEKKISCHIDCTDVVTIDNDCRRNRDVKLFKQLSQPTTLCNCMCNNLILDHYTRMGL

SEQ ID NO: 43209 - protein, 112 aa, Zea mays
  Coding DNA Sequence Number=SeqID_1430
  Gene Ontology: Mol. function=DNA binding; Cellular component =mitochondrion; Biological process=DNA integration
  Homolog annotation: Hit_ID=Q2R2I1; Match level="QueryCoverage=97%, HitCoverage=9%, E-value=6e-31, Identity=60%"; Hit description =Retrotransposon protein, putative, unclassified
  Pfam annotation: Domain name=RVT_2; Domain location=22-112; Score= -167.4; E_value=0.0007; Accession=PF07727.4; Description=Reverse transcriptase (RNA-dependent
MSTSPLLGNYRSALADPNWCAAMANEYQALSTTTLGDSYLDTHTSTPGANIMAGKRIFKHKIHSNGSLVHHKARWVLQGFNQQHDVYYDETFSPVVKPATIRVVLSIAPSQK

SEQ ID NO: 43210 - protein, 201 aa, Zea mays
  Coding DNA Sequence Number=SeqID_1431
MEELVQELVADRRRGPPVEQPLRNSPHSRARPLILFRRHAGPPRQPLHRVCSSLPFSGPWARPVGLVPFPKSAATKSPPPSAQQPPMNTGSAFLVPIKTKCRASPFQPLRAAIAIPLTSTREPRTEANPHPVDHAASDSPLCSRSGLRVWSGSFASTRREFPRHRHRVGGRSTPANCSPEPLRRRDSAPHRGQSSGRHDSR

SEQ ID NO: 43211 - protein, 174 aa, Zea mays
  Coding DNA Sequence Number=SeqID_1432
MGKSKKGSGSSHHSGDKRKREPTPPSEDFGDSEYSEEEFSSGSEGSPAPVSLPTSSDDSDDSQGIATEVWTYIRVVERAGLEGSDESEYSSDEENSSDSSEEGSGGDGGDDGDDGGDGNGGGDSGRGGDNDSKGGDGGGSKGSNKHFGGCGRVIRNPIAALGMTTELWWAVLVF

SEQ ID NO: 43212 - protein, 56 aa, Zea mays
  Coding DNA Sequence Number=SeqID_1433
MTEIRQRQWRRFGVDGEWGGSGGRTSGANRVGTGERSSLLAPPMPDLMRNGRFYGR

SEQ ID NO: 43213 - protein, 34 aa, Zea mays
  Coding DNA Sequence Number=SeqID_1434
MGCCLDKTGFIKENWLYAAEFDIVSWLNGSSCCK

SEQ ID NO: 43214 - protein, 362 aa, Zea mays
  Coding DNA Sequence Number=SeqID_1435
  Homolog annotation: Hit_ID=Q2R127; Match level="QueryCoverage=55%, HitCoverage=66%, E-value=7e-56, Identity=57%"; Hit description=Plant viral-response family protein, expressed
  Pfam annotation: Domain name=DUF716; Domain location=272-362; Score =88.6; E_value=1.9e-23; Accession=PF04819.3; Description=Family of unknown function (DUF716)
MSRAFDDYYIENCGVILAPEVTQRRIDNSDQFVIIATVRVAFVPAEAAGLPPFGYRTTKQEGSDPGSPSAVSSFRASNCASGVALAGAAAATRASAQRDLPPSAHRRRLAGRPRQRSATIGHKQERPRRAPQAASSSSSSSPPRPRARRKKSTRIHPREEMGSFKGHVLPGTLFLAVGLWRVWSSAARHAADPSSFRVRAWSPAPAPGPARLLELYVVAGGALADMCVEVLYSTHLRIFAGGEVNPAHLNDLEHGGMLLMFFLFGALALASQLWPRHFPLTDGALCLVAATAFTAELVLFYFHSTTHMGLEGYYHYLLVLLVGLCVAAAVLGALLPDSFPADLASGVLVALQGLWFYQTALA

SEQ ID NO: 43215 - protein, 105 aa, Zea mays
  Coding DNA Sequence Number=SeqID_1436
MPVETALSRRRCASSGTSSTLLLVERESRAHGDGHVVGGEAEITDGGGEEDKKSRVSNMIWLPNAKVSPLANVDAHAIRVMGVFWHAKSPPTWRTNCCGFGNQGH

SEQ ID NO: 43216 - protein, 1141 aa, Zea mays
  Coding DNA Sequence Number=SeqID_1437
  Homolog annotation: Hit_ID=Q2R124; Match level="QueryCoverage=65%, HitCoverage=77%, E-value=0.0, Identity=57%"; Hit description=Pg1, putative, expressed
  Pfam annotation: Domain name=DUF1399; Domain location=124-269; Score =343.7; E_value=3.1e-100; Accession=PF07173.3; Description=Protein of unknown function (DUF1399)
MDGEQAARWAAAQEGVPVGADLVAAALRQLRFLAAVDRRRWLYDEGPLLDRAIRRYKACWLPLLDKHTKGVVVDGPLVVPLDCEWIWHCHRLNPVHTLLTMIICNSRTLGEPRDLIIRAHIFQVQYIRDCKKVYGRILNNNNVESSTQTKSTLESEKVWKELYPEEPFELLFTRTFDTAVDVNPAGAEEDITYDLVSAVKRQSSFYYQVGTPTMHDPRFLQEALARYKAFLYLIKMNQEKGLQRFRVPTYDVDLLWHTHQLHPITYRNDMVKLLGKVLEHDDTDADRSEGKKLDVGFTETTEQFESTFGVRYWKAGCMYRGNVPSPVTSTPQTFSAEVGTGSYICKAQKDLNALDVTVVELYLQIVDIKNLPSAVQKENVYVRFAKNQSDMFISDGGRLDISTVTGKNTGVCLQCEPTGELILAVMVDQLSKKPEPIGKVSFPLHDLTGPDSKLSFEKWFELKAHGGHAASPPVSLRVAASATVPSSAQKVFTMVRMEPFSLKSCLLPHSIKDQNTGSWTRFVNDCGTELIRLQIREHKAKNSMAVVRELVGVLKSTKKQIQLAEFKENKWTLKDSNLPISHGTDGSLLDLKGDNHLIKLYRGRKLEYERKCCSAHSEDVSAVTAVKFCAEHPYGKAVALLDTEAQLIMVNEDWLLLPWISISVLFMDGDGGTKLGGGAMVQKGTVFGSDTSMVLETQTVGAGSVASNLAQCGTCSAVFGGDDKEMANCKVEHASSGASRTVVASGENGHTETAGCGGGCGSNCGPMMAEDPKAGNAKSGGCGSGCGGGCGGAGGCGTMANEGQSRSGGVGTLLSSNAMGGEGQQAHSAGCGSGCGGGCGSGMVIEGSKVNNVNAMSGGCGSGCGGGCGSGMVIEGSKANNAMSGGCGSGCGGGCGSGMLIEGSKANKAMSGGCGSGCGGGCGSGMVIECSKANNTMSGGCGSGCGGGCGSGMVIEGSKANNAMSGGCGSGCGGGCGSGMVNEGSKAANTMSGGCGSGCGGGCGALFNASTAAGEGLHNKSAGCGGGGCGSGCGGGGGCGSGMAIEGFKANHAKSGGCGSGCGGGGCGTLFSSSAAASQGQSRSGGCGSGCGGGGCGTGSMVAEGSNGGNAKSGGCGGGCGGGGGCGGGGCGGGCGAVFNA

SEQ ID NO: 43217 - protein, 165 aa, Zea mays
  Coding DNA Sequence Number=SeqID_1438
MWALAMKGEENFKLLPLSGYDLILGMDYGLNCPHQKRAERSFVPARPDKILHNPYAQQGMPQTFALNAGDGLASSQRPVPHDYEPRGGTRPQSERRVGTKGACWPKDLGPTCRGFEYQTERFGHFYEGLDGTHEGPGMNHHRWGSDDIRGGPDPNVVVRIHGSSP

SEQ ID NO: 43218 - protein, 216 aa, Zea mays
  Coding DNA Sequence Number=SeqID_1439
  Gene Ontology: Mol. function=metal ion binding
  Homolog annotation: Hit_ID=Q852N7; Match level="QueryCoverage=63%, HitCoverage=40%, E-value=1e-66, Identity=87%"; Hit description =Putative zinc finger protein
  Pfam annotation: Domain name=zf-C3HC4; Domain location=30-70; Score =38.6; E_value=2.1e-08; Accession=PF00097.15; Description=Zinc finger, C3HC4 type (RING finger)
MDEKATMESKLSSAAAFVEGGVQDACDDACSICLDAFCDSNPSTMTKCKHDYHLQCILEWCQRSSQCPMCWQHISMKDPMSQELLEAVEQERNIRANPSRNTAVFHHQMLGDFEIPVGADDAELEERIIQHLAAAAADFWDRIYTCGSRRNWTIRFTINGSNSRQTELLTNGAQTRVLPVGILDNGRYRDFIIKVQVDGGRGGFLGATLYWILVLR

SEQ ID NO: 43219 - protein, 556 aa, Zea mays
  Coding DNA Sequence Number=SeqID_1440
  Gene Ontology: Mol. function=protein binding; Cellular component =ubiquitin ligase complex; Biological process=cell cycle
  Homolog annotation: Hit_ID=Q10CD7; Match level="QueryCoverage=99%, HitCoverage=64%, E-value=0.0, Identity=88%"; Hit description=Cullin -4B, putative, expressed
  Pfam annotation: Domain name=Cullin; Domain location=73-556; Score =480.2; E_value=2.4e-141; Accession=PF00888.12; Description=Cullin family
MGGGRTNGEEDADMVLVNQDKLPAPSVPASAGVAANLFRKKATLPQPSTSARKPLRIKIGQPKLPKNFEEDTWSILKDAITAIFLKQKLSCDVEKLYQAAGDLCLHKLGANLYDRIKKECGIHIAEKISALVGQSPDLVVFLSLVQRTWQDFCDQMLIIRGIALLLDVKYVKNVANICSVWDMGLQLFRKHLSLSTEIEHKTVTGLLRLIESERLGEAIDRTLLSHLLKMLTALGMYSESFEKPFLECTSEFYATEGVRYMQQSDIPDYLKHVESRLQEEHERCILYLEANTRKPLIATTEKQLLERHTSAIIEKGFTMLMDANRINDLSRMYNLFQRVNAVELLKLALSSYIRATGQGIIMDEEKDRELVPFLLDFKASLDKILEESFAKNEAFSNTIKDSFEHLINLRQNRPAELIAKFLDEKLRAGNKGTSEEELEGILDKVLVLFRFIQIWGSFSSNMHYVRVKGKDVFEAFYKKDLAKRLLLGKSASIDAEKSMITKLKTECGSQFTNKLEGMFKDIELSKEINDSFRQSSQARTKLPSGIEMSVHVLTTG

SEQ ID NO: 43220 - protein, 234 aa, Zea mays
  Coding DNA Sequence Number=SeqID_1441
  Gene Ontology: Mol. function=protein binding; Cellular component =ubiquitin ligase complex; Biological process=cell cycle
  Homolog annotation: Hit_ID=Q10CD7; Match level="QueryCoverage=99%, HitCoverage=26%, E-value=1e-115, Identity=90%"; Hit description =Cullin-4B, putative, expressed
  Pfam annotation: Domain name=Cullin; Domain location=1-123; Score =35.5; E_value=1.3e-12; Accession=PF00888.12; Description=Cullin family
MDVKLPHELNVYQDIFKEFYLSKYSGRRLMWQNSLGHCVLKADFPKGKKELAVSLFQSVVLMLFNDAQKLSFIDIKDSTGIEDKELRRTLQSLACGKVRVLQKIPKGRDVEDKDEFVFNEDFSAPLYRIKVNAIQMKETVEENTSTTERVFQDRQYQLIFDMCWMLYDRKVDAAIVRIMKTRKVLSHTLLITELYQQLKFPVKPADIKKRIESLIDREYLERDRSNPQIYNYLA

SEQ ID NO: 43221 - protein, 155 aa, Zea mays
  Coding DNA Sequence Number=SeqID_1442
MPLLALRAGYLLVACQEEGLESYCDFKREPSARVVGSGSNATLRTRKCVFFLAHEATSSTGKREMTATVVTLASTCLPILPFSVRRLEQIGNHTLLAAPWREPVTGTDYCCRMVGSQKAIAGRARLLNFNIITDAEGVEKGAINEKIDKEIMREI

SEQ ID NO: 43222 - protein, 181 aa, Zea mays
  Coding DNA Sequence Number=SeqID_1443
  Gene Ontology: Mol. function=protein transporter activity; Cellular component=membrane; Biological process=intracellular protein transport
  Homolog annotation: Hit_ID=Q309H8; Match level="QueryCoverage=99%, HitCoverage=52%, E-value=3e-48, Identity=71%"; Hit description=SNARE protein
  Pfam annotation: Domain name=Syntaxin; Domain location=49-157; Score =47.4; E_value=4.8e-11; Accession=PF00804.15; Description=Syntaxin
  Subcellular localization annotation: CTP_CleavageSite=39; ConfidenceScore=5.20e-01
MNSLFSSSWKRGVGDGGEQGTSSPAAWRCLRRRVPERGRASTGSDVDVTRTGPGTLTVESIKEELRDLERIQRSLHDANVGGKSLHDAAAVRGLRARMDADVGTTIKKAKVVKLRLESLDRANAANRSVPGCGHGSSTDRTRTSVVAGLRKKLRDSMESFSSLRSRSCTSTGTRWRGATSR

SEQ ID NO: 43223 - protein, 127 aa, Zea mays
  Coding DNA Sequence Number=SeqID_1444
MQDIKKSAWNQKALTFPTQSKRIDDNCGAANHVWHLFSPELGSPCLLLALQLCSTSGAGSATVGRDSRVSTTAAMKDRYMEADGVTLQGIGVSMVRKKHDQAVHAIYTSSEEAEGEGKGKGGQPEPS

SEQ ID NO: 43224 - protein, 132 aa, Zea mays
  Coding DNA Sequence Number=SeqID_1445
  Gene Ontology: Mol. function=transferase activity; Biological process= cell adhesion
  Homolog annotation: Hit_ID=Q6F3A5; Match level="QueryCoverage=93%, HitCoverage=25%, E-value=1e-42, Identity=73%"; Hit description =Expressed protein
MIPEYQTEESMYNAVRRFGKVRYDTLRLPHKVVAREADGSVKFGQGEGSAYLFDPDIYTDGRISVQGIDAVLFAPDDAKATQTADPNRKPPAIVTHKKKIKLRRVSVGFLNDVWQMLNLSIGQREAIVKTWR

SEQ ID NO: 43225 - protein, 184 aa, Zea mays
  Coding DNA Sequence Number=SeqID_1446
  Gene Ontology: Mol. function=metal ion binding; Cellular component =integral to membrane; Biological process=ubiquitin cycle
  Homolog annotation: Hit_ID=Q6F3C6; Match level="QueryCoverage=97%, HitCoverage=100%, E-value=3e-51, Identity=56%"; Hit description =Putative C3HC4 type RING zinc finger protein
  Pfam annotation: Domain name=BIR; Domain location=84-138; Score= -13.6; E_value=0.1; Accession=PF00653.12; Description=Inhibitor of Apoptosis domain
  Pfam annotation: Domain name=zf-C3HC4; Domain location=115-156; Score= 34.2; E_value=4.6e-07; Accession=PF00097.15; Description=Zinc finger, C3HC4 type (RING finger)
  Pfam module annotation: Pfam domain module=BIR::zf-C3HC4; Domain location=84-138::115-156
MSSGGTPPVGLTPADGGMFSTDRIGGFGYGVGVSVGILLLVTTITLASYFCTRAPADAAGEAAPSSGRHGGEGAHDDVELGIDEATLKGYPEVVYGEARKLAKATKKGTSTCTCCSICLDNYGKGDVLRMLPDCGHLFHRECVDPWLRHHPTCPVCRTSPVPSPMPTPLAEVTPLAMSRMSMSS

SEQ ID NO: 43226 - protein, 46 aa, Zea mays
  Coding DNA Sequence Number=SeqID_1447
MHLIQQISIKRKMGKRKHLEAGTVMVELQKQSTLAGVVLIRLDVKK

SEQ ID NO: 43227 - protein, 100 aa, Zea mays
  Coding DNA Sequence Number=SeqID_1448
MAGKMQKQRMAHEMRMWKSSRVMDMRSRQHADETHNITRFHEDEAYVEDKSSDEGENLLGSNHVSVTPAVHPSQGNPTNGTLATQPFSKPTNATPSVQPS

SEQ ID NO: 43228 - protein, 96 aa, Zea mays
  Coding DNA Sequence Number=SeqID_1449
  Subcellular localization annotation: CTP_CleavageSite=43; ConfidenceScore=5.04e-01
MDQDASIACSPPVTLPRARIRVAALRLTLTGNRIMLRGRKIVVAVELEATPALMDSTSKKMYLCQVRKQQSSVASVPRWFLMKISKNEVREERILH

SEQ ID NO: 43229 - protein, 87 aa, Zea mays
  Coding DNA Sequence Number=SeqID_1450
MELGRGSEISPVLGVVAASTGRGSEGFYQTPQAIRQLEVATAKTRWTGKVLVYPAAESGGHGVSGMDAVRGHEAKWVAWVTSSGGPN

SEQ ID NO: 43230 - protein, 158 aa, Zea mays
  Coding DNA Sequence Number=SeqID_1451
  Homolog annotation: Hit_ID=Q9FGZ9; Match level="QueryCoverage=28%, HitCoverage=63%, E-value=1e-12, Identity=73%"; Hit description =Ubiquitin-like protein 5
MDRGTVMADGLVDASTTTRDGNGEFPVGILAPMDVSREDPHREVVPLPLPLLSESLASSPPHTHTANLPFSCHPAHLLRHRPKLKKLPRSPPPPLARPQELVAMQTGARPKKICIQKWYNISKDHITLKGYELHDDMGLALYYNSGSFLSFEGLKARL

SEQ ID NO: 43231 - protein, 933 aa, Zea mays
  Coding DNA Sequence Number=SeqID_1452
  Gene Ontology: Mol. function=zinc ion binding; Cellular component =nucleus; Biological process=anti-apoptosis
  Homolog annotation: Hit_ID=Q10CF1; Match level="QueryCoverage=95%, HitCoverage=96%, E-value=0.0, Identity=60%"; Hit description =Expressed protein
  Pfam annotation: Domain name=zf-C3HC; Domain location=89-258; Score =193.3; E_value=5.8e-55; Accession=PF07967.4; Description=C3HC zinc finger-like
  Subcellular localization annotation: CTP_CleavageSite=72; ConfidenceScore=5.30e-01
MREEVRSSAAAAPDPPPGRSASPPPTPVASSAGASSPPAQTNVASIDWLDSDQVSKAGSSHIAPPTSRPALSTNANGAAMDCLQSSCRPWERGDLLRRLATFKPSTWASKPKAASSLACARRGWVNIDMDKIECESCGAHLIFIALTSWSPAEELNYIELVGHLDLILAELVLITSNCVYSAFSIQDICATLSLDVISAGEAFAEQLDASHQNNCPWRGNSCADSLVQFHLTPSALVGGFKDRCDGLLQFTSLPAIALSAIESMKLTRSVQIDRVLSQSVTVLSGELGYRTDSTTGIDIAQQDETCCYSQAQKLISVCGWEPRWLPNVQDWEENSTRSARNAGSAEPDGQFHSQFPEHHQNSNSVSIKKDKGKGRKPVLVRGISATSGINGLVTEGAERENIEGRDEAGIVEGKSLSNAQVDLNLTMAGGLPSNNSALPPMPGHLNYGGMGRDLIIGQPTGSELGGRAASIESRGPSSRKRNLEEGGSTADKPISRLQPADSIEGTVIDRDCDEVDDAAQDSGARSKRSRCFNLFDINRPSSSGAGPSRNLSFDLDIDVNRFDTSNAEVPSALRNPFPRDSMRESSVIAMDTVHGMEENSMESVEYHPCDVDDVNKPSSALRSGLMSDTLDPNYSNQAQQSSFVQPAAETESNAREIGGSSMNGGEEVLNAETTPAFARDQLSLGVSGGSVGMGASHEAEIHGIDVSGHKTGSVVGDADPIPELIETMGHTGESAPGPALMDEFVPEEVGREGPNGDSQDMASRLAVRADSGSKICGSTKADSVESGEKTSRENSAHPSLSCNARVFSGIDASKDEVTGIMLTNDDYDPGSGLGATNGGNDYETGLPDFDPIRHHNDYCPWVNGNVAAACCISTGSSTALSGWQLTVDAIETLQSLGQAQNQTMQSDSAASLYKDDHVPPSRKLLKSANHSKS

SEQ ID NO: 43232 - protein, 312 aa, Zea mays
  Coding DNA Sequence Number=SeqID_1453
  Gene Ontology: Mol. function=protein binding
  Homolog annotation: Hit_ID=Q69VA2; Match level="QueryCoverage=99%, HitCoverage=69%, E-value=6e-76, Identity=35%"; Hit description =Putative leucine rich repeat protein
TFRIPLGAVGYYIVAKFTPVAPDGEVGEPAYATSDGLVETLPPSLNFLTVTGEFSEGQILTASYGYIGGHEGNSLYSWHLHEAEDDEGTPLSEATGLLQYCVTKEAVGKFVSFKCTPVRDDDIVGEARSFIGKDRVTPGRPKIEKLEIEGRGFHTDLYAVQGTYSGGKEGKSKIQWLRSMVGSPDLISIPGETGRTYEANVDDVGYRLVAIYTPVREDGVEGQPVSVSTEQIAVEPELYREVKQKLDDGSVKFEVELYRNDQHRFKIVVDGDTEVDLMVQTRHMRDRIILTIRGLAQKFNSTSLNTLLRIES

SEQ ID NO: 43233 - protein, 472 aa, Zea mays
  Coding DNA Sequence Number=SeqID_1454
  Gene Ontology: Mol. function=protein binding
  Homolog annotation: Hit_ID=Q69VA2; Match level="QueryCoverage=80%, HitCoverage=66%, E-value=1e-153, Identity=33%"; Hit description =Putative leucine rich repeat protein
MPLDDANLDGDDLKDDAFVTDASHIRDSLLCHEARTNTSLFVFPRGHGIAYLMLYVDDIVLTAFSTPICSHIYGAIQYFHSLFGALTDSTFSFLLEQWNNKLPQGYMVNKAYVDHPFEEDPCHCHFRFTNLGGEGELVLKYQWFLGGKTPTDFVAIPGASSEVYWPKREDVGRCLKVECTPIVNGAEFSPVFAVSLPVSPVKVLRKFICSCATFFVLVREFFLQGTGCPKVINLAVSGEVVEGNILSGVPEIAWCGGTPGKGVASWLRRRWNGNAVVIDGAEGMEYQLTVNDINSSLVFMYTPVTDEGVKGEPQCTMTDFVKAATPSVSNVHVLGDIVEDNIIVGKGKYFGGREGLSKIRWFREKENGEFLLVLSDSMEYTLTKEDVGRHLKFVYIPVNLEGQEGESACAITDVVKKGVITLFYLLVWPAPPKVFNLKIVGESMEGSKISASATVTGGTEGSSRFNGTSIFL

SEQ ID NO: 43234 - protein, 326 aa, Zea mays
  Coding DNA Sequence Number=SeqID_1455
  Pfam annotation: Domain name=PAM2; Domain location=228-245; Score =25.7; E_value=0.00016; Accession=PF07145.5; Description=Ataxin-2 C -terminal region
YGLHPRHAAQGPSRTPPGPIAGGSASHDDDISPHASQPPSLAAPVTHGERKGWVYGAPPDPPGSAYLSLHRPRYYLPLNLAAGQSLRLLRTSDAPPHYTPGPCSLQIVHLLLRSGRRSVAAAPTESLRPTPDLAAVNKYPTSPASASFENTSFPAFYPNNLTSCGSPLSLAATAPTSFPLWYCCWLAAALGGGGGGTETLALALMSQQEAVDPPSATDERLGGLPRSGSTSRLNAQAPEFVPRAAAVPPPPPQQKVVRLFAPPPHAAFFVAAPRPPPPPFEYYAAVATGGGGRFGPPAAAAEQEAEAEQPPRDGSFDDPVPKIRKQ

SEQ ID NO: 43235 - protein, 70 aa, Zea mays
  Coding DNA Sequence Number=SeqID_1456
  Subcellular localization annotation: CTP_CleavageSite=56; ConfidenceScore=5.63e-01
MQQPSISLTPAPFLPCTVPSLELYQRSYSRLSRVLFRAVACCFARRSRVVCALFVRGGLVVACWFMSLLV

SEQ ID NO: 43236 - protein, 587 aa, Zea mays
  Coding DNA Sequence Number=SeqID_1457
  Gene Ontology: Mol. function=protein kinase activity; Cellular component=integral to membrane; Biological process=protein amino acid phosphorylation
  Homolog annotation: Hit_ID=Q53JL7; Match level="QueryCoverage=99%, HitCoverage=100%, E-value=1e-169, Identity=84%"; Hit description =Receptor-like protein kinase
  Pfam annotation: Domain name=LRRNT_2; Domain location=26-67; Score =20.5; E_value=0.0061; Accession=PF08263.3; Description=Leucine rich repeat N-terminal domain
  Pfam annotation: Domain name=LRR_1; Domain location=122-144; Score =14.1; E_value=0.52; Accession=PF00560.23; Description=Leucine Rich Repeat
  Pfam annotation: Domain name=LRR_1; Domain location=146-168; Score =12.4; E_value=1.4; Accession=PF00560.23; Description=Leucine Rich Repeat
  Pfam annotation: Domain name=LRR_1; Domain location=170-192; Score =9.4; E_value=4.9; Accession=PF00560.23; Description=Leucine Rich Repeat
  Pfam annotation: Domain name=LRR_1; Domain location=97-120; Score =13.6; E_value=0.74; Accession=PF00560.23; Description=Leucine Rich Repeat
  Pfam annotation: Domain name=Pkinase; Domain location=279-554; Score =71.1; E_value=3.5e-18; Accession=PF00069.15; Description=Protein kinase domain
  Pfam annotation: Domain name=Pkinase_Tyr; Domain location=279-554; Score=60.0; E_value=3.8e-16; Accession=PF07714.7; Description =Protein tyrosine kinase
  Pfam module annotation: Pfam domain module=LRRNT_2::LRR_1::LRR_1::LRR_ 1::LRR_1::Pkinase::Pkinase_Tyr; Domain location=26-67::122-144::146
MAVRCSCTALFPLFFCFMICQLCYGTVTDIQCLKKLKASVDPDNKLEWTFNNNTEGSICGFNGVECWHPNENRVLSLHLGSFGLKGEFPDGLENCSSMTSLDLSSNSLSGPIPADISRRLPFVTNLDLSFNSFSGEIPEALANCSYLNIVNLQHNKLTGTIPVQLAALSRLAQFNVADNQLSGQIPSSLSKFPASDFANQDLCGRPLSNDCTANSSSRTGIIVGSAVGGAVITLIIAAVILFIVLRKMPKKKKLKDVSLFEKSVSKMNLNDLMKATDDFTKDNIIGTGRSGTMYRATLPDGSFLAIKRLQDTQHSEDQFTSEMSTLGSVRQRNLVPLLGYCIVKNERLLVYKYMPKGSLYDNLHQQNSDKKALEWPLRLKIAIGSARGLAWLHHSCNPRILHRNISSKCILLDDDYEPKISDFGLARLMNPIDTHLSTFVNGEFGDLGYVAPEYTRTLVATPKGDVYSFGVVLLELVTREEPTHVSNAPENFKGSLVDWITYLSNNSILQDAVDKSLIGKDNDAELLQCMKVACSCVLSSPKERPTMFEVYQLLRAVGEKYHFSAADDELTMLPQNANPEDELIVAN

SEQ ID NO: 43237 - protein, 75 aa, Zea mays
  Coding DNA Sequence Number=SeqID_1458
MVTGKVAVVLLACWTLVLYQPVLGRLPCNNDQKREILRECDPLNSTPDYTPSRHGHGLKECSCQPAIAYGIIVQT

SEQ ID NO: 43238 - protein, 257 aa, Zea mays
  Coding DNA Sequence Number=SeqID_1459
  Subcellular localization annotation: CTP_CleavageSite=11; ConfidenceScore=5.51e-01
ASTIARCTFCRSAHARGLPQPRFRPRLPSIPATLILRAATAAIPATPPRSPSSPRQSAPPHLPSSTPDSSVPSAGSLPAAYSIPQLPLAQGFPSRGRIQRCRRPIPSHPAPTPTQMPAMASGGARPEEVLPAPTVSASTSSCMGTRAEELTARLAAAGPSPGAGAGGEEVEHERVRALREIKNQIIGNRTKKLLYLRLGAVPAVVSALADPGASPAALVQAAAAAGIFACGVEDCARRAGRRRCGAPHSAPRSPRRE

SEQ ID NO: 43239 - protein, 327 aa, Zea mays
  Coding DNA Sequence Number=SeqID_1460
  Homolog annotation: Hit_ID=Q2WBL9; Match level="QueryCoverage=38%, HitCoverage=29%, E-value=7e-33, Identity=54%"; Hit description=4 -alpha-L-fucosyltransferase
MFCLRHPPVRAPSITQSLPPHHCSPPNPDLLPIIDASSPARDPPSSLYASASDETLAAVLDHLKPHTVGTFLPPRETTTSEILRPHLERRQLPLSVPPSSSPSPHAHVPTTLEFFGSRDRDCDPFTSLLEAIVAWNATIGCPRIRTKLAAAGLEPGLPLPAASTNGNGSAEDPPGASITGGAVWRGATKCEDLAVCHVRVLIKGWIWIPNAVVDVYTCHCGVSCVGSKFPAVRGSFLRREQVSCVGSNGGSEATSSAVKDLQSKLDVVTAECLTEKEMLKEMVLALLDESDLDIASDAVEMIVDRDITMVFPSFVMHSEISETDMVV

SEQ ID NO: 43240 - protein, 127 aa, Zea mays
  Coding DNA Sequence Number=SeqID_1461
  Homolog annotation: Hit_ID=Q2QQW1; Match level="QueryCoverage=58%, HitCoverage=81%, E-value=9e-30, Identity=85%"; Hit description =Expressed protein
MGLYCCLAHSRDCFLDSKILRTERRQAAAETGSASKHDSHVYCSALGTWFFSVAGALVAIPVGIKKKSLAPLVFFGTTGTMLDIIMGITQCEREHAEREMKILEAQKFSVDASAQNESSDSFGSADK

SEQ ID NO: 43241 - protein, 443 aa, Zea mays
  Coding DNA Sequence Number=SeqID_1462
  Gene Ontology: Mol. function=phosphatidylcholine-sterol O -acyltransferase activity; Biological process=lipid metabolic process
  Homolog annotation: Hit_ID=Q71LW1; Match level="QueryCoverage=85%, HitCoverage=90%, E-value=1e-137, Identity=59%"; Hit description =Phospholipase A1
  Pfam annotation: Domain name=LACT; Domain location=72-422; Score= -87.7; E_value=9.1e-07; Accession=PF02450.6; Description =Lecithin:cholesterol acyltransferase
  Pfam annotation: Domain name=PGAP1; Domain location=39-267; Score= -92.4; E_value=0.073; Accession=PF07819.3; Description=PGAP1-like protein
  Pfam module annotation: Pfam domain module=LACT::PGAP1; Domain location=72-422::39-267
MLGAALRLRVRVLRRRRSHRGRRRGRRSLGRVGDDDDDEGGREPVLLVSGMGGSVLHARRRSNSKFDLRVWVRILFANLDFKKYLWSLYNADTGYVEPLDDDVEIVVPEDDHGLFAIDILDPSWFVELLHLSMVYHFHGMIDMLINCGYEKGTTLFGYGYDFRQSNRIDKAMAGLRAKLETAYKTSGGKKVNLISHSMGGLLVRCFMSMNHDVFTKYVNKWICIACPFQGAPGCINDSLLTGLQFVYGFESFFFVSRWAMHQLLVECPSIYEMLPNPEFKWKEKPIIQVWRKNPEKDGTVELVQYEATDCVSLFEEALRNNELTYNGKKVALPFNMSVFKWATKTRQILDNAELPDTVSFYNIYGTSYETPYDVWLIGCQCIKFKADGFSAKERVGVKADHRGLLSDENVFKLLKKWLGVSEKKSEWRCVSKSYSKVGNWVAL

SEQ ID NO: 43242 - protein, 457 aa, Zea mays
  Coding DNA Sequence Number=SeqID_1463
  Gene Ontology: Mol. function=hydrolase activity; Cellular component =mitochondrion; Biological process=metabolic process
  Homolog annotation: Hit_ID=Q2QUG4; Match level="QueryCoverage=82%, HitCoverage=64%, E-value=1e-156, Identity=69%"; Hit description=3 -hydroxyisobutyryl-coenzyme A hydrolase, putative, expressed
  Pfam annotation: Domain name=ECH; Domain location=112-283; Score =45.4; E_value=8.8e-12; Accession=PF00378.10; Description=Enoyl-CoA hydrataseisomerase family
MVVTAPYDAHDRVLVGVVVAVSMPRGEVDMEGEGIEELEVVATISSSSGRELGREGTNWQREDMASLVIRDQRCFLVRRKRMTSMSPPSAAGDDSDQVLFLYILVEVNGFTRTLILNRPKQLNALSSTMIMGLLRCFTAYEKDDGVKLLIMKGKGRAFCAGGDVAAVVRSIHKDSWKYGADFFRNEFLLNYIIATYTKPQVSLLSGIVMGGGAGVSLHGRFRVATDNTVFAMPETALGLFPDIGASYFLSRLPGFYGEYVGLAGARLDGGEMLACGLATHFVQSNVGCVCASLITPSKYSVPQSLLSLEESLKKVDTSNAFAVCGIIDQFAQQPSLKESSSLNRLEIINKCFSKRTVEEIISALIREGRTQTVGECLQREYRMVCHVMRGDFSRDFFEGCRAILLDKDRNPKWMPPRLEQVHDEAVEQYFSRIDDPQWEDLNLPARRSHGRNIESKL

SEQ ID NO: 43243 - protein, 302 aa, Zea mays
  Coding DNA Sequence Number=SeqID_1464
  Homolog annotation: Hit_ID=Q6TKQ6; Match level="QueryCoverage=99%, HitCoverage=81%, E-value=3e-99, Identity=63%"; Hit description =Putative ankyrin-repeat protein
  Pfam annotation: Domain name=Ank; Domain location=210-242; Score =30.1; E_value=8e-06; Accession=PF00023.20; Description=Ankyrin repeat
  Pfam annotation: Domain name=Ank; Domain location=243-275; Score =39.1; E_value=1.5e-08; Accession=PF00023.20; Description=Ankyrin repeat
  Pfam module annotation: Pfam domain module=Ank::Ank; Domain location =210-242::243-275
MAEQIASDPVFNQMAEQLQKSAQGAGEQGIPALDPQQYMETMQQVMQNPQFVSMAERLGNALMQDPAMSSMLENLTSPAHKEQLEERMARIKEDPSLKPILDEIENGGPSAMVKYWNDPEVLQKIGQAMGVNLPGDSSVSTVLSGPEETEEEGGDDDESIVHHTASVGDEEMPFKCLYSFFKAAFTIPVTQQGLKKALEGGADKDEEDAEGRRALHFACGYGELKCAEILLEAGAAVDALDKNKNTPLHYAAGYGRKECVDLLLKYGAAVTLQNLDGKTPIEVAKLNSQDEVLKLLEKDAFL

SEQ ID NO: 43244 - protein, 112 aa, Zea mays
  Coding DNA Sequence Number=SeqID_1465
MAGAGGARKLLHARGARKLVERRWRRGRGLQGEGNVRRGALGRGHDLAGGGAGEKKLAEVADGRVRVGGGVVKTEIIIHGHAWLVLQRQISWTVLDQALFTPRRASMSLRFT

SEQ ID NO: 43245 - protein, 225 aa, Zea mays
  Coding DNA Sequence Number=SeqID_1466
MEMWLWDSDWGMEEWDGLGASRWLFKEFHLSLSEPARQCGSSANVETGFELSEYRTRKPTDEDVCKTATLWEHAEPWCHLQHSCPFPTFLEVRNDLLLEELNQTNQSITPSHHLVVAASASTPRAPSYTPVRSSRLHHPRDQLVLEVFLPIIGKANVAANRVGNPLLHPLVTPRQAVHPGPPTSTHGLAPYKCMGPVLLRPSPPVRPNRLLHRHTSSSQLLRTPF

SEQ ID NO: 43246 - protein, 623 aa, Zea mays
  Coding DNA Sequence Number=SeqID_1467
  Gene Ontology: Mol. function=ATP-dependent helicase activity; Cellular component=nucleus; Biological process=metabolic process
  Homolog annotation: Hit_ID=Q1S5T4; Match level="QueryCoverage=63%, HitCoverage=47%, E-value=1e-147, Identity=70%"; Hit description =Helicase, C-terminal
  Pfam annotation: Domain name=DEAD; Domain location=232-361; Score =49.1; E_value=1.5e-11; Accession=PF00270.19; Description=DEADDEAH box helicase
  Pfam annotation: Domain name=Helicase_C; Domain location=431-507; Score=117.6; E_value=3.5e-32; Accession=PF00271.21; Description =Helicase conserved C-terminal domain
  Pfam module annotation: Pfam domain module=DEAD::Helicase_C; Domain location=232-361::431-507
MPPWSLSQPSSLEAGQRFFQQRAENDACSACVRTVGDPDIYKENKRLRMAARIEPPGKNISIITPSLFSVIPKKIAKSRTVYEALSNNRWIYDIRGGLTVGVLADYFKLWDCLSGLELHPLIEDRHIFSIAPDGQYSAKAAYKGLFLGSCAFGHYKRVWKSWAPSKCRFFLWLVAQNRCWTADRLAKRGLNHPSSCPLCDQEPETINHLLVSCVFARLFWVHSMIEKLAQFTDIRCCLIVGGLSTKVFLLALSSIKFLMFSYGFSPIAFDILVQNTTFYVQEVALRSMPDIVVATPGRIIDHLRNSLSVGLEDLAVVILDEADRLLELGFSAEIQELIRMCPKRRQTMLFSATMTEEIDELIKLSLNKPVRLEADPSLKRPATLTEEVVRIRRARESNQEAVLLALCLKTFKRSVIIFSGTKQSAHRLKIIFGLSGMKAAELHGNLTQAQRLEALELFRKQEVDFLIATDVAARGIDIVGVQTVINFACPRDVKTYLHRVGRTARAGREGYAVTFVTDDDRSLLKAIAKKAGSQLKSRIVAEKPVAECAQLIEQLEDQISIIIREEKVEREARKAEMEIAKAENMIAHKDEIYSRPKRTWFATEREKKLLVAAAKLQNHLSCA

SEQ ID NO: 43247 - protein, 128 aa, Zea mays
  Coding DNA Sequence Number=SeqID_1468
MAHFPFTSSEGPCNGRSFQYQDSGILLPSTVVSADRPGTLEASRLQYGSYHPAPADPVPVPDIQAEDEAFRQFETQGTAVADDDDDDDDFGIPPLPPMTPRSHDHEAGSSSAAPAAPPAIDPALATIL

SEQ ID NO: 43248 - protein, 89 aa, Zea mays
  Coding DNA Sequence Number=SeqID_1469
MGGAARGQEEEGCSGRRGSLGIIIRHASPGGRIVAGRETATYSWLARAESSRHGPRPAEPARGSRCRGQADCSHRPRAPNIPPASSLEA

SEQ ID NO: 43249 - protein, 441 aa, Zea mays
  Coding DNA Sequence Number=SeqID_1470
  Gene Ontology: Mol. function=cation transporter activity; Cellular component=integral to membrane; Biological process=cation transport
  Homolog annotation: Hit_ID=Q94IH5; Match level="QueryCoverage=98%, HitCoverage=100%, E-value=0.0, Identity=86%"; Hit description =Ca2+/H+ antiporter
  Pfam annotation: Domain name=Na_Ca_ex; Domain location=273-430; Score= 130.1; E_value=5.9e-36; Accession=PF01699.14; Description =Sodiumcalcium exchanger protein
  Pfam annotation: Domain name=Na_Ca_ex; Domain location=82-229; Score =108.6; E_value=1.8e-29; Accession=PF01699.14; Description =Sodiumcalcium exchanger protein
  Pfam module annotation: Pfam domain module=Na_Ca_ex::Na_Ca_ex; Domain location=273-430::82-229
  Subcellular localization annotation: CTP_CleavageSite=37; ConfidenceScore=5.31e-01
METPQVEMGGFKVNSPQVPNGGLRPTVSSSWNSQGTVERALRSIRIVIFTSKLNLLMPFGPASIILHFTTRRHGLVFLFSMLGIMPLAERLGYATEQLAVYTGPTVGGLLNATFGNATEMIIAIYALKNGMIRVVQQSLLGSILSNMLLVMGCAFFAGGIVHRNKDQVFSKATAAVNSGLLLMAVMGLMFPAVLHFTHSEVRQGASEVALSRFSSCIMLVAYASYLYFQLSGRSNIYSPIGSEEAPSEDNPEEDEEAEIGMWEAVTWLAVLTFWVSFLSEYLVNAIEGASDSLNLPVAFISVILLPIVGNAAEHASAIMFAMKDKLDITLGVAIGSSTQISMFVIPFCVVIGWTMGQKMDLNFQLFETATLFITVLVVAFMLQRSVLYGSELHLISDPICNALVSSQDGTANYLKGLMLILCYLIVAASFFVHVDPQSSEG

SEQ ID NO: 43250 - protein, 169 aa, Zea mays
  Coding DNA Sequence Number=SeqID_1471
  Gene Ontology: Mol. function=protein dimerization activity; Cellular component=nucleus; Biological process=regulation of transcription, DNA-dependent
  Homolog annotation: Hit_ID=Q9FKM7; Match level="QueryCoverage=58%, HitCoverage=47%, E-value=1e-18, Identity=49%"; Hit description =Putative auxin-responsive protein IAA33
MSSGGASFEQHANKRRRPPAGPQRLTLSVQDADDAAAAVVPPVTVVLDGRCICHRVHLNRHTGYRSLAGTLRRMFVDSDDDDSDVHNHHHQQQQQQRGEDDLDLDLANAVPGHVVAYEDMEDDLLLAGDLKWNDFVRVAKRIRIIPAKKTTSSSSRAKKCGGGDVNHSN

SEQ ID NO: 43251 - protein, 482 aa, Zea mays
  Coding DNA Sequence Number=SeqID_1472
  Gene Ontology: Mol. function=RNA-directed DNA polymerase activity; Cellular component=mitochondrion; Biological process=RNA-dependent DNA replication
  Homolog annotation: Hit_ID=UPI00005A975E; Match level="QueryCoverage =91%, HitCoverage=27%, E-value=0.0, Identity=87%"; Hit description =PREDICTED: similar to Retrovirus-related Pol polyprotein from transposon 297
  Pfam annotation: Domain name=rve; Domain location=194-353; Score =120.0; E_value=6.7e-33; Accession=PF00665.16; Description=Integrase core domain
MEAYCDEVRRLEDKFYGLELNHIARRYNETADELAKIASGRTTPEVPSAPEGEALRVEEERSGVTPNRNWQTPYLQYLHRGELPLDRAEARRLARRAKSFVLVGDGKELYHRSPSGILQRCISIAEGQELLREIHSGACGHHAAPRALVGNAFRQGFYWPTAVADATRIVRTCEGCQFYARQTHLPAQALQTIPITWPFAVWGLDLVGPLQKAPGGYTHLLVAIDKFSKWIEVRPLNSIRSEQAVAFFTNIIHRFGVPNSIITDNGTQFTDRKFLDFCEDHHIRVDWAAVAHPMTNGQVERANDMILQGLKPRIYNDLNKFGKRWMKELPSVVWSLRTTPSRATGFTPFFLVYGAEAILPTDLEYGSPRTRAYADQSNQASREDSLDQLEEARDMALLHSARYQQSLRRYHARGVRSRDLQVGDLVLRLRQDARGRHKLTPPWEGPFVITKVLKPGTYKLANSQGEVYNNAWNIQQLRRFYP

SEQ ID NO: 43252 - protein, 188 aa, Zea mays
  Coding DNA Sequence Number=SeqID_1473
  Subcellular localization annotation: CTP_CleavageSite=51; ConfidenceScore=5.50e-01
SIPNDAAPPTQSKMNGSTKKSLVNGVLDQPNANSGLESSGNDYPSYTNSSSAMPPASTELIGSAAAVIDVDSAENGPEEGVAKRNKRKSDVGALLRYIVLEGDSLLVVLYCSAQLASVVVAIRMNRKSRRFAMERKEANAGIPKEVNDKAQNIMHQIKSPYPERSFGPLPALYTPNPNPTPGTGNVPA

SEQ ID NO: 43253 - protein, 617 aa, Zea mays
  Coding DNA Sequence Number=SeqID_1474
  Gene Ontology: Mol. function=DNA-directed DNA polymerase activity; Cellular component=mitochondrion; Biological process=nucleobase, nucleoside, nucleotide and nucleic acid metabolic process
  Homolog annotation: Hit_ID=P10582; Match level="QueryCoverage=92%, HitCoverage=93%, E-value=1e-176, Identity=47%"; Hit description=DNA polymerase
  Pfam annotation: Domain name=DNA_pol_B_2; Domain location=5-425; Score=229.8; E_value=5.8e-66; Accession=PF03175.4; Description=DNA polymerase type B, organellar and viral
MELKNDCSTLQNGNTFRGYLNELQKYYRGRSRSYRLYERQITVVQEFKEPYPTPASTETLSIAYMELMNMHAYPQIQGGAKFTLQLRLKTDDDIANITITTAIRLTYADGAVMLEAKAIYYDLYQVDILNRLTISSLALSIFRRKYINDSEKNRIYILNDNEEQFIRSGYYGGHTDVYLPTGEHLKYYDVNSLYPYSMLSEMPAGKPRWKNNLGLKKTKIELKDMFGFIKAFIICPADMHKPFLPYKQSDGTLIFPTGRFIGVYFSEELKYAVSIGYKVYPICGYLFDRMESPFKDFVNDIYRRRLEAKARGEKALDFIHKTTMNSLYGRFGINPESTTTLILNKEEALKFPMEHEGFMHSEELCADRFLITYKNKRSAELQRKREKPPANAAVQISAAVTAYARIHMYPYIAREDCYYTDTDSIVVKHPLPADEVSATKLGAFKLEHDVTKGVFLAPKSYMLQTVRDEQIVKHKGAGKIMANEKWFINQLDDPHLKHTFEYELKFSRNWHKLLVEKKTARITMGIESKKRDFVFDRYGKWVGTKPIHVGDGDVNSLNPTSYKLIKSLLEQNEDLRVELAKSEQMKSGTQNIKDSSKKKASKKKSDNPDKKAEKIDR

SEQ ID NO: 43254 - protein, 67 aa, Zea mays
  Coding DNA Sequence Number=SeqID_1475
MTDRVFGKRVRRQQGKIAVKEYRIGLLGEQDLNDQRSDSKKSVGNVMVLRAMALVLRNDWVVPSLRR

SEQ ID NO: 43255 - protein, 120 aa, Zea mays
  Coding DNA Sequence Number=SeqID_1476
  Gene Ontology: Mol. function=sequence-specific DNA binding; Cellular component=nucleus; Biological process=regulation of transcription, DNA-dependent
  Homolog annotation: Hit_ID=Q84V76; Match level="QueryCoverage=78%, HitCoverage=42%, E-value=3e-47, Identity=100%"; Hit description=M21 protein
  Pfam annotation: Domain name=K-box; Domain location=16-106; Score =8.1; E_value=9e-05; Accession=PF01486.8; Description=K-box region
MAYNKVCCVNDIVDKYSTHSKNLGKSHQQPSIDLNVEQSKYSGLNEQLAEETNGLRQMRGEDLEGLSVEELHRMERKLEAGLHRVISTKDQLFMQQIGELLQKIIPYVPSVTSVGRADHF

SEQ ID NO: 43256 - protein, 614 aa, Zea mays
  Coding DNA Sequence Number=SeqID_1477
  Gene Ontology: Mol. function=nucleotide binding; Cellular component =membrane; Biological process=transport
  Homolog annotation: Hit_ID=Q656J6; Match level="QueryCoverage=72%, HitCoverage=91%, E-value=1e-162, Identity=68%"; Hit description =Putative ABCG4
  Pfam annotation: Domain name=ABC2_membrane; Domain location=343-549; Score=175.1; E_value=1.7e-49; Accession=PF01061.14; Description=ABC -2 type transporter
  Pfam annotation: Domain name=ABC_tran; Domain location=78-262; Score =131.8; E_value=1.9e-36; Accession=PF00005.17; Description=ABC transporter
  Pfam module annotation: Pfam domain module=ABC2_membrane::ABC_tran; Domain location=343-549::78-262
MATTTPAVTEPDNADASPPSPTSPPSKKVMYELAARNIYYAKPTAAPRSLAQLLKPCGAAPTPPDYILRDVSLTARAGEILAVVGPSGAGKSTLLDILAARTAPTHGRLLLNSAPLRPSSFRRLSSHVPQADVALTLLTVSETFAFAASLLHPESESAVSAAVTALLVDLRLAHVAHTRVSPARLSGGERRRVSIGLALLRNPAVLLLDEPTSGLDSSSAHVVVSCLRAVAAARGTTVVFSIHQPSARLLSAVDCLLLLSRGTVLHHGSLASLDAALLSHGLVVPAQLNPLEFALEVLDQLPHPTPSTPEPKATTQELNSSSSHHKMVATATPSTGPPSSWLHELMVLYKRAWKVVYRSKQLLLTNFLEAVVVGTLLGTIYIHAGYGEAGAHKRLGLFAFTLTFLLTSTTETLPDRPIVLAETAAGLYRLSSHAAAGTLVFLPYLLAVALLYSVCVYFLVGLCSSAGAFASFVLVVWAVVLTANSFVLFVSSFAPDYIAGMSLVSVSLAGFFLFSGYFLSRGSMPSYWVFMHYVSPYKYALDALLANEYTCAGNRCFGVGGGSECSQTGLDVLVEKGLTAEERWTGVQVLFGFFLLYRVLYWVVLSRRASRAKR

SEQ ID NO: 43257 - protein, 62 aa, Zea mays
  Coding DNA Sequence Number=SeqID_1478
MERPRAETGDGREAKRRSQSQRRGEERLSGGSVSKPTKYQTVLGLAQRVEMAVEPSTLVGPG

SEQ ID NO: 43258 - protein, 80 aa, Zea mays
  Coding DNA Sequence Number=SeqID_1479
PEFIPSPSKVEEYWNVDNVDVIPRYRTINNILRATSSPGFASGQQALQPFRKKISWVSECNKLWEGAQQASPIRFRQRFS

SEQ ID NO: 43259 - protein, 97 aa, Zea mays
  Coding DNA Sequence Number=SeqID_1480
MTLYEDWHGHKPGVHFLRTSECVVCVKMTKSHLKKLDDHVLELEGRGQRHESDTHLVVEYHSMEIDIKRVDADTIARLLELPMTPTSATSLTFLKVA

SEQ ID NO: 43260 - protein, 131 aa, Zea mays
  Coding DNA Sequence Number=SeqID_1481
MDGQPGAAALSSPGPRVKASLVLGSESFAINSEFGTLSEQLAAVKEKSMAVLKEHIARHNAPNEVPDEAAEGESDITQPAGNYCSVALRLNGDGEVIKFPGQSQAMSKFNAAPELLVSDGDLTSLGAVVDR

SEQ ID NO: 43261 - protein, 328 aa, Zea mays
  Coding DNA Sequence Number=SeqID_1482
  Homolog annotation: Hit_ID=P93499; Match level="QueryCoverage=26%, HitCoverage=57%, E-value=2e-15, Identity=46%"; Hit description=DnaJ -like protein
  Pfam annotation: Domain name=DnaJ; Domain location=201-260; Score =75.3; E_value=2e-19; Accession=PF00226.21; Description=DnaJ domain
  Subcellular localization annotation: CTP_CleavageSite=95; ConfidenceScore=5.09e-01
LLPPPHTCSGAAETRDPGRAWCTAQEVTASRLRSPSPSPLGRGGSWQAATAMMAAAGSNGESNRCRSRQSSGTLVEMSQQSERISVSISILPRIRSVQRWTRKHHHSPQAPRRHRPINPTAHIGVRHRSPRRHTPRNQEHRPHARARTAGEAEDEQTIKEAMAPSLASTAGLPSCGARRGGRCVARRASAVATPATATARTHYEVLGVGAGASRCEIKAAYRRLAREVHPDCGGRGDEGFIRLHAAYATLADPDERARYDRAAAVRSRIRAAPSGSGAGFRPRRWETDQCWASCDHGAHIEDSPHEKRTAILAAHMSWDRGLYGLQAS

SEQ ID NO: 43262 - protein, 269 aa, Zea mays
  Coding DNA Sequence Number=SeqID_1483
  Gene Ontology: Mol. function=molecular_function; Cellular component =anchored to membrane; Biological process=biological_process
  Homolog annotation: Hit_ID=Q5Z9P1; Match level="QueryCoverage=91%, HitCoverage=83%, E-value=2e-62, Identity=51%"; Hit description =Putative SCUTL1
  Pfam annotation: Domain name=Thaumatin; Domain location=34-265; Score= 238.6; E_value=1.3e-68; Accession=PF00314.8; Description=Thaumatin family
MGAPLLLLPLLCCCCFALLLQVQGADAATLTITNSCGYTVWPGLLSNAGAPAPSTTGFALAPGRSAAVTVAAAWSGRVWARTLCATSPAASGATFACATADCGSGAVECAGRGATPPATLAELTLAGAGDDDDDFYDVSLVDGFNVPMLVAPRAGAANGSGCRPAACAADLNAACPAELRVAAGAGAGAGAPGVVACRSACEAFAAAQYCCSGAYGSPATCAPTPYSRFFKAACPSAYSYAYDDATSTFTCAAAGRGGYDVVFCPRASR

SEQ ID NO: 43263 - protein, 109 aa, Zea mays
  Coding DNA Sequence Number=SeqID_1484
MAPEVGLGGCQPHPGGWHSSRSSAGGDVFLSGSPIHPPLGALINPQVTKAKTVDSLLNTWVIFIMNLVVSTVTLGEEMGERDMTTLFAYSPVQDEGLAYTAAFDRTLTR

SEQ ID NO: 43264 - protein, 329 aa, Zea mays
  Coding DNA Sequence Number=SeqID_1485
  Homolog annotation: Hit_ID=P15718; Match level="QueryCoverage=32%, HitCoverage=17%, E-value=6e-21, Identity=51%"; Hit description =Putative Pol polyprotein from transposon element Bs1
MEPNLQSALEEQTKILRALSARLAVQEAWWRSWESKVAHHSVSIHDLEVAVATVPSATLRSERDAQVAATRECLAVVADDWGGLFGTGDGCIVADNWGGLFEYPAHFQEEQDIDNCIPINDGTRFTEEDDDNHPATLEPLLTDTTTAAEVDSIANTDDVEADSLASASTVGVATSQAAEMQLHVGWARWLEGQADYLRHDRMLHSNLDSLTSSNHPLLQDASATNNSPTQYSTECFSHDIVLLRTISAAPTSEDRALQQRRLECLVAWPEWRRIGGRNYIMLEHHPNRMFDACDRFWHCVFALCDFGSVQGLQRKLERLCLAGSAPDLE

SEQ ID NO: 43265 - protein, 308 aa, Zea mays
  Coding DNA Sequence Number=SeqID_1486
  Homolog annotation: Hit_ID=Q336V3; Match level="QueryCoverage=38%, HitCoverage=22%, E-value=6e-32, Identity=60%"; Hit description =Cytochrome P450 family protein, expressed
MDEQIAAAVFMPACIEASLNDGMNAGKTREAFADHQYSEYDSRLKDKDQKILFEDEIDLSLFNYKFDSYTTDSPAIDAEVELRSTDLWPYWKVDCLCKIIPRQLLAENAMMLIRNTVDKLIMKHKEIQVETEQIAGEDDVNEGDPSILRFLLASRDKSADMERSQELLETLVILIVKSVKDPRSVVCKTALMTCADIFKAYGALMVHSIDPSLVQQLLLTASQDKRFVWETATTTFISLTSWIFPLLLKPTMLPYLKNKNTGTWPKASRCVSVLLLVSHDNFFVMIWDPGGDTHNSLRASCISRRGEC

SEQ ID NO: 43266 - protein, 655 aa, Zea mays
  Coding DNA Sequence Number=SeqID_1487
  Gene Ontology: Mol. function=receptor activity; Cellular component =mitochondrion; Biological process=protein amino acid phosphorylation
  Homolog annotation: Hit_ID=Q5Z9P3; Match level="QueryCoverage=98%, HitCoverage=95%, E-value=0.0, Identity=68%"; Hit description =Receptor-like protein kinase-like
  Pfam annotation: Domain name=DUF668; Domain location=372-457; Score =161.7; E_value=1.9e-45; Accession=PF05003.3; Description=Protein of unknown function (DUF668)
MGCVCSRGLPEDAPPAPGPLAAAYDARRLRYGPGDLDSSELAIPRPKPPHSHKVSDTGTFLGRASIAGLEKAVEVLDTLGSSMTNLNPGSGFLSGGTNRGNKACILAFEVANTIAKASSLWRSCSDESIEELKKEILHSDGVRALVSSNTIELLHIAAVDKREELAIFSKEVIRFGNLCKDPIWHNLGRYFDKYASEKLVTDNTPQDHSKESMEATVQQLINLAQNTSELYHELHALDRFEQDFKRKFRDEESVPAARRGTNGESNSGLEEVYSDHVTNSAKDPFTTKEMKLENVLVAWCYALQSIMILHSELKRQRKLVKNLKKKSLWSRTLEEIVEKLVDIVIFLHKQIRDSFNETGTDFCASEQTQNKRLGSCGLALHYANIINQIENIVSRPLSLPPSARDNLYHGLPITVKSALRSRLQTYNPEEERTVAQIKAEMQKTLRWLLPIAENTISCFLLIHSPGHTKVLDGSASGQILVAAPPNMHPPCSQERHEQEIRLPAQRHPHPDAPSRRQGENRALHAGAGGAPPPPGDPGEEQRLRDQQIVEARRVVPVPQGGGNGPPTGDGDSAQHVAGEQPHGLEPAVGLRARGAGPPELQEDGLRQEPELRASAWPPTEQGPQELGPVPEPRQLPGDGVRQDPRRAAARPGQGS

SEQ ID NO: 43267 - protein, 163 aa, Zea mays
  Coding DNA Sequence Number=SeqID_1488
MAIGDRVTRPDVGRKNGRNESKVAHGDDDPSTMDAGWKWTGERERRRDGGAGYTTRHARRPGHGTKSDPSLPPPTARPRPKAPDVVSFRLGSGARPLVNLIALAPPSPSPPPPFRSTPLQSTRDFKVHSNPRPPGTTNSNSAAGKRRSDDELPGSTTSSKLQA

SEQ ID NO: 43268 - protein, 181 aa, Zea mays
  Coding DNA Sequence Number=SeqID_1489
  Gene Ontology: Mol. function=RNA-directed DNA polymerase activity; Biological process=RNA-dependent DNA replication
  Homolog annotation: Hit_ID=Q8S472; Match level="QueryCoverage=98%, HitCoverage=16%, E-value=1e-23, Identity=38%"; Hit description =Putative gypsy-type retrotransposon RIRE2
MVLTRRVRQFLEMVATAFSRWPGWSVRGGDFFFFTCEDGGSSGACQDVPTLPFLSTGLASIARVLPLSKNSPHYVLSVSELGRYVEQVHNCHWSPVPKLVDEHLVRGAIGEGAQYVGVSGVGDVGEFVSFLIKPLDVVLEALSILLGAPLQVLGASRPLVGALEISDKGLLEVGPVVDGSG

SEQ ID NO: 43269 - protein, 71 aa, Zea mays
  Coding DNA Sequence Number=SeqID_1490
  Subcellular localization annotation: CTP_CleavageSite=51; ConfidenceScore=5.10e-01
MSGRRMKRRRARCSFFMAAWCCFIRLSPRFVDTVATCTARGLSLSYSLPLRSERVPNLQRFLITWNEERLN

SEQ ID NO: 43270 - protein, 117 aa, Zea mays
  Coding DNA Sequence Number=SeqID_1491
  Gene Ontology: Mol. function=receptor activity; Cellular component =integral to membrane
  Homolog annotation: Hit_ID=Q8H399; Match level="QueryCoverage=85%, HitCoverage=22%, E-value=1e-26, Identity=54%"; Hit description =Putative membrane protein PTM1
GRNDGESSDVPEVEQRLDLMVAVSLGWITFEVHFKSMDEYNERWRATWVIPTVWQLIFSLLCAFCLMWTPSQSATRPGPLSYVDNLAISVYKDATIIILRTDSDVYAKAAGDGGKRV

SEQ ID NO: 43271 - protein, 144 aa, Zea mays
  Coding DNA Sequence Number=SeqID_1492
MGKGTKRKREPTPPSDDFGDSEYSEEEFSSESEGSPAPVSPPTSSDDSDDSQGIAAEVWSYIRAIERSGLEGSDESEYSSDEEDSDGGDEGEGDDDDDDDDDDGDGDGSGSGRGGGDGSRDSTKGGSSKGSTKGGGGGRGRASG

SEQ ID NO: 43272 - protein, 279 aa, Zea mays
  Coding DNA Sequence Number=SeqID_1493
  Gene Ontology: Cellular component=nucleus
  Homolog annotation: Hit_ID=Q5N7H4; Match level="QueryCoverage=19%, HitCoverage=6%, E-value=4e-14, Identity=62%"; Hit description=Zinc finger (CCCH-type) protein-like
  Pfam annotation: Domain name=GYF; Domain location=223-279; Score =28.2; E_value=2.9e-05; Accession=PF02213.6; Description=GYF domain
MDGALYMPRWLKSINEVFEYLDKKQLLRKPSEQQRLLEEVPQVIPETEDNKDTEFQVTGQDKPIQKSTVALQGTYVTRASFLKSHTGKKSKAAIAALPKYLHRHAATEANNAGDISSVQELDGEGVKASTDVDTTGTDVQHGSIEATKANAAGDAPGAFFQKQCAKAADVITIDDDDEDNSHRCYKEEQTAVVDLEADYAGDNHPVQLEANSRGHKHVKVKERIWYYIDPQGDEQGPFTMQHLSIWWSNGFFPGDFRVWRTGQTSNDAILLVDALQMTR

SEQ ID NO: 43273 - protein, 103 aa, Zea mays
  Coding DNA Sequence Number=SeqID_1494
  Homolog annotation: Hit_ID=Q5N7H4; Match level="QueryCoverage=38%, HitCoverage=4%, E-value=1e-08, Identity=67%"; Hit description=Zinc finger (CCCH-type) protein-like
MRELRTTYARRGVSQTTVASHEDPVWHASSAASRERPGSHVNDKGDLEEKARSLRREIVNHWISKELQRLERLIDRASEKGWRKEYPCYTSSFNHVLMFLNVE

SEQ ID NO: 43274 - protein, 118 aa, Zea mays
  Coding DNA Sequence Number=SeqID_1495
MGIDVEDPGVDSTAAIRDDMEDIWVAKSPSWRWTSARIVVIVSSVGDGVADATLSPLLEPGMTDTKLARSSRLQRLYVWLLGGGLEEDRAGAVMNFRKAPHPVKNRFFGGITSQLWKA

SEQ ID NO: 43275 - protein, 151 aa, Zea mays
  Coding DNA Sequence Number=SeqID_1496
  Gene Ontology: Mol. function=binding; Biological process=metabolic process
  Homolog annotation: Hit_ID=Q10AH5; Match level="QueryCoverage=87%, HitCoverage=29%, E-value=2e-46, Identity=75%"; Hit description =Pentatricopeptide, putative, expressed
MPFPSRHQRLASLTKLLTTHVNAGRHRDALGLFSRMLSAPDLPPLTDPSFAHAFPLALKSATALRVPGAAASFHALAAKCGLLSSPFLASALVASYGARVVGGACGASYELTRRLFDELPARNAVVWSAMISVHVRAGDLAAAAWALDHMD

SEQ ID NO: 43276 - protein, 155 aa, Zea mays
  Coding DNA Sequence Number=SeqID_1497
  Subcellular localization annotation: CTP_CleavageSite=35; ConfidenceScore=5.55e-01
MHACPQRGPPSPRHGAAVALGPRPGTVALPTRRPPAAPARPPMPARGVPDAACPRRARDVLDAACPRRARDSFVARTTRSLRAQRGQLAVSLAPVAMRMVVLVLTMVMVGVHTVGIKCARPEVLRIWLRAGWPWTSPEMPSGEAEMRFLSKGVLG

SEQ ID NO: 43277 - protein, 801 aa, Zea mays
  Coding DNA Sequence Number=SeqID_1498
  Gene Ontology: Mol. function=binding; Cellular component=nucleus; Biological process=mRNA editing
  Homolog annotation: Hit_ID=Q6K2P5; Match level="QueryCoverage=70%, HitCoverage=80%, E-value=1e-101, Identity=33%"; Hit description =Putative pentatricopeptide (PPR) repeat-containing protein
  Pfam annotation: Domain name=PPR; Domain location=210-244; Score =21.4; E_value=0.0033; Accession=PF01535.11; Description=PPR repeat
  Pfam annotation: Domain name=PPR; Domain location=272-306; Score =39.1; E_value=1.6e-08; Accession=PF01535.11; Description=PPR repeat
  Pfam annotation: Domain name=PPR; Domain location=334-367; Score =17.2; E_value=0.058; Accession=PF01535.11; Description=PPR repeat
  Pfam annotation: Domain name=PPR; Domain location=368-401; Score =11.6; E_value=0.31; Accession=PF01535.11; Description=PPR repeat
  Pfam annotation: Domain name=PPR; Domain location=429-463; Score =32.8; E_value=1.2e-06; Accession=PF01535.11; Description=PPR repeat
  Pfam annotation: Domain name=PPR; Domain location=527-561; Score =24.9; E_value=0.00029; Accession=PF01535.11; Description=PPR repeat
  Pfam annotation: Domain name=PPR; Domain location=598-632; Score=6.9; E_value=1.1; Accession=PF01535.11; Description=PPR repeat
  Pfam annotation: Domain name=PPR; Domain location=665-699; Score=2.7; E_value=3.6; Accession=PF01535.11; Description=PPR repeat
  Pfam module annotation: Pfam domain module=PPR::PPR::PPR::PPR::PPR::PP R::PPR::PPR; Domain location=210-244::272-306::334-367::368-401::429 -463::527-561::598-632::665-699
  Subcellular localization annotation: CTP_CleavageSite=74; ConfidenceScore=5.44e-01
MNKDEISISPSNPICVSSCSSGKKFKILRRYHQQSTTRTNPIQLGEGVTPRPSATSSSLPMLRRRRRVIPLLVRCSQLRRQSTVSRYRPLPRRRARGDTRYTSNDDTLTLGLARRRRDATGNAALRCHGTVAEPSTPPWQRDAQDDVCSTTGHDPRPQHGAAAARAVLDDDETPGADAYAAMVASRLRERDLTRAEALFGAAPAAARGLYLDTAMLDGYAKAGRVDRARELFDAMPVKNVVTWTSMVSGYFRAGRVQEARELFDVMPERNDYSWTTVVQGYARNGMLREAREMFDRMPQRNVVAWTAMVKAYVDCGQIQQAWELFDMMPERNSYSWNAMISGFLSIGKVAEAVQLFERMPHRHKNVVSWTTMVAGLANNGLACRAREFFDRMPAKDTAAWNAIITVYANNGQLNEAQRLFDSMLAKDLVTWSTIIEAYSKNERKHEALNMFLLMRHSAVSPNIRTLISILVISESTVEVKQIHGLVIALGFLSETSLGNALLTMYSRSGDLMSAWFAFKRLEQKDAITWTSIVQAFADHGCGYHALLGFAQMLRHGYKPSSTTFTAVLSACRHVGLVGKGRKMFKSIYHVYGLEPTIEHYSCLVDLLGRAGYVREAKELVDGMQQGMRDEAILATLLGACVVHNEVEVAREVGEDLVRFDPSGTGGYRLLANVFASHGMWDETANVWKVMRGSKAKRTPGFSQIEVNMRNHVFYSRDQEHPQCAEIYEMLIDTIAPQMKDEVSIVLSLAYHNWMQIQRDIEGAVALLLFRLSHTRLIAAEGRPPQLNPHPYAEYTAASGGS

SEQ ID NO: 43278 - protein, 284 aa, Zea mays
  Coding DNA Sequence Number=SeqID_1499
  Gene Ontology: Mol. function=binding; Cellular component=nucleus; Biological process=protein kinase C activation
  Homolog annotation: Hit_ID=Q10AH5; Match level="QueryCoverage=51%, HitCoverage=33%, E-value=4e-65, Identity=81%"; Hit description =Pentatricopeptide, putative, expressed
  Pfam annotation: Domain name=PPR; Domain location=120-154; Score=2.7; E_value=3.5; Accession=PF01535.11; Description=PPR repeat
  Pfam annotation: Domain name=PPR; Domain location=18-52; Score=7.2; E_ value=1; Accession=PF01535.11; Description=PPR repeat
  Pfam annotation: Domain name=PPR; Domain location=54-88; Score=7.4; E_ value=1; Accession=PF01535.11; Description=PPR repeat
  Pfam module annotation: Pfam domain module=PPR::PPR::PPR; Domain location=120-154::18-52::54-88
MSLFQHMEDQDDVRPDSIMFLSLMAACAHSGHADDALQYFDVLTRRYGVEACGDHYSCLVDVLGRAGRLHQAYELLRTMPVKVTAKAWGALLAACRKHGDVRLAEVAGRALFEIEPENAGNFVSLANIYSGRGMHEDAERVRREMEQRVTFYEKSGIQFRSVIVGAQKILFRCSDHLSMERIMKFSSGNGVNQLQQSKQPALIRSEQKREIRNKKEKRNPNGRRGWDGAIQRTAVPKVHNKPIKRPRKRVQTKEQRDNRRHPGLAHRTVRCATGQCPVHQRTSS

SEQ ID NO: 43279 - protein, 98 aa, Zea mays
  Coding DNA Sequence Number=SeqID_1500
MAGTRALRRAGAPRPLHAPRRAAPFAGATPWPGRGVGHATGRWPPSRGKKGQGWEEEEELGLTVGGAKAVQADGVEGGSDRRGRGGGGRGKERASGVE

SEQ ID NO: 43280 - protein, 462 aa, Zea mays
  Coding DNA Sequence Number=SeqID_1501
  Gene Ontology: Mol. function=RNA-directed DNA polymerase activity; Cellular component=mitochondrion; Biological process=RNA-dependent DNA replication
  Homolog annotation: Hit_ID=UPI00004C1732; Match level="QueryCoverage =97%, HitCoverage=29%, E-value=0.0, Identity=78%"; Hit description =UPI00004C1732 related cluster
  Pfam annotation: Domain name=rve; Domain location=204-363; Score =115.9; E_value=1.2e-31; Accession=PF00665.16; Description=Integrase core domain
MGRHPAPNSSDPTGTPDHVFRWVANEDRSRHGPALHLAPREAPTLRATPPFPGVQQCGRLIIYQVMKNSHCRDPKTKAYCDEVRREEDKLNGLELNHIARRYNETADELAKIASGRTTVPRTSSPETCINPPSRPTTRPSPRRPRPSPRHPRLSPRYPRLSPWYPRPPRPTAVADATRIVRTCEGCQFYARQTRLPAQALQTIPITWPFAVWGLDLVGPLQKAPGGYTHLLVAIDKFSKWIEVRPLNNIRSEQAVAFFTNIIHRFGVPNSIITDNGTQFTSRKFLDFCEDHHIRVDWAAVAHPMTNGQVEHANDMILQGLKPRIYNDLNKFGKRWMKELPSVVWSLRTTPRRATGFTPFFLVYGAEAILSTDLEYGSRGRGPTTAKAIELTEKTRWTRWKRLRTWPYYTRRGTSSPCDATTPEGSGPETSRWVTWCFGCDKTPEGGTSSRLPGKGHSSSPRF

SEQ ID NO: 43281 - protein, 358 aa, Zea mays
  Coding DNA Sequence Number=SeqID_1502
  Gene Ontology: Mol. function=transporter activity; Cellular component= intracellular; Biological process=transport
  Homolog annotation: Hit_ID=Q5NBA0; Match level="QueryCoverage=83%, HitCoverage=98%, E-value=1e-137, Identity=81%"; Hit description =Putative sec14 like protein
  Pfam annotation: Domain name=CRAL_TRIO; Domain location=140-309; Score=56.5; E_value=8.8e-14; Accession=PF00650.10; Description =CRALTRIO domain
  Pfam annotation: Domain name=CRAL_TRIO_N; Domain location=54-125; Score=43.3; E_value=8e-10; Accession=PF03765.5; Description=CRALTRIO, N-terminus
  Pfam module annotation: Pfam domain module=CRAL_TRIO::CRAL_TRIO_N; Domain location=140-309::54-125
MRARLYRSLRYVIYLNATALIVLLSFDYVILVAFLFDFLQSRRLKLVYSSNGGTTEKIPSPEEQREKINELRKELGEHSSAAIKDFLSDASLARFLRARNWNVQKASKMMKAAVKWRLAFKPENICWDDIAEEAETGKIYRADYKDKHGRTVLVLRPGLENTTSAIGQIKYLVYSLEKAIMNLTEDQEKMVWLTDFQCWTLGSTPLKVTRETVNVLQDCYPERLGLAILYNPPRIFESFWKIVKPFLDHETRKKVKFVYSNDKESQKIMAEVFDMEELDSAFGGKNPATFEYNSYAEQMQDDDKKMGSSHGSANSLLGSAGKEANGADSDASSEASFYSGTDSPTHENGEHSIAKKNG

SEQ ID NO: 43282 - protein, 65 aa, Zea mays
  Coding DNA Sequence Number=SeqID_1503
MALGLAAQGSVARGVVLARAGQCAGAGVARAAWEAGVARLGLLGAAGTRVGARVGERERIFFKIN

SEQ ID NO: 43283 - protein, 64 aa, Zea mays
  Coding DNA Sequence Number=SeqID_1504
  Subcellular localization annotation: CTP_CleavageSite=54; ConfidenceScore=5.66e-01
MAPVLPAAPSSKADLSHGPLSSPRRRDITSNLLRFGVFAVDSESRRRRSCRRPRASSALLLNHP

SEQ ID NO: 43284 - protein, 151 aa, Zea mays
  Coding DNA Sequence Number=SeqID_1505
  Gene Ontology: Mol. function=translation initiation factor activity; Cellular component=eukaryotic translation initiation factor 3 complex; Biological process=translational initiation
MRGHTRQELVVLSRGYLPDAGARVRIIWESGRITLSCHRGGRVVATGLDTLVEVQYLVKVVVDTRGTGAIRVTAGAMIAFQGFRMQGVATSLFHQAEVDLDAVERSEGWRFTDRHDAALQLNLLQLHDADQLCSQLPLYGIHSMTGADPFY

SEQ ID NO: 43285 - protein, 636 aa, Zea mays
  Coding DNA Sequence Number=SeqID_1506
  Gene Ontology: Mol. function=potassium ion transporter activity; Cellular component=integral to membrane; Biological process =potassium ion transport
  Homolog annotation: Hit_ID=Q7XLC6; Match level="QueryCoverage=99%, HitCoverage=100%, E-value=0.0, Identity=72%"; Hit description =Probable potassium transporter 11
  Pfam annotation: Domain name=K_trans; Domain location=49-636; Score =733.5; E_value=1.4e-217; Accession=PF02705.7; Description=K+ potassium transporter
MASLSESELTNRGSMWELDQNLDQPMDEEAGRLKNMYREKKFSSALLLRLAFQSLGVVFGDLGTSPLYVFYNIFPRGIGEGEDEDVIGALSLIIYTLTFIPLLKYVFVVLRANDNGQVLSASGGIRVQNQNMSTGTEALFADLCHFPVLAIQVKCLQNRVAICVRSYMLAKVKAHTGSIVHNTFDSVYSHYAIYWPAFVIATAAAIVASQATISATYSIIKQALALGCFPRVKIVHTSKKFLGQIYMPDINWILLVLCIAVTAGFKNQSQIGNAYGTAVVIVMLVTTFLMVPIMLLVWKSHWILVVTFIVLSLMVEVPYFVACILKIDQGGWVPLVVATAFFLIMYVWHFCTVKRYEFEMHSKVSMAWILGLGPSLGLVRVPGIGFVYTELASGVPHIFSHFITNLPAIHSVVVFVCVKYLPVYTVPTEERFLVRRIGPRSFHMFRCVARYGYKDLHKRDEDFEKVLFDCVLFFVRLESMMEGYSDSDEFSVPEQAPGIGRAAFLSVGERTCATVCSSGDLSFSSQDSVVPAAAQSSRAPTGLRVLHYSASASAAGQGSSGGTVGDELEFLNRCKDAGVVHILGNTIVRARRDSGVVKKLAVDYMYAFMRRVCRENSVIFNVPHESLLNVGQIFYI

SEQ ID NO: 43286 - protein, 238 aa, Zea mays
  Coding DNA Sequence Number=SeqID_1507
  Gene Ontology: Mol. function=oxidoreductase activity; Cellular component=peroxisome; Biological process=metabolic process
  Homolog annotation: Hit_ID=Q9LTV6; Match level="QueryCoverage=80%, HitCoverage=64%, E-value=9e-63, Identity=64%"; Hit description =Peroxisomal 2,4-dienoyl-CoA reductase
  Pfam annotation: Domain name=adh_short; Domain location=1-125; Score=- 55.2; E_value=0.024; Accession=PF00106.15; Description=short chain dehydrogenase
AVGFDGDVRNQEDAARVLAATVAHFGKLDILVNGAAGNFLASPEDLTPKGFRTVLEIDTLGTYTMCYEALKYLKKGGPGKGPSTGGLIINISATLHYSASWYQIHVSAAKAGVDSITRSLALEWGTDYDIRVNGIAPGPIQDTPGLRKLAPEEMSKGLREMMPLFKFGEKRDIAMAALYLASDAVITEQGLSRLYIVIFARGTAAVARVEGAVAGRGGGAATTDTQPRGRGERRGEEG

SEQ ID NO: 43287 - protein, 70 aa, Zea mays
  Coding DNA Sequence Number=SeqID_1508
MEKFIALNFLLSVHLSIKDGTSNRMTENGNAGKRHKEPCCGLVTDLMSFALHLGSIYKMASLELTKTWDK

SEQ ID NO: 43288 - protein, 183 aa, Zea mays
  Coding DNA Sequence Number=SeqID_1509
MGVMLRETASTAWRVFRRFELHIEFLRLFGGRGRRARKVVVLRIILTTSASASRLPPRRTSATRSTRRRSFSSESEGSPAPASPPASSDDSDDSHGIAAEVWTYIRAVERAGLEGSDESEYSLVEENSSDPSEEGSGGDNGDGDDDGGDGDVGGDSGKGGDGSGKGGSGDGGGGSKGSNKASG

SEQ ID NO: 43289 - protein, 91 aa, Zea mays
  Coding DNA Sequence Number=SeqID_1510
MEPGGRTAVGAVESLLTSSCLLGVAQAALSFCQAGQWSSEVTAVTSALPGGERQDKGVRPPLHLRLLRFGRSVRRSSQGCFLAKTGPRASR

SEQ ID NO: 43290 - protein, 90 aa, Zea mays
  Coding DNA Sequence Number=SeqID_1511
  Gene Ontology: Biological process=response to stress
  Homolog annotation: Hit_ID=Q2QQA6; Match level="QueryCoverage=94%, HitCoverage=39%, E-value=1e-07, Identity=38%"; Hit description =Universal stress protein family protein, expressed
MGVNDGEEAGGLRAGAQPVQAISLLVKLQNIRLVSDLAYPLSFLRSSGEEFVEQCINQAECLTLAVRKQSKGVGGYLISTRWQKNFWLLA

SEQ ID NO: 43291 - protein, 173 aa, Zea mays
  Coding DNA Sequence Number=SeqID_1512
MEAVQSWARSRVREPGPVPVDASGILRSCAFPVGADGPTWAIWGWCFWIISLVLGRLLRVQPKGRRDTLCGVYMCVQVRCFSADNARFRVGLDTVCAAAAAAAALRILQLCRTLQGSLRPLLVWLRRARDCASWQAKLYRSTSTAGFSFSKCRRSPDSGGASRESLLTIQRYE

SEQ ID NO: 43292 - protein, 1292 aa, Zea mays
  Coding DNA Sequence Number=SeqID_1513
  Gene Ontology: Mol. function=phosphatidylinositol phosphate kinase activity; Cellular component=mitochondrion; Biological process =phosphatidylinositol metabolic process
  Homolog annotation: Hit_ID=Q2QVA9; Match level="QueryCoverage=80%, HitCoverage=65%, E-value=0.0, Identity=56%"; Hit description =Phosphatidylinositol-4-phosphate 5-Kinase family protein, expressed
  Pfam annotation: Domain name=PIP5K; Domain location=1093-1286; Score =80.6; E_value=5e-21; Accession=PF01504.9; Description=Phosphatidylino sitol-4-phosphate 5-Kinase
MTSRFPVALIEVGAPLGRGGSFHEASDEPSRDMCHSQRSGLPRDSQRSGWSRPSSGEAENSSEGRTRRRARQRNRPRARLGVRRGVVLYPNMEGKHIFSIAPDGHYSARIAYMGLFIGSCSFGHYRQIWKVWVPPKYRFFLWLVAMNRCWTADRLARFIGTLLLEGLASTLHSLAPQHGDLFLQWWKGASAIVSGGLEPTNEKREKWQATGAKGLSFLAASSRTECMQEIVKGPERFLVVCLSASIPTPHIHAIRPAPMRILLKGATREELKKIKRVLHFTVFAAYHLILETSFFADQKLFTTDKTTTGKEKCFKTNQQLLGSCYDNSKNSDTMNNTPTCDDQYPNQEKLIHTEKSVPLHLHDSKTMASEDSAGEEHIDSKGIQSYSSLPVSDPSTNFMQDMPSPDCAESKISGGFDGSTFTDTSKEVQKKELSSDNFQGTFDVICAESGAALNTQDILVSMSSQHIRNQAVCEQSHLSRITYYGYFDTSLGRYLQDTLLNEKHSCLSCGESPESHMYSYTHHNGTLTVLVKRLPLELTLSGETQGRIWMWTRCLRCNAKPTHRVIISSSARNLSFGKFLELSFSTHSATKKLPTCGHLLHRDCLRFFGFGSRVAMFIYSSVEIYSACKPPLSLEFNNRNKNDWLDIEVKNPIAYLHANIILFFKVLLKWKQLFTTIENVIQDLRSRYSSQAMGEDTNVSVDEDEGLLLEVSRMLTQEKNKVEVSLREFSRIAIPESFAHGILGLNWLYQQLLLGFYIWDLRLLHILQYTKVNTASSDNSIHESTAKNEPKSSASIAIQDTPSLKEIGTERKEATINSSGNFDDPFGDTMLDKVHLTAKLITKEKEHDLLNYQDHDVKSALSSLGEAADQFETIANVNCSEKLNTIPFMNDEQPAASNVLHHVVIPSDDEGKWFWNQFNQLEMEYKKELEGGSLYKFYLINKYTPCSSPLAQLKHQMDLGHFIAGHGGNIFSISEEEASSIIAYALIISEQQGFYYEAASSNLDKNASMLPSMSSPNESFENNHKFSRFAPTEELTSGFYDSFLSALKDLHHEIDLNNEKIALRSKYTVICIYAKQFHDLRKMCCPSELAYISSISRCKNWNAQGGKSKVFFAKSMDDRFIIKQIKKTEFDSFLKFGLEYFKHFGASQVSSNPTCLAKILGIYQVKETRNGKETRVNFMVMENLLFGHNILRRYDLKGALFSRYIPDSENSEKNMNVMDYSLLVGVDKEKKELVFGIIDYLRQYTWDKQLESWVKTSLVVPKNLSPTVILPREYKMRFRAFMSQYFLSVPDA

SEQ ID NO: 43293 - protein, 153 aa, Zea mays
  Coding DNA Sequence Number=SeqID_1514
MGNPPLPSARSRSVFLKGNDGPAWVRGPTDHTDGCEDEDEDERHRRQRARGPFLECAAESRAAPRVSPAAVPEDALIIAIGRPQLSLPGDTAGPTPTKRHGSGTEGRHSVFAPIACCAAFPSAHPIHPSPDTQAAAGCRPRPGTGRQSGVQGI

SEQ ID NO: 43294 - protein, 107 aa, Zea mays
  Coding DNA Sequence Number=SeqID_1515
MALCARSSSSHALDSRRMDAGSKSAAILCPALGGNKKSRGGLHPAALPAHGHQTAERRPADSRTAKKGAFAPAPARNRTVVRLLPSLGSAGVLEDVDPSAIRFVDEG

SEQ ID NO: 43295 - protein, 124 aa, Zea mays
  Coding DNA Sequence Number=SeqID_1516
MEAAGGARARPAAAEWGGSRRRREGSRRRDGLGRRVARPAAGGGGKKKGSVTFTIDCCGSGKGGGRRRQGRRRLLPGSRWGGAGGAGEGSTGGWAGEVAAGREKNWLYTILETLTLTGVGQSIK

SEQ ID NO: 43296 - protein, 65 aa, Zea mays
  Coding DNA Sequence Number=SeqID_1517
MGNWSSVVVRASKLCREASPWHRERFCGPFWRIGLFVALESLTGATPTPQIRHDRGWVPAPRRSP

SEQ ID NO: 43297 - protein, 124 aa, Zea mays
  Coding DNA Sequence Number=SeqID_1518
MGNWSSVVVRASKLCREASPWHRERFCGPFWRIGLFVALESLTGATPTPQIRHDRGWVPAPRRSPSPFFGSIVRRNQVLAWSGHGAAVDPWPLFFLVGGKKKPGGPLRVRWAIQIRLGMRDEGS

SEQ ID NO: 43298 - protein, 337 aa, Zea mays
  Coding DNA Sequence Number=SeqID_1519
  Gene Ontology: Mol. function=transferase activity; Cellular component= integral to membrane; Biological process=transport
  Homolog annotation: Hit_ID=Q10MC5; Match level="QueryCoverage=99%, HitCoverage=64%, E-value=1e-167, Identity=77%"; Hit description=O -acetyltransferase, putative, expressed
  Pfam annotation: Domain name=Cas1p; Domain location=1-155; Score =219.4; E_value=8.1e-63; Accession=PF07779.2; Description=Cas1p-like protein
VLFLMYHYFNAKEIYNAIRVFIAAYVWMTGFGNFSYYYVRKDFSLGRFAQMMWRLNFFVIFCCIVLNNDYTLYYICPMHTLFTLMVYGALGILNKYNEIRSVMAMKFVACFLVVVLVWEVPGYTDPSKPDLPRLHEWQFRSGLDRYIWIVGMIYAYYHPTIHRPLGGNHMIVSKSVEKWLEKLEETEMRTKLYIKTSIVTVSMMAGYLWYEYIYKLDKITYNKLHPYTSWIPITWLGKITLETYISQFHIWLRSSVPNGQPKWLLSIIPNYPLLNFMLTTAIYVAVSHRLFELTNTLKMVFVPNRDNKRLSYNFVAGTAISAALYFVSFVLIGIAGY

SEQ ID NO: 43299 - protein, 84 aa, Zea mays
  Coding DNA Sequence Number=SeqID_1520
MGNASGRDEDAAAVDGDGADVEDGGGDSSERDFPSYGSGGANHVRRACSVGVVGGGAAAGSPPGSPGHSLSPRMFVPQVAHFVA

SEQ ID NO: 43300 - protein, 204 aa, Zea mays
  Coding DNA Sequence Number=SeqID_1521
  Subcellular localization annotation: CTP_CleavageSite=28; ConfidenceScore=5.52e-01
MQSACNRAKRAHPFDSNTPSMKTQAHTSCNRRAGCYVRATAPPLAPLPRLLDCGTSTATQGNPAYDPTVPARRVGHGSASYGRRRDGQYGQKWADSNGGGRRAEAADRRHLWQGKRATLRLRHNDRIKKRDRERGYPERDPSPRRKRAPSLPTDQRFEGWPLGGVQQPPQSARAPRPLLVRGSRAGPSEGFNGRLRPLGLRAHY

SEQ ID NO: 43301 - protein, 249 aa, Zea mays
  Coding DNA Sequence Number=SeqID_1522
  Gene Ontology: Mol. function=transferase activity
  Homolog annotation: Hit_ID=Q10MC5; Match level="QueryCoverage=98%, HitCoverage=37%, E-value=8e-70, Identity=59%"; Hit description=O -acetyltransferase, putative, expressed
  Pfam annotation: Domain name=Cas1p; Domain location=167-249; Score= -81.7; E_value=0.00034; Accession=PF07779.2; Description=Cas1p-like protein
MAEAVASAGRLAMDSSTSVSPGQVSAILGFLWVFAAWAYAEVLFHRKNTASIKTILSAIMVLPPASITCFLQPNATDYKLIWLPETLSNTDRSRHSDVNLAVMDDSSVKAEDQTMLLEEGGQAMAAKPAYTSLTSQILRLIFMDQLLLLENRLTLRALSEFGGYLLYFYICDRTNLLGESAKNYSRDLFLFLYFLLIIVAAMTSFKVHQDKSSFTGKSVLYLNRHQTEEWKGWMQCFLGLRNDFFNNCP

SEQ ID NO: 43302 - protein, 35 aa, Zea mays
  Coding DNA Sequence Number=SeqID_1523
MAVLTGYPRDRLRTAGQTDKLIYLVTALPVWHSPG

SEQ ID NO: 43303 - protein, 651 aa, Zea mays
  Coding DNA Sequence Number=SeqID_1524
  Gene Ontology: Mol. function=binding; Cellular component =intracellular; Biological process=protein kinase C activation
  Homolog annotation: Hit_ID=Q10MC4; Match level="QueryCoverage=99%, HitCoverage=99%, E-value=0.0, Identity=74%"; Hit description =Pentatricopeptide, putative, expressed
  Pfam annotation: Domain name=PPR; Domain location=173-207; Score =22.5; E_value=0.0015; Accession=PF01535.11; Description=PPR repeat
  Pfam annotation: Domain name=PPR; Domain location=235-269; Score =35.4; E_value=2e-07; Accession=PF01535.11; Description=PPR repeat
  Pfam annotation: Domain name=PPR; Domain location=367-401; Score =42.9; E_value=1.1e-09; Accession=PF01535.11; Description=PPR repeat
  Pfam annotation: Domain name=PPR; Domain location=468-502; Score =20.6; E_value=0.0057; Accession=PF01535.11; Description=PPR repeat
  Pfam annotation: Domain name=PPR; Domain location=504-538; Score =15.4; E_value=0.11; Accession=PF01535.11; Description=PPR repeat
  Pfam annotation: Domain name=PPR; Domain location=540-574; Score =15.3; E_value=0.11; Accession=PF01535.11; Description=PPR repeat
  Pfam module annotation: Pfam domain module=PPR::PPR::PPR::PPR::PPR::PP R; Domain location=173-207::235-269::367-401::468-502::504-538::540 -574
MLTVSILDAQLSRCCSARHLLQIHAQFLASGLLADAYAASRLLLFTTSATAARLLPHPLHHSLQLFGLVRSPNAFTCNTLLKAALRQGFPHLCFPLYASMPAAPDTYTHPLLAAACAARGDVREGLQVHSHSVKHGFSDNLYLRNALMHMYSACGCVASARRVFDAGPVWDAVSWNTILATYVRDGDVEQAVKVFTRMPERSAAAVSAMVALFARRGMVEEARGVFDGAEHRDAFTWTAMVSCFERNDLFMEALAVFSDMREEGWPVDEAVMVSVVAACAKSGVIQNGEVCHGLVVRAGLGSRVNVQNVLIHMYSSCQDVVAARRLFDNGESLDHFSWNSMISGYLKNGRVEDAKALFDVMPDKDNVSWSAMIAGCVHNNQSSEALNVFDSMRAHEIKPDDVTLVSVISACSNLSALEQGKLVHEYIRKYQYNITIVLGTSLIDMYMKCGCMEAALEVFDMLEEKGTPCWNAVIVGLAMNGLVTRSLDMFSEMEATGTAVPNEITFTGVLSACRHGGLVEEGRQFFKLMQNKYQIVPNIRHYGCMVDLLGRAGYVREAEDMIQSMPMSPDVPAWGALLGACWKHGDSEVGERVGKKLVKLDPDHDGFQTMLSNIYASEGMWQCVKDLRGSMKQQHVAKVAGCSMVEPSHSS

SEQ ID NO: 43304 - protein, 283 aa, Zea mays
  Coding DNA Sequence Number=SeqID_1525
  Gene Ontology: Mol. function=calcium ion binding; Cellular component =plasma membrane; Biological process=G-protein coupled receptor protein signaling pathway
  Homolog annotation: Hit_ID=P27164; Match level="QueryCoverage=57%, HitCoverage=80%, E-value=5e-66, Identity=71%"; Hit description =Calmodulin-related protein
  Pfam annotation: Domain name=efhand; Domain location=12-40; Score =3.1; E_value=6.8; Accession=PF00036.22; Description=EF hand
  Pfam annotation: Domain name=efhand; Domain location=130-158; Score =43.2; E_value=8.8e-10; Accession=PF00036.22; Description=EF hand
  Pfam annotation: Domain name=efhand; Domain location=57-85; Score =38.9; E_value=1.7e-08; Accession=PF00036.22; Description=EF hand
  Pfam annotation: Domain name=efhand; Domain location=94-122; Score =42.1; E_value=1.9e-09; Accession=PF00036.22; Description=EF hand
  Pfam annotation: Domain name=efhand_Ca_insen; Domain location=88-157; Score=1.2; E_value=0.071; Accession=PF08726.1; Description=Ca2+ insensitive EF hand
  Pfam annotation: Domain name=efhand_like; Domain location=94-175; Score=-11.7; E_value=0.1; Accession=PF09279.1; Description =Phosphoinositide-specific phospholipa
  Pfam module annotation: Pfam domain module=efhand::efhand::efhand::efh and::efhand_Ca_insen::efhand_like; Domain location=12-40::130-158::57- 85::94-122::88-157::94-175
MADQLTDDQIAEFKEAFSLFDKDGDGESQREKATGHGEHTGAERMHRRVAMNPTEAELQDMINEVDADGNGTIDFPEFLNLMARKMKDTDSEEELKEAFRVFDKDQNGFISAAELRHVMTNLGEKLTDEEVDEMIREADVDGDGQINYEEFVKVMMAKAAKESNSLFSLDKDDGIIRIQRALKKADFQYLLDKSVHTLTTINVPKEVLEEIDKFRRRFLWARNENLIEGKCKVNWPTVVRPLDLGGLGILDIHRFVRTLRASLAVAGMGGSKCPLGRPRNSLQ

SEQ ID NO: 43305 - protein, 95 aa, Zea mays
  Coding DNA Sequence Number=SeqID_1526
MRPIGANPNGPHRRANNRNRDPIFPRGSPHAAEPCEDKSARITQDKLESTNHFATVVDTVLLLENTLRGSPGHRSASRIFIRQPGCIPSPVVTQD

SEQ ID NO: 43306 - protein, 90 aa, Zea mays
  Coding DNA Sequence Number=SeqID_1527
MDKKEHPETSQDPPPEMFEPLTMKKILAPSLEVKEEAVSTPPPPPPSKITLELQEQVLLGEEFDSILPSQSPLEVIKIISLLTYPGDVLE

SEQ ID NO: 43307 - protein, 55 aa, Zea mays
  Coding DNA Sequence Number=SeqID_1528
MMGPWASSGAQGHTRRGARDGNRLIIEEFLTVVRGRHGSAPHPWTGYLDVLTTGA

SEQ ID NO: 43308 - protein, 68 aa, Zea mays
  Coding DNA Sequence Number=SeqID_1529
MEYLVQPAHDQHARSQTKESAAALNPAHHKSSREQAMKQPQVMVHATQVCFVRRSAEGQQQMCLQAQG

SEQ ID NO: 43309 - protein, 131 aa, Zea mays
  Coding DNA Sequence Number=SeqID_1530
  Gene Ontology: Mol. function=oxidoreductase activity; Biological process=gibberellin metabolic process
  Homolog annotation: Hit_ID=Q673G2; Match level="QueryCoverage=86%, HitCoverage=33%, E-value=5e-23, Identity=53%"; Hit description=GA 2 -oxidase 5
MVVLAKGELEQIALPAAAPPRADVRSVDLSAPAGPAREAAARALVAACEEHGFFRVTGHGVPAELVRAAEAAAAGFFARPQGEKDGEAPTLGYGSKRIGGNGDLGWVEYLLLGVNPAVPAASASSSTLPLR

SEQ ID NO: 43310 - protein, 144 aa, Zea mays
  Coding DNA Sequence Number=SeqID_1531
ATFTNDDENKNNKNFKRRDSKKRQFHKKKGGNTYIVGDWLTDIDFTSRSSSCGSDDEEEKVGTLAIRFSSLPPLSPSSYIDLCLMTKVLEEGVSGSSNSRCIYRIIENITCNTYVRYFNRFLLILGKKRRMSFLEHIMSVNDLS

SEQ ID NO: 43311 - protein, 84 aa, Zea mays
  Coding DNA Sequence Number=SeqID_1532
  Gene Ontology: Cellular component=anchored to membrane
  Homolog annotation: Hit_ID=Q9FKT1; Match level="QueryCoverage=76%, HitCoverage=42%, E-value=1e-08, Identity=49%"; Hit description =Similarity to GPI-anchored protein
MGEEGKEKGYRAGKDQMAATTSYINLYGKYPPGLFSSECKEGKMGLSCADVPRKDSSTANSGYRAQSSLLALITVLSVVAALFY

SEQ ID NO: 43312 - protein, 76 aa, Zea mays
  Coding DNA Sequence Number=SeqID_1533
  Subcellular localization annotation: CTP_CleavageSite=61; ConfidenceScore=5.17e-01
MGRGIEGQGRSKRGYLDLDRCGSARMAVARLRRSPPTSCSGPGVSGFSRGVVYARAQKVVRASRLTGSTAGRARVA

SEQ ID NO: 43313 - protein, 76 aa, Zea mays
  Coding DNA Sequence Number=SeqID_1534
  Homolog annotation: Hit_ID=Q7XDU8; Match level="QueryCoverage=57%, HitCoverage=24%, E-value=4e-08, Identity=56%"; Hit description=GRF zinc finger family protein, expressed
  Pfam annotation: Domain name=zf-GRF; Domain location=42-76; Score= -3.8; E_value=0.088; Accession=PF06839.3; Description=GRF zinc finger
MELSSARSSPWSKGIRCISRRLELKELLVPYTEGSFDHEPAVFCYCGSKAAKLTSWIDDNLGQRYFRCRGARVQLV

SEQ ID NO: 43314 - protein, 263 aa, Zea mays
  Coding DNA Sequence Number=SeqID_1535
  Gene Ontology: Mol. function=DNA binding; Cellular component=nucleus; Biological process=regulation of transcription
  Homolog annotation: Hit_ID=Q10S65; Match level="QueryCoverage=53%, HitCoverage=45%, E-value=5e-62, Identity=84%"; Hit description=No apical meristem protein, expressed
  Pfam annotation: Domain name=NAM; Domain location=1-82; Score=99.5; E_ value=1e-26; Accession=PF02365.6; Description=No apical meristem (NAM) protein
MAKIGEREWYFFVPRDRKAGSGGRPNRTTERGFWKATGSDRAIRSSADAKRVIGLKKTLVFYQGRAPRGTKTDWVMNEYRLPDHSAAGRAAPPLPPKEDMVICKIYRKATPLKELEQRASAMEEMQRRIGGATATSLVQAAGSTGDDYLSSDDTYDTSFLQFPSSSSPAPSGDSYGAPAAAPREAKTEAADATTVTVASTSSSSSLLHAASVAGPAVRHGDLPTLQVPTHLGVADWTQMQDPFQLRSPWQDQLFFSPLAHLLY

SEQ ID NO: 43315 - protein, 85 aa, Zea mays
  Coding DNA Sequence Number=SeqID_1536
  Subcellular localization annotation: CTP_CleavageSite=60; ConfidenceScore=5.41e-01
MGDVRGDRQQGGSHGSRGVRPAGPPAQHVGVSFANRAWVLRSRTNERIENLVSFRCRFVRGTLKTPNSQLVTPISIKLQRPDGCD

SEQ ID NO: 43316 - protein, 109 aa, Zea mays
  Coding DNA Sequence Number=SeqID_1537
  Subcellular localization annotation: CTP_CleavageSite=35; ConfidenceScore=5.26e-01
MPSPLATVSPAKVAAAPVWWVADLLRWRRRTVAVVAGSGSGSEPGPGAREANFEAERCSDEEEGERQAAMERLRRLEDCVVAAENGCERVYRALVNARVSLLNVLTPCF

SEQ ID NO: 43317 - protein, 243 aa, Zea mays
  Coding DNA Sequence Number=SeqID_1538
  Subcellular localization annotation: CTP_CleavageSite=54; ConfidenceScore=5.03e-01
MKYYLAVYDALMHIDTLNFVSRTIVHRRLLSFNRFPSLDASTWFTFPSPLQFVDCSAIQPGGAWYQQNNLSALASYAYRLLPEDGQHRRHLLLQRHRHHDHQRPNARCGCLQLQLSVPVGASPPTNLSPSTGFTPPVGSSPPSSSEFAPPVAGTTPPSGSDLGPGFGTPSGSFNGTGSFRPSGTLNPYNGVSRGLPRVGLFTALSAAAVAVLLVSMDAILPRRHRCRANATTTMFRPSCACGS

SEQ ID NO: 43318 - protein, 41 aa, Zea mays
  Coding DNA Sequence Number=SeqID_1539
MKPREQEAQWWLSFWLLMEASLAIKSSYCSEVERVPTPLAK

SEQ ID NO: 43319 - protein, 283 aa, Zea mays
  Coding DNA Sequence Number=SeqID_1540
  Gene Ontology: Mol. function=structural constituent of ribosome; Cellular component=ribonucleoprotein complex; Biological process =translation
  Homolog annotation: Hit_ID=Q8H3I3; Match level="QueryCoverage=91%, HitCoverage=95%, E-value=1e-104, Identity=70%"; Hit description =Putative 40S ribosomal protein
  Pfam annotation: Domain name=Ribosomal_S2; Domain location=23-166; Score=229.5; E_value=7.1e-66; Accession=PF00318.10; Description =Ribosomal protein S2
MAAAAGGGAVRALSQKEQDIQMMLAADVHLGTKNCDFQTERYVFKRRTDGIYIINLGKTWDKLQLAARVIVAIENPQDIIVQSARPYGQRAVLKFAQYTGAHAIAGRHTPGTFTNQLQTSFSEPRLLILTDPRTDHQPIKESALGNIPTIAFCDTDSPMRMVLQMRGTILPGHKWEVMVDLFFYRDPEEAKEQEEEVAAAPEFAAITDYQGADQWGGDQWTSDVAAPPVAPTGADWGAAPAPVPTGEGWDQAGAPVPADGTVPPVVAPTGWDQAAPPTAQGWE

SEQ ID NO: 43320 - protein, 259 aa, Zea mays
  Coding DNA Sequence Number=SeqID_1541
MVHGHGDGNHHQHQQLPRYSAAAAATGVARASKKSKPKKIPQRGLGVAQLEKLRIEEQKMEGSMPVSGPTHLGVGVGGFGHLLPMHPPPHAPLPLLPRPGADGGVHCGYPSVLWDPASASAVADPMKHPFYKRSLCPLPPLPTAAMRAECTCCWLPSPELTVKQWHGQVSVGLSLTAASSSHPTEPPSNQMYSSGGGGAETAAAEDDEDRHGSASASSSASASRPFYSFMPAGPVRIDRPRIGIKADDASDGVDLELKL

SEQ ID NO: 43321 - protein, 193 aa, Zea mays
  Coding DNA Sequence Number=SeqID_1542
ELLSPDFTSANEPRLRRCLLEPAGSSSPTRSHPIHQPGSRVPLPLRTLSSSSFAAAGTSFEKLELATAGAADGKRSIDLVDHGWYGAAHARAAVSLRWRMTPPWSHGSSTFQCACTPAVVTLTAWASTLTTVGRGYKTSKHICGGHELWSVAAENVGSTAVVTSVLIPCCGRQLRRFRYRSPPWKGCRVEMAD

SEQ ID NO: 43322 - protein, 98 aa, Zea mays
  Coding DNA Sequence Number=SeqID_1543
MPQMLLDYKVSVSQVEGEHPLCKIDSYMKCSELKWVQLEGPTYNVCYTFLQIDVMSKFFKLMMAYCVLEVLRPLYESPKIPAQKITVAICVIDQFRCY

SEQ ID NO: 43323 - protein, 343 aa, Zea mays
  Coding DNA Sequence Number=SeqID_1544
MQLVHRAEEHVYGLGGMHMELCADTQRRQPQCGHDECDGPACCCIVVCRSPPPPKPGKEATTLFQRQLKSVFAMEEPNNSGAGRRREREEMDGSASPKRVLLRGGPGPGTCEGDGSPSPPSASGGLCWALATAAAGGYNSYMRMMQAAMGMAAGARAPPPRTLRHPPRHAETTVEPSRGPGIKRQAQMQSASARPGAQGGEHAAPALRPRSTSSSEQLITFSGFVVAQKQPPPPPPPCCSRDHPFEMVGTALIAHGASAEARCGLETPPRLPAVAEQAGGDPCWTSSAGSEDDHDEEEDGCSLSLSLATRSSRSSGDEGGRLSPTAATSWGSQISLDLSLSTL

SEQ ID NO: 43324 - protein, 357 aa, Zea mays
  Coding DNA Sequence Number=SeqID_1545
  Homolog annotation: Hit_ID=Q8GSQ1; Match level="QueryCoverage=34%, HitCoverage=27%, E-value=1e-37, Identity=64%"; Hit description =Cytochrome P450 85A1
  Pfam annotation: Domain name=HLH; Domain location=195-243; Score=1.4; E_value=0.1; Accession=PF00010.16; Description=Helix-loop-helix DNA -binding domain
MPAPHIPVMPMDERREMDSVTDAHRVAWLQHGLLDLLVLRQLHPIRRSICLHLHGDATVRHPIMDGARGHGGQLLLPEAASARRFFAGARDRRLFFYDHAMGEGRGPTLPSAAAWPFLGGGPPAASRKPPRVHRHLTPHPTAPSTRIPLVCSISAQICNPWSGPRPSLSNRVLHGFRFLGKDRRNPWSLPTCARPLHDHIIAERKRRQKINQRFIELSTVIPGLKKARKKLVAMLRQMIADRRSSGCTRDDMLDALLSGNEGTRAKLSDDQIIDLLITLIYSGYETVSTTSMMAVKYLSDNPKALGQIRKEHLDIRKAKSPEDPLDWNDYKSMTFTKAIELPLHSTDASGSSTMYMV

SEQ ID NO: 43325 - protein, 367 aa, Zea mays
  Coding DNA Sequence Number=SeqID_1546
  Homolog annotation: Hit_ID=Q2QQD4; Match level="QueryCoverage=36%, HitCoverage=46%, E-value=1e-29, Identity=54%"; Hit description=Helix- loop-helix DNA-binding domain containing protein
  Pfam annotation: Domain name=HLH; Domain location=232-281; Score =25.4; E_value=0.0002; Accession=PF00010.16; Description=Helix-loop -helix DNA-binding domain
MNDLGALHHFLGIDVEHHLDILNRQYTLDILNLVDALQYLTFTRLDNAYVVRCETQTQASGQAAKAKQPPPPPTSPPMALSFHTTTAPLFGHRIPAPDMSFLHDDFHSEVTDALLGFVYDPLDASNAALDDLLGLPPSDDAAFLAPIDGATEAKWQCGKRQRIGGGNQQVPALAAAPMIDEFVLPLPVPLPLPQPPPPAAPLLPVPVPVPTQVPEPVVFVRGADGNKAGGACQSVQNSAARQRRKRISEKTAELARLIPGANKLNTAEMLEEASRHVKLLQAQVGMLALMRAAGSSEDDKMPSAITAQERMHALLACGSVQERLAAEGRCLVPTSLVDAVAKDYAVVKGNPVVRRDLGRFVASLQGQ

SEQ ID NO: 43326 - protein, 325 aa, Zea mays
  Coding DNA Sequence Number=SeqID_1547
  Subcellular localization annotation: CTP_CleavageSite=27; ConfidenceScore=5.12e-01
MHQPSRANPALHLALTGGTRTSAVCPRVETYLGTVVWGLVVNLTGSPTLAGVSAIDRWACLVSWFSHAVSFATNPSSTATTRVESATAPLPRSRLASEPTGGTHPPGALRLRSLRRWARVSAAVRHCRSSQATAHRVRRQVKRSCTQLTSPDYKGGRSRVLPSLFVLPLIPTATVTVGKKGVIAATSIGPPPRRREFIPGYSTGWSRNQRGWHHRRVENPGGARLNRIPTVSRKNRSPVRALCLQRRSCRGPRLRRHYCRYGFSVEFHLDSRMGNCSSYGRLDHGSAASAVRRWNPAVGDPDAAARSVMGGRTVGDRLILTDGQD

SEQ ID NO: 43327 - protein, 760 aa, Zea mays
  Coding DNA Sequence Number=SeqID_1548
  Gene Ontology: Mol. function=nucleic acid binding; Cellular component= beta-galactosidase complex; Biological process=DNA integration
  Homolog annotation: Hit_ID=Q8W0X4; Match level="QueryCoverage=95%, HitCoverage=47%, E-value=0.0, Identity=96%"; Hit description =Putative pol protein
  Pfam annotation: Domain name=RVT_2; Domain location=334-589; Score =540.0; E_value=2.5e-159; Accession=PF07727.4; Description=Reverse transcriptase (RNA-dependent
  Pfam annotation: Domain name=rve; Domain location=3-121; Score=58.3; E_value=2.6e-14; Accession=PF00665.16; Description=Integrase core domain
  Pfam module annotation: Pfam domain module=RVT_2::rve; Domain location=334-589::3-121
ERLPREPEAGEFRRPIFLGAPDMSGAHRTVRDNGSEFKNLQVEEFLEEEGIKHEFSAPYTPQQNGVVERKNRTLIDMARTMLGEFKTPECFWSEAVNTACHAINRVYLHRLLKKTSYELLTGNKPNVSYFRVFGSKCYILVKKGRNSKFAPKAVEGFLLGYDSNTKAYRVFNKSSGLVEVSSDILFDETNGSPREQVIDCDDVDEEDVPTAAIRTMAIGEVRPQEQDERDQPSSSTTVHPPTQDDEQVHQKETCDQGGAQDDQVMEEETQPAPPTQVRAVIQRDHPVDQILGDISKGVTTRSRLVNFCEHYSFVSSIEPFRVEEALLDPDWVLAMQEELNNFKRNEVWTLVPRPKQNVVGTKWVFRNKQDEHGVVTRNKARLVAKGYAQVAGLDFEETFAPVARLESIRILLAYAAHHSFRLFQMDVKSAFLNGPIKEEVYVEQPPGFEDERYPDHVCKLSKALYGLKQAPRAWYECLRDFLLANAFKVGKADPTLFTKTCDGDLFVCQIYVDDIIFGSTNQKSCEEFSRVMTQKFEMSMMGELNYFLGFQVKQLKDGTFISQTKYTQDLLKRFGMKDAKPAKTPMGTDRHTDLNKGVATPCFGLWYPKGSTFDLVGYSDSDYAGCKVDRKSTSGTCQFLGRSLVSWNSKKQTSVALSTAEAEYVAAGQCCAQLLWMRQTLRDFGYNLSKVPLLCDNESAIRMAENPVEHSRTKHIDIRHHFLRDHQQKGDIEVFHVSTENQLADIFTKPLDEKTFCRLR

SEQ ID NO: 43328 - protein, 100 aa, Zea mays
  Coding DNA Sequence Number=SeqID_1549
  Homolog annotation: Hit_ID=Q43831; Match level="QueryCoverage=30%, HitCoverage=6%, E-value=5e-08, Identity=90%"; Hit description =RuBisCO large subunit-binding protein subunit beta, chloroplast
  Subcellular localization annotation: CTP_CleavageSite=50; ConfidenceScore=5.03e-01
MSYSTRHPPWGRKPPARTSRESRLPTPPVGMNQRRNMKGHLALQKNVIIKDTMENDEQKVGAQIVRRALSYPLKLIAKNVCAMAALSLKRCEFFIILHLT

SEQ ID NO: 43329 - protein, 263 aa, Zea mays
  Coding DNA Sequence Number=SeqID_1550
MDLCSIVQLAHIPSLDLSFALMAQAFSKTNALNCTLSGLFWSCLNLVRNWIWAAILHLCNQNSQQSFFGLASRIRNNVWAPEWLVKGGAAWRSTGLEYPVPWTRSFPCHFSPGGRCGGSDPDDFVVSDGTRGQAGHCASGRNPRRWYGCAPAFDRLPSRWRQPAAGPPTSTPQLICLLSTRPTFRCGVISSSIRVRSYAQSYWAVLPVTFSNLLHIAGQKQPNFRTRQIHLCAKILLTVGLPGYYDPGRYHDVASVKRNQPFK

SEQ ID NO: 43330 - protein, 124 aa, Zea mays
  Coding DNA Sequence Number=SeqID_1551
MPSQLPLERVRAPRNGCIHDGKSALDQLTCRNNVIKTQGFRTGISAANNDTDSEYRNYLPPQETKHLKHPLIINPKGDSFHITSCLTEAHSQYPMNEPANDGDIPQPATSSKTKQQKRERWGPT

SEQ ID NO: 43331 - protein, 609 aa, Zea mays
  Coding DNA Sequence Number=SeqID_1552
  Gene Ontology: Mol. function=DNA binding; Biological process =regulation of transcription
  Homolog annotation: Hit_ID=Q9FFI5; Match level="QueryCoverage=53%, HitCoverage=65%, E-value=4e-83, Identity=52%"; Hit description=NAM (No apical meristem)-like protein
  Pfam annotation: Domain name=NAM; Domain location=6-134; Score=321.5; E_value=1.5e-93; Accession=PF02365.6; Description=No apical meristem (NAM) protein
MAPVSLPPGFRFHPTDEELIIYYLKRKINGRQIELEIIPEVDLYKCEPWDLPEKSFLPSKDLEWYFFSPRDRKYPNGSRTNRATKSGYWKATGKDRKVNSHRRAVGMKKTLVYYRGRAPHGSRTDWVMHEYRLDERECETDTGLQDAYALCRVFKKTAPGPKIIEHYGAVHHPIEHPQWMAEAGSVDRHSPTLDLSSDARGDDFESSSFSFPTEAPSMDSMHGMQMSAPHEDGKWMQFLSEDAFNATNNPFFMNPPSSSSFPCLPSKVDVALECARIQHRLSLPPLEVEDFPQDVSLDTKASVLRSNPNEVDILQEFLSVASASQELINGATSSCYAAELWPSGAGTSSTSTHYVNELSSLVELGVKAKEEADNFYYMDCIVGTSVGFSSKSSVQVDEQAVRLVEIADIEGLKQEEKRQVENLRGVRLHNNDLGEIVVQGDESNPTDCITQYPISDYSADNLGEAGHLADPTDVGGGLATAPIFSQSQPDDFAIGFGDVDVNPNASFDLYERVDVKHGLFVSTAGAPKTFFHHVEPSKKVSVYLSPVASDVVGKATEKFHSPITVTATKASVFSKLKALVTRQGQIPGGEDASIMPPEVLRQQRNSGSE

SEQ ID NO: 43332 - protein, 404 aa, Zea mays
  Coding DNA Sequence Number=SeqID_1553
  Gene Ontology: Mol. function=1,3-beta-glucan synthase activity; Cellular component=1,3-beta-glucan synthase complex; Biological process=1,3-beta-glucan biosynthetic process
  Homolog annotation: Hit_ID=Q8H046; Match level="QueryCoverage=67%, HitCoverage=13%, E-value=1e-141, Identity=90%"; Hit description =Putative callose synthase
  Pfam annotation: Domain name=Glucan_synthase; Domain location=2-382; Score=-260.6; E_value=0.082; Accession=PF02364.6; Description=1,3 -beta-glucan synthase component
MYSWPGKIMCNTQQITLDQEGGEENHPTRVQELENKVGKGRDVGLNQIALFEGKVAGGNGEQVLSRDIYRLGQLFDFFRMLSFYVTTVGFYFCTMLTVLTVYIFLYGKMYLALSGVGESIQNRADILQNAALNAALNTQFLFQIGVFTAVPMILGFILESGVLTAFVQFITMQFQMCSVFFTFSLGTRTHYFGRAILHGGAKYRATGRGFVVRHIKFAENYRIYSRSHFVKGMEVALLLVIFLAYGFNNGGAVGYILLSISSWIMALSWLFAPYLFNPSGFEWQKIVEDFRDWTNWLFYRGGIGVKGEESWEAWWEEELGLFGSILKLPKIATYSMSHLPKVRRSNSAPQFTMSKGILPHFYKSLTSVTYAAGKTCHSCGYKPNTCLTLSNLPNLRYGKLLQVR

SEQ ID NO: 43333 - protein, 232 aa, Zea mays
  Coding DNA Sequence Number=SeqID_1554
  Homolog annotation: Hit_ID=Q8H046; Match level="QueryCoverage=52%, HitCoverage=5%, E-value=2e-44, Identity=72%"; Hit description =Putative callose synthase
  Pfam annotation: Domain name=PPR; Domain location=17-50; Score=6.2; E_ value=1.4; Accession=PF01535.11; Description=PPR repeat
  Pfam annotation: Domain name=PPR; Domain location=52-86; Score=17.0; E_value=0.067; Accession=PF01535.11; Description=PPR repeat
  Pfam module annotation: Pfam domain module=PPR::PPR; Domain location =17-50::52-86
MQILDQMFSENLTPRITIHSAFIKGYFYAGRIEDACKYVSDMSTRDRHSVNRNYSLLAKLLWKSGRTIDAGRVLYELMEKGLRPDHSAYVKVAKDLHKMGKGNLACELKMMFQRFSVNSRSETHHQPISGSNVVDDKRSMVLSTATIGRWRAISVPPQPTRTRLRPGTRSYQREHPYRLVVILVHPFPWLSLKIVWGHMEASNVQLAVVVKDIQSTIVELAKVIIDSVQPMG

SEQ ID NO: 43334 - protein, 51 aa, Zea mays
  Coding DNA Sequence Number=SeqID_1555
MGTMIFQKVGIGSASWKDLDIRKVQDKHQGKDRGMTRVKVMRDKRTIKDVF

SEQ ID NO: 43335 - protein, 63 aa, Zea mays
  Coding DNA Sequence Number=SeqID_1556
MDATTRLAEGGEGEGGAVVKQVVDAHAEGQRTSKPALQSAILPLKGMFTFIVAIVWGLYKIPR

SEQ ID NO: 43336 - protein, 337 aa, Zea mays
  Coding DNA Sequence Number=SeqID_1557
  Gene Ontology: Mol. function=transcription regulator activity; Cellular component=nucleus; Biological process=regulation of transcription
  Pfam annotation: Domain name=HLH; Domain location=121-227; Score =39.6; E_value=1e-08; Accession=PF00010.16; Description=Helix-loop -helix DNA-binding domain
MTTVAVMEQWADKQQQAASTNAAAAAAQMPFLALLQGAGVVVEAEQQEEQHHDGRKRQAFARAVSDLDLLESCVTQAVAPAAAASAPVAGRTERRRKRQRPRARAAPPPEKRKKPEEAESQRMTHIAVERNRRRLMNDHLASLRSLIPSSYTPRVSCQPMQRPCMQTSSTTRSTVRIHCTALHTRQTVLCCACVPFLTTRAARCNDRMQGDQATVVGGAIDYVKQLEQQLVALQAAAAARRGVAGTGAAAVATVASDGVFVSPQYASYSDSRGAGAGVDVEATAAVGGHVRVRVAGRRWPGRLVRVVAALEDLRLAVLHLAVTSVGHDAVVYCFNLK

SEQ ID NO: 43337 - protein, 345 aa, Zea mays
  Coding DNA Sequence Number=SeqID_1558
MGKGFLMGIDIFHGYEFGTTKPSGFIPIAISTMKVESETVPSQPLPQPQPQSQTGLPWHLYEQATLKKFRTNSPNAQGQGQGLSVRESGATAAAGTVLGETGTASLSRVVSILQQRLVTASLGGAVPASATRGRLQLLATGCTAHAKAAAATPRQLLLVRAGQHAENDSAIRSARTGTVIHDARRRAGQEAEEDGWMDRGKTFSHQVPYQLAGNDGMGALTGRHGRSSSGARPLARSSQSRSRSRIRYCRPVPVRRGLRRAAQPGTPRTGECICTRQQRHTRWGKACPSSPPPPPRETHAHALQTDGSGGNDDSREDMHGETQTHAEMGWACSLPLPERQQLRPE

SEQ ID NO: 43338 - protein, 119 aa, Zea mays
  Coding DNA Sequence Number=SeqID_1559
  Subcellular localization annotation: CTP_CleavageSite=51; ConfidenceScore=5.38e-01
MNSFHRGRPDVSVKSSCAVLRAGSHPYPIVNPAWRPPGTGSRSRRRARRRRFAELAEACDAIPHVLQGTAIPLGIVRCTRLRTLNSAPALVFAGKDLIALAQTGPGTRARSCCPSCRSC

SEQ ID NO: 43339 - protein, 95 aa, Zea mays
  Coding DNA Sequence Number=SeqID_1560
  Subcellular localization annotation: CTP_CleavageSite=41; ConfidenceScore=5.41e-01
MATAVPAACLRAPCSSPAAVARRLGAGGPSLRKRHCAVAPVAAACGPAPPRLLDNEEARCWRFDVHWPLSVSGRRACSVNGLFGQNCASECASDL

SEQ ID NO: 43340 - protein, 347 aa, Zea mays
  Coding DNA Sequence Number=SeqID_1561
  Gene Ontology: Mol. function=oxidoreductase activity; Cellular component=proton-transporting two-sector ATPase complex; Biological process=flavonoid biosynthetic process
  Homolog annotation: Hit_ID=Q10SI2; Match level="QueryCoverage=98%, HitCoverage=94%, E-value=1e-142, Identity=69%"; Hit description =Oxidoreductase, 2OG-Fe oxygenase family protein, expressed
  Pfam annotation: Domain name=2OG-FeII_Oxy; Domain location=165-295; Score=114.2; E_value=3.9e-31; Accession=PF03171.10; Description=2OG -Fe(II) oxygenase superfamily
LPDSYVRPETQRPRLREVVPDAEIPVVDLADPDREAVVARVAEACRTHGFFQLTAAMMSVAYEFFRLPAEEKAKLYSDDPAKKMRLSTSFNVRKETVHNWRDYLRLHCHPLEQYVPDWPDNPPSFRRTVSAYCSAVRELGFRLYVAISEGLGLDGAYIKEALGEQEQHMAVNFYPRCPAPELTYGLPAHTDPNALTILLMDQQVAGLQVLKDGRWIAVNPRPGALVVNIGDQLQVTCSCLALPLFPPSHLLSAPGLHYCTAPAQALSNGRYRSVWHRAVVNADRPRMSVASFLCPCNDARIGPAARLLTDGTPAVYRDYTYAEYYAKFWSRNLDQEHCLELFRTPTS

SEQ ID NO: 43341 - protein, 98 aa, Zea mays
  Coding DNA Sequence Number=SeqID_1562
MWSLPPSLVGYPVGLSPSHRRMGEAHGTSPIETPRPAVDGRLDEQDRTRRPKLAVVFASLLLLAVATTATGAAPQFYRRVFTPRGDIGEGPFYQTFSF

SEQ ID NO: 43342 - protein, 158 aa, Zea mays
  Coding DNA Sequence Number=SeqID_1563
  Gene Ontology: Mol. function=protein serine/threonine kinase activity; Biological process=protein amino acid phosphorylation
  Homolog annotation: Hit_ID=Q5ZC62; Match level="QueryCoverage=81%, HitCoverage=21%, E-value=2e-19, Identity=39%"; Hit description =Putative receptor serine/threonine kinase PR5K
  Subcellular localization annotation: CTP_CleavageSite=15; ConfidenceScore=5.16e-01
MATTTAPTAAVVAPPASHAREFGCRSYSNKRVVVVCRAHEPLAWRRWLGAVVEDEVLVVGADRERRGKPGRGVGRRDAAPFGASSRIEICKPWSIREEQGAVVVEDAEDLQGDLALRKSEARDGVIATNLEPNPDAAAGLRGALRDKPKREGDLHVTA

SEQ ID NO: 43343 - protein, 43 aa, Zea mays
  Coding DNA Sequence Number=SeqID_1564
MTKVMLAEDIQSSRNGKTNYKCTFELMKGKGTGVMQKANAKSA

SEQ ID NO: 43344 - protein, 142 aa, Zea mays
  Coding DNA Sequence Number=SeqID_1565
MDREGAPRALAWERRSTSMEEKKGALGMGWSSGIVDLGRVMGLVVARRESSAPWLLARAGEDDSLLQPLAMRRSREGAAPWQRGRRELGRHGRGGAELPAGGRISPQGKAGGHGASARWLLLPWSREEEGRLLLRMGGRKGC

SEQ ID NO: 43345 - protein, 139 aa, Zea mays
  Coding DNA Sequence Number=SeqID_1566
MTKPLGCVLPQYDREVCGVDHLPSLPAHLQPGSGFAWPVRSQVASHGKEFDACEKSRSCARLLHVMLMDEGLLPLHGWLIIEDGVNLHHCVDVEYVESAPSVGNTGEGSKVEDLSSGKVEDDVKDNGHRAIGNRSRTHT

SEQ ID NO: 43346 - protein, 120 aa, Zea mays
  Coding DNA Sequence Number=SeqID_1567
MCISDADESRIVRNITRSIGFLDIEEKLCQALWMQQEKEEKEISTLQDKVAGLQKFLEEKEAEITSLKEKVDKVEKKNDEATKMHNADTLKMKKQDESIKELQTNLEAAKKHCQQRCGES

SEQ ID NO: 43347 - protein, 151 aa, Zea mays
  Coding DNA Sequence Number=SeqID_1568
MEEKKRALGRGWSNGVVDLGRVMGLVLARKESSAPWLLAGAGEDDSLLQPLAMRRSREGVAPWQRGRRELGRHGRGGVELPAGGRSSPQGKAGGHGAPARWLLLPWSREEEGRLLLRVGGRKGCWRLKIFEGWECKIAKCKGRGLLFIGMW

SEQ ID NO: 43348 - protein, 579 aa, Zea mays
  Coding DNA Sequence Number=SeqID_1569
  Gene Ontology: Mol. function=calcium ion binding
  Homolog annotation: Hit_ID=Q10S92; Match level="QueryCoverage=96%, HitCoverage=53%, E-value=1e-165, Identity=58%"; Hit description=EF hand family protein, expressed
  Pfam annotation: Domain name=efhand; Domain location=383-411; Score =15.3; E_value=0.23; Accession=PF00036.22; Description=EF hand
  Pfam annotation: Domain name=efhand; Domain location=417-445; Score =24.3; E_value=0.00044; Accession=PF00036.22; Description=EF hand
  Pfam module annotation: Pfam domain module=efhand::efhand; Domain location=383-411::417-445
MHADRNKTGFLGRPEFFNALRLVTVAQSGRQLTPDIVQSALYGPAAARIPAPKIAAGAVPPQMGAAGAPRPQGSAAMTPTPGQVGAAQMNPAATPRPQGSGMVPTSTQVSVPQVNPGAAPRPQGINSTMPAASQGGALQATQFAGPRVMQPQPSNLGITQQQPSSTGFMHPPQVGAPAASLQAQAPGINQGLVSGGSMGGSVGWQGWQGGNAASVGGIPQAIPGAAPSQAAQGGFGPGLPRTIGVALVQQVQAMSPSPLPPQSNSAGLPQDSKALVMSGNGPAISSGSSTDIFSALTQQKPSISAPAPQTSSIPSSSSFMPTPTGSQNLTNLTQFGSLQGSSQRQQTQPVVKPSPAPAAPVVSAGISNPSPQWPKITQSDIQKYMKVFGDVDRDRDGKITGAEARTLFLSWRLPREVLKQVWDLSDQDNDGMLSLREFCVALYLMERHRAGTPLPPALPDSLRHDETLLRATGLPSTAYNGPSWQQNQGGLSQRGPGAPGVPAGGVRPPLPPHLHSQTDGASRPGQPRSYMSGMDNHVVVQGNKDDKSGVNQSVQEVADPKKVGSVVVKNSKCTQFMHL

SEQ ID NO: 43349 - protein, 62 aa, Zea mays
  Coding DNA Sequence Number=SeqID_1570
  Homolog annotation: Hit_ID=Q10S92; Match level="QueryCoverage=76%, HitCoverage=4%, E-value=1e-19, Identity=100%"; Hit description=EF hand family protein, expressed
MVEVEKQVLDSREKLEYYRTKMQDLVLYKSRCDNRLNEITERASSDKRETHCYDWKSIWAPA

SEQ ID NO: 43350 - protein, 396 aa, Zea mays
  Coding DNA Sequence Number=SeqID_1571
  Gene Ontology: Mol. function=oxidoreductase activity; Cellular component=nucleus; Biological process=protein modification process
  Homolog annotation: Hit_ID=Q10S80; Match level="QueryCoverage=99%, HitCoverage=85%, E-value=1e-134, Identity=60%"; Hit description =Ubiquitin family protein, expressed
  Pfam annotation: Domain name=UBA; Domain location=354-394; Score =45.7; E_value=1.6e-10; Accession=PF00627.21; Description=UBATS-N domain
  Subcellular localization annotation: CTP_CleavageSite=83; ConfidenceScore=5.16e-01
VETDHTIHMVRGAVLSPTSTAPAANQEPTTAAPASSPATGLGGLLQSLGTTGAAANSEGLFGSAPPGLDQMQQQLAENPNLMREMMNMPLMQNLMNNPELIRSIIMNNPQMRELIDRNPDLAHVLNDPSIMRQTFEAVRNPELMREMMRNTDRAMSNIESSPEGFNMLRRMYETVQEPFLNATTMGSEGDRNSNPFSALLGNQGSNQARDSAANGTTRASDPTSGSPAPNTNPLPNPWGSNADLGSTHGASGGGSDATLLTQVLQNPTMMQMMQNIMSNPQSMNQLLNMNPNVRNMMESNTQMREMIENPEFLRQLTSPETLQGADTIRLWCSGLGAGGGLGVPNAPNAPPEELYATQLAQLQEMGFFDTQENIRALAATAGNVHAAVERLLGNMG

SEQ ID NO: 43351 - protein, 95 aa, Zea mays
  Coding DNA Sequence Number=SeqID_1572
  Gene Ontology: Mol. function=oxidoreductase activity; Biological process=protein modification process
  Homolog annotation: Hit_ID=Q10S80; Match level="QueryCoverage=60%, HitCoverage=10%, E-value=1e-22, Identity=89%"; Hit description =Ubiquitin family protein, expressed
  Pfam annotation: Domain name=ubiquitin; Domain location=22-89; Score =50.8; E_value=4.4e-12; Accession=PF00240.13; Description=Ubiquitin family
MGGGDADAGGEPADAQATLHIRCTNGSKFTVRTDLGATVGAFKAIVAHSCDVPAPQQRLIYKGRILKDEQTLASYDAMSVNIFAAGKTRRFAPWR

SEQ ID NO: 43352 - protein, 119 aa, Zea mays
  Coding DNA Sequence Number=SeqID_1573
  Subcellular localization annotation: CTP_CleavageSite=41; ConfidenceScore=5.34e-01
MAKTRMPASPPPAETPTPQRRRKKKGRPSLLDLQRRSLRLQAQNPSPDPSPTRREPNPFDDDEDGTGSGRRRQKRFKSVLSGVVKVGGLPISRQIFENCGVWGPPPRVFGRGTRGDAEL

SEQ ID NO: 43353 - protein, 229 aa, Zea mays
  Coding DNA Sequence Number=SeqID_1574
  Gene Ontology: Mol. function=transcription factor activity; Cellular component=nucleus; Biological process=regulation of transcription, DNA-dependent
  Homolog annotation: Hit_ID=Q84TW0; Match level="QueryCoverage=20%, HitCoverage=19%, E-value=2e-09, Identity=60%"; Hit description =Putative AP2 domain containing protein
  Pfam annotation: Domain name=AP2; Domain location=30-95; Score=104.6; E_value=2.9e-28; Accession=PF00847.10; Description=AP2 domain
  Subcellular localization annotation: CTP_CleavageSite=44; ConfidenceScore=5.32e-01
PLVLPKKRPLPSQAAAAALVRRRSSGAGFRRRFPGVRLRPWGKYAAEIRDPHQRKRLWLGTFDTAEEAAAAYDDAALRLKGSRHVVTGFPAEAPPPWPRLGLRPRREVPKEAAEGAAEEDGEALASAPVPAAAPASLDSQAVDGTALVCPFSSPISVLRHAADEAPAAPALPAFEFLYSGLGELGDLGSATAPSKAVAAEFDCLPWWEGEDFVTVTGLTASAGAAVSVI

SEQ ID NO: 43354 - protein, 157 aa, Zea mays
  Coding DNA Sequence Number=SeqID_1575
  Subcellular localization annotation: CTP_CleavageSite=52; ConfidenceScore=5.06e-01
MPVLHCPYGCHGRALPEQPTALSLPFSAAARCLSSPPGLHCPLLRRLQRKARRRTAGSGAGTEGRPAQRRGTGTSPGRTKVWVEPPGKSRDHHQPPRAAARPPLPLWLPRASAARAADHPFPTVFSCRALPRLPARPPLPTSPAATAEVKEKDSGQR

SEQ ID NO: 43355 - protein, 61 aa, Zea mays
  Coding DNA Sequence Number=SeqID_1576
MSYCINTYPNGEAGSSRQEETMMESGFPLYPMESRFSASPFSCDFGIPAQFPFMEAVKACD

SEQ ID NO: 43356 - protein, 127 aa, Zea mays
  Coding DNA Sequence Number=SeqID_1577
  Subcellular localization annotation: CTP_CleavageSite=38; ConfidenceScore=5.63e-01
MSAPRAWPGVAPAGVPPPATMLAFPRRQSLRFRALCLCCTYVPACETPLLPGFSLERHAERFSCQCRMVRTNNVTPSGGGDDHDPLRPFRHDKGKDVYLEQHGGKKKQKLDRATQVVVAAAAADPAE

SEQ ID NO: 43357 - protein, 181 aa, Zea mays
  Coding DNA Sequence Number=SeqID_1578
MAKPTVGGQRAVGAPDMSGLYSLLTFGGRYVEEWVRVFYATIWVGRDHQWMRFQFERNDVTLRTAQIRELFGFPESMTRLHNAALDTTRLSFGFYRSAPEDIALACAPMDPLASELRDEDEAIRQFEDQGVVVDTSSDSDDEDLGIPQPPHHFLCHLVPMITRPIVLVLLLRLLLQLSIQP

SEQ ID NO: 43358 - protein, 60 aa, Zea mays
  Coding DNA Sequence Number=SeqID_1579
MTHILQHTGVPVPLVQSAPLPALQASVVIKAISAQPLVPPISAVASLAVADTISAPAPVA

SEQ ID NO: 43359 - protein, 141 aa, Zea mays
  Coding DNA Sequence Number=SeqID_1580
  Subcellular localization annotation: CTP_CleavageSite=6; ConfidenceScore=5.10e-01
MAAACLAPAPPPLCACPLPPQTPTSSRQWRPHAPCPPRIPHARPDQFAVSNGGHACPDQFTIATATAPAYHTILVLQTTAQSFAPFISPPLHSHASVTLERKDEGEGACPATGEEGYLILLNRAGLDQGHGKRLEEIFLKW

SEQ ID NO: 43360 - protein, 123 aa, Zea mays
  Coding DNA Sequence Number=SeqID_1581
MGWARRSHGVRRGAGNRAEGLLARPCACDWWSSPTTLLWPEEKSRFSEIYRYFKLVFLAMYIGSIRYLTTHFIPPNLETEIRGLTILAKFCLDNLCDYSGHGVNGLNQSTSNSTFYPATDPDF

SEQ ID NO: 43361 - protein, 80 aa, Zea mays
  Coding DNA Sequence Number=SeqID_1582
MGFSEIYRYFKLVFLAMYIGSIRYSTTHFIPPNLETEIRGLTILAKFCLDNLCDYSGHGINGLTKSTSNSTFYPATDPDF

SEQ ID NO: 43362 - protein, 234 aa, Zea mays
  Coding DNA Sequence Number=SeqID_1583
NTICHGDCRGASSAWAPPWESKGSALPHAGLPALAGRADAQAGHAAARRGPCCQSSTGGGETAHEDIARYGHGLLNQAKGVMRRWGYARWGSSSASEICRGSPREGRGSDARSWLAGRSADQLSQCTRGGARGWGCRDEDELGTLRGWPGLGAARSCGGGQRRNAHTRYATAALRWAGEHPPEHKGWTTSRMATATTALSIWAPVGCGEAAARATRWALHDEARQNEVAAIDSE

SEQ ID NO: 43363 - protein, 489 aa, Zea mays
  Coding DNA Sequence Number=SeqID_1584
  Gene Ontology: Mol. function=oxidoreductase activity
  Homolog annotation: Hit_ID=Q53QW8; Match level="QueryCoverage=98%, HitCoverage=83%, E-value=1e-137, Identity=57%"; Hit description =Expressed protein, partial
MVKAVLGDEEHLKAFEETLASPSSPPCQAQVGLVVGKLSSSSDRALVYALLPTPLTDAAAPACSLRAAPKSKPSKGGGKAPSSSDASLDFDVEWISEHARQVSRMLLGGMSVMGAYVWASEASFKATSPAVLSQVIRAICQACYGSASGSIPPRKSSFFSPISFLCGVIRWACRICEVASGSLRPCDFKYSKLLASLQTFRCTYNFEIRLTSVQAEPFKKIILKAISHLTEEVQNARALVDGQLFSEEMNISTEDPHQVDFLVPFKNAVPVEECSLEGVAGLIRFIGSVSALAYLGPKESISEAISDLKADIVTSLKSRLDIILDEADDGPATAEVEKSPSQKATQVIFHELREPYSFSFPRRVLIPWLSGTYVCDYLQQPETAEDAVDRFKEVIGALETAVERSSILEPESAAAACSVLESFWDMVPGSGSGGQGGSSKLKDSHSIQKDDSSKGQGGLHFSIVAALIVLLVALIAGLFFTGSAGYPVT

SEQ ID NO: 43364 - protein, 77 aa, Zea mays
  Coding DNA Sequence Number=SeqID_1585
MTKSKGGSVDARTLVAHVLAAGTVVLVLLWCIHFRGGALCGGADGLHLYKKEGLNPLQVESQVSPADLANKFRNPEP

SEQ ID NO: 43365 - protein, 85 aa, Zea mays
  Coding DNA Sequence Number=SeqID_1586
  Subcellular localization annotation: CTP_CleavageSite=36; ConfidenceScore=5.33e-01
MSSASCLVHPAPRFRVWLLPLPSSIAVRPLLGFRPRCGAPAKSSGGAEVKKEEVSSLNGEQEQNLKDDDWFLQLQKASLICLNCL

SEQ ID NO: 43366 - protein, 68 aa, Zea mays
  Coding DNA Sequence Number=SeqID_1587
MEQLDAPNRCESFSSSLRPFPLHDSITVPAPAESKGIPSPPPMPLFCSHWPNLGMRNPRFHDLLSVEA

SEQ ID NO: 43367 - protein, 653 aa, Zea mays
  Coding DNA Sequence Number=SeqID_1588
  Gene Ontology: Mol. function=choline transporter activity; Cellular component=integral to membrane; Biological process=choline transport
  Homolog annotation: Hit_ID=Q9LUQ4; Match level="QueryCoverage=98%, HitCoverage=99%, E-value=0.0, Identity=54%"; Hit description =Arabidopsis thaliana genomic DNA, chromosome 3, P1 clone: MJK13
  Pfam annotation: Domain name=CobS; Domain location=342-555; Score= -94.6; E_value=0.011; Accession=PF02654.6; Description=Cobalamin-5 -phosphate synthase
  Pfam annotation: Domain name=DUF580; Domain location=335-649; Score =284.9; E_value=1.5e-82; Accession=PF04515.3; Description=Protein of unknown function, DUF580
  Pfam module annotation: Pfam domain module=CobS::DUF580; Domain location=342-555::335-649
MVLGGGPLGAIIGRYPSSSAAAGDDEQGDPGPGGGVIRHDRKCRDWPFLVLFAAFWVAMIVNSSFGFNQGNPLRLTYGLDYKGNICGSRHADPDLYQLDVRYWVNPNQVYQSGLKTSHIELPDAKTICLMECPLPAEDGLNFVCDYPEGDIRLSVDDWIDRDYDYFEYLTPDMRNSSLQLQGPCYPVIFPSVNVYWSCQFIARASNASLKHWKDMGGVTIDENMLIDRTIHDAINSKSAVMKRYVADIGKSWPVLILCGGLLPLFLSMIWLLMIRFFVAGMSWITVVVFNALVVSVTMFFYIKAGWIGHDPLTVVIGESDPYVSIGGREINHLHAASVLMTVIMILAFLTSIAIARRIMKATSVLKVAAKVVGEVQALIIFPVVPYLILAIFYTFWFSAALHLFSAGQVIQNDCNTDCCSYDLKLGKHDIPFHTVVSSLKRLLRYSLGSVALGSLIVSIVEWVRFILESLRRRLKFVDSARGSRFGKTVSSSSQCCLGCIDWTLKSVNRNAYVMIAITGKGFCKASVLATGLIMNNVLRVGKVNVIGDVILLLGKLCVSLLCALFAFLMLDEHKYRSGHNKISSPLVPVLLSWALGYIVAKLFFAVVEVSIDTMVLSFCQDSEEHQGNARYAPPLLMETLDEESELRRLTQGP

SEQ ID NO: 43368 - protein, 538 aa, Zea mays
  Coding DNA Sequence Number=SeqID_1589
  Homolog annotation: Hit_ID=Q84JR0; Match level="QueryCoverage=33%, HitCoverage=71%, E-value=5e-71, Identity=73%"; Hit description =Myosin-like protein
MANFIPSNPFMARLHGDGNQRAGAEHLARVQELENGNTELERENKMLLSKIAEKEVEKDALVNRLNDLERNVVPSLKKSLNDIYLEKDAAVVAKEDALAQLRSMKKRLKEAEEEQYRAEEDSASLRAQLNTLQQQMGHTYSGYTMGTSSEESVAMEKEIQDLQAQLKQESLLRQQEQQQLAEQSQLRQQEQEKLAKEQTRIASLEAEKQQLEDQITMLTKKATGMEDTYTYIILSFIYVRNVRTCRRYNDEDEQLNTSPVRSQPKQKTHANSGGGLGFVLSNSGFFPDSIAMLNVFDYFTIHTIVALLPHASISMVLQSHNSQMNTPFGVLLEQKASRSYLPGCSIRLVLLTYGHLPILEDASEFAARKAFSMQDREKLEQQLHDMALMIERLEGSRQKLLMESQMLIIFYRGRQIDSQSSEIEKLFEENSALSASYQEAIDVTVQWENQVRDCLKQNEELRSHLEKLRLEQVSLLKDQLIKEQSRSEGLSAEIMKLSAELRKAVHAQNNLARLYRPVLRDIESNLMKMKQETYATIQ

SEQ ID NO: 43369 - protein, 557 aa, Zea mays
  Coding DNA Sequence Number=SeqID_1590
  Gene Ontology: Mol. function=protein serine/threonine kinase activity; Cellular component=nucleus; Biological process=protein amino acid phosphorylation
  Homolog annotation: Hit_ID=Q10NJ0; Match level="QueryCoverage=96%, HitCoverage=96%, E-value=1e-159, Identity=62%"; Hit description =Protein kinase domain containing protein, expressed
  Pfam annotation: Domain name=Pkinase; Domain location=21-247; Score =210.7; E_value=3.3e-60; Accession=PF00069.15; Description=Protein kinase domain
  Pfam annotation: Domain name=Pkinase_Tyr; Domain location=21-247; Score=16.4; E_value=1.8e-13; Accession=PF07714.7; Description =Protein tyrosine kinase
  Pfam module annotation: Pfam domain module=Pkinase::Pkinase_Tyr; Domain location=21-247::21-247
MGDGASGRGGRSGAGRRVGEYELLRPIGSGAYSQVWLGRHRVRGTEVAVKEIAMERLSKKLRESLLSEVDILRRIRHDNVIALHDSVKDHGSIYLILEYCRGGDLHAYLQRHKRVSEKVAKHFIPSGLKMLRDNNVVHRDLKPQNILLVENNENTLLKIADFGFAKFLQPFALAETLCGSPLYMAPEVMQGQKYDAKLLKNILRTHEIRLPSDCELSHDCIDLCRKLLRLNSVERLTVEEFVHHPFLSEHAPERTLSRTLSEIRDGFPINNISPTRPSSQSSQEDCMPFPLDDESSGQDEGPIPDSKSPMKSYGFPTDSPIIDSLEFVDQEYVFVSGPHPEGSSSSTNASQQLNLPAKYDNLSVSPPKLTFLSAPMPINGLPINRQQSAGTGSFDSHYSPASVISQGSADISDAMDQPPSDYLTRIRLLEQYASAIAGLVRDEIEKQFLSEVEYAEELASTVGQIADGTEMPDAIEMIFQSALLTGRRGGVDEMFGKAADAMTGYTRAVSMLRFLLIEAPSLALNPPLTLTRSDRHRLRTYIEALNTRLCQMQSQRH

SEQ ID NO: 43370 - protein, 117 aa, Zea mays
  Coding DNA Sequence Number=SeqID_1591
MNSPVRLAPWRARPWLGREVEETVGGEEKGRRADDRAAGAVGVGKQVAPRHRCLSPSSGPERTRNRGNLRLVAPDTSAQRGRYGGIGPIASAVNPSSGRSLGYFSCMGWDERAGMFD

SEQ ID NO: 43371 - protein, 285 aa, Zea mays
  Coding DNA Sequence Number=SeqID_1592
  Gene Ontology: Mol. function=phosphoprotein phosphatase activity; Cellular component=nucleus; Biological process=carbohydrate metabolic process
  Homolog annotation: Hit_ID=P48489; Match level="QueryCoverage=87%, HitCoverage=77%, E-value=1e-142, Identity=95%"; Hit description =Serine/threonine-protein phosphatase PP1
  Pfam annotation: Domain name=Metallophos; Domain location=31-226; Score=145.4; E_value=1.6e-40; Accession=PF00149.18; Description =Calcineurin-like phosphoesterase
MALSQGKCEAGCGKTGEGREGGGGYLSAISTVIWYPGDIHGQYSDLLRLFEYGGFPPEANYLFLGDYVDRGKQSLETICLLLAYKIKYPENFFLLRGNHECASINRIYGFYDECKRRFNVRLWKVFTECFNTLPVAALIDDKILCMHGGLSPDLAHLDEIKNLQRPTDVPDQGLLCDLLWSDPGKDAQGWGMNDRGVSYTFGADKVSEFLQKHDLDLICRAHQVVEDGYEFFADRQLVTIFSAPNYCGEFDNAGAMMSVDETLMCSFQILKPAERKNKFMGSNKM

SEQ ID NO: 43372 - protein, 100 aa, Zea mays
  Coding DNA Sequence Number=SeqID_1593
  Gene Ontology: Mol. function=protein binding; Cellular component =spindle pole body; Biological process=protein modification process
  Homolog annotation: Hit_ID=P55857; Match level="QueryCoverage=79%, HitCoverage=80%, E-value=2e-34, Identity=88%"; Hit description =Ubiquitin-like protein SMT3
  Pfam annotation: Domain name=ubiquitin; Domain location=24-92; Score =36.1; E_value=1.2e-07; Accession=PF00240.13; Description=Ubiquitin family
MQTQGPNVLLLVQVNRKAIPLAIPATDGNEVFFRIKRSTQLKKLMNAYCDRQSVDMNAIAFLFDGRRLRGEQTPDELEMEDGDEIDAMLHQTGGSVPSTT

SEQ ID NO: 43373 - protein, 88 aa, Zea mays
  Coding DNA Sequence Number=SeqID_1594
MAMKAKTPKTKESAPGWGGWRPLGCCWKRGIDGDGDGGGGERRLCAESEHLGTVDLGADLDAMDLGADHKFIVPTRENTNSAGLVLQG

SEQ ID NO: 43374 - protein, 299 aa, Zea mays
  Coding DNA Sequence Number=SeqID_1595
  Gene Ontology: Mol. function=molecular_function; Cellular component =endoplasmic reticulum membrane; Biological process=biological_process
  Homolog annotation: Hit_ID=Q1SBN2; Match level="QueryCoverage=95%, HitCoverage=83%, E-value=1e-131, Identity=77%"; Hit description=SPFH domain / Band 7 family, putative
  Pfam annotation: Domain name=Band_7; Domain location=10-199; Score =109.6; E_value=9.2e-30; Accession=PF01145.15; Description=SPFH domain  Band 7 family
MISLSVPSSVLHQVPEGHVGVYWRGGALLKTITPPGFHLKLPLITQYEPIQVTLQTDQVRDIPCGTKGGVMISFDKIEVVNRLRKEFVHETLLNYGVHYDKTWIYDKIHHEINQFCSAHSLQQVYIDMFDQIDETMKEAIQRDCTRYAPGIEIISVRVTKPNIPGSIRRNFELMEEERTKALIAIEKQKVAEKEAETQKKIALSEAEKNAQVSKILMEQKLMEKDSSKRQEKIDNEMILKEAEANRLKLTPEYLELRFIESIANNSKIFFGEKIPNMIMDQRLLKNYLDAVPRKDHYEM

SEQ ID NO: 43375 - protein, 39 aa, Zea mays
  Coding DNA Sequence Number=SeqID_1596
MQRHEGRGDGCLVGTDTRYERKDATRGDRIGSSGDYIKD

SEQ ID NO: 43376 - protein, 288 aa, Zea mays
  Coding DNA Sequence Number=SeqID_1597
  Gene Ontology: Cellular component=nucleus; Biological process =abscisic acid mediated signaling
  Homolog annotation: Hit_ID=Q10JI3; Match level="QueryCoverage=53%, HitCoverage=50%, E-value=1e-48, Identity=64%"; Hit description =Expressed protein
  Pfam annotation: Domain name=DUF1675; Domain location=29-281; Score =370.3; E_value=3e-108; Accession=PF07897.2; Description=Protein of unknown function (DUF1675)
MASRDFLRVFGAGEGAGPPGDAGAGQPDDDELSLGLSLGGRFGTDAKRPRLARSSSIASVCSVSSLHADPSPAAPLPLLRTTSLPTETEEERWRRREMQSRRRLEARRKRVERRNSMGSVSVAPADAVSGRRSNASQGSNSASTTEQGIGGSMFNQSADAKSPSTSDNRNQNDMLPPTKAAEKPLNGTATEQQPRLRTLGSLTTRTGSTSDIRKLMMEDMPMVSSKVEGPNARRIDGFLYRYKKGEDVRIVCVCHGSFLTPAEFVKHAGGGDVPNPLRHIVVNPAPFS

SEQ ID NO: 43377 - protein, 174 aa, Zea mays
  Coding DNA Sequence Number=SeqID_1598
  Gene Ontology: Mol. function=sugar porter activity; Cellular component=integral to membrane; Biological process=transport
  Homolog annotation: Hit_ID=Q53WP9; Match level="QueryCoverage=94%, HitCoverage=31%, E-value=1e-73, Identity=81%"; Hit description =Putative anion/sugar transporter
  Subcellular localization annotation: CTP_CleavageSite=17; ConfidenceScore=5.24e-01
MAGAAALWSLATILTPWAASRSTLMLLVVRALFGLAEGVAFPTMSTFLPKWFQTHERATAVDISMGGFHLGNVISFLATTIIMSHIGLSGTFTFFVSLGYLWLSVWMVNVESEPIDSRTISKCELQLILDGRIGSKVQGSKFPYVRELFSKTQFLAVTLANVVNNWVRMGLWAK

SEQ ID NO: 43378 - protein, 105 aa, Zea mays
  Coding DNA Sequence Number=SeqID_1599
MTAKLLNIKLIKIIRLWIKQHVPLSDLGEVGNSTRADEVVGERVGEASDNLAPESVKQGVGEASGGAAPEPVKQRVGEIGDGLSPEPAKQRVSEAHGGVTLEVMK

SEQ ID NO: 43379 - protein, 35 aa, Zea mays
  Coding DNA Sequence Number=SeqID_1600
MACQILPMWVHIYTPSALQLEGPRLSLTVAILAKG

SEQ ID NO: 43380 - protein, 101 aa, Zea mays
  Coding DNA Sequence Number=SeqID_1601
  Homolog annotation: Hit_ID=Q1T3R4; Match level="QueryCoverage=49%, HitCoverage=7%, E-value=2e-08, Identity=60%"; Hit description =Peptidase aspartic, active site; Oligopeptide transporter OPT superfamily
MPPSKSHKSPLVLACGWPFQTPVPLSAVWTFHDIDFCNLLSFNQFFAYRTEPVIISQVVQVATLPVGHFMARVLLERERACAELLICIFVNVGTVSGKGGA

SEQ ID NO: 43381 - protein, 1146 aa, Zea mays
  Coding DNA Sequence Number=SeqID_1602
  Gene Ontology: Mol. function=histone acetyltransferase activity; Cellular component=nucleus; Biological process=regulation of transcription, DNA-dependent
  Homolog annotation: Hit_ID=Q6YXY2; Match level="QueryCoverage=99%, HitCoverage=67%, E-value=0.0, Identity=63%"; Hit description =Putative HAC5
  Pfam annotation: Domain name=DUF902; Domain location=959-1016; Score =91.1; E_value=3.3e-24; Accession=PF06001.3; Description=Domain of Unknown Function (DUF902)
  Pfam annotation: Domain name=PHD; Domain location=1040-1091; Score =18.8; E_value=0.00074; Accession=PF00628.19; Description=PHD-finger
  Pfam annotation: Domain name=zf-TAZ; Domain location=658-737; Score =64.4; E_value=3.7e-16; Accession=PF02135.6; Description=TAZ zinc finger
  Pfam module annotation: Pfam domain module=DUF902::PHD::zf-TAZ; Domain location=959-1016::1040-1091::658-737
MNVGHAAHLSGQTAHMNQVPGSGVGIGVGGSDGLPQHQPMQEMAALSGMDQQFVMLRTAMRDKISDYIGRKQSPGDWRKRLPELAKRLEEILYRKFPNKHEYYNMMKGPVEPQLQFAIKTLSAQNQHNQQNPQMTRQISSSSSYGAMIPTPGMTQGTSAGSRTPYVTETNALSSSGACMVPQNANMGTSMQGPMSNGYQHLNTNISQNSTTNNVESTMGSVGVQRQLSHMIPTPGFSNQQNVPSNPDYSNGTGYFNGESAVAPHMQHQKQFPSNHNSNQIQHIGGHNNSGIHSSLLDNSSAYGLSDGHMNGGIGVHGSNMQLTNRTTAPEAYMNISSYGNSPKPMQQQFNQHPQQRIPTSVDMAGSGSFYAIGSTPLTTANSQSMNVANLQSRSSMNQMLVSNQLNIQSVQQQSQIKNGPLDQTEKVNFQSTQLTHDQLLHQHPMSQHQVQPNSQFIQNQYHINQQQPNSQHQQAMLRNNSLKQSQMASNHSMQLPEQGTLPHTELVSSQASDPADLPNFQGQYQQRNALDNVKGGQMLGHLSSSQNFLPSASHGSQQLLPSNPQLDNGSNAVSYVLKGSQTEQMLLSQWQPQTMEKAPVATNSSLEKQVQEDCCQRIMSQDGVQQPFSSDWCLSNGTLASVDPAVPKPTAGGFGQVKRNIHYLRQIKWLLLLFHAKTCTYPVGSCKFNGCVQVQELLNHFQNCQRKDCSYRSCTKSKAMSHHYKTCVDEQCPVCSVVRKFLRQSTEQASKQKTLESRKLAQQNVPQRIMNGIEGDRMDVDPMSAEAFEDQPSVPKRLKMHLPSLSGPENDISVVSNHHVNPGFLLQEAQPEQLEHNNRTTYLKREVDAKADIRAPQKPIKISYDIDENVTTSRHNVIPGVPSEMDSHIKQENLSVNKETSETALEVKNETNDLTDATVTKSGKPKIKGVSMIELFYPDEVDVHIDSLKLWVGQSKAKAEKNQAIGHSENENSCQLCRVEKLTFEPPPMYCSPCGARIKRNAPYYAVGTGDTRHYLCIPCYNESRGETIEVEGQTFPKAKLEKKRNEEETEEWWVQCDKCQCWQHQICALFNGRRNGGGQAEYTCPHCYVEEVKCGLRKPLPQSAVLGAKDLPRTVLSDHIEDRLFKRLKQEKQDRAAAAGKSIDE

SEQ ID NO: 43382 - protein, 178 aa, Zea mays
  Coding DNA Sequence Number=SeqID_1603
  Gene Ontology: Mol. function=protein binding
  Homolog annotation: Hit_ID=Q1LU93; Match level="QueryCoverage=65%, HitCoverage=67%, E-value=5e-14, Identity=33%"; Hit description=Novel protein
MAEEAASLEAPPPLHNPSLRKSSLDDETRALVVPDAAALPASPPSAVEANFARYFVAAPAHVVFKEEGVISTVDFNVGKSDRSEMKVTGKRKRNAQHLQENSALCKVCVNDKSFIVRCCVKGSLLEINERLIKQPDLLNTAADREGYIAVFQPKPADWLKIKDKFLSYEDYKNLRGVC

SEQ ID NO: 43383 - protein, 121 aa, Zea mays
  Coding DNA Sequence Number=SeqID_1604
MTYKVIHGWEVEILGAQAKDSEDETEDAGTGSLSSRRIDRRTPIREIRTKSHVDSAVHAPSGGPTVSGSNVVGATGKHLSTPEQFMKAHNASKKSSDIRTDSGTAPDTKCAAMSIDNDTFN

SEQ ID NO: 43384 - protein, 146 aa, Zea mays
  Coding DNA Sequence Number=SeqID_1605
  Gene Ontology: Mol. function=protein-tyrosine kinase activity; Cellular component=integral to membrane; Biological process=protein amino acid phosphorylation
  Homolog annotation: Hit_ID=Q00GA4; Match level="QueryCoverage=55%, HitCoverage=22%, E-value=1e-34, Identity=86%"; Hit description =Putative Pti1-like kinase
  Subcellular localization annotation: CTP_CleavageSite=55; ConfidenceScore=5.09e-01
MKGASVQHEGLPLMGKIFTRALSPLSPYTRIRPNRYAMTGQLTQKSDVYSFGVVLLELLTGRKPVDHTMPRGQQSLVTWATPRLTEDKVKQCVDPRLMGEYPAKGLAKVPHTIHTCAVCVSLGQLIAIFSIQNFLITVFVYASLLL

SEQ ID NO: 43385 - protein, 632 aa, Zea mays
  Coding DNA Sequence Number=SeqID_1606
  Gene Ontology: Mol. function=methyltransferase activity; Cellular component=cellulose and pectin-containing cell wall
  Homolog annotation: Hit_ID=Q6EP94; Match level="QueryCoverage=69%, HitCoverage=65%, E-value=1e-115, Identity=45%"; Hit description =Dehydration-responsive family protein-like
  Pfam annotation: Domain name=DUF248; Domain location=89-625; Score =692.0; E_value=4.4e-205; Accession=PF03141.7; Description=Putative methyltransferase
  Pfam annotation: Domain name=Extensin_2; Domain location=25-319; Score=-132.4; E_value=0.039; Accession=PF04554.4; Description =Extensin-like region
  Pfam annotation: Domain name=Methyltransf_11; Domain location=216 -311; Score=23.8; E_value=0.00024; Accession=PF08241.2; Description =Methyltransferase domain
  Pfam module annotation: Pfam domain module=DUF248::Extensin _2::Methyltransf_11; Domain location=89-625::25-319::216-311
  Subcellular localization annotation: CTP_CleavageSite=59; ConfidenceScore=5.38e-01
MPLSEPSAPAVLAALPRALSLAAAAVAAATATLLLISAVFSTPHHAASSSSPQLSPSASASTAAPVAPAPAHAPDSGPGHPHPPPPVPPCPPNATHDVPCHEPPSRERHCPPRPPPPPPLLPHPPKDPPPHPPPHCRVPPPPRYRPPPPWPARRDRARYANVDLPPLPPVKAADGQQQDPVHGRGEWLLFTDGVQGYVERLERVVPLRDGVVHTALDIGCGVASFGDYLLNYGVLTMSIAPRDRFEPQVQLALERGLPAMIGALVAHRLPYPSRSFDMVHCADCRVPWTAHDGLYMLEIDRLLQPGGYWVFSKPPVNWKSTYNISNQGTIDKQDNQVAMDDMSKRLRWTKVSEEGTISVWRKPSCNLHCDQEANAKLAGLPPLCTGEDPDSAWQVYYCPLVTLHLRYANISMCMTCIPRAETFNGCAGGAMKKWPKRLGAVPPRIASGEIEWLSIQRYRYDTLVWEKRVNFYLTYLNFLSNGTYRNVMDMSAGSGGFAAAMSKHPVWVMNVVPANTTENALGVIYERGLIGTYTDWCEAFSTYPRTYDLIHGNGIFSSHIHKCGIIDILVEMDRILRPGGAVIVRDRADVVLRVKKDADRLRWHSRVVDTENGPLDPEKLLIVDNSLPLPGS

SEQ ID NO: 43386 - protein, 153 aa, Zea mays
  Coding DNA Sequence Number=SeqID_1607
  Homolog annotation: Hit_ID=Q6EN70; Match level="QueryCoverage=77%, HitCoverage=23%, E-value=6e-37, Identity=64%"; Hit description =Streptococcal hemagglutinin-like protein
MKREHILRSVVNAQVPHLIQWGEIEGCHGSCLRGATTALSNTSLRLPIIGSVNVNCGEVTEVLKSAAQLLEPLSPGIENFLPKVEQAGDVASNLAQVIATEKTLIEECGNLLYQAQNLQYICCAICCGNIFVVYLLEKQIQADFYKWKLVDSL

SEQ ID NO: 43387 - protein, 77 aa, Zea mays
  Coding DNA Sequence Number=SeqID_1608
MVHRRMPVRRRSGDRVWKERSATLDLDVGPGLDPEDGDQPAVRSVSWGLDHAQTKANLGDRGPSISDRAARVEYPFT

SEQ ID NO: 43388 - protein, 175 aa, Zea mays
  Coding DNA Sequence Number=SeqID_1609
MLWPELSLSGSPLGPHPAFGAPYDGAVGASSWGTSQTPTPIEAGRSPIYPPLGALSTQEQDEYLQTKPPHSLEKLLQKLDEYIKAYNSFSPKKIRSIKAGTFECSKGTKEIPKTFTSRMDQDSEVVPKGMQSKFSSTKVKVSKRLRSHSYGNVESKSLNTKVKVSKGSRVVPKGM

SEQ ID NO: 43389 - protein, 146 aa, Zea mays
  Coding DNA Sequence Number=SeqID_1610
MSGGWPPGCRCTLGTLLYLQEGHYLGGPCRMLHNDGLNLRYYPHRPTGSTGSVVVSPIGENNPRLRSTVNLVDVLNTELDHSLEELSRSRAEIAELRAERAERRHQEDGFPAPVGTQHLYRPSPRSHHAYGSPRLQDQDSSRSLDR

SEQ ID NO: 43390 - protein, 542 aa, Zea mays
  Coding DNA Sequence Number=SeqID_1611
  Homolog annotation: Hit_ID=Q337M3; Match level="QueryCoverage=88%, HitCoverage=91%, E-value=3e-35, Identity=29%"; Hit description =Expressed protein
MGSAAEVPVVISSDEDGAQTPAAGKRQSPEDAALAWAEGILAQDDYDDNAVCEGVGYPAMMLELLDSLKDETGTVVGDKEVAVGAKNTNTMPDARCDDDGDDCVILDGDPDKPVAVAKEEGGPPRDAPEDELQIVAEKGELACRDFPHPRHLCAALPFSSSSHASHCSMCHCYVCDCPAPCALWDKHCHATDKDRKWKRLREISKNKSQPNPKRRIPQHFKRSVTTGPSSSQYSANMTGFTGRFPASGTANQIQQVDISVMVAQDMVRGISLPSAPSPTPRTKNRSYGSKGAQIAPPIYTFSNDNHFQPSVPSYGLVRPHASKTAHVSSGGHVSAKTFQSNPSQFCVRAPMGSHGHRYRPPSYPQPPPNTVVGTGVPLSRCASLNAEAQGTQRPQVPPAGTISKESLANLARRLGLPYYNTNQPLGQQSTSTSQFLHMHPHEMLPAQGAQNTTWQAYVKKSVATTSQIVPSSEHNSSIHAPGSTVLPSGSVQIQQPLRQFKSGTVLSSGAAQIHQQPLRQLDSQSSVTPSETVPSTLYLPQP

SEQ ID NO: 43391 - protein, 56 aa, Zea mays
  Coding DNA Sequence Number=SeqID_1612
MAGMAAGGSRLSRRAGPLLADTVQAEGIKELCKLLVVVSREAAKAYAGTAIVFTLI

SEQ ID NO: 43392 - protein, 245 aa, Zea mays
  Coding DNA Sequence Number=SeqID_1613
  Gene Ontology: Mol. function=transcription factor activity; Cellular component=nucleus; Biological process=regulation of transcription, DNA-dependent
  Homolog annotation: Hit_ID=P93392; Match level="QueryCoverage=68%, HitCoverage=51%, E-value=6e-28, Identity=50%"; Hit description=S25 -XP1 DNA binding protein
MEDAERPARSYYHSYIISNAAYAHDWRLPEQDDGIRLCIGLPAPAAAHHVVDVDTNHYSSNTIVGAAFQTSSDPAATYDLGESTQRRSGTPRATASACGSAPSTAPGPPRSPTTKPPTPCAAPPRCSTSPSSAWRSRCARWDWGSAALGLGLGGGAVEDSPVLALKRRHCIRKRLRTNKSKAATADKEGCHVEAEAREQVAVTARHGQGKRKDKVTAGVLELKDLGPEYLEELLAQSDQCNEEFH

SEQ ID NO: 43393 - protein, 145 aa, Zea mays
  Coding DNA Sequence Number=SeqID_1614
MPVATSHTSIPVVTSPISTPVATSTTGGDKSICNLLYLETMGKPFISAGDVAQRKGKRRHDDAARTAMPDDKGEEKKAKIDKAVRGSSLWTRRRANTATTSDLVIRVPERESRFCMLQDCCASSCCGSIHGSKWRLQKRSKIEAK

SEQ ID NO: 43394 - protein, 98 aa, Zea mays
  Coding DNA Sequence Number=SeqID_1615
  Gene Ontology: Mol. function=monooxygenase activity; Cellular component=membrane; Biological process=electron transport
  Homolog annotation: Hit_ID=Q10S02; Match level="QueryCoverage=90%, HitCoverage=17%, E-value=1e-32, Identity=72%"; Hit description =Cytochrome P450 family protein, expressed
MGKANSLVYLHAALCESLRLYPPVPFERKTAVDADVLPSGKELMPGDSVLISNYCMGRMEGVWGKDCMEFRPERWFNDEGGLRYEPSYKFISNAGAAD

SEQ ID NO: 43395 - protein, 204 aa, Zea mays
  Coding DNA Sequence Number=SeqID_1616
  Subcellular localization annotation: CTP_CleavageSite=51; ConfidenceScore=5.12e-01
MWSGSSLGGTPPCPPLPQSALLTMPISKYPLGPPPMTPPTLDITPAIAPASATIFGPFWTLWTGGWDHQSQCGGGDVRAGHVDGADVGEESCSGDRSRGGGVCPMAAPHVVEEVPVLRQSLVVPSEESWPRPWSRRAVLARLGGGSRSGCRCSRAAGAWGSMLGSRAVVPGMVGVGGGANRERRVRRWAALWPHATQGAWGGSW

SEQ ID NO: 43396 - protein, 383 aa, Zea mays
  Coding DNA Sequence Number=SeqID_1617
MTLRLRGDINPSAPTFGFYSSLIDSSYTVRKSFICKLYGLLKKRAIPFRYACAFALTATDCSRDIRTENRTSKESIVDNPAYAVIFLIHTLAYDGALPSDYYVDESSFPEFCSPLCVMLRELVEIDSSSKTEHGPTASFVSVLSGILRGIQKAEDPINSEITPECCQENFISDKLVKRILKAHEPYNHNDNTKCSVVSERVSYEFVPERKACSSLNKSVVQNASGCDSNRNKCLASGKAVSKKKDQSTNNSLDKENMSSCGSGGTKVSSPGSLGLAREVDSGNCLSLLDNRNCPMTRTSKANHNNCRQTADILDFNLRECVLQLHSLASLVVLTLQHYTLDDHDIVHERGGTVRLAWVAIKNQFLGNSEAHVVHLDVAFQIFV

SEQ ID NO: 43397 - protein, 169 aa, Zea mays
  Coding DNA Sequence Number=SeqID_1618
MEGSRRKDGRSARTKAVESLCGCRGRRGPLNELLKNEVIPSLLEGGEHNISHNPSPMRPVALIEAMKKVENKGAIGDRLTEWRGSKIGPHCPYDARKATVSEDMVVEGVVLQGCPPTGQQMRKREPGGQRQDGLDQDTDDQDKDLARLPVPTVADHGAPCQEVGRDDNE

SEQ ID NO: 43398 - protein, 494 aa, Zea mays
  Coding DNA Sequence Number=SeqID_1619
  Gene Ontology: Mol. function=nucleic acid binding; Cellular component= chromatin; Biological process=DNA integration
  Homolog annotation: Hit_ID=Q8H6I0; Match level="QueryCoverage=98%, HitCoverage=30%, E-value=0.0, Identity=80%"; Hit description =Putative gag-pol polyprotein
  Pfam annotation: Domain name=rve; Domain location=156-303; Score =145.1; E_value=1.8e-40; Accession=PF00665.16; Description=Integrase core domain
MSIYVIAVYVYASGGSSWIIDSGCTNHMTGEKRMFSSYEKNQDPQRAITFGDGNQGVTVFRRSDDSIAFKGVLEGQLYLVDFDRAELDTCLIAKTNMGWLWHRQLAHVGMKNLHKRLKGDHILGLTNVHFEKDRICSACQAGKQVGAHHPHKNIMTTDRPLELLHMDLFGPIAYISIGGSKYCLEKSQTQETLKGFLRRAQNEFGLRIKKIRSDNGTEFKNSQIEGFLEEEGIKHEFSSPYTPQQNGVVERKNRTLLDMARTMLDEYKTSDQFWVEAVNTACYAINRLYLHRILKKTSYELLIGKKPNISYFRVFGSKCFILVKRGRKSKFAPKTVEGFLLGYDSNTRAYRVFNKSTGQVEVSCDVVFDETNGSQVEQVDLDEIGIEEAPCIALRNMSIGDVCPKESEESPNAQDQPSSSTQASPPTQNEDEAQVDEVEDQTKEPPQNDGNDQGGDTDDQDKEDEEQRPPHPRVHQAIQRDHPVDTILGDIHKG

SEQ ID NO: 43399 - protein, 243 aa, Zea mays
  Coding DNA Sequence Number=SeqID_1620
  Pfam annotation: Domain name=zf-CCHC; Domain location=1-18; Score =20.3; E_value=0.00045; Accession=PF00098.13; Description=Zinc knuckle
MDCYNCGELDHLAHQCIKPKKNKFKGKNNDESDDEKKEKKKKNGKAYIVGDWLTDIESSSGFSSSEEENDEKFATIAEDLSSPPSSPSYTTHLYLMAKSERKLQDETVIVEDCDSDSDDEYCRGEADNSQVQPRAQQEAPPRPTLGLGLGRRSPPLPTPGLGLNLGLGRRSPPRPTPGLSLNLGLGRNRVLARSRPRPQEKSPHPTLGSDRPRHGGYIITLPLASSGYEGTRPASHLARPGNK

SEQ ID NO: 43400 - protein, 143 aa, Zea mays
  Coding DNA Sequence Number=SeqID_1621
  Gene Ontology: Mol. function=nucleic acid binding; Cellular component= nucleus; Biological process=type I hypersensitivity
  Homolog annotation: Hit_ID=Q1SXU5; Match level="QueryCoverage=77%, HitCoverage=31%, E-value=6e-29, Identity=57%"; Hit description=RNA -binding region RNP-1
  Pfam annotation: Domain name=RRM_1; Domain location=34-115; Score =27.9; E_value=3.6e-05; Accession=PF00076.12; Description=RNA recognition motif. (a.k.a. RRM, RBD, or
  Subcellular localization annotation: CTP_CleavageSite=27; ConfidenceScore=5.24e-01
MAMQQHAASASSSSLGLHLLASPSSIREATHTKVFVGGLAWETSSDRLRRFYERFGDILEAVVITDRHSGRSKGYGFVGASRFHSFFAANFASVYVAFPCVTFREAESASKACEDPTPVIDGRRANCNLASLGRAQHPVPPVT

SEQ ID NO: 43401 - protein, 53 aa, Zea mays
  Coding DNA Sequence Number=SeqID_1622
MDNIDEVTDKRLTALGEIDQDKIIVAKAYNKKVNAKSFHLGDLLMQLCKKGRK

SEQ ID NO: 43402 - protein, 32 aa, Zea mays
  Coding DNA Sequence Number=SeqID_1623
MEQQPILRSERVDLCLDITSASSSTRLRSRLV

SEQ ID NO: 43403 - protein, 108 aa, Zea mays
  Coding DNA Sequence Number=SeqID_1624
MEKVVVRQKGEEWQFSKLRTLSFQIVTTPPRLPQVSMERKQFRLRGRKCFAFIAERICVRERKRGHFCMDYMAYMASRCSMVRGQPLSRGGAGEARGQIAWCGSVGGG

SEQ ID NO: 43404 - protein, 178 aa, Zea mays
  Coding DNA Sequence Number=SeqID_1625
MPALERNEGGDATWEKAARSRKMVQVEVAEVLAELDPHCVPEITSNGPAWEDPKKEFDPGSTAISDEAMDEVVFMMPRRQQGVEIFGVQAAGGVSSEAVSHVGGRVELNRTDRGRGPIFREPVEECDDELAVLNGSLEVFMSTHSCLSSPVDLLKVSSETPSRITFGSNGTPSREDER

SEQ ID NO: 43405 - protein, 185 aa, Zea mays
  Coding DNA Sequence Number=SeqID_1626
  Gene Ontology: Mol. function=structural constituent of ribosome; Cellular component=intracellular; Biological process=translation
  Homolog annotation: Hit_ID=P42732; Match level="QueryCoverage=74%, HitCoverage=72%, E-value=3e-38, Identity=58%"; Hit description=30S ribosomal protein S13, chloroplast precursor
  Pfam annotation: Domain name=Ribosomal_S13; Domain location=47-166; Score=153.3; E_value=6.2e-43; Accession=PF00416.12; Description =Ribosomal protein S13S18
  Subcellular localization annotation: CTP_CleavageSite=17; ConfidenceScore=5.20e-01
MATLSMVSVPIAPSSLSLSTRGRSSSASFPAKKGGIGHGGLRIECIRIGGVEIPNHKRVEYSLQYIHGIGRSRSRQILLDLNFDNKITKDLSEEEVITLRKEFYIDVGLQGSENAESWHTAVWYALQKRFNRVAIERLKEIRCYKGIRHKLGLPVRGQRTKNNCRTLKGKRASVAKKKSPASQDE

SEQ ID NO: 43406 - protein, 171 aa, Zea mays
  Coding DNA Sequence Number=SeqID_1627
  Gene Ontology: Mol. function=structural molecule activity; Cellular component=chloroplast thylakoid membrane
  Homolog annotation: Hit_ID=Q75IA6; Match level="QueryCoverage=52%, HitCoverage=34%, E-value=3e-33, Identity=79%"; Hit description =Putative PAP_fibrillin
  Pfam annotation: Domain name=PAP_fibrillin; Domain location=92-171; Score=2.0; E_value=3.2e-06; Accession=PF04755.3; Description=PAP _fibrillin
  Subcellular localization annotation: CTP_CleavageSite=34; ConfidenceScore=5.79e-01
MAPAFSVSCAPGSSRPLAASPGPSVVVVASSQLPASSRSSERRRAPGLALAAAPGVGGRDGGGRWRAGISSFPFLPPFFTGNKGEKDAEKAMRLKEELLDAIAPLDRGAEATPEDKERVEQIVQQLEAVNQVKEPLKSDLLNGKWELLYTTSTSILQPQVHFLFASPMYRF

SEQ ID NO: 43407 - protein, 114 aa, Zea mays
  Coding DNA Sequence Number=SeqID_1628
  Gene Ontology: Mol. function=structural molecule activity; Cellular component=chloroplast thylakoid membrane
  Homolog annotation: Hit_ID=Q75IA6; Match level="QueryCoverage=91%, HitCoverage=40%, E-value=1e-49, Identity=89%"; Hit description =Putative PAP_fibrillin
  Pfam annotation: Domain name=PAP_fibrillin; Domain location=1-104; Score=-10.4; E_value=3e-05; Accession=PF04755.3; Description=PAP _fibrillin
MTNSTHFLLQRPKYLRPFGKIYQSINADNLRAQNMETWPYFNQVTANLVPLNSRRVAVKFDYFKIFGLIPIKAPGSGKGELEITYLDEELRVSRGDKGNLFVLKMVDPAYRVPL

SEQ ID NO: 43408 - protein, 34 aa, Zea mays
  Coding DNA Sequence Number=SeqID_1629
MAPSRRPCHRPPEVQPSTGTPYYSVKARCPCGYL

SEQ ID NO: 43409 - protein, 319 aa, Zea mays
  Coding DNA Sequence Number=SeqID_1630
  Gene Ontology: Mol. function=RNA-directed DNA polymerase activity; Cellular component=nucleus; Biological process=RNA-dependent DNA replication
  Homolog annotation: Hit_ID=Q8S472; Match level="QueryCoverage=99%, HitCoverage=29%, E-value=1e-155, Identity=83%"; Hit description =Putative gypsy-type retrotransposon RIRE2
MLKESCPYHQGPVKHTLEECAMLRRHFHKAGPPAKGGRAHNDDEDHKAGEFPEVHDCFMIYSGQVANALARHRKQERREVCSVKVAAPVYLDWSNKPITFDQGNHPDRVPSPGKYPLVVDPVIGNVRLTKVLMDGGNSLNIIYAETLGLLRIDLSSVQAGAAPFHGIIPGKRVQPLRQLDLPVCFGTPSNFRRETLTFEVVGFRGTYHAVLGRPCYAKFMAVPNYTYLKLKMSGPNGVITVGPTYRHAYECDVECVEYVEALAESEALIADLESLSKEAPNVKRHAGNFEPAETVKSVPLDPSNDASKQIRIGSELDPK

SEQ ID NO: 43410 - protein, 351 aa, Zea mays
  Coding DNA Sequence Number=SeqID_1631
  Gene Ontology: Mol. function=RNA-directed DNA polymerase activity; Cellular component=chromatin; Biological process=RNA-dependent DNA replication
  Homolog annotation: Hit_ID=UPI00004C1733; Match level="QueryCoverage =77%, HitCoverage=23%, E-value=1e-111, Identity=69%"; Hit description= UPI00004C1733 related cluster
  Pfam annotation: Domain name=RnaseH; Domain location=1-123; Score= -11.4; E_value=0.00067; Accession=PF00075.14; Description=RNase H
  Pfam annotation: Domain name=rve; Domain location=177-320; Score =45.1; E_value=2.3e-10; Accession=PF00665.16; Description=Integrase core domain
  Pfam module annotation: Pfam domain module=RnaseH::rve; Domain location=1-123::177-320
MFFDGSLMKTGAGAGLLFISPLGKHLRYVLHLHFPASNNVAECEALVNGLRIAIELGVRCLNAHGDSQLVIDQVMKNSHCHDPKTEAYGVEVRHLEDKFYGLELNHIARRYNETVDELAKIASGLTTVPPDVFSRDLHQPSVKTDDTPELEKASVEPEAPSAQSEVPSAQPKEPSVRPEAPSVRPEKAPGGYTHLLVAIDKFSKWIEVRSLNSIRSEQAVAFFTNVIHRFGVPNSIVTDNDTQFTDRKFLDFCEDHHIQVDWAAVAHPMTNGQQSLRRYHARGVRSRDLQVGDLVLRLRQDARGRHKLAPPREGPFVIAKVLKPGTYKLANSQGEVYSNAWNIQQLRRFYP

SEQ ID NO: 43411 - protein, 72 aa, Zea mays
  Coding DNA Sequence Number=SeqID_1632
  Gene Ontology: Mol. function=protein-tyrosine kinase activity; Biological process=protein amino acid phosphorylation
MWRLYCCNCQVDGTNQCESGHVKATTNKIDGVTKGLRDSATAKVKPHDDATKGLDIFMGKFIIPLSIWVIDQ

SEQ ID NO: 43412 - protein, 206 aa, Zea mays
  Coding DNA Sequence Number=SeqID_1633
  Subcellular localization annotation: CTP_CleavageSite=35; ConfidenceScore=5.03e-01
MAPPTLTAATMADDGQAAIPGRLGGGRGIRHAPRRAAAIPRGSVALGKKRLTGRGPCVCDRQLERVRAEPTTEMRAPPDSQRIGHTARGTEDSRFRVGPLHQRHHRAGEKACSFYDEVMAHNIRISTIYSLYSFFGYYNSPLIGRSSKNPKSLPNNPDKNFSLKWSRFSPPKHPPSTKDPPLRNNRDAKKSEELGRMQELQEYIRA

SEQ ID NO: 43413 - protein, 278 aa, Zea mays
  Coding DNA Sequence Number=SeqID_1634
  Gene Ontology: Mol. function=nucleic acid binding; Cellular component= chromatin; Biological process=DNA integration
  Homolog annotation: Hit_ID=Q8S479; Match level="QueryCoverage=100%, HitCoverage=20%, E-value=1e-128, Identity=74%"; Hit description =Putative pol protein
  Pfam annotation: Domain name=rve; Domain location=14-179; Score =102.6; E_value=1.2e-27; Accession=PF00665.16; Description=Integrase core domain
MTGEKKMFTSYVKNKDSQDTIIFGDGNQGKVKGLGKIAITNEHSISNVFLVESLGYNLLSDKLETQGTLKRFLRRAQNEFELKVKKIRSDNGSEFKNLQVEEYLEEEGIKHEFSAPYTPQQNGVVERKNRTLIDMARTMLGEFKTPERFWSKAVNIDCHAINRLYLYRLLKKTSYELLTGNKPNISYFRVFGSKCYILVKKGRHYKFAPKVVEGFLLGFDSNTRAYRVFNKSSGLVEVSSDVVFDETNGSPREQAVDLDDVDEDDVSTAAMRIMAIGD

SEQ ID NO: 43414 - protein, 153 aa, Zea mays
  Coding DNA Sequence Number=SeqID_1635
  Subcellular localization annotation: CTP_CleavageSite=44; ConfidenceScore=5.59e-01
MAAFLPTGAAPSPSSLDQAPAAPRLPARPPLEQRRPSSPACTPSSGAAAAAAGLACLRALQWCGGSGRARLPTHPPAVQRRPGSPACAPSSGAAAAAATGLTCLRPSSCAAPQLLVRSVPRPSSVPCASPLPRAAPPGPPHRDGHLSARVVTK

SEQ ID NO: 43415 - protein, 237 aa, Zea mays
  Coding DNA Sequence Number=SeqID_1636
MRRAGGRCAWERRRAGHTGRPRDTAHEELRRGAGRGPQAGEPGRCRRTTGGRAGRRARPLPPLHHWRRGGRGSSAGGEEGGHRGEGQRPSAAAGGSHACGGRALGADGEGQRPCAAEAAEPREGCTFGGLVLRSCGSEGERVAGRLSGGARFYMEPETSGSGSVASGSAGRGSQSAAAFHSTRVPGGAAVRPLPALKGITPAAAAKASSEGWRLCLRPNICPPRDQFDKVTWCRRRR

SEQ ID NO: 43416 - protein, 122 aa, Zea mays
  Coding DNA Sequence Number=SeqID_1637
MAPIVLSGEKIDMALALTEIDDSNDNPKHVSLVQKERLRSVSSFTIVLVLSRSFFSHNFGANLSFLQTAPSYHAHLILKAEASCDRDATDQDTSFSNKQTKLLKTQKFAFELDHLASSFFQS

SEQ ID NO: 43417 - protein, 336 aa, Zea mays
  Coding DNA Sequence Number=SeqID_1638
  Gene Ontology: Mol. function=homoserine kinase activity; Biological process=threonine metabolic process
  Homolog annotation: Hit_ID=Q6K969; Match level="QueryCoverage=86%, HitCoverage=77%, E-value=1e-102, Identity=69%"; Hit description =Putative homoserine kinase
  Pfam annotation: Domain name=GHMP_kinases_C; Domain location=189-270; Score=45.9; E_value=1.4e-10; Accession=PF08544.3; Description=GHMP kinases C terminal
  Pfam annotation: Domain name=GHMP_kinases_N; Domain location=61-127; Score=66.4; E_value=9.2e-17; Accession=PF00288.16; Description=GHMP kinases N terminal domain
  Pfam module annotation: Pfam domain module=GHMP_kinases_C::GHMP _kinases_N; Domain location=189-270::61-127
  Subcellular localization annotation: CTP_CleavageSite=80; ConfidenceScore=5.40e-01
DTVTATLDPSLPPATVSIASVTSPSRPNLAERLSRDPLRNCAGVAAIAALRALGVRSHAVSIHLTKGLPLGSGLGSSAASAAAAAKAVDALFGSRLGRDDLVLAGLESEKAVSGFHADNIAPAILGGFVLVRSYDPFHLVPLSFPPALRLHFVLVTPDFEAPTSKMRAALPRQVDVQQHVRNSSQAAALVAAVLQGDAGLIGSAMSSDGIVEPTRAPLIPGMAAVKAAALQAGALGCTISGAGPTVVAVIQGEERGEEVARKMVDAFWSAGKLKATATVAQLDTLGARVIATFGKWYCNCITKQGRMKGNPMDLWLIGFGINEMEDIARTILFRGL

SEQ ID NO: 43418 - protein, 401 aa, Zea mays
  Coding DNA Sequence Number=SeqID_1639
  Gene Ontology: Mol. function=binding; Cellular component=nucleus; Biological process=apoptosis
  Homolog annotation: Hit_ID=Q6AZH5; Match level="QueryCoverage=99%, HitCoverage=81%, E-value=4e-59, Identity=33%"; Hit description =Ctnnbl1-prov protein
  Pfam annotation: Domain name=DUF1716; Domain location=1-50; Score= -2.9; E_value=0.00011; Accession=PF08216.2; Description=Eukaryotic domain of unknown function
  Pfam annotation: Domain name=DUF383; Domain location=35-220; Score= -67.9; E_value=0.072; Accession=PF04063.4; Description=Domain of unknown function (DUF383)
  Pfam module annotation: Pfam domain module=DUF1716::DUF383; Domain location=1-50::35-220
SEIALHAETDRLRLLAGAPELFPDLVPIGLASSLASLLTHDNVDLAAAAASLLADLTDSEDPSDLAAVQALADALVDANALDLLVHNLSRFSETDPDEAEAVHNTLAVLENLLDLRPNLADKVCGGTKLLRWLLSRVKAREFDANKQYASEILAILLQNSPANQKRLGQINGVDALLQAVAMYKSRDPKTSDEEEMLENLFDCLCCVLMPLENKERFVKAEGVELMIIIMKQKKLAYSSATRTLDFAMTKFPPACERFVDVLGLKTAFAAFMGKASGITKGSRRMRLLGKFVENECEKIDRLMELYTRYSDRVKEETERLDSLDLEDLEMDDDERYNRKLEAGLYTLQMRARVELLLKQNKLTKQDVKSILEEYHDNIGDLDGPEEKERAQVRTKEIIDAL

SEQ ID NO: 43419 - protein, 280 aa, Zea mays
  Coding DNA Sequence Number=SeqID_1640
  Homolog annotation: Hit_ID=Q6Z6L4; Match level="QueryCoverage=37%, HitCoverage=11%, E-value=2e-52, Identity=91%"; Hit description =Putative aminopeptidase M
MKNYGLVTYHETALLFDEMHSAAANKQRVAVVVAHELAHQWFGNFVTMEWWAHLWLNEGFATWVSYLAADQFFPEWNVWTQFLEESTIGFKLDALAGSHPIEMEDPVAAISALFPLPLLPWPLKDHILLYLKHLPPELLKERLPCISENAVIPRLLDDVKKPEKTITETEIPKRPMWHTYLGCRPPETNPSVLEPQPMISNFGRGRGRAIATETMLGGGGRGYGRSFHGAESSQSRGSRNDRSSYAGRGTYGGGFQRQQTTWRPAGDAGRRGGSEQRRGW

SEQ ID NO: 43420 - protein, 281 aa, Zea mays
  Coding DNA Sequence Number=SeqID_1641
  Gene Ontology: Mol. function=RNA-directed DNA polymerase activity; Cellular component=mitochondrion; Biological process=RNA-dependent DNA replication
  Homolog annotation: Hit_ID=UPI00004C1731; Match level="QueryCoverage =99%, HitCoverage=21%, E-value=1e-143, Identity=82%"; Hit description= UPI00004C1731 related cluster
  Pfam annotation: Domain name=rve; Domain location=88-247; Score =120.8; E_value=3.8e-33; Accession=PF00665.16; Description=Integrase core domain
MKNSHYRDPKMEAYCDEVRRLEDKFYGLELNHIARRYNETANELAKIASGFLLGTAVADATRIVRTCQGCQFYARQTHLPAQALQTIPITWSFAVWGLDLVGPLQKAPGGYTHLLVAIDKFSKWIEVRPLNNIRSEQAVAFFTNIIHRFGVPNSIITDNGTQFTGRKFLDFCEDHHIRVDWAAVAHPMTNGQVERANGMILQGLKPRIYNDLNKFGKRWMKELPSVVWSLRTTPSRATGFTPFFLVYGAEAILPTDLEYGSPRTRAYNDQSNRANREDSLD

SEQ ID NO: 43421 - protein, 138 aa, Zea mays
  Coding DNA Sequence Number=SeqID_1642
MEMNLEFVTLSSECSGSLSWSKSIFPFQSTFETKSSKLKHMGSDSASAPEDDELRLARPQGSDSASAPEDDELRLARPQGSDSALASADGLRLARPKGSDSTSTSEDRLDLDLGGASASPYPGLGLTTSQEGPSLPYP

SEQ ID NO: 43422 - protein, 304 aa, Zea mays
  Coding DNA Sequence Number=SeqID_1643
MGPTPPHTDDTRVAQLPLPGGAEDYVRDSIHASLGLPVSDRSLRLKLLASEEQRHRLQDHVFSLEEDLRAAQRRIDLLKAEAAMNAAGLRRCVEEKEAVAAAYADLSDKSSKECRLYERDLERAMESCDDLARENDDLRARLNQNTDVSCLLFFQTDSLTTDPLLKNRAFHCLVVFKIDIDGTTSFASCALAALMVQVQELHKEKEILKMNLDTAEAEVVTLSEDNRALDEEIKRLLSLLEKERQRRSERKKSASTSTKNKRKSSSLRDGNTTGRALDFGCADSSRHPLSPLPHNSPDYRAHKK

SEQ ID NO: 43423 - protein, 80 aa, Zea mays
  Coding DNA Sequence Number=SeqID_1644
MALSGAYQQQALRDDERSSALPLMWRDGKEGKSSVQRFAKGNGRGTDRQASWRQGRRTAAATPGGSSNGRRCSGKGDEQF

SEQ ID NO: 43424 - protein, 149 aa, Zea mays
  Coding DNA Sequence Number=SeqID_1645
  Gene Ontology: Mol. function=metalloendopeptidase activity; Biological process=proteolysis
  Homolog annotation: Hit_ID=Q5N6Y0; Match level="QueryCoverage=90%, HitCoverage=19%, E-value=4e-48, Identity=74%"; Hit description =Putative thimet oligopeptidase
MEPRRRERRVIAIAGAAALVAVGLNIAFSAVVAHRRRKRRELPGFTAQVNLSAAAIKRTTDRIISKSRETYDSVAAVPLDKVSFANVIAPLAELDALQFPLVQACVLPRMVSPSEDVRKASAEAEKLLDSHFVLCRCNFATYFLQFTWI

SEQ ID NO: 43425 - protein, 35 aa, Zea mays
  Coding DNA Sequence Number=SeqID_1646
MASMPVNHCSVTDAALDPITGVAPPATDHKNYVFV

SEQ ID NO: 43426 - protein, 199 aa, Zea mays
  Coding DNA Sequence Number=SeqID_1647
  Gene Ontology: Mol. function=transcription regulator activity; Cellular component=nucleus; Biological process=regulation of transcription
  Homolog annotation: Hit_ID=Q5N8U8; Match level="QueryCoverage=98%, HitCoverage=56%, E-value=8e-52, Identity=58%"; Hit description =Putative helix-loop-helix protein 1A
  Pfam annotation: Domain name=HLH; Domain location=144-192; Score =26.7; E_value=8.3e-05; Accession=PF00010.16; Description=Helix-loop -helix DNA-binding domain
MAASGGAMGSYTQAGSDAALGPGHGHGHAQLSSQWSFSRQDLPQISEMGMIPADIGESIVGAGGCNSSSDAAQSSSYLSRTFSVGSWDDTNSIMFSSAPCKKPKVDPAAGADDMVTNFSTIDPQFGLSNSSLELPGMDDYLQLQQDSVACRERRTRISKRLKKLQDLVPNMDKQTNTSDMLDLAVEYIKELKDQVEHSC

SEQ ID NO: 43427 - protein, 111 aa, Zea mays
  Coding DNA Sequence Number=SeqID_1648
  Homolog annotation: Hit_ID=Q6Z3T8; Match level="QueryCoverage=80%, HitCoverage=37%, E-value=1e-23, Identity=46%"; Hit description=Auxin- regulated protein-like
MEVFIIERSVAYGACLRRGKHAPSDSAQKELADELRAKVADEFVKRRGDTEWMPITVYMYTGSSDGPRIIAEYGQEYGKDDPVRVLYDGYGHYDALQPSLVRTQSSRLRGV

SEQ ID NO: 43428 - protein, 684 aa, Zea mays
  Coding DNA Sequence Number=SeqID_1649
  Gene Ontology: Mol. function=ubiquitin-protein ligase activity; Cellular component=ubiquitin ligase complex; Biological process =protein ubiquitination
  Homolog annotation: Hit_ID=Q93XR9; Match level="QueryCoverage=87%, HitCoverage=75%, E-value=1e-55, Identity=27%"; Hit description=Bg55 protein
  Pfam annotation: Domain name=Arm; Domain location=356-400; Score =14.0; E_value=0.22; Accession=PF00514.13; Description=Armadillobeta -catenin-like repeat
  Pfam annotation: Domain name=Arm; Domain location=402-440; Score=0.0; E_value=12; Accession=PF00514.13; Description=Armadillobeta-catenin -like repeat
  Pfam annotation: Domain name=Arm; Domain location=441-487; Score=7.8; E_value=1.3; Accession=PF00514.13; Description=Armadillobeta-catenin -like repeat
  Pfam annotation: Domain name=Arm; Domain location=534-575; Score=6.9; E_value=1.7; Accession=PF00514.13; Description=Armadillobeta-catenin -like repeat
  Pfam annotation: Domain name=U-box; Domain location=180-252; Score =79.1; E_value=1.4e-20; Accession=PF04564.6; Description=U-box domain
  Pfam module annotation: Pfam domain module=Arm::Arm::Arm::Arm::U-box; Domain location=356-400::402-440::441-487::534-575::180-252
IVEIVGELEEIVFTLDRSEKEAGDELIKLLQRNNKTNGSSDSGELEVFHMSALKLGITSSRAALTERRALKKLIEKARSDEDKRKELVVSYLYNLMRKYSKFFRSETGDDTDSQGSSPCSPTVLGMDDMYGPYNNGRAFSRQLSSIQSFNSRFGSFNSRLGSFNCRRGGGPRSENMSIPPEELRCPISLQLMYDPVIISSGQTYERICIEKWFNDGHSTCPKTQQQLAHLSLTPNYCVKALIASWCEQNDFPVPDGPPGTFDVNWRLALSDTEAAGCVSVESFDCANAKSVKVVPMENVRKEEPANSESGTLDDGSCNDFDLNEGYGNLLLLLHERSNMNKQCRLVEQIRYLLKDDEEARIQLGSNGFAEALVEFLRNAVNDGNEKAQEVGAMALFNLAVNNNRNKGLLLSAGVTDLLEQMISNPRLSGPATALYLNISCLPDAKAVIGSSQAVPFLVDRLYSQDGSDTRGSSCKHDALYTLYNLSSHQASVPALLAAGIVDALHCLVTESPGSEEGLGWTEKALAVLISLAATQAGRKEIMSTPGLVSTLAMLLDTGESTEQEQAVSCLLVMCGADDKCIAPVLQEGVVPSLVSISAAGTGRGREKAQKLLKLFREQRQRDTPPPQQQQQQLLQSQLAEGGNGGGGAIVCHRESKPLCKSKSRKLGRTLSSLWKNRGFSLYQC

SEQ ID NO: 43429 - protein, 133 aa, Zea mays
  Coding DNA Sequence Number=SeqID_1650
MASAHPADRNGRTELTLREPHGIDDMFDDASSPTSHRGPGPRVARTGRTAADPVPFLQSSPFSTQVFVIERSSSLFATSCVYSRKVLDLVRLFPIHMDWMRLEKILKKFDLFGIQTHPISLNPHGLRANRTSP

SEQ ID NO: 43430 - protein, 107 aa, Zea mays
  Coding DNA Sequence Number=SeqID_1651
  Subcellular localization annotation: CTP_CleavageSite=40; ConfidenceScore=5.03e-01
MAHAKSIPEPADIMFFFFFFISGHKTSQMLLTGCIGALVRCWSLGSSQRWKQWRPKKVLFWLMMPSCTQEFVEHFILLYLSFPPFSPLSKHQDPEASLVYKHCVHYM

SEQ ID NO: 43431 - protein, 76 aa, Zea mays
  Coding DNA Sequence Number=SeqID_1652
MQRHSGGRLAAELRPAWTRGTRLVLWSRPTWPVPSGNSCEAQVQPIITPNPATQRLQFLNVAPQLIHRNICLAPVE

SEQ ID NO: 43432 - protein, 241 aa, Zea mays
  Coding DNA Sequence Number=SeqID_1653
  Homolog annotation: Hit_ID=Q2HUP4; Match level="QueryCoverage=47%, HitCoverage=40%, E-value=7e-07, Identity=33%"; Hit description =Endonuclease/exonuclease/phosphatase
MKEKGCDRLGEPTLNLAIIMEMKPERNPFKRNPLSDRPYQAQSQVSKDQVATSLVAHYIGVQHVCPQVGHNGSPKRLIWKDLDGMVIMVRDTPISEKFFIGDLNGHVDTTSVSFEAVHEGFEYGSRNQEEEESWTLRCGPIEINKPKLREQSSGKWRGESRGLQGKDHQRGHLEGRIHKQHVKEDGNLHMEGGLRGIRHDNPSRCLGILATTPCSPGTRRVGFRQGDTPWRVRAPGHLVSA

SEQ ID NO: 43433 - protein, 431 aa, Zea mays
  Coding DNA Sequence Number=SeqID_1654
  Gene Ontology: Biological process=response to jasmonic acid stimulus
  Homolog annotation: Hit_ID=Q2QWM9; Match level="QueryCoverage=68%, HitCoverage=68%, E-value=3e-95, Identity=57%"; Hit description=VTC2, putative, expressed
MTRRSDARLRRVVMEPASPPTAASRADEGGGESFAVSTAVFAPKSNRNLRGQRKVGNLVREPALSETPILGRHCRLFFVLGKALSDSCIFILAMLSAATKLTMDGTSFDLTEHEGSNLSPFLLKLFNEVLPGVHNFVATLIEGRDQKKRPTEFTMNQVLQPFVSEKFNFTKVSPLEVIFRFNDTEKDSAQYFDGVPDTVSASSSAILINVSPIGYCHVLLTPKIQDCLPQRIDQESFLIAMYVAREARTPFFRVGYNSLGGFATINHLHFQAYYLKVQYPVEKAITEKLKTLGNSVSIFHLVDYPVNGFVFEGGASLEDLSDVVSKVCIFLQENNRPFNVLISESGKRIFLLPQCYAEKQLLGKASQEFLDMRINPAIWELSGHLVLKRRKDYEEASEANICRFLVEAALSETEFQELNLCVLDFLTSSLG

SEQ ID NO: 43434 - protein, 267 aa, Zea mays
  Coding DNA Sequence Number=SeqID_1655
  Gene Ontology: Mol. function=oxidoreductase activity; Cellular component=integral to membrane; Biological process=electron transport
  Homolog annotation: Hit_ID=Q658G9; Match level="QueryCoverage=82%, HitCoverage=45%, E-value=6e-80, Identity=64%"; Hit description =Putative cytochrome P450
  Subcellular localization annotation: CTP_CleavageSite=41; ConfidenceScore=5.08e-01
MASQLPSLAAPAGLCLLSALAAALLVLTLYVLGAVASFAVFCAGEFARRDPGRPPLTGTMLRQLKNFDRLFDEHVRLQQYELMDMILNSFENDTQGAYNIGVMKDLFGDGIFAIDGDSWRHQRKLASHEFSTKVLREFSSVVFRANATRLVDKISSAAANRTILNMQDLLMKTTMDSIFKVGFGFELNTLSGSDKSSVQFSNAFDEANCIVYHRYVDLFWQLKRYFNIGSEAKLRKNIQIIDDFVMNLIHQKREQMNGQDNVRAAKL

SEQ ID NO: 43435 - protein, 276 aa, Zea mays
  Coding DNA Sequence Number=SeqID_1656
  Gene Ontology: Mol. function=oxidoreductase activity; Cellular component=integral to membrane; Biological process=electron transport
  Homolog annotation: Hit_ID=Q658G9; Match level="QueryCoverage=99%, HitCoverage=45%, E-value=1e-105, Identity=67%"; Hit description =Putative cytochrome P450
KAREDILSRFIIASKEDPEMINDCYLRDIVLNFLIAGKDTTGNTLSWFLYMLCKNPIVQDKVALEIKESVEWAEEDNNREDFTARLNDRAIDKMHYLHAAISETLRLYPAVPVGQISNKGQQQQQQDLLVPSKLGQARLKIQWKPQIKDGKMAEDDDVLPNGYKVIKGDGINYMIYAMGRMTYLWGEDAEDFRPERWIANGVFQQESPYKFVSFNAGPRTCLGKDFAYRQMKIMAATLIHFFRFKLTDESKDATYKTMFTLHMDKGLKLYAYPRSI

SEQ ID NO: 43436 - protein, 46 aa, Zea mays
  Coding DNA Sequence Number=SeqID_1657
MNFRRLNEKKRKCKGNKTETVPDFPGCEKVKFGEVVDAPPKLSFPK

SEQ ID NO: 43437 - protein, 118 aa, Zea mays
  Coding DNA Sequence Number=SeqID_1658
MAVGSSCNSLAVGRVVLIKSPPAIKSRGNLTHDFWSHGHHEEAKDLLLKRGPLEKFRIDPSRGPAIKLVGNLLLKRGKGTIKRPTARLQAIQSNKGDYGFLSIVDGSCLCHLILGRGV

SEQ ID NO: 43438 - protein, 85 aa, Zea mays
  Coding DNA Sequence Number=SeqID_1659
MARPASMQRRKERVDPTNRGDDRSDQWEVKHVCKSTVSSILHFEYYIVDVLLVIFFVVVIFIIIPRVVRVVASGSRGLNCWCRRC

SEQ ID NO: 43439 - protein, 191 aa, Zea mays
  Coding DNA Sequence Number=SeqID_1660
  Subcellular localization annotation: CTP_CleavageSite=59; ConfidenceScore=5.53e-01
MAGRCHQAVAWKRTSYRPGSENSSVGRPRSLGLFHVVVFPGTFLRQTHIWSSRSLFRPRARSSRDRLRVHLQEPGDTHLSNPLLEQAGVGDGPLSCPEYRRRYPHGGPNGNIREEEKGWGASDITAADLGEEEATARRSGRRRRRCGARGGDESGGAPRQCRLKVEKLCGRLRSIDHRPCPLLDAIDFFNG

SEQ ID NO: 43440 - protein, 179 aa, Zea mays
  Coding DNA Sequence Number=SeqID_1661
MPVVTGRAGRGDGDGTVVVDVGPGARGGLRCGVAMARTRPRHALEKSLSYRVGTRVFWRPPLGGVAVVGKGGCRAGGGGEIERRPSRTREEEEGEEVIESYTEPTEATLEVGDGESGGLGKENIDIIIERRGGEKGGQRRTSRGHFPCWWRHKSDSERRTKVKGLRKSSVDYVGSAMNE

SEQ ID NO: 43441 - protein, 171 aa, Zea mays
  Coding DNA Sequence Number=SeqID_1662
MPLWTAAHHRRLLGCGSPSPAAPPIDADVSSLCHLVYVLFIRLVGVTSCNTASCVRNEILCSYFREVTVDESLTCGPDLELDSRVIDGKLQIAGYKASKALFSTVACRKNILKPGVGIGPNNFKYYASEDEAAEALPAEDNSMDAVIGALLTDATSPGKQDTASEMLGSRA

SEQ ID NO: 43442 - protein, 173 aa, Zea mays
  Coding DNA Sequence Number=SeqID_1663
  Gene Ontology: Cellular component=chloroplast thylakoid membrane
MASPLLKSHSQLAAAAALHSVRRADRCPATIHLGKFHDHGLRSGRSKRSGSAKVGAFPSLDVVPLMVTMVEHVDMSRDYVVTKSIWHLSDAALKSVSCLRAWVKSKQDPFYDSETYRSQGGDGTVHWYYDRQEDLEASAREELLREELLEEIEQRVGGLRELEEASKEEQLTK

SEQ ID NO: 43443 - protein, 202 aa, Zea mays
  Coding DNA Sequence Number=SeqID_1664
  Homolog annotation: Hit_ID=Q67X40; Match level="QueryCoverage=68%, HitCoverage=75%, E-value=7e-49, Identity=71%"; Hit description =Integral membrane family protein-like
  Pfam annotation: Domain name=DUF588; Domain location=37-187; Score =176.4; E_value=7e-50; Accession=PF04535.3; Description=Domain of unknown function (DUF588)
  Subcellular localization annotation: CTP_CleavageSite=53; ConfidenceScore=5.01e-01
MEDSKAPVSEHGGETSKAAVLVGVAAGSGGRRGRAATRVLAVVDLILRSVAVVATVGSAIAMGTTNQTLPFFTQFLRFKAQYSDLPTLTFFVVVNSIVAAYLVLSIPLSIVHIMASSAKYSRLVLVFFDAAMLLALVTAAASAAAAIVYLAHKGNARANWLAICQQFDSFCERISGSLIGSFAAMALLLLLILLSAAALARR

SEQ ID NO: 43444 - protein, 304 aa, Zea mays
  Coding DNA Sequence Number=SeqID_1665
  Gene Ontology: Mol. function=ATP binding; Cellular component =membrane; Biological process=anion transport
  Homolog annotation: Hit_ID=Q6Z2T4; Match level="QueryCoverage=99%, HitCoverage=84%, E-value=1e-131, Identity=72%"; Hit description =Putative ATPase
  Pfam annotation: Domain name=ArsA_ATPase; Domain location=7-304; Score=155.8; E_value=1.1e-43; Accession=PF02374.6; Description=Anion- transporting ATPase
MSSGTRRRYYMLGGKGGVGKTSCAASLADLSGGTLVQVEGPDSPLFALEINPEKAREEFRTVSQKNGGTGVKDFMDSMGLGVLVEQLGELKLGELLDTPPPGLDEAIAISKVMQFLEAQEYSMFSRIVFDTAPTGHTLRLLSLPDFLDASIGKILKLRSKIASATSAIKSVFGQEVQQQDAANKLEQLRERMVKVRELFRDTESTEFIIVTIPTVMAISESSRLHSSLQKESVPVRRLIVNQVLPPSTSDCKFCSIKRKDQTRALDMIRTDPELKGLNIIQAPLVDMEIRGVPALNFLGDILWK

SEQ ID NO: 43445 - protein, 154 aa, Zea mays
  Coding DNA Sequence Number=SeqID_1666
  Subcellular localization annotation: CTP_CleavageSite=64; ConfidenceScore=5.39e-01
MAFRQSDRSRNRGSAIFEFAESPVKKRVRAKSSSCNGNRRWSGGGSRTGVGARWLGVGLIRLPVGMMRSRNRATRGRGRASGRREGSSAGGETPWIASIYDKEAESMESAARTRLERQGREFLEQPKRYSKNHGVCNSKVRVFDSCELLLKVIL

SEQ ID NO: 43446 - protein, 256 aa, Zea mays
  Coding DNA Sequence Number=SeqID_1667
  Pfam annotation: Domain name=DUF623; Domain location=148-217; Score =88.3; E_value=2.4e-23; Accession=PF04844.4; Description=Protein of unknown function, DUF623
MEEAEAEEENKSTKAAGMGCKKNVTRLQRSFLHLSRALGKLHGRRGHGNANGEASLSSSSSAATSSFLSGCMHPRTHSFALGRRHRHKRDGGGSGSGDALAVNFRSLQVDDEGGSSSAQHCYHGDRGSEADEPKAVVRGAGVAVATLSAAPYEDFRRSMREMVEAAAGTGSGGAAAAAVDWDFMEELLFCYLRLNDRAVHKDILRAFTDTVAAIRRRRRAAKSSRTRRRRRRQPRPGGDGPGRGDDCDGAEAVTSS

SEQ ID NO: 43447 - protein, 56 aa, Zea mays
  Coding DNA Sequence Number=SeqID_1668
MEGKMHLDVAGEEIAGEEGRSLARGADRQRQRVETEQRRGPWLKDLTLNSGKRGKA

SEQ ID NO: 43448 - protein, 44 aa, Zea mays
  Coding DNA Sequence Number=SeqID_1669
MAYEQFRKARVSIAQIRRLDPQNPPGQAEDANRTEARSTAFALV

SEQ ID NO: 43449 - protein, 65 aa, Zea mays
  Coding DNA Sequence Number=SeqID_1670
MAKGYGGLQVVRSKSDGRDQRLISPEPCCFSPYDPVHAGTGLRHPTCGGRPTGGGCCEAMDELSL

SEQ ID NO: 43450 - protein, 62 aa, Zea mays
  Coding DNA Sequence Number=SeqID_1671
MWLPMENSDVSTGRWSLGRERQGRRSGAVPVNDKVATTDASPFVINDLTVNARHHRASLREV

SEQ ID NO: 43451 - protein, 695 aa, Zea mays
  Coding DNA Sequence Number=SeqID_1672
  Gene Ontology: Mol. function=transporter activity; Cellular component= intracellular; Biological process=transport
  Homolog annotation: Hit_ID=Q5N8J4; Match level="QueryCoverage=80%, HitCoverage=87%, E-value=0.0, Identity=62%"; Hit description =Putative SEC14 protein
  Pfam annotation: Domain name=CRAL_TRIO; Domain location=157-343; Score=166.9; E_value=5e-47; Accession=PF00650.10; Description =CRALTRIO domain
  Pfam annotation: Domain name=CRAL_TRIO_N; Domain location=27-141; Score=40.7; E_value=4.9e-09; Accession=PF03765.5; Description =CRALTRIO, N-terminus
  Pfam module annotation: Pfam domain module=CRAL_TRIO::CRAL_TRIO_N; Domain location=157-343::27-141
MSATIDRLATPSHEGRAHSDEKRECNSDEENSEGERKPKKDSFKKRAVTTGYRFRHSLRRKSKTKNDNHIASIEDIRDVQELEIVERFRQCLLDDGLLPEHHDDYHTMLRFLKARKFNIDKAKHMWSEMLRWRKEFGADNIEEFDYTELDEVVKYYPQFYHGVDKDGRPVYIELIGKVDTNKLVQITTIDRYLKYHVKEFERCLQMRFPACSIAAKRHIDSSTTILDVKGVSLKNFTKDARELIMRLQKINNDNYPETLYQLYIINAGQGFKILWGTIKSFLDPETASKIHVLGNKYQTKLLEIIDGSELPEFLGGKCRCEEYGGCPKSDKGPWKDPEIFKRVINGEANYGRQVLAVSSINQKEVGCTEHTTLKFQGHASSSDAPPIIGDSIPAAGKVMDACSNPRNSSTPSSSGSFSLRNIPATLGGLKTRIVAWSTFVILTLSAFLCSVLSIVTKRLSNQAITCDHYSADFHQGYMGNGTLTSVLTRLGELEEKVQALEAKPPQVPFEKEELLHTAVYRVDVLEAELISMKKALYETLIRQDELLAYIDQQQTAKFCNINKPLAGVLKTYIRTRDRAFSAPNSLGPRQAISRHVIDRALTAPNSVGKRYQVSSECRGVCGYFPGSVPQRVQSWPFCCAVVHAVVGRAYCGGYEGPMFLCGGDNDTVEPRQCQQADFSDWNLWFFLKIEYVLAS

SEQ ID NO: 43452 - protein, 202 aa, Zea mays
  Coding DNA Sequence Number=SeqID_1673
  Homolog annotation: Hit_ID=Q9FLQ5; Match level="QueryCoverage=43%, HitCoverage=18%, E-value=1e-12, Identity=38%"; Hit description =Arabidopsis thaliana genomic DNA, chromosome 5, P1 clone:MCO15
MTRISYPPRSIDLRDSRHPPPSFGTMIGTWHPHAQQIPPPGDAHGTLNRHRQRQGVIVPPLPPSYASLGLSLGLDGGMTDLRLHDGASLLRKLWSDWQLVPGMPLEAAPDLNSCLLHQEIQFVNCCILRKKQRKAAKSDNIGDYVLQLVVGQPSKNLTLLETGEPIYSLTLQLVGPYLKTKSDSDKNMSVIFDLLRKKKIAG

SEQ ID NO: 43453 - protein, 130 aa, Zea mays
  Coding DNA Sequence Number=SeqID_1674
MQSGVVLSGATSQWSVFTRNIIKHIMDLDKRSDRDGKNYGNLSLMDPEHIVYSAIRGTGINRTARDMPVRHFWKVTANHGKKSVSAAACDDSEESNTPIAMPVRCCRKVLANRGKRPTLITKQSSSDGSR

SEQ ID NO: 43454 - protein, 80 aa, Zea mays
  Coding DNA Sequence Number=SeqID_1675
MARRRKARLLWGAVASALFPNIPRSRWMVRLFTVHGNVTKASLCVYMHMIEHVICSNYPVISLFPINEANWFILAKSQME

SEQ ID NO: 43455 - protein, 163 aa, Zea mays
  Coding DNA Sequence Number=SeqID_1676
MGKNNKRKREPTPPSKEFGDSEYSEEEFSSESEGSPAPIPLHESFDDSDDSQGLATEVWTYIRAVERSGLEGLDESEYSSDEEDSDGGGEDKDDDDDDGGGGDDDGSDRGGGSSSKDGDGGGSRGGSGGGGSSRSSTRGGSGGGSSRGSTRGGSGGGSNRASG

SEQ ID NO: 43456 - protein, 232 aa, Zea mays
  Coding DNA Sequence Number=SeqID_1677
MVCYMYHKYYECKVKNGGASASCCQQPDASRLTRLLSCVRCGTAGGQIPNARTRRQTGRGAGQLSFLRPPEAGSPTRRQPASPALRSALRRRLDAALSSAPPPCCERLSFALPLRSCAERLQVQFGSLRMMFPVWFSFDMRCISRMTSRIGSGSQSPCPPASSQDGLRRQISNRGSATTPTSAGGATDTPTPSSSAAAAGTPTPIDGGTDNVVVDGEDGNVTVGSKRKLKSD

SEQ ID NO: 43457 - protein, 114 aa, Zea mays
  Coding DNA Sequence Number=SeqID_1678
MRETPEPDGTQRGMSGPHEATEAEATHGCAEEGGAGGVARGDVGDAKVARGGAGERGAGGVALGDAGDAEAARGCAEGGVAGGAARVGAVDGPAGKGGTTIGDTGSTSRTRRAR

SEQ ID NO: 43458 - protein, 876 aa, Zea mays
  Coding DNA Sequence Number=SeqID_1679
  Gene Ontology: Mol. function=protein serine/threonine kinase activity; Biological process=protein amino acid phosphorylation
  Homolog annotation: Hit_ID=Q94CU5; Match level="QueryCoverage=99%, HitCoverage=99%, E-value=0.0, Identity=58%"; Hit description =Putative LSTK-1-like kinase
  Pfam annotation: Domain name=Pkinase; Domain location=8-206; Score =88.3; E_value=2.4e-23; Accession=PF00069.15; Description=Protein kinase domain
  Pfam annotation: Domain name=Pkinase_Tyr; Domain location=8-206; Score=-60.8; E_value=9.7e-09; Accession=PF07714.7; Description =Protein tyrosine kinase
  Pfam module annotation: Pfam domain module=Pkinase::Pkinase_Tyr; Domain location=8-206::8-206
MESRMDQYEVLEQIGRGAFGAAILVNHKTEKKKYVLKKIRLARQTERCRKSAHQESKWKLQMALIARLQHPYIVEFKEAWVEKKLLRWFAQLALAVDYLHSNFVLHRDLKVVGTPNYMCPELLTDIPYGFKSDIWSLGCCMYEMAAHRPAFKAFDMAGLISKINRSSIGPLPTFYSSSMKTLIKSMLRKSPEHRPTASEIIKNPYLQPYVNQYRPFANILHPGRSPEKPGTDSRSSQKSMSGSQCSSISGTGSDMDSIQSNERNTSGLASSSSNTIDTEGAETTELQRHKDTACPGLKRQDSSKSVQDNQHPGHENKQPKIIKKILTTLREESKFRESNSPVRASRVKLNSPSNRERSSDDSKQSDISSSSRSSEVMSHESANASCEPVKRGHASPPLKHLSPIVEHSPKVKIKVDELLHPHLAKQVGEVVDAAAGKVKNRTPPIFIKCTSIPTRRQGVASPSRQHTGVKRAHNKVMAEHARNPCQHLHSPSNALVKLPSVPMVPPSHLEDLKRKPDNTRAKSAPPRALATKEDNSACSSSTIGNAENTNQSEPSEPDSPTYLVSSCKCLIPDTIIQKHGITSKKSSEIITTNCEKKMTSNGDLSLSAAMVQSSDIPEQEFICKDGMLSSQVGQCSETVTVPSDEDKFTVRELLSSVPDLCSLVPTTMMNTEPGRGPTLTQSSEKPSGPHLNPPPVEDIIHVISHSSFHVNGEQAVKETGSESIDVDKRLNMVREEIGVRSTEPNLIPSGPIDSDTVKPNVVEANITFQKPSSTDAIKLPTIPEGNFSTLETNNGFKQEAAPAKEILDVTSFRQRAEALEGLLELSAELLEHSRLEELAIVLKPFGKAKVSPRETAIWLAKSFKGLMNDEASRSST

SEQ ID NO: 43459 - protein, 271 aa, Zea mays
  Coding DNA Sequence Number=SeqID_1680
  Homolog annotation: Hit_ID=O82294; Match level="QueryCoverage=64%, HitCoverage=71%, E-value=1e-24, Identity=36%"; Hit description =Similar to harpin-induced protein hin1 from tobacco
  Pfam annotation: Domain name=Hin1; Domain location=107-251; Score =126.2; E_value=9.3e-35; Accession=PF07320.4; Description=Harpin -induced protein 1 (Hin1)
MADTFSNKEFFPERKQRAMLNCLTDGFYGRSEDTLELMNHHPQEGVVYGYTEVTYLASTGPPPPYHPPPPLPPPPPPPPRRPSPFRIIVRVFIGVCVFIGVLALLIWLIYRPRTIQVAVATATLARFDLNTTSIFTPPVLSYNLTVMLSVSNPNRRVSVYYDQLQAAGLYQEERFGRAALPVSFQGTRRADAVPALLVGDTPMGFGDSGVAAFGEDRRAGVFPVDLWVEGVVRYKFGELMTTTASTLTIKCHLALKLMQASGWVECTVSDS

SEQ ID NO: 43460 - protein, 238 aa, Zea mays
  Coding DNA Sequence Number=SeqID_1681
  Gene Ontology: Biological process=protein transport
  Homolog annotation: Hit_ID=Q94CU7; Match level="QueryCoverage=70%, HitCoverage=71%, E-value=2e-47, Identity=58%"; Hit description =Putative harpin inducing protein
  Pfam annotation: Domain name=Hin1; Domain location=70-208; Score =144.3; E_value=3.3e-40; Accession=PF07320.4; Description=Harpin -induced protein 1 (Hin1)
MAAYEKQQRPETPLNAAYYGQPIPPPQPPAYYPPPPPPPPVPRRGGRSRCLLGSVVALVVALGVATLVLWLIFRPDNLRAYADSAALSRFDLGSGGDLLQYNLTVDIRVRNPNRFGIRYDYAEAQAFYDGDRFGFDPLQPFYLGRRSDARVTATFSGSAAMDDGGDALRTYRRESGEGFYYVTVKVYSDLSFRVRVVRRHDFKSKITCVLRLPVPAAGGNANSTTAMTTLGTRCDVDF

SEQ ID NO: 43461 - protein, 89 aa, Zea mays
  Coding DNA Sequence Number=SeqID_1682
MAEASKKAWLGGAGRARACEAHGLPQSARQRVDDSAGGSGAWSQAKGTVIMSRAVPTLDCALGSSAAEVSGGGCSAGAAQRAGKHDKQQ

SEQ ID NO: 43462 - protein, 203 aa, Zea mays
  Coding DNA Sequence Number=SeqID_1683
MWLCLCIKGNQLLLPPIILFLNAPSSLYNTRISSELLDKHSHLANSYTPNQVGELQATKTKVMPSACDRNLCGGGGGGDDEQEQRQGVEAGAPKDGPVEGEGRALGDGAARRGQRQQRPRDDVAAPGVLLVLVHRVAAELVRVVRGQPRRGRRRAGAHGPGRVPPVHDSERNGELRYVQRGPVQYDHRCRNVSWGQTQITENP

SEQ ID NO: 43463 - protein, 200 aa, Zea mays
  Coding DNA Sequence Number=SeqID_1684
  Gene Ontology: Mol. function=cation transporter activity; Cellular component=membrane; Biological process=cation transport
  Homolog annotation: Hit_ID=Q5NA18; Match level="QueryCoverage=92%, HitCoverage=46%, E-value=5e-79, Identity=80%"; Hit description =Putative cation diffusion facilitator 9
MAAAANGGDGEELLLLSAVEAGRGGGVPTEVEDSWRLNFEGFRPPEAHQERPPNGPLHHCLGVLAQGPEDVVAEYYQQQVEMLEGFSEMDTLTDRGFLPGMSKEEREKVARSETLAIRLSNFANMVLFAAKVYASVRSGSLAIIASTLDSLLDLLSGFILWFTAFSMQTPNPYRYPIGKKRMQPLVGMASDEQQPMSSGG

SEQ ID NO: 43464 - protein, 431 aa, Zea mays
  Coding DNA Sequence Number=SeqID_1685
  Gene Ontology: Mol. function=protein serine/threonine kinase activity; Cellular component=nucleus; Biological process=protein amino acid phosphorylation
  Homolog annotation: Hit_ID=P51566; Match level="QueryCoverage=98%, HitCoverage=91%, E-value=1e-177, Identity=72%"; Hit description =Serine/threonine-protein kinase AFC1
  Pfam annotation: Domain name=Pkinase; Domain location=94-422; Score =235.6; E_value=1.1e-67; Accession=PF00069.15; Description=Protein kinase domain
  Pfam annotation: Domain name=Pkinase_Tyr; Domain location=95-387; Score=-62.5; E_value=1.2e-08; Accession=PF07714.7; Description =Protein tyrosine kinase
  Pfam module annotation: Pfam domain module=Pkinase::Pkinase_Tyr; Domain location=94-422::95-387
MEAQWLAEYPHQGADKRPRKRARLAWDVAPTLFQPPKVWFWPRSPHRLATSRGVWLDLGAVFARFGVGWFDQGLELGELGAIPMLYCGQELINDRILNKMGEGTFGQVLECWDLENQEAVAIKIVRSLQKYREAAMIEIDVLQRLGKHDFTGSRCVQIRNWFDYRNHICIVFEKLGPSLYDFLRKNSYRSFPIDLVREFARQILESVAFMHDLRLIHTDLKPENILLVSSESIRVPDYKVSIRPPKDGSFFKNLPKSSAIKLIDFGSTTFESQDHNYVVSTRHYRAPEVILGLGWNYPCDLWSVGCILVELCSGEALFQTHENLEHLAMMEKVLGPLPKHMIVRADRRAEKYFKRGVRLDWPEGAASRESMKAVWKLPRLQNLVMQHVDHSAGDLIDLLQGLLRYDPNERLKAHEALQHPFFTRCIRRCGF

SEQ ID NO: 43465 - protein, 284 aa, Zea mays
  Coding DNA Sequence Number=SeqID_1686
  Homolog annotation: Hit_ID=P93713; Match level="QueryCoverage=39%, HitCoverage=63%, E-value=2e-25, Identity=55%"; Hit description =PEThy;ZPT2-5
  Pfam annotation: Domain name=zf-C2H2; Domain location=151-173; Score =16.3; E_value=0.11; Accession=PF00096.16; Description=Zinc finger, C2H2 type
  Pfam annotation: Domain name=zf-C2H2; Domain location=208-230; Score =17.0; E_value=0.069; Accession=PF00096.16; Description=Zinc finger, C2H2 type
  Pfam module annotation: Pfam domain module=zf-C2H2::zf-C2H2; Domain location=151-173::208-230
MEESPAGHQPAAILNWGRRARRGGLKRTPTELEPSSPDAAIRCLCAVLYVRAGAAIYIHEPPAAPMPYTTACLPAARRSRVVLGVNQLDRAMQPPTTAKRDRAAWEADAGAADTARLLMLLAQAQAQQQQRLLQHAYHHGVAPLFPAGRVFECKTCSRQFPTFQALGGHRASHKRPRALQQQQPVVVADDHDAGLCLGRQPPKPRRVHECPVCGLEFAIGQALGGHMRRHRADAEVRPPPDKARDVAGGICLDLNLTPSENCAKCRSVVVLGAAAGQGVHKALA

SEQ ID NO: 43466 - protein, 87 aa, Zea mays
  Coding DNA Sequence Number=SeqID_1687
MRNCTYPYTTLPCATYEKSDDEDGDTMIRAVLMGSEYALAGRVIKLEVAKEAGDLHDRCIPRKPKGKKDGWLPGHLLQLQRAGAAGE

SEQ ID NO: 43467 - protein, 236 aa, Zea mays
  Coding DNA Sequence Number=SeqID_1688
  Homolog annotation: Hit_ID=Q943L5; Match level="QueryCoverage=81%, HitCoverage=45%, E-value=1e-53, Identity=62%"; Hit description =Putative auxin-regulated protein
  Pfam annotation: Domain name=DUF966; Domain location=43-236; Score =73.3; E_value=7.6e-19; Accession=PF06136.4; Description=Domain of unknown function (DUF966)
MAVAAAGSRARAEQARLQWREQEPRSPEMAAPPRPPRPRPARAAVVYYLARNGHLEHPHFMEVALSCPDGLYLRDVIDRLDALRGKGMARVYSWASKRSYRNGFVWHDLADDDYIHPVVGREYVLKGTERLHPVPPPALLDAAAASSSSSGSQETPTSSSSAGWEARGRTAHRMKSASACGAADAELGEYVAYKGEERAADAATQTEDGGRGHGHSHSQRRVLALAAQEELSRAET

SEQ ID NO: 43468 - protein, 49 aa, Zea mays
  Coding DNA Sequence Number=SeqID_1689
MAGLAFIPVRKLFVLDAGACFFFNLGSRSGGANDVWSVGARKKTHRCKR

SEQ ID NO: 43469 - protein, 179 aa, Zea mays
  Coding DNA Sequence Number=SeqID_1690
  Subcellular localization annotation: CTP_CleavageSite=24; ConfidenceScore=5.33e-01
MSTQPISHQQGARPPDLRAKGIPKGSLVWRTGLSGVPPDSVRCTRGLRTELLSLGNFQSRRAIIHRTSPVYTGQCPVLQEDAALELGSLGNSRQLLRYNSPDMSGVTTGQRLLRHQRLPADALNARQRAQKSGTPILAHRTLYSTCPVRHRTSRRAQKSELQRPKPNSFGDVAGAPDMS

SEQ ID NO: 43470 - protein, 373 aa, Zea mays
  Coding DNA Sequence Number=SeqID_1691
  Gene Ontology: Mol. function=catalytic activity; Cellular component =integral to membrane; Biological process=cellular metabolic process
  Homolog annotation: Hit_ID=Q6B6M1; Match level="QueryCoverage=92%, HitCoverage=93%, E-value=1e-173, Identity=80%"; Hit description=UDP -D-glucuronate decarboxylase
  Pfam annotation: Domain name=3Beta_HSD; Domain location=99-298; Score= -134.1; E_value=0.0043; Accession=PF01073.9; Description=3-beta hydroxysteroid dehydrogenaseisomerase family
  Pfam annotation: Domain name=Epimerase; Domain location=98-299; Score= 110.2; E_value=5.8e-30; Accession=PF01370.11; Description=NAD dependent epimerasedehydratase family
  Pfam annotation: Domain name=NAD_binding_4; Domain location=100-284; Score=-84.6; E_value=0.0037; Accession=PF07993.2; Description=Male sterility protein
  Pfam annotation: Domain name=RmlD_sub_bind; Domain location=97-368; Score=-132.8; E_value=3.1e-05; Accession=PF04321.7; Description=RmlD substrate binding domain
  Pfam module annotation: Pfam domain module=3Beta_HSD::Epimerase::NAD _binding_4::RmlD_sub_bind; Domain location=99-298::98-299::100 -284::97-368
  Subcellular localization annotation: CTP_CleavageSite=22; ConfidenceScore=5.44e-01
MKQLHKSSPTHAPSPAHAPAPKAAKTARPGPRSWIGYVLREQRLLFVLLGALIASTFFLLRPYLSLSPSSHLPDARPLFSFATRSGVPAGFRPPQRRVVVTGGAGFVGSHLVDRLLEQGDSVIVVDNFFTGRKENVAHHLRNPRFELLRHDVVEPILLEVDRIYHLACPASPVHYNTSEVYGDPLEHPQKESYWGHVNPIGVRSCYDEGKRTAETLTMDYHRGGGVEVRIARIFNTYGPRMCLDDGRVVSNFVAQALRRQPMTVYGDGKQTRSFQYVADLVAGLMALMESDHIGPFNLGNPGEFTMLELAQVVKETIDPMATIEFKPNTADDPHMRKPDITKAKQLLHWEPKVSLKEGLPLMVQDFRQRISDE

SEQ ID NO: 43471 - protein, 155 aa, Zea mays
  Coding DNA Sequence Number=SeqID_1692
  Homolog annotation: Hit_ID=Q8GRM2; Match level="QueryCoverage=32%, HitCoverage=6%, E-value=2e-11, Identity=46%"; Hit description=COP1 -interacting protein 7 (CIP7)-like
MDTGATAPARARKRKGSENDAFIEEVKKMRESRLEIERDRKARVDKFFELEKSKLDLERDKHDTKCYCGLLIVHWYSMNIYAEGVLILVCMVHLLDLHRKAPTIGGTKFTAFTENVHNLAGSPSSWNSHSLDEITDADVSRMRKKWSSAQMYLGC

SEQ ID NO: 43472 - protein, 82 aa, Zea mays
  Coding DNA Sequence Number=SeqID_1693
MVVAEECPLLGPDTPGWGCCILGRRRSTDPGQTVRTTTHGTWPGPRMVRCQGLDGPHCNLFEPHQSHHTSDHSEWIADDLAT

SEQ ID NO: 43473 - protein, 187 aa, Zea mays
  Coding DNA Sequence Number=SeqID_1694
  Gene Ontology: Cellular component=integral to membrane
  Homolog annotation: Hit_ID=Q9FJV7; Match level="QueryCoverage=60%, HitCoverage=38%, E-value=1e-18, Identity=42%"; Hit description =Arabidopsis thaliana genomic DNA, chromosome 5, P1 clone:MFO20
  Pfam annotation: Domain name=DUF607; Domain location=1-184; Score =221.4; E_value=2.1e-63; Accession=PF04678.4; Description=Protein of unknown function, DUF607
MAEQNSKIGNNQEGGRKSRRAHGILSNVRTRLGILGRVRMQVVDLVRRAVPLALAPENDPRKEEFELLREKKEAIDRLAHKQVRRILWSGLGFFMCQVGLFFRLTFWEFSWDVMEPIAFFTTASGLLVGYAYFLITSRDPTYQDFMERLFLSRQRKLCAAHKFDMERFMELQKHCRCPLEGHGPRGP

SEQ ID NO: 43474 - protein, 482 aa, Zea mays
  Coding DNA Sequence Number=SeqID_1695
  Gene Ontology: Mol. function=hydrolase activity, acting on acid anhydrides, catalyzing transmembrane movement of substances; Cellular component=proton-transporting two-sector ATPase complex; Biological process=ATP ...
  Gene Ontology: Biological process=synthesis coupled proton transport
  Homolog annotation: Hit_ID=Q84PC1; Match level="QueryCoverage=97%, HitCoverage=89%, E-value=1e-104, Identity=84%"; Hit description =Putative vacuolar ATP synthase subunit C
  Pfam annotation: Domain name=V-ATPase_C; Domain location=2-481; Score= 723.2; E_value=1.7e-214; Accession=PF03223.5; Description=V-ATPase subunit C
MATRYWIVSLPVQSPGATATSLWSRLQDGISRHSFDTPLYRFNVPDLRVGTLDSLLALSDDLVKSNVFVEGVSHKIRRQIEDLERAGGVDSGALTVDGVPVDTYLTRFVWDEGKYPTMSSLKEIVGSIQSQVAKIEDDMKVFLGALTIWMAVENLLSKILRLRSFHKFHMVFWLADCRSVDQAVTAIRLVVSFPEKGMLVLINLLSCPDCDGDDGQMRSCVELQSKVATGEAFAGAWEGFQNILEVRAAEYNNVRSQLTAINRKQSGSLAVRDLSNLVKPEDMVCSEHLVTLLAIVPKYSQKDWLSSYESLDTFVVPRSSKQLYEDNEYALYTITLFAKVVDNFKVRAREKGFQVRDFEYSPEAQESRKQEMEKLLLEQEVMRTSLLQWCYASYSEVFSSWMHFCAVRIFVESILRYGLPPSFLSAVLAPSTKGEKKVRSILEDLCGNVHSIYWKGEDDVAVAGLGGESEVHPYVSFTINFV

SEQ ID NO: 43475 - protein, 230 aa, Zea mays
  Coding DNA Sequence Number=SeqID_1696
  Gene Ontology: Cellular component=chloroplast thylakoid membrane
  Homolog annotation: Hit_ID=Q2QYC9; Match level="QueryCoverage=60%, HitCoverage=41%, E-value=5e-42, Identity=67%"; Hit description=FHA domain containing protein, expressed
  Pfam annotation: Domain name=FHA; Domain location=103-192; Score =42.6; E_value=1.4e-09; Accession=PF00498.16; Description=FHA domain
  Subcellular localization annotation: CTP_CleavageSite=66; ConfidenceScore=5.79e-01
MAATSSLLLASGSRRWPATLPPSPSPQQQRLVIFCLAARTRPLDSKRGSWRRSSSATGGRSTAVSSSSERWVLDPAGDGDWRHIGYKVARPGAIEIVSEDTAVTVGRVADKADIVLPVATGQLAAVAIMLSSTHGRRQGGHAVSGAHARLEKKGGSLLVTDLDSTNGTYINERRLNPGFPASVDPGSLLIFGDIHLAMFRVRKTVVVEAPSTSTEEAEGAQQEATAAEDI

SEQ ID NO: 43476 - protein, 133 aa, Zea mays
  Coding DNA Sequence Number=SeqID_1697
  Subcellular localization annotation: CTP_CleavageSite=35; ConfidenceScore=5.16e-01
MGRGETPVVGAISCSSLARSGPKRAGPARLARKKRAMRAGLPILHYRNRVLCRVSKTLGKGYFTLGKGFAECNTRQRTLGKDFIGKGFFAEGIFAECSLPSVTLGKAFAECKIAFAECLRHSAKNAIPVVKDW

SEQ ID NO: 43477 - protein, 515 aa, Zea mays
  Coding DNA Sequence Number=SeqID_1698
  Gene Ontology: Mol. function=transferase activity; Cellular component= membrane
  Homolog annotation: Hit_ID=Q2RB29; Match level="QueryCoverage=93%, HitCoverage=93%, E-value=0.0, Identity=71%"; Hit description =Secondary cell wall-related glycosyltransferase family 47, putative, expressed
  Pfam annotation: Domain name=Exostosin; Domain location=98-465; Score= 328.2; E_value=1.4e-95; Accession=PF03016.6; Description=Exostosin family
MAPRGRTLLLPLAAATVLVASTIFLFAAVGARWRPADTGLPVPPDAFPTAVTIALPNATTGKELSFLDENGRPDDSSSASASGATAVRCDPRAAAVRVFMYDMPPEFHFGLLGWSPPSPASVWPDVTDGSLPPPRYPGGLNQQHSVEYWLTLDLLSSSSFSLSPPCGRHSAVRVTDPRDADLVFVPFFASLSYNRHSRPLPPEKVGRDKALQEKLVGYLTARPEWRRFGGADHVIVAHHPNSLLHARAALSPAVFVLSDFGRYPPRVASLEKDVIAPYKHMAKTFVNDSAGFDDRPTLLYFRGAIYRKEREYKSGTSKLYSKSRTIWNLVKLALSNINQEPASYTGGTIRQELYYMLKDEKDVYFSFGSVQDHGASKASQGMHSSKFCLNIAGDTPSSNRMFDAIVSHCVPVIISDDIELPYEDVLDYSKFSIFVRSSDAVEKGHLMRLLSGVSKQRWTEMWSRLREVDRHFEYQYPSQKDDAVQMIWRSLSRKVPSIKLKVHRSGRFSRSGRGK

SEQ ID NO: 43478 - protein, 214 aa, Zea mays
  Coding DNA Sequence Number=SeqID_1699
  Gene Ontology: Mol. function=kinase activity; Cellular component =ornithine carbamoyltransferase complex; Biological process=amino acid metabolic process
  Homolog annotation: Hit_ID=Q6QP54; Match level="QueryCoverage=69%, HitCoverage=45%, E-value=4e-21, Identity=53%"; Hit description =Putative kinase
MKCWSGGEVTAWRRRVAPDDDAPRRLFTDASSLGYFSLDTISFVLDASSTCSSWAGDVEGSDSGSAPEDSELRSARPRARTRAQPRKTANSAPPDPGLGLGLTPGRRRTPLRPTQGSDSGSTPKDGELRFARPQGSDSALASADGLRLARPRGSDSTSASEDRLDLDLGEASTSPNLRHGPTTSIGGAIITLPQADSSYEEQDRRPIWLAPPDK

SEQ ID NO: 43479 - protein, 350 aa, Zea mays
  Coding DNA Sequence Number=SeqID_1700
  Gene Ontology: Mol. function=transferase activity, transferring hexosyl groups; Cellular component=cytoplasm; Biological process =metabolic process
  Homolog annotation: Hit_ID=Q6H7J1; Match level="QueryCoverage=94%, HitCoverage=63%, E-value=5e-82, Identity=48%"; Hit description =Putative indole-3-acetate beta-glucosyltransferase
  Pfam annotation: Domain name=UDPGT; Domain location=1-340; Score= -136.9; E_value=0.001; Accession=PF00201.9; Description=UDP -glucoronosyl and UDP-glucosyl transferase
MSSLEACFGTPISSSSTDSDEQDARTVRGLHILPAQVELRVEELPWLVGDSATRRSRFAFWLQTLHRARGLRWVLVNSFPAEAGCPAAAAAAAGDEDEDDGAHRQQGPRVIPVGAALLPAGGIGERTKQQQQCVNINKSPSMWRADSTCIGWLDAQRARSVVYVSFGSWVGSIGPGKVRELALGLEATGRPFLWALKRDPSWRAGLPDGFAGRVAGRGKLVDWAPQQDVLRHAAVGCYLTHCGWNSTLEAIQHGVRLLCYPVSGDQFINCAYITGLWKIGLRLGGMMRDDVRAGVERVMDDGGHLQEKVWALRERVVTPEARRGADRNVRSFVDEITRDHPLVVQLYSVL

SEQ ID NO: 43480 - protein, 482 aa, Zea mays
  Coding DNA Sequence Number=SeqID_1701
  Gene Ontology: Mol. function=serine carboxypeptidase activity; Cellular component=cellulose and pectin-containing cell wall; Biological process=proteolysis
  Homolog annotation: Hit_ID=Q9LEY1; Match level="QueryCoverage=92%, HitCoverage=92%, E-value=1e-116, Identity=46%"; Hit description =Serine-type carboxypeptidase II-like protein
  Pfam annotation: Domain name=Peptidase_S10; Domain location=44-472; Score=523.9; E_value=1.8e-154; Accession=PF00450.12; Description =Serine carboxypeptidase
  Subcellular localization annotation: CTP_CleavageSite=16; ConfidenceScore=5.13e-01
MAVAMASALLMLALATASAAVSGAGAPWRSRRPRPEADLVTGLPGQPAVGFSHYAGYVDVTSGGGGGKALFYWFFEAEREPDKKPLLLWLNGAANLLFLEAPVGVGFSYANRTSDLRRLGDRVTAQDSYAFLLGWLDRFPEFKGRDLYIAGESYAGHYVPQLAELIYEGNKGASRDRAISIKGFMIGNAVLNDATDQLGMVEYAWSHAIISDELYSAVRRDCDSFKEEADGGRPGKGCSPALRAFLGAYDDIDIYSIYTPTCLLSNLSSASAAAGSARPRPARLVAAPRLLSKHEEWHRLMKRVPAGYDPCTEAYVTKYFNRGDVQRALHANRTGLPYPYSPCSEVIRKWNDSPATVLPILKKLMGAGLRVWVYSGDTDGRVPVTSTRYSINTMGLRPRPRQRAASRSAASAGGAAAEWGGWRAWYYRQQVAGWAVEYEEGLTLVTVRGAGHQVPLFAPDRSLAMLYHFLRGQALPAARSSG

SEQ ID NO: 43481 - protein, 221 aa, Zea mays
  Coding DNA Sequence Number=SeqID_1702
  Homolog annotation: Hit_ID=UPI000051A15D; Match level="QueryCoverage =43%, HitCoverage=18%, E-value=3e-09, Identity=41%"; Hit description =PREDICTED: similar to lactation elevated 1
MAWRGGVNDGARRMSGADGGMNGKVVLVQSCLEAPSLSVSSRLTARRRRHCRWQLLIAASGGRVAAPGRLLFCCSGLSRTGRGEADIPVRKACSGRASPTAVRALEFLAQAHNFFMVFDIGRGGPMVEYERRIASGELVDGDSFQVDTIQQLQRLYEELIENEEDCQLDRYKSSEKSGRSRWLWSRLITQPSTYAPIKGLYLYGGVGTGKTMLMDLFYEQL

SEQ ID NO: 43482 - protein, 58 aa, Zea mays
  Coding DNA Sequence Number=SeqID_1703
MKKVTLEEDPAEASGDGAAAPGSTSRKSLRARKGDNTYGREIYKKLCTIKIHPENHRL

SEQ ID NO: 43483 - protein, 545 aa, Zea mays
  Coding DNA Sequence Number=SeqID_1704
  Gene Ontology: Mol. function=transferase activity; Cellular component= nucleus; Biological process=protein kinase C activation
  Homolog annotation: Hit_ID=Q75HW7; Match level="QueryCoverage=97%, HitCoverage=96%, E-value=0.0, Identity=77%"; Hit description =Putative pentatricopeptide repeat-containing protein
  Pfam annotation: Domain name=PPR; Domain location=152-186; Score =13.3; E_value=0.2; Accession=PF01535.11; Description=PPR repeat
  Pfam annotation: Domain name=PPR; Domain location=214-248; Score =41.7; E_value=2.5e-09; Accession=PF01535.11; Description=PPR repeat
  Pfam annotation: Domain name=PPR; Domain location=315-349; Score =28.1; E_value=3.2e-05; Accession=PF01535.11; Description=PPR repeat
  Pfam annotation: Domain name=PPR; Domain location=351-385; Score =15.8; E_value=0.1; Accession=PF01535.11; Description=PPR repeat
  Pfam annotation: Domain name=PPR; Domain location=419-452; Score=0.1; E_value=7.4; Accession=PF01535.11; Description=PPR repeat
  Pfam annotation: Domain name=PPR; Domain location=74-108; Score=21.4; E_value=0.0033; Accession=PF01535.11; Description=PPR repeat
  Pfam module annotation: Pfam domain module=PPR::PPR::PPR::PPR::PPR::PP R; Domain location=152-186::214-248::315-349::351-385::419-452::74-108
MAARSLWQLEDAIIARLRTCATFRDLLRAHGLAVRLCLSQSSYVATQIVHICNAHGRAAHAARVFAQIPAPNLHLHNAMIKAYAQNHLHRDAVEVYVRMLRCLPHPSTAGFSVGDRFTYPFLLKACGALAASRLGRQVHAHVARSGCESHAVVQNSLIEMYTRCGDLSTARKAFDGMREKDVVSWNTLISAHARMGQMRRARELFYSMPDKTVVSWTALVSGYTAVGDFTGAVEVFRLMQMEGFEPDDVSIVAVLPACAQLGALELGRWIYAYCSKHGMLGKVYICNALMEMYAKCGCIEEALQLFHGMSEKDVISWSTAIGGLAAHGRAREAVRLFEVMDREGRVMPNGITFVGLLSACSHAGLVDEGLRYLDQMKEDYGVEPGVEHYGCVVDLLGRSGRIQRALDTIRGMPVPPDGKIWGSLLSACRSHGDVETAVVAAERLVELEPGDVGNLVMLANVYGAAGRWGEVASTRKEIRSRSTRKTPGCSMIEVDNVVREFVAGQDLGPELGGIATVLDILASKLADDEELVDSDCGDAIVFVSG

SEQ ID NO: 43484 - protein, 46 aa, Zea mays
  Coding DNA Sequence Number=SeqID_1705
MAKQWSGTGQTPRATTLAQVRHANLLTMPVVRYGPDTAGHNSGPET

SEQ ID NO: 43485 - protein, 194 aa, Zea mays
  Coding DNA Sequence Number=SeqID_1706
  Homolog annotation: Hit_ID=Q41822; Match level="QueryCoverage=91%, HitCoverage=78%, E-value=2e-70, Identity=78%"; Hit description =Protein Iojap
  Pfam annotation: Domain name=DUF143; Domain location=114-191; Score =47.7; E_value=3.9e-11; Accession=PF02410.6; Description=Domain of unknown function DUF143
  Subcellular localization annotation: CTP_CleavageSite=62; ConfidenceScore=5.89e-01
MGGTSAAVPSHGLACAPPAAVTLNPRARRRRASSGSGGHRSSPQQPLRSDLLPPATVACRARSQSASSSNVNFGRGDDADKLLEDLLKQHGEVVYSSGGPPDPTVEADDDAECLSFAVSLAKAASEIKATDIRVLCVRRLVYWTRFFIILTAFSNAQIDAISSKMRDIGEKQFSKVASGYQLLPEDPTYWNSKP

SEQ ID NO: 43486 - protein, 153 aa, Zea mays
  Coding DNA Sequence Number=SeqID_1707
FGRRHRTLPPPPLFLCSADELGFDAPPRALAADEALQPGQLYLVLPDSALRRPLTAKDMAALAVKAATALAAEAGLAAGLSPGRDSRGGTPAGKRPRRQSAARVAPLLVAVSKESSPPPPGDGAARKNDVHRGVGAINDESSFDQGPDNTMIR

SEQ ID NO: 43487 - protein, 278 aa, Zea mays
  Coding DNA Sequence Number=SeqID_1708
  Gene Ontology: Mol. function=zinc ion binding; Biological process =intracellular signaling cascade
  Homolog annotation: Hit_ID=Q1SKG4; Match level="QueryCoverage=67%, HitCoverage=60%, E-value=5e-44, Identity=44%"; Hit description=Zinc finger, ZZ-type; Zinc finger, PHD-type; Protein kinase C, phorbol ester/diacylglycerol binding; C1-like
  Pfam annotation: Domain name=C1_2; Domain location=129-156; Score =27.4; E_value=5e-05; Accession=PF03107.7; Description=C1 domain
  Pfam annotation: Domain name=C1_2; Domain location=187-217; Score =25.2; E_value=0.00024; Accession=PF03107.7; Description=C1 domain
  Pfam annotation: Domain name=C1_2; Domain location=69-96; Score=16.0; E_value=0.049; Accession=PF03107.7; Description=C1 domain
  Pfam annotation: Domain name=C1_3; Domain location=128-156; Score =20.5; E_value=0.002; Accession=PF07649.3; Description=C1-like domain
  Pfam annotation: Domain name=C1_3; Domain location=186-217; Score =30.6; E_value=5.5e-06; Accession=PF07649.3; Description=C1-like domain
  Pfam annotation: Domain name=C1_3; Domain location=68-96; Score=18.4; E_value=0.0035; Accession=PF07649.3; Description=C1-like domain
  Pfam module annotation: Pfam domain module=C1_2::C1_2::C1_2::C1_3::C1_ 3::C1_3; Domain location=129-156::187-217::69-96::128-156::186 -217::68-96
MNSRCRCVSMNTRKLSGHRLPSSSEPEDDVLETRDEHVVESRPEAEGEMVHFSHPEHRLARFDFPYLFMCMGCREYGAGKRFMCQTCGFQLHEFCALAPPSLHDHPLHPKHPHLLFFAKPASGGFLRCKCDVCGKPVRGFSFRCASCSFDMHPCCAAMARRMELPAVHEHPLLLAPAAQDGAETSFVCQVCRRTKRSSGQRVYQCLPCGYYLHARCAKDMVNGLYVHGVVPPEKRNALAAAARATVNALFGVIGGLIEGIGEGIGEAFVDNIGRSRRI

SEQ ID NO: 43488 - protein, 563 aa, Zea mays
  Coding DNA Sequence Number=SeqID_1709
  Gene Ontology: Mol. function=transcriptional elongation regulator activity; Cellular component=cytoplasm; Biological process =regulation of transcription, DNA-dependent
  Homolog annotation: Hit_ID=Q7EZ88; Match level="QueryCoverage=83%, HitCoverage=98%, E-value=1e-128, Identity=50%"; Hit description =Ternary complex factor-like
  Pfam annotation: Domain name=DUF547; Domain location=339-483; Score =244.7; E_value=2e-70; Accession=PF04784.5; Description=Protein of unknown function, DUF547
AGSEATGCAGASAAAIAMQTQQGQAIHPAHATQQQPEPGAAVELPRRKLSHGAFVALRRTWTDSSLFPAVTAQGSRSRSAMERESRSRVLSETASCAGTPRSVQSTCSLQRRYSSRSILKPHDGALDMSPRFSYCKPAADREKMFNRRHSLNLPEQLPDLVGEIAALEQEVIRKELHLLALYRRAFDQYVSESCSFTSEEEQEEAPPEAKAGARHSSLVNFLSASISEYVPKISCKLSEDILGCIAAVYCKLSGAEGECCVASPSPSVSSWSTFSPRRRNDSWSPRSRCNNFDSWSPRPCGVEKESGEQSPGVMMVVVPRIRVDADTFEYASKMLETTRSLIQRLEKVDPVKMTHEEQLCFWINIHNALVMHAFLAYGLHDKRMKSTDMILKAAYNVGGQSVNAQTIQNSILGCRQSHRPSLWVRALFTPAKRSAARHPYALQHPEPVAHFALSTGAFSDPPVRLYTAKKIQQQLEAARTEFIRGSVAVRKQALLLPKVLHCYARDAALELRHLVELVCETLSDAQQKQLQLGLRRRAVDKCVEWMPYKSSFRYVVHRDLADD

SEQ ID NO: 43489 - protein, 104 aa, Zea mays
  Coding DNA Sequence Number=SeqID_1710
  Homolog annotation: Hit_ID=Q41822; Match level="QueryCoverage=35%, HitCoverage=16%, E-value=1e-14, Identity=100%"; Hit description =Protein Iojap
  Pfam annotation: Domain name=DUF143; Domain location=7-90; Score= -23.8; E_value=0.027; Accession=PF02410.6; Description=Domain of unknown function DUF143
MAGRRGADAVEAGRRGAGRRPAQGTDRRQGRRQAGAELEEDRRWRRTAGSLGACLRGGSGGAQDQPEGDVVVHIFLPQQRAFYNLEEFYGNATPIELPFDTQRQ

SEQ ID NO: 43490 - protein, 137 aa, Zea mays
  Coding DNA Sequence Number=SeqID_1711
MGKSKKGGSSSHHSGDKRKHEPSPPSEDFGDSEYSEEEFSSESEGSSAPASPPASSDDSDDSQVIAAEVWTYIRAVERAGLEGSDESEYSSDEEDSSDSSEEGSGGDGDDDRGDGDGGSGSGGDGGSGSKGSNKASG

SEQ ID NO: 43491 - protein, 367 aa, Zea mays
  Coding DNA Sequence Number=SeqID_1712
  Homolog annotation: Hit_ID=Q8H4X8; Match level="QueryCoverage=16%, HitCoverage=8%, E-value=3e-13, Identity=58%"; Hit description =Putative subtilisin-like serine protease AIR3
MSTAAESVHALTAKVVDLDGSVAQFAPPVTAQEALAATASGAQPSSSSRFLCCSDALDFDAPISALAAHDALHPGQLYFALPASMLGRPLSAQGMAALAVKACAALGTAPVGSVPSSSSSLDRSEARAASSWPQRWQSTGRVAPLVVVRADAHGEWKTYPVHGGYKAARVGGGGGGGDQTVGKTKNGVGYKGIARDLAPIQRLSVIVEGAELSSTSPSTATVVDVDYRRRPRLPPPISPTTVVLVVTVVWALLLQLREKNCSSSSYIKMLVYGQDDDDQVSTRWKGYSVMHDVACNHMLIGGRFFNRDTLLSNPTVVDANWTRETEGQGTHTLSTTGTAKAVRRGRVSVECTTAAVGDRYLSGPLEG

SEQ ID NO: 43492 - protein, 353 aa, Zea mays
  Coding DNA Sequence Number=SeqID_1713
  Gene Ontology: Mol. function=carbohydrate binding
  Homolog annotation: Hit_ID=Q2QN32; Match level="QueryCoverage=93%, HitCoverage=70%, E-value=1e-159, Identity=84%"; Hit description =Lipase, putative, expressed
  Pfam annotation: Domain name=DUF620; Domain location=51-303; Score =586.5; E_value=2.6e-173; Accession=PF04788.3; Description=Protein of unknown function (DUF620)
MSHVYYSDISLGSRQTLLPGLSMETSSAQYILQQYLAASGGQRLLSSIRNSYAMGKVRMVATEFEAGGRVVRNRMAAQRAEPGRFVLWQMAPEMWYMELAVGGSKVHAGCNGKLVWRHTPWLGAHSAKGPVRPLRRALQGLDPLTAASMFAGARCIGERKVNGEDCFILKLSADPETLRARSEGLAEIIRHVLFGYFSHKSGLLVHLEDSHLTRIQSATGGDAVYWETTISSSVEDYRAVDGVVVAHAGRSAVTLFRFGEAAVGLGHTKTRMEEAWTIEEVAFDVPGLSADCFIPPTDVGPGSVSEAAELPRGERSKAAAGLVLPCHRARVAALEKADDGGVAWSGALQLGCK

SEQ ID NO: 43493 - protein, 80 aa, Zea mays
  Coding DNA Sequence Number=SeqID_1714
MAFLLLAFDTMASIGFGGARVLGDAVVATGGGEADVRDQEAVAAEEGRGRSRQLFSGVGRRVFRGMAGGVGADMRQSRRP

SEQ ID NO: 43494 - protein, 113 aa, Zea mays
  Coding DNA Sequence Number=SeqID_1715
  Homolog annotation: Hit_ID=Q5U9D4; Match level="QueryCoverage=34%, HitCoverage=4%, E-value=7e-11, Identity=87%"; Hit description=Plasma membrane proton ATPase 5
MFLLAVSECEIALSTGEIVEQIPEESGRSYLEICDDLEKKPPKIMWNQSFDLRSPIATSDDATPAASMGARKDGSTKTISKALVLGVNVKMIAGDQLAIGKETGRRLGMGTNM

SEQ ID NO: 43495 - protein, 135 aa, Zea mays
  Coding DNA Sequence Number=SeqID_1716
  Subcellular localization annotation: CTP_CleavageSite=56; ConfidenceScore=5.13e-01
MMRGWRSAWASALKLDFGPHQPQRGYPVVRKCPHQGRQRPYTRRGASSKLGSSSIVAEEAVVEEVTLACPNTKLRARKLAFIATKAVKHDAGTSAGAASYSHSWLDAAQKAIQRDIEVARHDLEGQARQDAIIVK

SEQ ID NO: 43496 - protein, 92 aa, Zea mays
  Coding DNA Sequence Number=SeqID_1717
MHRGPTFLMGPLLLPVLLLLLLLGRQPMHLPAGCVFWDRGSGVPKASQPLWRDRRSKMRRKEPKTEAQDAACEKLHSCPLHLLLTYVRLYED

SEQ ID NO: 43497 - protein, 108 aa, Zea mays
  Coding DNA Sequence Number=SeqID_1718
MGNCNGEWLVESCSHNFKKCFAVFGGFLRFLICRVLFDTRQSLYRVSEKVLGKQNFTDKMFAEYSLPRTLERSNKDLGKAKELRRRSKGIHNRKDIKSDLAAIPFWVP

SEQ ID NO: 43498 - protein, 167 aa, Zea mays
  Coding DNA Sequence Number=SeqID_1719
  Subcellular localization annotation: CTP_CleavageSite=21; ConfidenceScore=5.55e-01
MGTHQRFWSSDTRPWKSLVPRRTSVFGEQSPQLGMSFLHTDSTTSFPVPRGIPTVAPREQRPGHGKIRVRLPTAMPAAEGVEWLRGAANLAMGQLKAQVVGHLYRARNEPCGGKDRSEPEEPRGVQPKPFMACEIYRETALTLGARATMTERARRPAERLTPLAHMA

SEQ ID NO: 43499 - protein, 76 aa, Zea mays
  Coding DNA Sequence Number=SeqID_1720
  Gene Ontology: Mol. function=DNA binding; Biological process=DNA integration
  Homolog annotation: Hit_ID=O24587; Match level="QueryCoverage=98%, HitCoverage=8%, E-value=2e-29, Identity=75%"; Hit description=Pol
MTTSRPLELLHMDLFGPVAYLSIGGSKYGLDKSETQGTLKRFLRRAQNEFELKVKKKRSDNGYEFKNLHVEEYLKE

SEQ ID NO: 43500 - protein, 994 aa, Zea mays
  Coding DNA Sequence Number=SeqID_1721
  Homolog annotation: Hit_ID=Q2QN61; Match level="QueryCoverage=99%, HitCoverage=99%, E-value=2e-49, Identity=25%"; Hit description =Expressed protein
  Pfam annotation: Domain name=DUF863; Domain location=134-985; Score =750.4; E_value=1.1e-222; Accession=PF05904.2; Description=Plant protein of unknown function (DUF863)
MGAKVERESYMPGYYATGDLNLEPNGRWSPYYEEMTSNDQLCNGFTTKPTNDYSEFDKEILKHQILEHEAVFRQQPHNPLAIQVYELHRVYKIQKDMMKQHQSKEVYSYPTLAVASHTNSPSQVPQNGAKMMWQMPVPPMSTTYRKAIGEHNDTNQSSMKFLREGSVQSSPNGFISSDVGPRSRQGTFDLQLPADHYIDDDGTSDNKPIDFLGLASDTKPRNDAELTLVSAEGLGKFSDNSSSSGLQTTNNLGPRQVTDLNESNTGFHMGRANGSVSRGLPRTLENSWNQPILRANTTNFSFSKKHSKEKHTDEGTSSNFFDTSVKTIHDDKPSINKGKQVSSVTFLAPRYNDADPPKYFKAVDGRPATASYNHFVYQGQNSSVGWIAQSPLEPSVINNFARVDRPHHLNMGTFTAPVSIPQIDNPSIVSPMGSCTADPRSSVINNPALIPRFNGFSTVNSYTSLSAVTQSIGTSIPKLINVDNVDKRYRGFPLDSFSVSHSRHQVAVSSNLEQKNSQKLEDSDQQSHGKGMKNFNLNETLSDCQEDGLVEQDGRCASSFQHDKDGGSVLGISWLKKKLMSADPTAVEKPGKIFGHSLGTAIELKNTKDQNEPAVTIRNLSDSASTSVGCAIKKDRPSDNIVTGTLPVCNKAQEGATCLPLSCQKHVPKDGQAAEGATKKSGAPIRNFIDLNDDVPNDDNSEESVVSHECHVEPSRNNHPKRAFVIDLEVPACEEDASWDIDQECAQPKPDAYQEVDDGSDTSALAAAENIVALSRNTPTAAEASDDTLQWFADLAVLNINDLAEQAELQACTNDSSNYESDSFESLTLKLEETKIDDLWSRPLEPETATDEQTVSAAHLLTKPRRGQQRRRRQKRDFQRDVLPGLSSLSRPEITEDVQLLEGLVQASGGSWESSLTRRGRCGGRARGRKPRKTVVTVIVEEEEEEEVEVSPPPKPAGTGELEADGRGMIGWGRTTRRCRRARCPSGNSMATAS

SEQ ID NO: 43501 - protein, 102 aa, Zea mays
  Coding DNA Sequence Number=SeqID_1722
  Subcellular localization annotation: CTP_CleavageSite=80; ConfidenceScore=5.08e-01
MGTTTLTEPVRLADCDGPFTAGRLEDCRQPATSPTGARRVAVVVFVSVSSRRMGVGWECGTMGGRHANNTDGTAEAASVLASSSASFPTPPLLLLSRNPRSE

SEQ ID NO: 43502 - protein, 106 aa, Zea mays
  Coding DNA Sequence Number=SeqID_1723
MAHSWLMALVPEGMGCVLLLLHIGAKPKSWTILRKNGRVWVLLIPGALHYLARRIRKTKIPSAIVGAIDRIPRGANLEQKQESQLEVEAVAWEVRTSGRPDVFILR

SEQ ID NO: 43503 - protein, 226 aa, Zea mays
  Coding DNA Sequence Number=SeqID_1724
  Gene Ontology: Mol. function=nucleoside-triphosphatase activity; Cellular component=membrane; Biological process=cell division
  Homolog annotation: Hit_ID=Q5MJW2; Match level="QueryCoverage=63%, HitCoverage=55%, E-value=2e-35, Identity=53%"; Hit description =Avr9/Cf-9 rapidly elicited protein 102
  Pfam annotation: Domain name=AAA; Domain location=26-193; Score=27.2; E_value=1.9e-06; Accession=PF00004.19; Description=ATPase family associated with various cellular activities (AAA)
MSDEIKFGFRLCTFISGIVQSLVNCCYLLYGPLGTGKSTFAAATARFLGYDVDLSHADAAGDDLCALLLHTTSRSLVLVEDLDRYLQGGGGDTEARVARVLSFMDGVASCCSEERVMVFTMRGGKDAVDAVVVRPGRLDVHIQFTLCDFEAFKALFSNYLGLKDHKLYPQWRSGSTVGVMKEMVNAAVDSDIQLWTLRTWRKNYFIFSDRYRGMGMDIDDMSYKYV

SEQ ID NO: 43504 - protein, 106 aa, Zea mays
  Coding DNA Sequence Number=SeqID_1725
MSAGSKIHGGKPPWAKRYAPDGSSPIISRSTAHERDGAAHTRGGAIAGVRQIEATMLPARNKALIRNEEGDTNRALPRNQNAITGPKGGGCSYLSFLFLTVMMLGM

SEQ ID NO: 43505 - protein, 55 aa, Zea mays
  Coding DNA Sequence Number=SeqID_1726
MHMLKYVLPEGTLLSLVSDEVDTNEDWGETACSTVREGRVARIALELLGLTECEG

SEQ ID NO: 43506 - protein, 60 aa, Zea mays
  Coding DNA Sequence Number=SeqID_1727
MANARQDISSTRERDVHAIREMAARGPLSPVWQSQRGSRQIRGLMNSDTQLIVGEKSAAD

SEQ ID NO: 43507 - protein, 533 aa, Zea mays
  Coding DNA Sequence Number=SeqID_1728
  Homolog annotation: Hit_ID=Q2QN63; Match level="QueryCoverage=99%, HitCoverage=100%, E-value=1e-142, Identity=50%"; Hit description =Expressed protein
  Pfam annotation: Domain name=DUF1336; Domain location=277-517; Score =510.3; E_value=2.2e-150; Accession=PF07059.3; Description=Protein of unknown function (DUF1336)
MGSCVSSTRHRRRPRKLSVAARKIRRKVCTAIADAPIICGAASCLARHGVVHVEAPDSSVTLHLTKLQWQRSQTDAGNVICEEAWYDSVSILESPDSDDDLDNDFASVSGDPLPDVTGGSNAQQCKDAACFLDTMQLLRSIANAEACDRREQPDKSDDSNGEECCSSSTLKELQAAMSPRPFPASIPSNKVQPMPIAGASPHQQQQKKKTAVVRLSFRTRSYEGDEMTETMPFSGWIITSLTSPAIPGGSANYLYRPRAGFTVPCCSTGEKLSEGCWSVLEPSTFRVRGESFFKDKRKYPAPDCSPYTPIGADMFAYTRKIHHIAQHLSLPSLKTHEAFPTLLIVNIQLPTYPATVFGDNDGDGISLVLYFKLSDSFDKEISPQLQDSIKRLMNDEMEKVKGFAVDSIVPYTERLKILAGLANPEDLQLSTAERKLVQTYNQKPVLSRPQHKFYKGPNYFEIDLDVHRFSFISRKGLETLRERLRHGVLDLGLTIQAQKAEELPEHVLCCMRLNKIDFADNGHIPTLITAADE

SEQ ID NO: 43508 - protein, 133 aa, Zea mays
  Coding DNA Sequence Number=SeqID_1729
  Homolog annotation: Hit_ID=Q7XAA5; Match level="QueryCoverage=55%, HitCoverage=7%, E-value=3e-14, Identity=54%"; Hit description=WRKY11
MAEALVGLRVAALAVPQPRSHRRRLLPAARLAAFRRDRLSTARAAVAGPPEVDEDDSMSIDNLHRFFDLNVGKWDGSFYVFFALFASSPLIFDTFCSFRIRDWSDCRALCPPCTCVLSFHVAIRRAREGSSGD

SEQ ID NO: 43509 - protein, 89 aa, Zea mays
  Coding DNA Sequence Number=SeqID_1730
MADQRPKRHLVRELQTNGCYPSRECAHSFTTGTTSAIGPIANGGSAGSSFIYWHRICYRDRRGEDRPQPVAITGGCAGKIAISATSWRG

SEQ ID NO: 43510 - protein, 304 aa, Zea mays
  Coding DNA Sequence Number=SeqID_1731
  Gene Ontology: Mol. function=transferase activity; Biological process= auxin mediated signaling pathway
  Homolog annotation: Hit_ID=Q9FUD8; Match level="QueryCoverage=87%, HitCoverage=100%, E-value=1e-104, Identity=71%"; Hit description =Putative glutathione S-transferase OsGSTF3
  Pfam annotation: Domain name=GST_C; Domain location=193-289; Score =65.9; E_value=1.3e-16; Accession=PF00043.15; Description=Glutathione S-transferase, C-terminal domain
  Pfam annotation: Domain name=GST_N; Domain location=40-107; Score =38.5; E_value=2.2e-08; Accession=PF02798.10; Description=Glutathione S-transferase, N-terminal domain
  Pfam module annotation: Pfam domain module=GST_C::GST_N; Domain location=193-289::40-107
  Subcellular localization annotation: CTP_CleavageSite=38; ConfidenceScore=5.17e-01
MHMTTFGAQECHLASPPKDSALSIPSTSAKVPSGGEAMAAPVTVYGPMLSPAVARVAACLLEKDVPFQIEPVDMSKGEHKSPSFLKLQPFGQVPAFKDHLTTVFGTSTSQFFYYYCYISKMHTFAKGQIAEALGYILGVTSAYACLAESRAICRYICDQYADSGNQALFGKKEDGAVGRAAIEQWIESEGQSFNPPSLAIIFQLAFAPMMGRTTDLAVVEQNEAKLAKVLDVYDQRLGESQYFAGDDFSLADLVHLPNADFLVNRTSKAGLITERKNLARWWDDVSSRPAWKKVTEMQSTPRPS

SEQ ID NO: 43511 - protein, 620 aa, Zea mays
  Coding DNA Sequence Number=SeqID_1732
  Gene Ontology: Mol. function=sequence-specific DNA binding; Cellular component=nucleus; Biological process=regulation of transcription, DNA-dependent
  Homolog annotation: Hit_ID=Q10SF7; Match level="QueryCoverage=99%, HitCoverage=100%, E-value=1e-138, Identity=49%"; Hit description =Associated with HOX family protein, expressed
  Pfam annotation: Domain name=Homeobox; Domain location=358-416; Score= 6.3; E_value=0.0011; Accession=PF00046.19; Description=Homeobox domain
  Pfam annotation: Domain name=POX; Domain location=162-305; Score =198.8; E_value=1.3e-56; Accession=PF07526.2; Description=Associated with HOX
  Pfam module annotation: Pfam domain module=Homeobox::POX; Domain location=358-416::162-305
MAHDPSLGFADYFSAAAAAGATAMDDDVGAPELYGLHADDMEFLGMRGLAAMPPAAAHHQHHHHHGHSKAGALLDDDDAGVGPDVSGSADDATMRFLSEQQQQQHQAPLSLSLCRPDVATTLHEQQHLAGGGSSSRYHQEQQPAAWVQQQHDYSPSPQQHAWHLRSSRFLVPAQQVLQEFCSLPVDSSSAAASSKRAKAANKPASQQQQQQEDGGGAEGSSSSASWAPSPQIQAMDALELQRLKDKLYIMLEEVDRRYRRYCEQMRALAGGFEAVAGERAAAAYTALASRTISRHFRSLRDGVVAQLQAARRALGEKDVAVPGMTRGDTPRLRVLDQCIRQHKALTQAAGMMESHPWRPQRGLPERAVTILRAWLFEHFLHPYPSDVDKHILARQTGLSRSQVSNWFINARVRLWKPMVEEMYVEEMKAEGQDGGGQQQVGVAVANNPNPSSAGHASEAAEDDGRGDSGGGAVVDRKPTRAQLLHDAGSLASVVNIGGGSRAGFGIMDHLDFDAYGGHHAGAVSLTLGLQQHDSHADGGAGGVNIAFGAPPPAHHHGYLFAPTAAAAGHQMGGGVHPGLHHHVQFSGAGAGIDGEAAHGQEHYRGLQGGGGFHLLRDLAG

SEQ ID NO: 43512 - protein, 517 aa, Zea mays
  Coding DNA Sequence Number=SeqID_1733
  Gene Ontology: Mol. function=transmembrane receptor activity; Cellular component=integral to membrane; Biological process=defense response to bacterium
  Homolog annotation: Hit_ID=Q6Z2C9; Match level="QueryCoverage=97%, HitCoverage=75%, E-value=0.0, Identity=72%"; Hit description =Endosomal protein-like
  Pfam annotation: Domain name=EMP70; Domain location=60-517; Score =320.3; E_value=3.4e-93; Accession=PF02990.7; Description =Endomembrane protein 70
MVSLCASTTTIYAFLVILFIHSGHSPTAAFYLPGSYPQRYRPGDTFAAKVNSLTSPSSKLPYPYYSLPFCAPQHGVRHAAESLGELLLGDRIETSPYRFSMLNNTASPLFLCRTDPLSPGTAELIKSRIDDAYQVNILLDTLPVMRYVKNPVAPDVLLRSTGFPVGVRADDGEYYVYNHIKLTVLVNKQNTTTRVETLMATADGADLISFTGGKEGCGYTVVGFEVVPCSVEYDAAAVKNKTMYDEITSKAATGCDPSVVSMRVQDNSPLVYSYEVAFIESSVEWPSRWDAYLEMGGAKVHWFSILNSMVVVSFLAAIVLVILLRTVRRDLAQYEELGGSESGAHADELAGWKLVAGDVFREPSHPVLLCVLVGDGVRILGMGVVTIVFAALGFMSPACRGALVTGMLCLYLVLGVAAGYTSVGVWKTVRQGEAAGWKSVAWRASFAFPGVGFTVFTVLNCVLWYNGSTGAVPLLLFVVILLLWFFVSVPLTLAGGLLASRGRHIEFPVRANKIARQ

SEQ ID NO: 43513 - protein, 87 aa, Zea mays
  Coding DNA Sequence Number=SeqID_1734
  Homolog annotation: Hit_ID=Q9SIT6; Match level="QueryCoverage=54%, HitCoverage=7%, E-value=3e-09, Identity=66%"; Hit description=White -brown complex homolog protein 5
MAEARERTVLLSIHQPGARIVKMFDSVLLLAAGSILHHGTVDQLRALLSLVWKSSDANKEVRRGGHEQGQRGSGRTQGRQRKPPWAS

SEQ ID NO: 43514 - protein, 239 aa, Zea mays
  Coding DNA Sequence Number=SeqID_1735
  Gene Ontology: Mol. function=nucleic acid binding
  Homolog annotation: Hit_ID=Q75L03; Match level="QueryCoverage=53%, HitCoverage=22%, E-value=2e-19, Identity=39%"; Hit description =Hypothetical protein OSJNBb0041A22.17 (Os05g0114500 protein) (Putative RNA recognition ...
  Homolog annotation: Hit description=motif (RRM)-containing protein)
  Pfam annotation: Domain name=RRM_1; Domain location=80-150; Score =65.7; E_value=1.5e-16; Accession=PF00076.12; Description=RNA recognition motif. (a.k.a. RRM, RBD, or
MAAEDQTPCTKLRPGKAKTRKKTKRDKWGQPISAAAADEEPSVEPEQEHPAGVVEAAVQVEKEEEEEATAAAEGYEPGKVVASGLPYTTTEADIRKLFEFYGPIQSMQLSRFPDSGNFRGLAFLCFESEEDAIKSLELDGFKIGSRYMRVERCRVTATSNKKRKAEFETDPKKSEGCLSAYVGNLSWNVDENDLRGFFGPSKIASVRGNRHRKGRMRWSVTEITPSFRARVDQISATRY

SEQ ID NO: 43515 - protein, 95 aa, Zea mays
  Coding DNA Sequence Number=SeqID_1736
MQVHRDDGGGAVTTMQQQQTPVPGANRKRGGDQAGASLGMEMGVGYAGGGGGGECSSSSAAAAAAAAAEGEERQLLKGEIAVHPLCEQLVAAHVG

SEQ ID NO: 43516 - protein, 73 aa, Zea mays
  Coding DNA Sequence Number=SeqID_1737
MDIQTLSDVSGGIKFDGQSIIPRMMNCMRRQMLAVVYDSKTGLTRRLSQSRGVLVDVDADFIQKFFNLLRERE

SEQ ID NO: 43517 - protein, 156 aa, Zea mays
  Coding DNA Sequence Number=SeqID_1738
  Subcellular localization annotation: CTP_CleavageSite=41; ConfidenceScore=5.21e-01
MATTTGIWLFAECSALCRVLSIVHSARKSLSSAALGKVLLSVTTVFTESRTLGTENTLGDKGEATLIFSVLSSRIRFFDRKFHLLAAEAAAAEDTAHGAEGDEPPKALLPKIQAQGTTVEPASCQGRGLALTMGEKFLECECDKMFASKKAIFVHL

SEQ ID NO: 43518 - protein, 202 aa, Zea mays
  Coding DNA Sequence Number=SeqID_1739
MQRYCRHNVPSLWRQCPRRTGQSEGPGGYHVQPQNLDESNCRWDQQGSGGSMTAGVWCSRGELAGVWSEEKQSGGGEDDPVVACRARSSRENAVWGALVRRWRKTVREAWALTGCVEQGEAAGWRRGRLGRGAGHGRENAVGGGDTRQPAEGRGPVKRGESLKGSQVLISPIGFRLQLVPCHGMHGQGVSELPYVHAPAAGP

SEQ ID NO: 43519 - protein, 340 aa, Zea mays
  Coding DNA Sequence Number=SeqID_1740
  Homolog annotation: Hit_ID=Q6QP54; Match level="QueryCoverage=25%, HitCoverage=30%, E-value=7e-13, Identity=67%"; Hit description =Putative kinase
MALPVDVAVSCPRSGVVEAPPKSRSSLSCMAEAEPELLGRARRRSFGRGQGGVRALGRAKRSSSSSGALARVRALGRAERSSPSSGALARLYADGGYQLRIRRLEGAVSSGLGLARGRRPAPLLACTEAGPPAREAAGCSREAGAAGAGTPTRLWLACAPARLCGWPACAPVWPRLPTSEARIRLSPALERACTRRGSRAETLSWPGLRLAGVLAEPALVPVANQSHAIRERLRVVRLTGSAKDCALVSCPRPGRVAAPASSQVRPRRVSALRRPSAPARQGFQAPARRQGADPAHVKPLPALARCQGGADPTVLRTHAGGRARGQQPAAGRASRCPCAR

SEQ ID NO: 43520 - protein, 38 aa, Zea mays
  Coding DNA Sequence Number=SeqID_1741
MARWRFSSTVMTLGIGTLLLLDIECSCRIREGKTRFTY

SEQ ID NO: 43521 - protein, 178 aa, Zea mays
  Coding DNA Sequence Number=SeqID_1742
  Homolog annotation: Hit_ID=Q9LTA1; Match level="QueryCoverage=48%, HitCoverage=39%, E-value=1e-09, Identity=43%"; Hit description =Genomic DNA, chromosome 5, TAC clone:K2I5
MANCTDPLRRASMGRTHKPGEDIVTQDLLESREPSGRSNALASPRRRVQSPEFLEKLDTLQKSVYQHGAVDETVSWDIISAADIWDDKSMNVSDDSEDGYVLVKQEDIVDGIACFMAAYLLSLKQTKDLTPNQLQQALSKTFSAKKRKSKLQKAWDGTKVVYNIASWSATAIGIAEAF

SEQ ID NO: 43522 - protein, 106 aa, Zea mays
  Coding DNA Sequence Number=SeqID_1743
MRQRWCRLERAQGKAEGRMGGRVAAPARSEYSALRPSASRVTGKAARRRKARQVGGAAVACTFPRCAAAAIRHWAHQNRRRQLKAVRDLLLLLSVWTGQSEAGRVE

SEQ ID NO: 43523 - protein, 39 aa, Zea mays
  Coding DNA Sequence Number=SeqID_1744
MASLRWDVRKGSRSDDNTRREDDNDEQRQERDIRVDWFK

SEQ ID NO: 43524 - protein, 719 aa, Zea mays
  Coding DNA Sequence Number=SeqID_1745
  Gene Ontology: Mol. function=hydrolase activity; Cellular component =endoplasmic reticulum; Biological process=metabolic process
  Homolog annotation: Hit_ID=Q6K821; Match level="QueryCoverage=85%, HitCoverage=68%, E-value=1e-168, Identity=68%"; Hit description =Phosphatidylinositolglycan-like
MMLHDCKHDANNVLHYLGLDHVGHIGGRRSVLMTQKMKEMDDVIRRVHAASLQDNLDRTLLVVVSDHGMTDGGNHGGSSYEETDSLAFFIGHSVESPYCSPYDQNEALQVDLAPTLALLFGVPIPKNSFGVVLPKLLNSLTDDQKLRMLELNSWQILRLLQAQVSAFCLEDCINVESSIELDILPESIEQKLCFLLSKAISSHQSSRLHRGSDFKSVEAGYYGTAADNYHTFLRNASEWLSHRATDKPLYLLVSAIMLMTMSCLFLMGTVSYLFKGRSLSQADHHSESYLDQRWHLDEVLVLAGMFLYVISLGSSSFVEEEQYTWHFLTSTLYLIFLAKAVQSMLKGSNPTLGHKAEGNSFDRSSFFYATSYELTPGKRNGYKLCTILVVLVAGRVIRAWHQGGINWVHFPDISKLLAQADPSVVKSLQIISVLAVVVLFSISLTLLRARPEFVIGVWLTHISCGFLVLLHVWGNHIGTSLPINHTTASVARQFYVIASVSVSVTVLASPWVFPIFSREAKSPSSGSSPVKAIHGIRKSLVLTGMTYTAFWGLLQLLLQQPINAIPLFLILLQTVSSAVHFSLDKTLHKQWVQVVAMHFLGMAGHFGLGNTNSLASIDVAGAFIGISSYSTVLSGILMFMITYASPLMLYLGLVLHASVKDVDDASNLRQLKWSYILDKIVTLPCLFPLLINSLALTSYTIVLLAMRNHLFVWSVFSPK

SEQ ID NO: 43525 - protein, 115 aa, Zea mays
  Coding DNA Sequence Number=SeqID_1746
MGPDAIPIEVWRYLRDIAILLQLNHPQSFPKGREDHNLSGSVLANHNHLMRPYYEAMERVIEHSLRGITMNSLNQFGFMPKSTHEEGDAILASQVVPRKDTFRWSGRQRRRGGGA

SEQ ID NO: 43526 - protein, 120 aa, Zea mays
  Coding DNA Sequence Number=SeqID_1747
MAWCDDLASCVSVMGEVREEEAELAGNFLRYHSGGEQYSSTLVFHLDDAQEELRRHRCTAPPEATGCSCSCVCVPPVVAPLGSLGVFGLTFGFGFCPPKSQKPTKGLDLGNSFFEKPTFS

SEQ ID NO: 43527 - protein, 214 aa, Zea mays
  Coding DNA Sequence Number=SeqID_1748
  Gene Ontology: Mol. function=ATP-dependent helicase activity; Cellular component=intracellular; Biological process=DNA recombination
  Homolog annotation: Hit_ID=Q6K831; Match level="QueryCoverage=99%, HitCoverage=28%, E-value=3e-86, Identity=76%"; Hit description=DNA helicase RECQE-like
  Pfam annotation: Domain name=DEAD; Domain location=35-190; Score =75.1; E_value=2.2e-19; Accession=PF00270.19; Description=DEADDEAH box helicase
MKGVLPIKGASGREKKAPKELESVLNRYFGYSGFRGKQLEAIEAVLSGRDCFCLMPTGGGKSMCYQIPALENQVASLKNKGVPAEFLSSTQASHTKQRIHEDLDTGNPSLKLLYVTPELVATSSFMAKLKKLYNRGLLGLVAIDEAHCISSWGHDFRPSYRKLSSLRKQFPDIPLLALTATAVPKVQKDVVSSLCLQNPVILRASFNRPNIFYE

SEQ ID NO: 43528 - protein, 510 aa, Zea mays
  Coding DNA Sequence Number=SeqID_1749
  Gene Ontology: Mol. function=ATP-dependent helicase activity; Biological process=DNA recombination
  Homolog annotation: Hit_ID=Q6K831; Match level="QueryCoverage=99%, HitCoverage=62%, E-value=4e-82, Identity=63%"; Hit description=DNA helicase RECQE-like
MGIDRQDVRIVCHFNLPKSMESFYQESGRAGRDQRPSRSVLYYGLDDRRRMEFILRNPKTKKSQPSSSSNELSEKALADFSQIIDYCEISSCRRKKIIESFGEKVQPTLCQRSCDACKHPNLVLSRLEELRRVPNCRFNKISPVFQSSVKEAHLDTEFWNREDEASLSAEDISDSDDGNEVVSNIAISKVPAKAGLDAKFKALERAENAYYQGKDKWLNGSAIHDIAPAIACMVGRRAISTRTVAQALDNWQWVSDIESPLSLIGLQQYLKLWDALRGVVFDGVNPSISSIKRLFLDELISWDKGGGLADKKSISETLRDACRKRLLDALGQAKLRLGNIPCGDEASATHLETECFKKYVKAGKTFYNSQIAATVRWLSSATLSQMRDRLDTLIDRTKDDGASGCPDIVPESPPASPEIVVGARSGETSNDKPQHICELKSSDESAKGAASSTGNMVLPAIPTFREFLSQKGRDRAKCYSNSNATNQPSGIRRKFSGHLDKEEASKRMKS

SEQ ID NO: 43529 - protein, 150 aa, Zea mays
  Coding DNA Sequence Number=SeqID_1750
MHACRLRPSARPPQTPPRPLYESRDHRKSRRNPMPAEQQTPISRNRRPHAVHAAAASDACGAAHAPTHLALPPHISCHHQTTRPPDLPLCDKKFSPPLLQLHFTAFSGSNPQTQLLEEDLMVVANVGNSRIVLGTASNDGAITSSNSSSI

SEQ ID NO: 43530 - protein, 188 aa, Zea mays
  Coding DNA Sequence Number=SeqID_1751
  Gene Ontology: Mol. function=sequence-specific DNA binding; Cellular component=nucleus; Biological process=regulation of transcription, DNA-dependent
  Homolog annotation: Hit_ID=Q6H6J2; Match level="QueryCoverage=77%, HitCoverage=28%, E-value=2e-53, Identity=71%"; Hit description =Putative homeobox protein
  Subcellular localization annotation: CTP_CleavageSite=53; ConfidenceScore=5.05e-01
MALHFAAVVVRSRWTSNQCLDKIQSTTAKFNTLMHSPPGGGGICAPFAHRAVSAMYRGLRWWLAGEIMATASRASCWGESSSSVTVAAGGDVERSWESAFIQKHWSAQQLRRTEQQCWLPQRGLPEKSVAVLKAWMFENFLHPYPKHHEKDVLAARSSLTRNQAQIEIPPDSFQIRFFFGEMGFRIGS

SEQ ID NO: 43531 - protein, 106 aa, Zea mays
  Coding DNA Sequence Number=SeqID_1752
MARVRLPLGRPALVAPYHARKEAGCRVGAQTAKQTRPAGVHCQCQVLGVSRRCPPRCRLQKRRRGRGGDSDFSGAGAGKQDGFSPAPPRGFGLVFVRVSPCRCITD

SEQ ID NO: 43532 - protein, 187 aa, Zea mays
  Coding DNA Sequence Number=SeqID_1753
  Gene Ontology: Mol. function=iron-sulfur cluster binding; Cellular component=phycobilisome; Biological process=lipoate biosynthetic process
  Homolog annotation: Hit_ID=Q5ZAQ2; Match level="QueryCoverage=82%, HitCoverage=44%, E-value=2e-50, Identity=66%"; Hit description =Putative lipoic acid synthetase isoform 1
MQSSLARPPVLAGCGERRGLAAVARCRAEAAAPVWTASRASAGPYTGRDPEVKKPAWLRQRAAQGEKYARLRESIGELKLNTVCVEAQCPNIGECWNGGGGAGGEGDGIATATIMVLGDTCTRGCRFCAVKTSNKPPPPDPLEPLNTALAVASWGEYHRASHQAADRAAPRADRPPLCRGHHHGSLE

SEQ ID NO: 43533 - protein, 73 aa, Zea mays
  Coding DNA Sequence Number=SeqID_1754
MALHKLCDDGDPQLSYGSRATSAGTRPLQQLSLRQAPSHLRPPRHHASKFKGCNMDFDEGKVMIGNINTSSKN

SEQ ID NO: 43534 - protein, 94 aa, Zea mays
  Coding DNA Sequence Number=SeqID_1755
  Subcellular localization annotation: CTP_CleavageSite=66; ConfidenceScore=5.71e-01
MALFVSSLAAALSHLSLPSTSTPKPHPASLLRLRSTYRRAVSLALRVSVGEAAEAFEAGLPAEEVMAVEEEAEEDALFDLAKNHPPPSTPSSHS

SEQ ID NO: 43535 - protein, 230 aa, Zea mays
  Coding DNA Sequence Number=SeqID_1756
  Homolog annotation: Hit_ID=Q5ZC88; Match level="QueryCoverage=24%, HitCoverage=7%, E-value=2e-12, Identity=64%"; Hit description=CUL1
MKIAEFTCLGPFGLMHNSLVVSVIILVFLVTVGSITGCPWASNTQYSLKLHYQPHQPPPCSVLGFWNTANRQFHLLHRRQTHHTQIQMDTPSGVKGSIPACIKFSVKVPGEIPYYGIYYDPPEEMKTMESPLLHSINCPKKTGKQPVMKMDIFSYDYSPDFGSVARIAIELEDEQIDRALLKNVLDIFIKIRLGQMECFENDFEDFLLKDTTEYCFVKAQRMQRFLRVTL

SEQ ID NO: 43536 - protein, 74 aa, Zea mays
  Coding DNA Sequence Number=SeqID_1757
MEDAEVGPVEDAPCTMNTSPVSDPSVLGAGIRRQFNDLEEIDGAMRTGWKWGVYGWTHVPYDEELDGLHDSKVE

SEQ ID NO: 43537 - protein, 142 aa, Zea mays
  Coding DNA Sequence Number=SeqID_1758
  Gene Ontology: Mol. function=ATP binding; Cellular component=cytoplasm
  Homolog annotation: Hit_ID=Q6ZHC0; Match level="QueryCoverage=74%, HitCoverage=27%, E-value=3e-31, Identity=64%"; Hit description =Putative GAMM1 protein
  Pfam annotation: Domain name=UPF0160; Domain location=1-141; Score= -132.0; E_value=2.5e-05; Accession=PF03690.4; Description =Uncharacterised protein family (UPF0160)
MRLEDSTLRKIHCLCFRHYIFELAYRSALINCHIEHWKLHLFELEEELKTNPLTKYVLYQLHNESHKQDERSKNWRVQAVAVGPDRFESRKALSEKWRGMRDDGLSAETNIPGCVFVHMSGFIGSNKINEGALEITRATLKC

SEQ ID NO: 43538 - protein, 194 aa, Zea mays
  Coding DNA Sequence Number=SeqID_1759
  Homolog annotation: Hit_ID=Q9ZRC5; Match level="QueryCoverage=69%, HitCoverage=51%, E-value=5e-21, Identity=37%"; Hit description=Plant IF-like protein
YHHELDDLRTHLSFTQATGEAGVASAMSLLKELNEKDISLKDHRLRVNNLGEHLDLLQKDVQAREDSQMQLKDIVIRIETNIMDEVAKAFEIAMLRGEIRILSTHWTNKTKNLESQLKKHQQTDQELKKRVLKLEFCLWSCHPLVHSPPHLPLLLAPLLFSCCDWDKASWILNLGQNLGGSRTTMMPGTYSYFI

SEQ ID NO: 43539 - protein, 87 aa, Zea mays
  Coding DNA Sequence Number=SeqID_1760
MSRGINSTKDQHAILVHVQRDVAAGGDRPDSMVRTSGTVYLEAHFLVAAKGEDMVAETGQPDGGGNAEDNVIGLSRVREQIESAMLV

SEQ ID NO: 43540 - protein, 59 aa, Zea mays
  Coding DNA Sequence Number=SeqID_1761
  Homolog annotation: Hit_ID=Q6K7R4; Match level="QueryCoverage=88%, HitCoverage=8%, E-value=3e-16, Identity=69%"; Hit description =Putative ABC transporter
MEAVSVAMPPVYVNHGNGGGPAVKDIHMENFSVTIDLIQEATLTIVFGRHYGLAKMIFS

SEQ ID NO: 43541 - protein, 155 aa, Zea mays
  Coding DNA Sequence Number=SeqID_1762
MGKNNKRKREPTPPSEEFGDSEYSEEEFSSESEGSPAPIPLRESSDDSDDSQGLAAEVWTYIRAVERSGLEGSDESEFSSDEEDSDGGEDEVDDDDDGDDDDGGDGDGDGGNGGGGSGGKGSTRGGSSTGSTRGGSSKGSTKGGGGKGSGGKANG

SEQ ID NO: 43542 - protein, 156 aa, Zea mays
  Coding DNA Sequence Number=SeqID_1763
  Gene Ontology: Mol. function=RNA-directed DNA polymerase activity; Biological process=RNA-dependent DNA replication
  Homolog annotation: Hit_ID=UPI00004C1732; Match level="QueryCoverage =82%, HitCoverage=8%, E-value=6e-17, Identity=42%"; Hit description =UPI00004C1732 related cluster
MVCNPIAVIIVGIILYSDASRLTFRVRARTHVQATCGTLRTVHRNWTTLGDYMLRFSRQCNKLTNPVDADIIDAFILGTTNETLVHKLGRKSPRTMKELLDITTNHTSGEDAVGAGSLITAGRKPDTTRSLTRVSTASPTERKKRDLWGIDIPRVH

SEQ ID NO: 43543 - protein, 108 aa, Zea mays
  Coding DNA Sequence Number=SeqID_1764
MGREFHVATRDGNGTPIPDSSRGIPPSEDGDGDGMGSRQGFILMGNGMVKKYPPQVFAGIPMWKFFLRGDTYRELFLDGELPIAMSSRDIGTWGLTNILHQPQQEITP

SEQ ID NO: 43544 - protein, 106 aa, Zea mays
  Coding DNA Sequence Number=SeqID_1765
MLAAAQCGSTETYFSGEKFNGAPLPGHGAATAPGGAISSQAMMAEVVERRGESRESEGPRPTSQQHKRMRLQRQVHGAHASYQPCARAIGQVGRADGKLEWAEMEV

SEQ ID NO: 43545 - protein, 95 aa, Zea mays
  Coding DNA Sequence Number=SeqID_1766
MRKEAYQKMETPAGPDGSPLHAIQPRGQRRRRTRKHANYFEMDDVLRRRDAGDATAGEVDVRRRWCCLAWRGRCRSAEDDDACVADPFCLACVAK

SEQ ID NO: 43546 - protein, 1016 aa, Zea mays
  Coding DNA Sequence Number=SeqID_1767
  Gene Ontology: Mol. function=DNA binding; Cellular component=nucleus
  Homolog annotation: Hit_ID=Q10LJ1; Match level="QueryCoverage=80%, HitCoverage=87%, E-value=1e-118, Identity=34%"; Hit description =Expressed protein
  Pfam annotation: Domain name=Myb_DNA-binding; Domain location=258 -303; Score=16.8; E_value=0.081; Accession=PF00249.21; Description =Myb-like DNA-binding domain
  Subcellular localization annotation: CTP_CleavageSite=31; ConfidenceScore=5.31e-01
MSMYNVGIKKVKQRLTIASTSSPLRQRQRPRHASAAAVHFTSGRRLHPDAEHAARFQMDSLEIKRKEDYQMEPIEIKDDEEHPIEMLVDQPRFLEPLCPEEVNEDTRVYPRVGDEYQVKVPDLLTVEEQMKLRSSTVYGSMAFGFEYPVGVGLAIPVTWTQNRSSHIKEERMGFPGHSSFPSQGEGSNHKSGNVLDILYQHGVCSECVNCKVESAEQGEKLPGFVGQDMHCLQKRKLLGCSCVNRKLTDSFPLPGMTRYSWTDEEAQIFLLGLYSFGKNLVQVTRFTETKTMGEVLSYYYGEFFRSDAYRRWAVCRKARSRRCIFGLRIFSGPRQQELLSRLLAGVAREVEAPLLEVFKILNEGTSTFEQFILTLRSTVGAQVLVQAIGIGKGKYDLTGFALDPSRNHGISARPEIPVGKACSALSSGDIIKFLTGDFRMSKARSNDLFWEAVWPRLLSRGWHSEQPKDSSPIGKHALVFLIPGVKKFSRKKLVKGNHYFDSVSDVLSKIASEPRLLEFGVERGNDESVIKHENGWSHDSEPDRNILPNKKPSCYNRPTEPGCSPELMKFTVVDTSLVQGEEPSKVRSLRNLPTDSSHGYMSSPHCGGSGSDSSEEHSDSEDSSRSCEHIITDDRSTTNAKYASDERKSKPPTADKVDSSVIQKSASSGTLVSINGHISTDQGFSTMNNVSSSNATILPVDVQMVHAPTTSTEISFQFDQRLNAESQIFLAPFSKRRRLVSSKTERTGRKNTTTIENHYWKQVDEPVHHDASGENEASGPKAFVWGATPSSSTNISFEVNNKKPYCRQLDNVLPNAETMVYKETCQNRHVIDLNIPQMPSDFESTVSYIVPPSDKNAETTIRPIRTSGAEEVTDRVPDIEASSDVLYDEFSFNSRRHSSRSRPPTARALEALACGFLGTKQKGRETSFPSSSRSSRPVRRPRRSPDVARPFPSEGKECTSRFPDPPMDVNAWQMNNSPYQMIHSSSSDKSTEKGSPDLFGADKSTDKGVHELYGIP

SEQ ID NO: 43547 - protein, 338 aa, Zea mays
  Coding DNA Sequence Number=SeqID_1768
  Homolog annotation: Hit_ID=Q208N5; Match level="QueryCoverage=31%, HitCoverage=18%, E-value=9e-58, Identity=100%"; Hit description =Putative symbiosis receptor-like kinase
  Pfam annotation: Domain name=LRRNT_2; Domain location=234-279; Score =12.7; E_value=0.041; Accession=PF08263.3; Description=Leucine rich repeat N-terminal domain
TNGSQVEQVDLVEIGNEEASCIALRNMSIRDVCPKESKEPPKAQDQPSSSTQASPPTQNEDEAQVDEGEDQRDEPPQDDGNDQGEMQMIKTRRMKNRGHHTQESTKQSNEITPSTPSSATFIRGVEEALQDSDWVVAMQEELNNFTRNEDAKPIKTPMGTNEHLDLDTEGGGNTQAANSGSVTVQSRLSLSGTHLGISLTLAKPRPPPQGMAARSLLLYALLLLALATAAPSHGLTQADVAKRLKEVLSERNRGHEMLDSWNGDGDPCSPSTWEGFSCEPKDGAQVVVKLNFSSKKLQGPIPAEIANLTELNEIHLQYNNFTGFIPASFSAFRHLLKL

SEQ ID NO: 43548 - protein, 59 aa, Zea mays
  Coding DNA Sequence Number=SeqID_1769
MAMEARGRCGAEEVVMAPGSYVTHAIRHNEHEQRQGIYGQAASLSVQLITHSSTCFSIT

SEQ ID NO: 43549 - protein, 114 aa, Zea mays
  Coding DNA Sequence Number=SeqID_1770
MQDYGSHSTGRRVPRSLPAVIIPVLSDAGSNRILEAECGYPRGEPICRSQRARLGGRPRRQRGGGRWGGDVQRRDIGFSGGHVGGRRRRGPPPPPSPWARRSSWVDLDLGRAVV

SEQ ID NO: 43550 - protein, 47 aa, Zea mays
  Coding DNA Sequence Number=SeqID_1771
MDDLMIRNLGEDQQGLGKGQGVEEEQQGPVCTKMDAEDVSGLQLWRT

SEQ ID NO: 43551 - protein, 48 aa, Zea mays
  Coding DNA Sequence Number=SeqID_1772
MARQTQLDLLEQGPIIVVGLGQDKDSNFRGSVLLIGTTTSWVGNDYPA

SEQ ID NO: 43552 - protein, 171 aa, Zea mays
  Coding DNA Sequence Number=SeqID_1773
MNVCELTLAVSHPPQVKNRYRRMRSMEDAVAKLLLVHLPEVRVEMASLATAQVVLRQLHGDGQRLARNSWCLPDNPTPERPEEVSDHLRWTRREANAAVDGDGGSLVLCPLPFLSAGYRGGFKAMAADLPGLIGARHGVLDPQITTLTGEASAVIPRDARGVRCAPGKEDD

SEQ ID NO: 43553 - protein, 214 aa, Zea mays
  Coding DNA Sequence Number=SeqID_1774
  Subcellular localization annotation: CTP_CleavageSite=49; ConfidenceScore=5.36e-01
MKFMYPMGRIELSRPNTPFHFSPPGQPLCPAVLTVPWAPQASGLSLSPCAPTLSGVFRLSLTRGPKLSDLSPPDPTNLCPIMVRIGRHVPPENSGNIALSRTSPWSIRTATAKGRMNCHCVPLDVHPCRNPLEGSGVHASQLKLGLGGIALLTNGVPRRNGSFAMLSRMPWTASLASFLSPWVLSCGGLRAAALLQWEKEDGAWVVDPIRDGLD

SEQ ID NO: 43554 - protein, 142 aa, Zea mays
  Coding DNA Sequence Number=SeqID_1775
MAEVVFHGNRALVNDGGRPRESQGAQRRPWIVSRGGDAALAFIAQGGSRPESGRNNHAMTAKSVLINKVKRLSSWGVHMSAVLYPKPGKSEEGERKDPASRTPRQSRVSAQRSSRCSVEEEADNWVPQVIDAKRDEKTAVRE

SEQ ID NO: 43555 - protein, 117 aa, Zea mays
  Coding DNA Sequence Number=SeqID_1776
MATSTLWSWQAGPGGIAEWVQGRIVKLRTLFPILKPLDSLDVIGFQEGTDTIFISIDMEVFAVTLRSEQVKKVGKTGSKYAMAPYVSFYTPDVCVVCDLQNLVKQRINLAKGRLLSP

SEQ ID NO: 43556 - protein, 142 aa, Zea mays
  Coding DNA Sequence Number=SeqID_1777
MAEVVFHGNRALVNDGGRPRESQGAQRRPWIVSRGGDAALAFIAQGGSRPESGRNNHAMTAKSVLINKVKRLPSWGVHMSAVLYPKPGKSEEGERKDPASRTPRQSRVSAQRSSRCSVEEEADNWVPQVIDAKRDEKTAVRE

SEQ ID NO: 43557 - protein, 66 aa, Zea mays
  Coding DNA Sequence Number=SeqID_1778
MELDSWRSTKAAPTLLPLPRGPRLRAICGTVLTLLPVTGDDPKDVKARLKVWAQAVALASASRLGS

SEQ ID NO: 43558 - protein, 75 aa, Zea mays
  Coding DNA Sequence Number=SeqID_1779
MPRAPMPTWTMKKGGLTGTFIAQGKESASRTIGWRGREDPEIPGDGHGGNRAELLRDFSSREEKSLASQPTWRRQ

SEQ ID NO: 43559 - protein, 127 aa, Zea mays
  Coding DNA Sequence Number=SeqID_1780
MENEKHERNGGIAAALDFRIRARPMLEDESRRFVGVHAWEPPIAVANVLSIPTIGKNPCVVFAIVSSVGSTLRLRVSAAMVDPRNSGMLRRWEAGRRRRALSAEVGDGLWPSDREWVVTIKSRYLFA

SEQ ID NO: 43560 - protein, 229 aa, Zea mays
  Coding DNA Sequence Number=SeqID_1781
  Subcellular localization annotation: CTP_CleavageSite=32; ConfidenceScore=5.25e-01
MDKLDSGLNFLPLNPFLSPTTHLLSTHRVQSVAAIVGSVGRLDSTTAADYSAFDSGVLDSVVKSWAHRAMSFACDQLQARAAIVVTATGATWCLGVRDSRSSHRGADFQTVRAGLVFISVAVCCVSLLTSVNSADTYVSVKWLLSLGELTMGGNGAIAAHSRTGGGALVSWVEDDIWSLDEDRRVAIPQRVYRFRLLSVLWINDPTTESERGAVRCVPRILDPTIRGGY

SEQ ID NO: 43561 - protein, 190 aa, Zea mays
  Coding DNA Sequence Number=SeqID_1782
MAEHRRGLAIRSLDAPTLKLIGANRRGGDGDYGKGYLTDEGATMVSVHGRRRICGGRTPPSRNSRVPRGSQLDLRAPAASLLPGERLRPPVRIRAQSRRGISGGGALGSTHFRAAAPVLCASRSGWMELIGLEGVVPVSLLSRSMEDGACSHAPRATASPESPGSPRFRELRREERIGEDAAPWAPHDGV

SEQ ID NO: 43562 - protein, 178 aa, Zea mays
  Coding DNA Sequence Number=SeqID_1783
MERGNGGIETSLMSGRRTDTLKLNVGETDAAGSLGVAARASDFGSVAGGTSVLGAVGIGLAAGLHVGFLGFLVGVASGPAGVQGAQLARHGAVGLRPVRRGRVGARQLGTSGFVGSWAGSMHGSERRRGGMEREGPVGERESRVGEEMQGRRLPREEGAAWPAPRVREGRGLMGLGPA

SEQ ID NO: 43563 - protein, 104 aa, Zea mays
  Coding DNA Sequence Number=SeqID_1784
  Subcellular localization annotation: CTP_CleavageSite=31; ConfidenceScore=5.00e-01
MAARRRWREVAGGVVLSPNGGGHRAQQSAPRAQARTRRGLRLLLSRADNRGRWGNELTNGPALPVTHGETSSARVKIMGRTEVKKSGAKSDVAGPFSNEFELVI

SEQ ID NO: 43564 - protein, 136 aa, Zea mays
  Coding DNA Sequence Number=SeqID_1785
MGMGMGVNPYPSVYMGVPVELFLYRGYEYGIVIPSGYLPIAISSQELPRHELQVPSLLNLNLWSGRHWQPIPRCTQPSSPLHSARAVTAAGPLPLRPACLVPHRPINATTQPMTSPRPPVPVPASRDSSGSNFVWV

SEQ ID NO: 43565 - protein, 232 aa, Zea mays
  Coding DNA Sequence Number=SeqID_1786
  Homolog annotation: Hit_ID=Q00YC2; Match level="QueryCoverage=84%, HitCoverage=85%, E-value=7e-14, Identity=26%"; Hit description =Homology to unknown gene
  Pfam annotation: Domain name=Abhydrolase_3; Domain location=46-204; Score=-79.2; E_value=0.015; Accession=PF07859.3; Description =alphabeta hydrolase fold
  Pfam annotation: Domain name=DLH; Domain location=36-226; Score= -57.6; E_value=0.0026; Accession=PF01738.9; Description=Dienelactone hydrolase family
  Pfam annotation: Domain name=Peptidase_S15; Domain location=10-203; Score=-92.4; E_value=0.0032; Accession=PF02129.9; Description=X-Pro dipeptidyl-peptidase (S15 family)
  Pfam annotation: Domain name=Peptidase_S9; Domain location=54-225; Score=-77.5; E_value=0.034; Accession=PF00326.11; Description=Prolyl oligopeptidase family
  Pfam module annotation: Pfam domain module=Abhydrolase_3::DLH::Peptida se_S15::Peptidase_S9; Domain location=46-204::36-226::10-203::54-225
MEWTTVETRDGAKLSVRLFKPPASGTGLEPEPREDVAVVLVHPYTILGGVQGLLRGMAEGVARRGYTAVTFDMRGAGRSTGRASLTGSTEVGDVVAVCRWVAENIKPRGILLVGSSAGAPIAGSAVDKVDEVIGYVSIGYPFGLMASVLFGRHNDAILKSEKPKLFIMGTKDGFTSVKQLQNKLKSAAGRADTHLIEGAGHFQMEGPAFDAQMVWHLSFRNLKLKLFEIFSL

SEQ ID NO: 43566 - protein, 51 aa, Zea mays
  Coding DNA Sequence Number=SeqID_1787
MSVAERSVQGTPQWASVGRWRVTEKWAEGRVSVQIEDLLKSQLQDFGCYNN

SEQ ID NO: 43567 - protein, 143 aa, Zea mays
  Coding DNA Sequence Number=SeqID_1788
MVAAQTPNIEKESATDESRVHRRWGLDSGSGSFTTFSGECSWPLQALLAHWALVISHWSSFITTEPPSSVDMVLLDSTTGKLLPPKSAVVPTTFCADPFFVWGISAPATPCSRDAPPRGYSEWGGVAPIVGSYASDRDGIVMF

SEQ ID NO: 43568 - protein, 210 aa, Zea mays
  Coding DNA Sequence Number=SeqID_1789
  Gene Ontology: Mol. function=protein transporter activity; Cellular component=mitochondrial inner membrane; Biological process=protein transport
  Pfam annotation: Domain name=Tim17; Domain location=2-127; Score =21.8; E_value=0.0003; Accession=PF02466.9; Description =Tim17Tim22Tim23 family
MEDDSPLTKTMKGAVTGLAAGTIWGTVVATWYDVPRVERHVALPGLIRTLKMCGTYGATFATIGGLYIGVEQLVQSQRKKRDFVNGAVGAFVAGASVCGYRGLIKHRDRKNVGIELYATYNSIGKFPRGHVQFYPNPYGLRVFQSLYIGYQLRFLLNLDATFAGKSIQSALIGGSCLAFTSAVLDIGGNTTRVDNGKEYYAYTTEKKPAN

SEQ ID NO: 43569 - protein, 180 aa, Zea mays
  Coding DNA Sequence Number=SeqID_1790
  Gene Ontology: Mol. function=transporter activity; Cellular component= membrane; Biological process=oligopeptide transport
  Homolog annotation: Hit_ID=Q6ZGW7; Match level="QueryCoverage=99%, HitCoverage=30%, E-value=8e-42, Identity=52%"; Hit description =Peptide transporter-like
MARLSGNPQGLTELQRMGVGRARDRHGGDGGGGRGGGGAAEARGTGSPVPAELPECAVAGATVVQYALIGASEVFMYVGQLEFFNGQAPDGVKSFGSALCMASISLGNYVSIMLVSVVISLTAGEKRPGWIPLNSGHLDRFYFLLAALSLVDLAVYIACAMWYKGIKLDGDNRRKVSAHV

SEQ ID NO: 43570 - protein, 312 aa, Zea mays
  Coding DNA Sequence Number=SeqID_1791
  Gene Ontology: Mol. function=transporter activity; Cellular component= membrane; Biological process=oligopeptide transport
  Homolog annotation: Hit_ID=Q6ZGW7; Match level="QueryCoverage=74%, HitCoverage=34%, E-value=9e-57, Identity=54%"; Hit description =Peptide transporter-like
MASRRLNLASSTRFFRQRLQKSLKRPQENKLSNKKDKADEDIVKNHKSSKNCEGSENSLDKLMNPTSTTPDSKWMPPATTDGSMDRRGNPAVKTTTGGWRSAILVLANYGLATCAFFGVGVNNIVVFLRRVLHQCNAEAANNISKWTGTVYIFSLFGAFLSDSYWGRYVTCAIFQIIYVTVRSSVQTLAKPSVSCDRSCSYLPVLCCVCSWWSGAQGLVILSLASWTWFLLVKPSGCGGVKAHCDEGSAPGVALFYLSSIATFGSDQFDETDPKGGALQGRLLAFFSYFYLALNVGSLFSQHRAGVLRGLWA

SEQ ID NO: 43571 - protein, 107 aa, Zea mays
  Coding DNA Sequence Number=SeqID_1792
MSDPKAYPDHAESRGVGLQRIRQRHNFPGWDSRSEAGSVGTKICPEAKVGCSGEADIPPEAEAGCSGEADIPPEAEAGCSGEADIPPEAKAGAATVASHAWVPDTAV

SEQ ID NO: 43572 - protein, 114 aa, Zea mays
  Coding DNA Sequence Number=SeqID_1793
MDSLQQPWQFGTVIRFGSLEFMAPGIGYDMVLLSPQHHIDADYRLAQPGGARPRLPPSLRRDIQSTVATLLAGGGGGTTATTPQIALPWLSSLGKLTTQAPLQGTCQPFASSQE

SEQ ID NO: 43573 - protein, 233 aa, Zea mays
  Coding DNA Sequence Number=SeqID_1794
  Homolog annotation: Hit_ID=UPI00004C1731; Match level="QueryCoverage =31%, HitCoverage=5%, E-value=1e-27, Identity=84%"; Hit description =UPI00004C1731 related cluster
MDLLTTPPTSEPAGFEEGDDLDAGLDFSGLHDPGAMHHFLSACDYYLSDGSSDYSSDDEGYDSTRECFHIEHEEHGGDNQLGMPTNNIALGASISRRDPAGASCGPDPCGEPSSTRSGSNSSSFSKPSSRRGQVEPPIEEHASGHTTNTAASSTTPSRATGFMPFFLVYGAEAILPTDLQYGSLRLKAYNDRSNQVSQEDSLDQLEEARDVALLHSARYQQSLRRYHARRVRS

SEQ ID NO: 43574 - protein, 491 aa, Zea mays
  Coding DNA Sequence Number=SeqID_1795
  Gene Ontology: Mol. function=transcription factor activity; Biological process=regulation of transcription, DNA-dependent
  Homolog annotation: Hit_ID=Q75G59; Match level="QueryCoverage=97%, HitCoverage=91%, E-value=1e-139, Identity=55%"; Hit description =Expressed protein
  Pfam annotation: Domain name=CDT1; Domain location=98-210; Score =66.7; E_value=7.6e-17; Accession=PF08839.1; Description=DNA replication factor CDT1 like
MSEVNNTQLDLEKGFSQVSHDNDSSSPVTVHKMKVETEGGSEIESPTPEKRESRSKGVVVSSLARNLLAERYKDRLANQLVEDESETDDEDYNESVSPSGSRSLFLESIELLENWMIVFLHYRKLLYSHLAQMKHLFPEAIQIKRILVHDEKSICMYADMEITLVMDVVECTSPDHSLSMTICEAFYSKLLRFLDAHHKGADIPEAILPEPFNSRPREKLYLEAVHNGHAAEPPLHGAVEEGFSNASHFPQSFQKFMSKKIIADGTEKTQLLSDPAELSSVSAYGTKGSNRNPKKQDEHAPVPVNSEISATPSRHLISCCQESTPKQQTSESPLLSGTPAMQTPKRPLLAPLEKPKATCGHISEPRSASSARRSLNTSLTYEGGSPSYYDGMEHTATAKKCMISEDLSSFNKSFEEDSHVFFTDKDKINEVESVDSQERIASLRTTFDIVYDISHSTKNPLITKQELFHNILANNLEIEEIGNAVYTPNYT

SEQ ID NO: 43575 - protein, 480 aa, Zea mays
  Coding DNA Sequence Number=SeqID_1796
  Gene Ontology: Mol. function=transferase activity, transferring hexosyl groups; Cellular component=integral to membrane; Biological process=metabolic process
  Homolog annotation: Hit_ID=Q5VN44; Match level="QueryCoverage=97%, HitCoverage=97%, E-value=1e-102, Identity=45%"; Hit description =Putative UDP-glycosyltransferase
  Pfam annotation: Domain name=UDPGT; Domain location=11-480; Score= -78.3; E_value=1.1e-06; Accession=PF00201.9; Description=UDP -glucoronosyl and UDP-glucosyl transferase
  Subcellular localization annotation: CTP_CleavageSite=57; ConfidenceScore=5.09e-01
METAAAPTLAPHVLVVPFPAQGHALPLLDFAGLLAARGLRLTVVTSPANLPLLSPFLAAHPGAVTPLTLPFPSSSSIPPGVESTRGCPPEYFPVFIHALTALREPVRAWARSRSPSDDGPIVAVVADFFCGWAQPLARDLGAAGIVFSPSGVLGAAVPHSLFRRLVRRPAAAEESSVVTFPAIPGEPVYQWREVSMLYRWFVEGGEEDEQAREPVRRNFLWNVEESWGFVFNTLRALEGRYLEQPLEDLGFRRMWAVGPVAPDADAAGARGGETAVAAASLGAWLDPFPEGSVVYVSFGSQAVLTPGVAAALAEALERSAVPFVWVVGAGSSGVVPKGFEVRAASAGRGVVVRGWAPQLATLRHPAVGWFMTHCGWNSVLESAAAGVAMLTWPMTADQFVNARLLVDEARVAVPACAGGFGVAPDPGELATVLADVVGEKGRDVRARAKELAAEAARAVMEGGSSYADLDGLVQEIRNLR

SEQ ID NO: 43576 - protein, 390 aa, Zea mays
  Coding DNA Sequence Number=SeqID_1797
  Gene Ontology: Mol. function=RNA-directed DNA polymerase activity; Biological process=RNA-dependent DNA replication
  Homolog annotation: Hit_ID=Q9LGH0; Match level="QueryCoverage=72%, HitCoverage=99%, E-value=2e-27, Identity=27%"; Hit description=NAM -like protein-like
  Subcellular localization annotation: CTP_CleavageSite=67; ConfidenceScore=5.66e-01
MPEGVPPAGKRPAPSSKSGVAAIGRRPATLPSAVVPTSQGPVRGVGTSMMDKRHAQKPRRSSLNIALGMIGGGCEGSSQNCGRNPIANSASFGSMYEEIRGPMPSQENYFTNLLNEDGLEVSGSEDVVEADYDLLEPVLAVDMSSQTKSKGRSKNFSEEEDMLLISAYLNVSKDPIAGRDQKDGRFWERIEKYYYENKTFESDRNWSSLRHRWTTISKEVSLFNSYHEAIERKNESGKTINDKLAEAKGTYQRLRKRAFSLFHAWNALRFEPKWVSIKDDKPPVDGNDGAALNVERPPGRKAEKEKLRARKREEDACDPFIEEVKKMREAKLDSERDRRLREDQFLELEKTKMDTKIMETDTSTMDNESKEYFRLMKQEILDRRFGSTQA

SEQ ID NO: 43577 - protein, 218 aa, Zea mays
  Coding DNA Sequence Number=SeqID_1798
  Gene Ontology: Mol. function=oxidoreductase activity, acting on the CH-OH group of donors, NAD or NADP as acceptor; Biological process=L- serine biosynthetic process
  Homolog annotation: Hit_ID=Q9LT69; Match level="QueryCoverage=57%, HitCoverage=21%, E-value=5e-29, Identity=58%"; Hit description =Phosphoglycerate dehydrogenase
  Pfam annotation: Domain name=2-Hacid_dh; Domain location=73-200; Score=80.9; E_value=4e-21; Accession=PF00389.20; Description=D -isomer specific 2-hydroxyacid dehydr
  Subcellular localization annotation: CTP_CleavageSite=5; ConfidenceScore=5.32e-01
MAAPPATTATTHHRALLPPTRTHAAATHSALRLPLRAHPHAHAQRARLTAAAAPAPAASTASLESSAAGKPTVLVAEKLGAAGLALLREFANVDCSYGLSPEDLRAKISLCDALIVRSGTKVGRDVFEASGGRLRVVGRAGVGIDNVDLAAATEHGCLVVNAPTANTVAAAEHGIALLTAMARNIAQADASLKAGLFPSVHRLHSESDACFCLGMVLP

SEQ ID NO: 43578 - protein, 640 aa, Zea mays
  Coding DNA Sequence Number=SeqID_1799
  Gene Ontology: Mol. function=oxidoreductase activity, acting on the CH-OH group of donors, NAD or NADP as acceptor; Cellular component =chloroplast; Biological process=L-serine biosynthetic process
  Homolog annotation: Hit_ID=Q8LGJ6; Match level="QueryCoverage=66%, HitCoverage=68%, E-value=1e-180, Identity=75%"; Hit description =Phosphoglycerate dehydrogenase-like protein
  Pfam annotation: Domain name=2-Hacid_dh_C; Domain location=19-186; Score=247.6; E_value=2.6e-71; Accession=PF02826.9; Description=D -isomer specific 2-hydroxyacid dehydr
  Pfam annotation: Domain name=ACT; Domain location=386-450; Score =32.1; E_value=2e-06; Accession=PF01842.15; Description=ACT domain
  Pfam annotation: Domain name=AdoHcyase_NAD; Domain location=36-190; Score=-32.6; E_value=0.03; Accession=PF00670.12; Description=S -adenosyl-L-homocysteine hydrolase, NAD binding domain
  Pfam annotation: Domain name=IlvN; Domain location=42-222; Score= -78.7; E_value=0.0093; Accession=PF07991.2; Description=Acetohydroxy acid isomeroreductase, c
  Pfam module annotation: Pfam domain module=2-Hacid_dh_C::ACT::AdoHcyas e_NAD::IlvN; Domain location=19-186::386-450::36-190::42-222
MAMGKYPPGITTSYPYPRHKNNLTGLPIYTGKWQRNKYVGVSLVGKTLAILGFGKVGSEVARRAKGLGMHVIAHDPYASADRARAIGVELVSMEEAMTTADFISLHMPLTPATNKMLNDEAFAKMKYGVRIINVARGGVIDEDALVRALDSGIVAQAALDVFTKEPPAPDNKLVLHENVTVTPHLGASTVEAQLRVCLPQQVSQEGVAIEIAEAVIGALKGELAASAVNAPMVPAEVLSELAPFVVLAEKLGHLAVQLVAGGGGIKSVKVTYASARAPDDLDTRLLRAMITKGLIEPISSVFVNLVNADFTAKQRGVRITEERIILDGSPETPIDYIQVQIANVKSKFPSAISETGEITVEGRVKDGVPHLTKVGAFQVDVSLEGSLILCRQVDQPGMIGSVGSVLGEENINVSFMSVGRIAPRKHAVMAIGVDEEPSKVTLRKIGEIPAIEERTPHPSHTTSTVVGKENTASKPSKPTSAVRWSTSSLSQASKIQSSVDSTFWAPVLLGSRASGGWRQWRRVGLQLCQNRNSLVAFFAADDPFAPAKDGDDKDDEAVRCPPKEADVDALLSWDVTGLKGLELALLLRLQHDLADRARDDDLTAAIDIWLAIAFDLQRKREFCGLRWGQAGRFTLKYEVL

SEQ ID NO: 43579 - protein, 70 aa, Zea mays
  Coding DNA Sequence Number=SeqID_1800
MARGGGGRGLLGVGGGGSSVDTRDGQAHCDCRRMREVVAGAEGSSNGRRAVLQTRSPAVYWTCEVLLTFD

SEQ ID NO: 43580 - protein, 118 aa, Zea mays
  Coding DNA Sequence Number=SeqID_1801
MGRCVPGPEVAAVVSSMAASMAAVVVAVETSIGATACGSAWSVQVLVGVAWHRDWRGFLATWRVGCAGEGALGDGRCRGCVGQRAVGLGAGRGPLLSLARRQAVVSALQNQPIVNGFI

SEQ ID NO: 43581 - protein, 103 aa, Zea mays
  Coding DNA Sequence Number=SeqID_1802
MQQGLQTHIDGRFQGMMTHMDQRIGALQTHMDGHHTTLVNRVNLMSNQFDSLHDEVVPTTTTCTLVLHLVVSEAPLLWQLMPKGEMKMKMGLSQSGGAHFVDF

SEQ ID NO: 43582 - protein, 289 aa, Zea mays
  Coding DNA Sequence Number=SeqID_1803
  Gene Ontology: Mol. function=nucleotide binding; Cellular component =endoplasmic reticulum; Biological process=protein folding
  Homolog annotation: Hit_ID=Q69TV0; Match level="QueryCoverage=88%, HitCoverage=73%, E-value=3e-47, Identity=37%"; Hit description =Putative dnaK-type molecular chaperone BiP
  Pfam annotation: Domain name=HSP70; Domain location=1-289; Score= -359.6; E_value=0.017; Accession=PF00012.10; Description=Hsp70 protein
MDNGTILSGEAAMNHAAVSPGTAISGFTRLLNQKLKDDLVKSEMKLSPSYKFSEREGRAAIQIQAAGGGQVIELCPLDLADILFSELKHRAEAHLGCELSAAIIAMPHHLNYNGRQDVVNMARYDAGFRRAAKAIDRQIAAAVAHHRHTEQGDDFTARIIDYMAELIKEPHQWDIRQDAEALRRLRVSCEHAKKALSDQEETMSRKDMVDEIVLVGSGARMPKLHQLVEDYFHGRQPNSRKGVEPEDAIVRGTAILSRPKAACYLEECFDFLYGKDGRGLPSFLFRTSD

SEQ ID NO: 43583 - protein, 52 aa, Zea mays
  Coding DNA Sequence Number=SeqID_1804
MVIGVRCMAKAYHLAWGPQDFGRVHFATRPEESFPSVNAQDKPFFKFKAKKC

SEQ ID NO: 43584 - protein, 143 aa, Zea mays
  Coding DNA Sequence Number=SeqID_1805
MAIHTRSCKSNVINMKPIHLQAPSKANMGELSCMAKYFQRPYWLLQHQQHQDAQPCEDAQPTGFYNINNTKMLSLAKVFPSNYVAIYEAKSRVVQARQKTNPDKKQIDIRRIRLGRAWAKIAWTGKMMGLACLGHADVAPANI

SEQ ID NO: 43585 - protein, 148 aa, Zea mays
  Coding DNA Sequence Number=SeqID_1806
  Gene Ontology: Mol. function=transferase activity, transferring phosphorus-containing groups; Cellular component=integral to membrane; Biological process=two-component signal transduction system (phosphorelay)
  Homolog annotation: Hit_ID=O82424; Match level="QueryCoverage=99%, HitCoverage=50%, E-value=2e-49, Identity=87%"; Hit description =Pyruvate dehydrogenase kinase isoform 2
MALGVQQLKKELGRSRKVPFEFDEIHEFLDRFYMSRIGIHMLIGSQPSNCFVKSLIYEGQHVALHDPKPEPGVIGLINTRLSPIQVAQAACEDARSVCLREYVSAPDINIYGDPNFTFPLAMKVAGYQEAASQEFSRICTALQRILLS

SEQ ID NO: 43586 - protein, 106 aa, Zea mays
  Coding DNA Sequence Number=SeqID_1807
  Gene Ontology: Mol. function=glucose-1-phosphate adenylyltransferase activity; Cellular component=chloroplast; Biological process =glycogen biosynthetic process
  Homolog annotation: Hit_ID=P55229; Match level="QueryCoverage=66%, HitCoverage=13%, E-value=6e-12, Identity=67%"; Hit description =Glucose-1-phosphate adenylyltransferase large subunit 1, chloroplast precursor
MGDFIGEVAYMMSQARPTVTYSIISHEWFLENYSVDHSFVGVQSRIGSNVNLKDIVMPSVDYYETDTEGENYLQKEMFLLGSERIQRFSMNAYFTSTTNAFDIILY

SEQ ID NO: 43587 - protein, 171 aa, Zea mays
  Coding DNA Sequence Number=SeqID_1808
  Homolog annotation: Hit_ID=Q6QP51; Match level="QueryCoverage=26%, HitCoverage=20%, E-value=7e-07, Identity=60%"; Hit description =Putative growth-regulating factor 1
  Subcellular localization annotation: CTP_CleavageSite=73; ConfidenceScore=5.17e-01
MQAACNRAKWAHPFDSNAPSMEAQAHTSCNRRASCYVRATAPPLVPLPRLLDCETSDTFGRRSGRRFTFAITTASKKVRHVIRFRILFLFLFLSYNRDRERGYPERDPSPRRKRAPSPPTDQRFEGRPLRGVQQQPQSARAPRPLLVRGSKAGPLEGFNGRLRPLGLCAHY

SEQ ID NO: 43588 - protein, 65 aa, Zea mays
  Coding DNA Sequence Number=SeqID_1809
MDRNLTEFSYMHLHGYPQFHFCYILQSVSTNTLVNEGKTIIGMVDEVLDAEDSGGACMRHCDVKC

SEQ ID NO: 43589 - protein, 91 aa, Zea mays
  Coding DNA Sequence Number=SeqID_1810
  Gene Ontology: Mol. function=protein phosphatase type 2C activity
MASSSDPVSRTTRESSMLATTMRPLCLTMDSAVQLLWIASKWWLRGSLSYTAAHATTGQKPKAKSQTKHTLSFAGGGNEKDRIKNGNDRPY

SEQ ID NO: 43590 - protein, 147 aa, Zea mays
  Coding DNA Sequence Number=SeqID_1811
  Gene Ontology: Mol. function=nucleic acid binding; Cellular component= intracellular; Biological process=chromatin modification
  Homolog annotation: Hit_ID=Q5N712; Match level="QueryCoverage=96%, HitCoverage=11%, E-value=2e-58, Identity=70%"; Hit description =Putative floral activator, relative of early flowering 6
  Pfam annotation: Domain name=JmjN; Domain location=20-64; Score=40.7; E_value=5e-09; Accession=PF02375.7; Description=jmjN domain
MASSQGEPVPPWLKFLPLAPEFRPTVAEFADPIAYLLKIEPAAAPFGICKIVPPLSPPPKRTTLGNLSRSFVALHPDDPTPTFPTRHQQLGICPRGPCPALKPVWLSPHRYTLPKFEAKVGASRKALLARLNVPASKQRRRMDHHEV

SEQ ID NO: 43591 - protein, 110 aa, Zea mays
  Coding DNA Sequence Number=SeqID_1812
MANQFAGFQEMMKTTRDTLSDLEAWCTITETSMMQQSKETTARVQQPETTRRSVSTPTSAQVDRFERRAIAVAAGLGMACTTTTGQAALLASESSDPRRHTRSQVYRIRP

SEQ ID NO: 43592 - protein, 509 aa, Zea mays
  Coding DNA Sequence Number=SeqID_1813
  Gene Ontology: Mol. function=transcription regulator activity; Cellular component=nucleus; Biological process=regulation of transcription
  Homolog annotation: Hit_ID=Q2HRN6; Match level="QueryCoverage=62%, HitCoverage=61%, E-value=2e-79, Identity=47%"; Hit description =Pentatricopeptide repeat
  Pfam annotation: Domain name=PPR; Domain location=186-220; Score =12.7; E_value=0.24; Accession=PF01535.11; Description=PPR repeat
  Pfam annotation: Domain name=PPR; Domain location=223-257; Score=8.3; E_value=0.77; Accession=PF01535.11; Description=PPR repeat
  Pfam annotation: Domain name=PPR; Domain location=258-292; Score =29.4; E_value=1.2e-05; Accession=PF01535.11; Description=PPR repeat
  Pfam annotation: Domain name=PPR; Domain location=293-327; Score =18.5; E_value=0.025; Accession=PF01535.11; Description=PPR repeat
  Pfam annotation: Domain name=PPR; Domain location=435-469; Score=2.5; E_value=3.8; Accession=PF01535.11; Description=PPR repeat
  Pfam annotation: Domain name=PPR; Domain location=470-504; Score=3.0; E_value=3.3; Accession=PF01535.11; Description=PPR repeat
  Pfam module annotation: Pfam domain module=PPR::PPR::PPR::PPR::PPR::PP R; Domain location=186-220::223-257::258-292::293-327::435-469::470 -504
  Subcellular localization annotation: CTP_CleavageSite=64; ConfidenceScore=5.01e-01
MSRRPACSLLPLLRSRRCLYDATTARPFTSVSVPPDVISSTWPPHSPSPLHPPPDPAGTWCSASCSSTSPALPPFTASHLRAAVSLLATSLTALPGPDPDPVSALHDHSFPTLLAVSPLASLELLSLLRSRPRLGLAVFSFRRVLSPVPSISEFALAISLAGRAGDHDAAAALFADGTAIHSPNLGLYNALMSAYMHSGLLDNCIEVFHALERDPRCGPPNVDSYNILIALFGRSILVDHMERTLQSLDASGQPRTIGTYNAIISGYLTAWMWDKMEASFQEMVSFHVAPDATTHKLMLRGYAHAGMICKMEQAYERACKLGIKVDILHIRAMLCAYCKFYHVGRIQKIEDLLKKLGPDDYRPWLNVLLIKVYAQEGLTEGMELYISEALERNTIVTAVKVMRSIICNYFQYDAVDRLALFVRRAEDAGWKLCRSLYHCKMVMYGKHYRLEEMHGVLDEMECLKFDRTKKTFWIMYKAYVSCGRRTEANTIIGMMWKHGFAVRDDMSDQ

SEQ ID NO: 43593 - protein, 56 aa, Zea mays
  Coding DNA Sequence Number=SeqID_1814
MQQGEAAMLFCHVGKSASFIVLKQSALSFGISIVVLELKWRYMRNVLVQYLVDHMN

SEQ ID NO: 43594 - protein, 81 aa, Zea mays
  Coding DNA Sequence Number=SeqID_1815
MFSLTHYTKHPLYRKNLNDELDAKLEELEGEELESQLLEPVTALSVYPVHVQGNKQPARPAPQKAKAKDDELAALQVEMAL

SEQ ID NO: 43595 - protein, 78 aa, Zea mays
  Coding DNA Sequence Number=SeqID_1816
  Subcellular localization annotation: CTP_CleavageSite=32; ConfidenceScore=5.18e-01
MASSKLAYSMSTSRYLRRTWHTSTLPLRRSCRGKQFSGEVFAQSFLLDFLDETEDGKRPSTLARVEFTVIANRSTGDV

SEQ ID NO: 43596 - protein, 162 aa, Zea mays
  Coding DNA Sequence Number=SeqID_1817
MVPPRRPSIVESNSEDPPTEIQEEKHMLSALDALCKREVMALCKREVMALAPSRLGLAPSLEDVDRATVGCATRPNPQGPTPVDDDNDGMGYVVDLPPPNALVICGLHFRQDRAIRHGGEPDVDYCSKGGSATLQDKRSSPSSTPLCGSRRVMNMVVTLTLT

SEQ ID NO: 43597 - protein, 67 aa, Zea mays
  Coding DNA Sequence Number=SeqID_1818
  Homolog annotation: Hit_ID=Q5QNL8; Match level="QueryCoverage=73%, HitCoverage=14%, E-value=2e-10, Identity=64%"; Hit description =Putative G-protein beta
  Subcellular localization annotation: CTP_CleavageSite=43; ConfidenceScore=5.11e-01
MSETESAAAAPVAAAESKPRRLRGHKKGAVTCCVASSARPGVVASSGEGSFLVTAKGVCFMKRENNK

SEQ ID NO: 43598 - protein, 195 aa, Zea mays
  Coding DNA Sequence Number=SeqID_1819
MRKGAASARDSESTTPAQRNLFSARPNSDLDAAELQKDGSGLQAGAGEDCFALLLLSSSCCRSCSPPSPLHFLALASQQTPLRLGLPPPDLVAIVTPLCPTPTAMRTFRLSVARFPLQRAPSPPSPPDSLAWTAPRNKGEWAAASSQVKVSLPLPDPTRSGERLVGVLVVVEVEPALERLSGGDARGGNRSGPGQ

SEQ ID NO: 43599 - protein, 250 aa, Zea mays
  Coding DNA Sequence Number=SeqID_1820
  Gene Ontology: Mol. function=DNA binding; Biological process=DNA integration
  Homolog annotation: Hit_ID=O24587; Match level="QueryCoverage=87%, HitCoverage=53%, E-value=8e-68, Identity=87%"; Hit description=Pol
RNVVNIPRKVNEPSTIYHALNASFAICRKDRKVYASGGSSWIIDSGCTNHMTGEKKMFTSYVKNKDSQDSIIFGDGNQGKSLLDIICYLLVNYAKWGLVEVSSDVVFDETNGSPREQVVDCDDVDEEDVPTAAMRTMAIGDVRPREQLEQEQPSSSTMMHPPTQNDEQVHQEECDQGGAQDDHVMEEEAQPAPPTQVRAMIQRDHPVDQILGDISKGVTTRSRLVNFCEHYSFVSSIEPFRVEEALLDPD

SEQ ID NO: 43600 - protein, 495 aa, Zea mays
  Coding DNA Sequence Number=SeqID_1821
  Gene Ontology: Mol. function=RNA-directed DNA polymerase activity; Cellular component=nucleus; Biological process=RNA-dependent DNA replication
  Homolog annotation: Hit_ID=Q8S472; Match level="QueryCoverage=99%, HitCoverage=45%, E-value=0.0, Identity=82%"; Hit description =Putative gypsy-type retrotransposon RIRE2
  Pfam annotation: Domain name=Retrotrans_gag; Domain location=1-74; Score=30.3; E_value=6.7e-06; Accession=PF03732.7; Description =Retrotransposon gag protein
PLGQISNWDDLVQAFAGNFQGTYVRPGNSWDLRSCRQQPGESLWDYIRRFSKQRTELPNVTDSDVIGAFLAGTTCRDLVSKLGHKTPTRASELMDIATKFASGLEGVEAIFRKDKQPQGRQPEDVPEASTQRGTKKKGKKKSQAKRDTADADLVTAAEYKNPRKPPGGANLFDKMLKEPCPYHQGPVKHTLEECAMLRRHFHRAGPPAEGGRAHHDDKKEDHKAEEFPEVRDCFMIYGGQVANASARHRKQERREVYSVKVAAPVYLDWSDKPITFDQADHPDHVPSPGKYPLVVDPVIGDVRLTKVLMDGGSNLNIIYAETLGLLRVDLSSVRAGAVPFHGIIPGKRVQPLGQLDLPVCFGTPSNFRRETLTFEVVGFRGTYHAVLGRPCHAKFMAIPNYTYLKLKMSGPNGVITVGPTYRHAYECDVECMEYAEALAESEALIADLESLSKEAPDVKRHASNFEPAKTVKFVPLDPSNDASKQIRIGSELDPK

SEQ ID NO: 43601 - protein, 145 aa, Zea mays
  Coding DNA Sequence Number=SeqID_1822
  Gene Ontology: Mol. function=DNA binding; Cellular component=nucleus; Biological process=regulation of transcription
  Homolog annotation: Hit_ID=Q109M5; Match level="QueryCoverage=97%, HitCoverage=69%, E-value=4e-22, Identity=36%"; Hit description=Myb -like DNA-binding domain containing protein, expressed
  Pfam annotation: Domain name=Myb_DNA-binding; Domain location=58-107; Score=28.4; E_value=2.6e-05; Accession=PF00249.21; Description=Myb -like DNA-binding domain
MILQLLEGPQDETNLDDWLSGDLHPSPLLETNAHYQDPMFFERPVSREYSTAKGRKNNSRWTSKEVERLARGVSRFGVGQWTLLKQEFFKSSIRTAVNLKDKWRNLLKGYQENSQKSTLLYLEPSLVEKIRNLAAKQPYPYRRHR

SEQ ID NO: 43602 - protein, 137 aa, Zea mays
  Coding DNA Sequence Number=SeqID_1823
  Gene Ontology: Mol. function=transcription factor activity; Cellular component=nucleus; Biological process=regulation of transcription, DNA-dependent
  Homolog annotation: Hit_ID=Q7XDZ2; Match level="QueryCoverage=43%, HitCoverage=48%, E-value=2e-17, Identity=71%"; Hit description=AP2 domain containing protein
  Pfam annotation: Domain name=AP2; Domain location=11-76; Score=131.4; E_value=2.6e-36; Accession=PF00847.10; Description=AP2 domain
MEAGKDAGGGGTKYRGVRKRPWGKFAAEIRDAERGGARVWLGTFDTAEEAARAYDRAAFAQRGATAVLNFPGEIAGAAGSGRGGGSSSSSSAPAATASSRGAAGRGRAGDDGEKIELEYLDDKVLEDLLDDGKYGRH

SEQ ID NO: 43603 - protein, 543 aa, Zea mays
  Coding DNA Sequence Number=SeqID_1824
  Pfam annotation: Domain name=DUF241; Domain location=403-543; Score= -47.4; E_value=0.0042; Accession=PF03087.5; Description=Arabidopsis protein of unknown function
MFQRTFTSLRKSACTSPHVVRSVTPLEGHGRGRPSVTAEDMFRPHLCHPLIHDLTAGLPLSHLPNPTSFPPTVPPCPPAFPTTSPLPPTTLPPTSPTFPPDEVTSAFDSVRLCPTSVSAASTAVASPTVAFPIRASLAVIPTVAPLSASPSLRLASASSIVDASGSSSPASAHSGLPNPVEPRRHPHCRALAGLPIPSLCRVHRRGLTHGRLPDPGEPRRHPHRRALVGLPVAAPRIGIVHRRCVRVLPGLRHSGLPNPVEPRRHPHCRALAGLPVVAPRSAPSAINASGSSSPTSAHSRTSSPSPTPRTLLASRSEEYMLLFRLPPDKRLESSGKKVRFSYYFYLISNTQELPARDYRSMCLAKSISLPSRPQSSEAAVQQEMCILEAIISSPSTCIVTMCDGLRRLGDIYSSVVEMTHLPSNQVCSSQQRKMLDGETESSLELLDLCNTMQEIFVELKAIIQELQVALRKGDGATVQAKIQSYSRLVKKAKQSFKKSSKKAVSDKTDCAMVRLLTKAREIAISLLESTVQLLSKQIEVPKQ

SEQ ID NO: 43604 - protein, 89 aa, Zea mays
  Coding DNA Sequence Number=SeqID_1825
MEPSCAAHQGQWRVLSLSDCWPNRRIGGQPNRVLIRSRRTVAAAMETSCYAADGLQVEAAIVLGGHVWGSDGPGVPQSEQQGSLKAWRR

SEQ ID NO: 43605 - protein, 65 aa, Zea mays
  Coding DNA Sequence Number=SeqID_1826
MEDGMDLLGGYGGCHEHEACELEVEAGARHRVGGILSGGSKDQGEYGGIERIRQESDNPSVQTVG

SEQ ID NO: 43606 - protein, 68 aa, Zea mays
  Coding DNA Sequence Number=SeqID_1827
MTRPLLFSMLSLLGSDLTSLLMKDKTAEDPVPTGPEEVVPEKAIEEIPRGTMDVKQKKTIAEALALKE

SEQ ID NO: 43607 - protein, 305 aa, Zea mays
  Coding DNA Sequence Number=SeqID_1828
  Gene Ontology: Mol. function=protein binding; Cellular component =cytoskeleton; Biological process=sensory perception of sound
  Homolog annotation: Hit_ID=Q10CH7; Match level="QueryCoverage=76%, HitCoverage=53%, E-value=5e-95, Identity=74%"; Hit description=Actin- related protein 7, putative, expressed
  Pfam annotation: Domain name=Actin; Domain location=4-305; Score= -103.2; E_value=7.2e-09; Accession=PF00022.9; Description=Actin
MITIKSVSTAKEQGLEDFLNYSFIYGNVTAYLCFKTVYTCIYLAWWANKADVGVTFSASILLDIAPVCEGAVQHIASKRLEIGGVDLTNLFAQELKKSNPSVNLDVADVELLKEQYACCTEDYLTFESIESSCQPEKHTLPDGQVITIEKEGYIVGEALFQPRILGLEDYGIVHQLVTSVSNVSSEYHRQLLENTMLCGGTSSMTVEHNFIQDENLPWTRLIAKVYLTCFPQGFEDRFQREANLSASAICPSLVKPPEYMPENLARYSAWLGGAILAKVVFPQNQHVTKGEYDETGPSIVHKKCF

SEQ ID NO: 43608 - protein, 305 aa, Zea mays
  Coding DNA Sequence Number=SeqID_1829
  Homolog annotation: Hit_ID=Q84V55; Match level="QueryCoverage=12%, HitCoverage=8%, E-value=5e-09, Identity=76%"; Hit description =Secretory acid phosphatase
MHGECSCAIKLAKHSGSSRESARPGHRPPGKRPTTKQATSDDSEVVRSKDASEAIRSKVVVVVGGPPMRCIEGDCCLQMPPQMVTAAITACASKHRCHRRRHQSRLGKSRSPPLLAPRADAATAAHAYVSLAVPRLCIRVQTKNQSDLRTKLFLGTSDQHIPSPIPRRVPPHALTHKVDPSPSTKLNTRSHSHSLAQYNLRLQQAAAPSLEAERGTHEARKRRCCRPRAAAVGVRGMGRHGVDQIGAVAAFVWVTLLPLLLVCVVWPGAQAGHTSEYRRQLGSAIDMPLDADVFRPPPGYNAPEQ

SEQ ID NO: 43609 - protein, 169 aa, Zea mays
  Coding DNA Sequence Number=SeqID_1830
  Gene Ontology: Mol. function=carboxyl- and carbamoyltransferase activity; Cellular component=ornithine carbamoyltransferase complex; Biological process=amino acid metabolic process
  Homolog annotation: Hit_ID=Q8SA97; Match level="QueryCoverage=60%, HitCoverage=23%, E-value=2e-16, Identity=48%"; Hit description =Ornithine carbamoyltransferase
MAPPVDVAGLRPRLGDVEAPPKPRSSLSSVAEVESEPLGRARRRPSAEARAESEPWGRAERSGAVLLSGRSVERRSDGSHFGSTGWLCADGGYQLRIRSLEGGNEIDGFGYDYGTGKCDAHVCREWDSDISSTNSSSDKDAANIAVNKGLLFPNVVHKCLMAKNSKRKK

SEQ ID NO: 43610 - protein, 825 aa, Zea mays
  Coding DNA Sequence Number=SeqID_1831
  Gene Ontology: Mol. function=RNA-directed DNA polymerase activity; Cellular component=intracellular; Biological process=RNA-dependent DNA replication
  Homolog annotation: Hit_ID=UPI00005A975E; Match level="QueryCoverage =99%, HitCoverage=46%, E-value=0.0, Identity=87%"; Hit description =PREDICTED: similar to Retrovirus-related Pol polyprotein from transposon 297
  Pfam annotation: Domain name=RVT_1; Domain location=56-225; Score =141.8; E_value=1.9e-39; Accession=PF00078.17; Description=Reverse transcriptase (RNA-dependent
  Pfam annotation: Domain name=RnaseH; Domain location=455-582; Score =10.8; E_value=5.8e-06; Accession=PF00075.14; Description=RNase H
  Pfam module annotation: Pfam domain module=RVT_1::RnaseH; Domain location=56-225::455-582
MPGIPRDVAEHSLDIRAGARPVKQPLRRFDEEKRRVIGEEIHKLTAAGFIKEVFHPEWLANPVLVRKKGGKWWMCVDYTGLNKACPKVPYPQPRIDQIVDSTAGCETLSFLDAYSGYHQIRMKESDQLATSFITPFGMYCYVTMPFGLRNAGATYQRCMNHVFGEHIGRTVEAYVDDIVVKTRKASDLLSDLEVTFRCLKAKGVKLNPEKCVFGVPRGMLLGFIVSERGIEANPEKIAAITSMGPIKDLKGVQRVMGCLAALSRFISRLGERGLPLYRLLRKAECFTWTPEAEEALGNLKALLTKAPILVPPAAGEALLVYVAATTQVVSAAIVVERQEEGHALPVQRPVYFVSEVLSETKIRYPQVQKLLYAVILTRRKLRHYFESHPVTVVSSFPLGEIIQCREASGRIAKWAVEIMGETISFAPRKAIKSQVLADFVAEWVDTQLPTAPIQPELWTMFFDGSLMKTGAGAGLLFISPLGKHLRYVLRLHFPASNNVAEYEALVNGLRIAIELGVRRLDARGDSQLVIDQVMKNSHCRDPKMEAYCDEVRRLEDKFYGLELNHIARRYNETADELAKIASGRTTVPPDVFSQDLHQPSVKIDDTPEPEAPSVQPEVPSAQPEAPSARPEAPSVQPEVPSASEGEAMRIEEERSGATPDRNWQTPYLQYLCQGELPLDRAEARRVARRAKSFVLLGDEKKLYHRSPSGILQRCISVAEGRELLREIHSGACGHHAAPRALVGNAFRQGFYWPTAVADATRIVRTCEGCQFYAKQTHLPAQALQTIPITWPFAVWGLDLVGPLQKAPGGYTHLLVAIDKFSKWIE

SEQ ID NO: 43611 - protein, 191 aa, Zea mays
  Coding DNA Sequence Number=SeqID_1832
MGGHLVSPVTPPHGGCVIVISSIVCQAFRNVGIDAELDLEQYYEHDQEFRERINHKKVEVVVKDKYFCDISIVRPGPKDTVQHPEKDELYRHKGFSPEAHSLLGVTTCESVGNAEGERRTIPSRYKEEEKSDEEVVEVPIQNEVPLASLQLGSKPEAQSKPKSSFKGTPRKVNRCNDTTKINRKASARLLA

SEQ ID NO: 43612 - protein, 329 aa, Zea mays
  Coding DNA Sequence Number=SeqID_1833
  Homolog annotation: Hit_ID=Q9XHE1; Match level="QueryCoverage=68%, HitCoverage=28%, E-value=2e-80, Identity=71%"; Hit description =CENPCA protein
MAKNFGSKTVQIAMNAVVTSHLLVCLYSTAGSTVIRPWIHLSVEKKTWKDDEDKSSQLLEMPQEDINPLNQAQMHGGSTKKSAPDLSPTKQKKQQAVQERKRKQQSKRGKKWLDFLAFKGHITPLLARFSYGENCVYTAEGESLKIPQTNFESENQPHNDDVNIEKQTITSSTPSPNGAKEQKRAQRRNQPKKRNQRKILGDADLACQPGVRKSSRTRSRPLEYWLGERLLYGPIHDNLHGAIGIKAYSPGQDGKRSLKVKSFVPEQYSDLVAKSARFKMRYHRYLGQLEYLDVKICGVELDVNIYSTKLNNMDCGTNLSIIDHDAHLY

SEQ ID NO: 43613 - protein, 318 aa, Zea mays
  Coding DNA Sequence Number=SeqID_1834
  Homolog annotation: Hit_ID=Q9XHE1; Match level="QueryCoverage=94%, HitCoverage=71%, E-value=3e-95, Identity=95%"; Hit description =CENPCA protein
MDATDPLCAISSTARLLPRTLGPAPAIGPSPSKARDALLEAIALARSLKGSEELVKQATMVPKEHGDIQALYHDDGVKGRPPANGSKEQQGRRPALDRKRARSRGWHRISELEKHLFPGGAANAKCTDDESKGSPDIVMGEPSLVHYSSDVLMTDENFTASDVDRETPNLGARAADPVLDPEPNLPDHAYERQPGGSSLGLYRDTEVGVAKENETCSKSIIFVEEDDVPIDYITIGRSTDETEVSSSHPLEGSSTEELVTKPVRHAAPDGICRTSHAAEDSIQHLVLASWHMKRSKRVVSYKVHSFCYAPGYTIIRCI

SEQ ID NO: 43614 - protein, 323 aa, Zea mays
  Coding DNA Sequence Number=SeqID_1835
  Gene Ontology: Mol. function=metal ion transporter activity; Cellular component=membrane; Biological process=metal ion transport
  Homolog annotation: Hit_ID=Q1KSC0; Match level="QueryCoverage=99%, HitCoverage=78%, E-value=1e-135, Identity=78%"; Hit description =Putative corA-like Mg++ transporter protein
  Pfam annotation: Domain name=CorA; Domain location=1-321; Score =139.4; E_value=9.6e-39; Accession=PF01544.9; Description=CorA-like Mg2+ transporter protein
MVIDLEFIRAIVTADEVLLLEPLAQEVIPFIDKLRRHFPLKSLEVDVGATQVGNVNGKHAKTAAECELPLPFEFQVLELALEAVCLSFHSSLSDLNRHTIFVMDELTKNVSTRNLERVRSLKRNLTSLLAGVQKVRDEVEHLLDHNENMAQLHLSRKQIKCPQDEILLASAALNSNLPSKTKLGTPNSVVNQAMGIAMTAPLADNVGDLEILLESYFMQLDGIRNRIMMVRGYIVDTEDYINIQLDNQRNELIQFHLVLIIVSFGIAMNTLIAGAFAMNMPHNGEMKKFVGPFWPFVGATSSFCLLVSVVLLGYARGNRLLGS

SEQ ID NO: 43615 - protein, 354 aa, Zea mays
  Coding DNA Sequence Number=SeqID_1836
  Pfam annotation: Domain name=Toxin_33; Domain location=222-239; Score= 4.9; E_value=2.5; Accession=PF08121.2; Description=Waglerin family
  Pfam annotation: Domain name=Toxin_33; Domain location=305-322; Score= 8.4; E_value=0.58; Accession=PF08121.2; Description=Waglerin family
  Pfam module annotation: Pfam domain module=Toxin_33::Toxin_33; Domain location=222-239::305-322
MFELQVAMRLMVLGFDSGNGASVHLDSLDFVITLEEKLERVEAAAKPPSHTSTNSSFSEYEWWMFDGKDRREGENYPSRECFMPRTPKGHLKDILESNDVTPGIWGRCLRARQHALVPAAALAQARSSRRVLGPTCQSAGLHFSPCTLLQPPHALLLARHSPTTPRNLTSAPTFSYPTSAHHLLFLLHFPLSPALDLDVPSSPLARAAARRLVPGMARGPRGGQPDSCPCVAAAREKPREPSFGEQDRRRLAQPSVTSSAPCAPAGRHPPCARDPIRRRRAAHPCRHPSRASSLLSPACLRSPRSLRPCGMPSASSPRPAPRSSPHAVTHSPSLAVVSPRQRLIELAPVTVSSS

SEQ ID NO: 43616 - protein, 99 aa, Zea mays
  Coding DNA Sequence Number=SeqID_1837
MAEPRQGWRVAVLAFHGELRRVGQGDHARGARCRGQSALGRRCARSPGAARARTVPPASSPHPRLVAVALGPVSSACPPLRSAAPARRGFGSRGRGAPA

SEQ ID NO: 43617 - protein, 89 aa, Zea mays
  Coding DNA Sequence Number=SeqID_1838
  Homolog annotation: Hit_ID=Q9FMJ6; Match level="QueryCoverage=45%, HitCoverage=51%, E-value=8e-11, Identity=73%"; Hit description =Similarity to NOI protein
  Pfam annotation: Domain name=NOI; Domain location=1-89; Score=71.2; E_ value=3.3e-18; Accession=PF05627.2; Description=Nitrate-induced NOI protein
MATPDNKGHGHPLPKFGEWDVKNPATSEGFTVIFQKARDDKKTTTGPGAGNARAGIPPAFRNGGGDGGYRPDFGDGNQYTPPKRDSDHT

SEQ ID NO: 43618 - protein, 68 aa, Zea mays
  Coding DNA Sequence Number=SeqID_1839
MTTVLTPRRCLKYIVSHYVLHGMKLVAYAMRVICSIMLLMMMVLAYGTYTNMKLLERYSIICVWIVLI

SEQ ID NO: 43619 - protein, 246 aa, Zea mays
  Coding DNA Sequence Number=SeqID_1840
  Gene Ontology: Mol. function=protein binding; Biological process =protein modification process
  Homolog annotation: Hit_ID=Q1S0J6; Match level="QueryCoverage=55%, HitCoverage=40%, E-value=5e-26, Identity=44%"; Hit description =Ubiquitin; Apoptosis regulator Bcl-2 protein, BAG
MLVTGQLKKLLAPRTGLQPADQQLSYRGRARGNAEYLDACGVKNKSKVALAEDPASVERRYIERQRNATAESANRAIGAVALEVDKLADQVTSIEKSISRGNKVPEVQITTLIELLMRHAVKLESIPAAGDSSSQKNIQVHTPTLHYCTPGACCQLNGIPAWALFGPVPDFHQGHRSISYATAASATSSVSDDDISSLQRAKRVQKCVETLDVLKVSNARLQAVVVTTKWETFDAAATTTKWELFD

SEQ ID NO: 43620 - protein, 1647 aa, Zea mays
  Coding DNA Sequence Number=SeqID_1841
  Gene Ontology: Mol. function=ATPase activity, coupled to transmembrane movement of substances; Cellular component=integral to membrane; Biological process=transport
  Homolog annotation: Hit_ID=Q42093; Match level="QueryCoverage=99%, HitCoverage=99%, E-value=0.0, Identity=68%"; Hit description =Multidrug resistance-associated protein 2
  Pfam annotation: Domain name=ABC_membrane; Domain location=305-593; Score=137.6; E_value=3.4e-38; Accession=PF00664.13; Description=ABC transporter transmembrane region
  Pfam annotation: Domain name=ABC_membrane; Domain location=943-1215; Score=98.0; E_value=2.8e-26; Accession=PF00664.13; Description=ABC transporter transmembrane region
  Pfam annotation: Domain name=ABC_tran; Domain location=1291-1474; Score=157.4; E_value=3.6e-44; Accession=PF00005.17; Description=ABC transporter
  Pfam annotation: Domain name=ABC_tran; Domain location=665-839; Score= 128.9; E_value=1.4e-35; Accession=PF00005.17; Description=ABC transporter
  Pfam annotation: Domain name=Dynamin_N; Domain location=668-823; Score=-45.5; E_value=0.084; Accession=PF00350.13; Description =Dynamin family
  Pfam annotation: Domain name=MMR_HSR1; Domain location=1292-1381; Score=-15.6; E_value=0.027; Accession=PF01926.13; Description=GTPase of unknown function
  Pfam annotation: Domain name=SMC_N; Domain location=1280-1478; Score=- 111.1; E_value=0.0017; Accession=PF02463.9; Description=RecFRecNSMC N terminal domain
  Pfam module annotation: Pfam domain module=ABC_membrane::ABC _membrane::ABC_tran::ABC_tran::Dynamin_N::MMR_HSR1::SMC_N; Domain location=305-593::943-1215::1291-1474::665-839::668-823::1292 -1381::1280-1478
MGFDPLEWYCQPVKDGVWSHVVENAFGAYTPCGTDTLVVCISYLALFGVCFYRIWRTTRDYTVQRYKLRSPYYNYLLGLLVVYCIAEPLYRIITGTSIMNLDGQPGLAPFEIVSLIIESVAWCCMLVMILLETRIYINEFRWYIRFVVIYMMVGEAAMFNLVLSVRQYYSSSSIFYLYCSEIVCQFLFGILMVVYLPSLDPYPGYTPIRNEVLVDNTDYEPLPGGEQICPERHANIFARIFFSWMTPLMQQGFRRPITDKDIWKLDSWDETETLYSQFQKRWNDELQKPNPWLLRALHSSLWGRFWLGGFFKIGNDASQFVGPLVLNLLLESMQKGDPSWSGYIYAFSIFAGVSLGVLAEAQYFQNVMRVGFRLRSTLIAAVFRKSLRLTNDSRRKFASGRITNLISTDAESLQQVCQQLHSLWSAPFRIVISMVLLYAQLGPAALVGALMLVLLFPIQSLLFALIRAVSNQHVFWLFQTVIISKMQKLTKEGLQRTDKRISLMNEVLAAMDTVKCYAWEQSFQSKVQDIRDDELSWFRRAQLLAALNSFILNSIPVVVTVVSFGVYSLLGGDLTPAKAFTSLSLFAVLRFPLFMLPNLITQVVNCKVSLKRLEDLLLAEERLLLPNPPIDPDLPAISIKNGYFSWESEAQRPTLSNVNLDVPVGSLVAIVGSTGEGKTSLISAMLGEIPPVSGSGTSVVIRGSVAYVPQVSWIFNATVRDNILFGSPFQPPRYEKAIDATSLRHDLDLLPGGDLTEIGERGVNISGGQKQRVSMARAVYSDSDVYIFDDPLSALDAHVGRQVFDKCIKGELQHKTRVLVTNQLHFLPYVDKILLIHDGVIKEEGTFDELSNSGELFKKLMENAGKMEEQVEEDESKPKDVAKQTVNGDVTIADEGSQKSQDSSSKTKPGKSVLIKQEERETGVVSARVLSRYKNALGGIWVVSILFFCYALTEVLRISSSTWLSIWTDEGSLKIHGSGYYNLIYGILSFGQVLVTLSNSYWLIISSLRAAKRLHDAMLRSILRAPMVFFHTNPLGRIINRFSKDMGDIDRNVAVFVNMFMAQISQLLSTFVLIGFVSTMSLWAIMPLLILFYAAYLYYQATSREVKRLDSITRSPVYAQFSEALNGLSTIRAYKAYDRMANINGRSMDNNIRFTLVNMGANRWLAIRLETLGGIMIWFTATFAVMQNQRAENQKAFASTMGLLLTYTLNITNLLTAVLRLASLAENSLNAVERVGTYIELPSEAPPVIEDHRPPPGWPSSGVIKFEDVVLRYRPELPPVLHGISFVINGSEKVGIVGRTGAGKSSMLNALFRIVELERGRILIDDCDTSKFGIWDLRKVLGIIPQAPVLFSGSVRFNLDPFNEHNDADLWEALERAHLKDVIRRNSLGLDAEVSEAGENFSVGQRQLLSLARALLRRAKILVLDEATAAVDVRTDALIQKTIREEFKSCTMLIIAHRLNTVIDCDRLLILSSGQVLEFDSPENLLSNEGSAFSKMVQSTGPSNAEYLKSLVFASGEERSRREEIKLQDIQRRWVASNRWAEAAQFALARSLTSSHSDLLALEAAEGNNILRRTKDAVITLQSVLEGKHNTEIDESLTQYQVPADRWWSSLYKVIEGLATMSRLGRNRLQQPSYNFENNNSIDWDQM

SEQ ID NO: 43621 - protein, 83 aa, Zea mays
  Coding DNA Sequence Number=SeqID_1842
MSRAFDDYYIKDCGVISALETSRLPVPVVSPIGLLVSNDAARPSSNLVAAICHRMWRVVVDAMRERNHSIFKIATAKKWSIDN

SEQ ID NO: 43622 - protein, 117 aa, Zea mays
  Coding DNA Sequence Number=SeqID_1843
  Subcellular localization annotation: CTP_CleavageSite=32; ConfidenceScore=5.19e-01
MRIALPVSLLSHRLSQLCSESSDSSPCDVSTSSSMAKVTCSEQQVLEHPLPSSNCLALEDEVLVARTVWMARKLSGRTSVGLSLKELLAWEFTCSSLVDPRGLYIQSYTQWSDVSRI

SEQ ID NO: 43623 - protein, 583 aa, Zea mays
  Coding DNA Sequence Number=SeqID_1844
  Homolog annotation: Hit_ID=Q9ZUM1; Match level="QueryCoverage=96%, HitCoverage=99%, E-value=2e-41, Identity=29%"; Hit description =Expressed protein
  Pfam annotation: Domain name=Remorin_C; Domain location=437-573; Score=93.1; E_value=8.7e-25; Accession=PF03763.4; Description =Remorin, C-terminal region
MEYERIHQKAQLRALVEKERLTALRLLLQPGALSPTKLRMKILGAHNRVRVITSNSSSRTSPAKTIEASQAQNRLLVCDVLEEDSADSTKHPSATNKTEAVEKVQKDPAVDISQVQNASTSSAAKPATGSSSMIQIHPLRPAEEDSTTECDSGLDNASTSSFEFHGVEKAAATQNPAAGYLSRQTSISSKWNDAEKWIVSRQNVSQKNNVAKGALQNQTVNQMSSAAARGAVVPKISARPVQKMKRVNPALSAPRSILERLSFASYQPKLVRHADVCPVSNAGANSEHHKATDTGSSIEVKPCNDTNDIPTVQSSVSVRDVGTEMTPIPSQEPSRTGTPLGSRTPTRSPNCSVPSTPVGGRSIASPPGEDCTDDGPFFHRKCGVHANELSDTETRLKTRQEIAALGIQLGKMNIATWASKEELELVSAAPSIADLERIRKEYAARAASYEEAENTKHTARFKKEEVKIEAWEGRQRAKIEYEMRRIEQYRMLRYLEFNNLDVAVMSKNTLWQEFAERMRSEAMEKMAEKLEMTRRIAEEKRASANAKMNQQAAIAVQKAEKIRQTGRVPGSSILRCGGCFCGP

SEQ ID NO: 43624 - protein, 153 aa, Zea mays
  Coding DNA Sequence Number=SeqID_1845
MSTVRKRLEAEKLCQKYGSTNAKRGKRSASTHVTNRGGTNRWASGPAHRGSSSLMLHLNEKKERLINSADPKMVAVNLGSEARVACSSHLTQSSFFGPCAVLDACCLVVAVDLDSEGGQQIWDDAQLSTDHLLGVIYCGIELTQLDAIAYDAE

SEQ ID NO: 43625 - protein, 574 aa, Zea mays
  Coding DNA Sequence Number=SeqID_1846
  Gene Ontology: Mol. function=hydrolase activity
  Homolog annotation: Hit_ID=Q4KU02; Match level="QueryCoverage=46%, HitCoverage=72%, E-value=1e-118, Identity=63%"; Hit description =Purple acid phosphatase
  Pfam annotation: Domain name=Metallophos; Domain location=337-499; Score=23.8; E_value=0.00063; Accession=PF00149.18; Description =Calcineurin-like phosphoesterase
MHGECSCAIKLAKHSGSSRESARPGHRPPGKRPTTKQATSDDSEVVRSKDASEAIRSKVVVVVGGPPMRCIEGDCCLQMPPQMVTAAITACASKHRCHRRRHQSRLGKSRSPPLLAPRADAATAAHAYVSLAVPRLCIRVQTKNQSDLRTKLFLGTSDQHIPSPIPRRVPPHALTHKVDPSPSTKLNTRSHSHSLAQYNLRLQQAAAPSLEAERGTHEARKRRCCRPRAAAVGVRGMGRHGVDQIGAVAAFVWVTLLPLLLVCVVWPGAQAGHTSEYRRQLGSAIDMPLDADVFRPPPGYNAPEQFDTKYYYAVGIGQTVRKFWFLTPPKSGPDVPYTLGLIGDLGQSFDSNVTLTHYESNAKAQAVLFVGDLSYADNYPYHDNVRWDTWARFVERSVAYQPWIWTAGNHEIDFAPELGETKPFKPFSHRYPTPYKASGSTAPYWYSIKRASAYIIVLASYSAYGKYTPQYKWLEAEFPKHRISNVAYNVVNGLCTPIPDQSAPVYITIGDGGNQEGLATKEASFGHAILDIKNRTHAYYTWHRNQDGSAVAADSMWFTNRYWEPTDDSADDFQ

SEQ ID NO: 43626 - protein, 333 aa, Zea mays
  Coding DNA Sequence Number=SeqID_1847
  Gene Ontology: Mol. function=nucleic acid binding; Cellular component= intracellular
  Homolog annotation: Hit_ID=Q2Z1Y7; Match level="QueryCoverage=59%, HitCoverage=54%, E-value=3e-37, Identity=38%"; Hit description=Pm27 protein
  Pfam annotation: Domain name=DUF1644; Domain location=28-197; Score =258.1; E_value=1.8e-74; Accession=PF07800.3; Description=Protein of unknown function (DUF1644)
MGSGNLVTKKVVRRPSSIDQDIKFDQSWVEDVACPICLDSPHNAVLLRCASYEKGCRPFICDTDQTRSNCLERFRGAHGLPLPVPANARASSRTVAPLNSIHTITISSSNANNNRPACPLCRGDVMGWFVIGEARSHLNQKRRCCEESRCSYVGSFHELQRHTQQKHPDSRPSAIDPARRADWENLQRSSDVVDVLSTIHAQVPNGVVLGDYVIEYGDGDEAGDDDYEVYHGVRASWWTSCIFCKAFCRSSPPGGVRRRTRTGERRSSGGSGTRSSSNRSSSSQERFTLDEVDDGYVVAGAMARAAVSGTMDARYSFTGKQQLSKHEVRQKHC

SEQ ID NO: 43627 - protein, 213 aa, Zea mays
  Coding DNA Sequence Number=SeqID_1848
  Gene Ontology: Mol. function=protein serine/threonine kinase activity; Cellular component=ubiquitin ligase complex; Biological process=protein amino acid phosphorylation
  Homolog annotation: Hit_ID=Q67UV9; Match level="QueryCoverage=80%, HitCoverage=22%, E-value=2e-56, Identity=70%"; Hit description =Putative serine threonine kinase
MSYTFPTQPIVAPAKKKDARKDAADAAERHCSPLPSREHGRAAVAVDGDRGSQYALKWAADNILSRARPFFLVHVRRKPTFLQGPGGKQFAISHVQDDIPADLHAQMDLQAKDLMIPFQCFCSRRGGNYPGRNRRVEGDRRFRRHQQGRQVSAGLSIQERLYKDDMEAGRADIRDEVRAELLFGLRDSEREDLVLQARHLRERDKRQQGRSGT

SEQ ID NO: 43628 - protein, 459 aa, Zea mays
  Coding DNA Sequence Number=SeqID_1849
  Gene Ontology: Mol. function=protein serine/threonine kinase activity; Cellular component=ubiquitin ligase complex; Biological process=protein amino acid phosphorylation
  Homolog annotation: Hit_ID=Q67UV9; Match level="QueryCoverage=93%, HitCoverage=54%, E-value=1e-161, Identity=66%"; Hit description =Putative serine threonine kinase
  Pfam annotation: Domain name=APH; Domain location=138-317; Score= -10.6; E_value=0.032; Accession=PF01636.13; Description =Phosphotransferase enzyme family
  Pfam annotation: Domain name=Pkinase; Domain location=135-401; Score =101.5; E_value=2.5e-27; Accession=PF00069.15; Description=Protein kinase domain
  Pfam annotation: Domain name=Pkinase_Tyr; Domain location=135-400; Score=67.2; E_value=5.2e-17; Accession=PF07714.7; Description =Protein tyrosine kinase
  Pfam module annotation: Pfam domain module=APH::Pkinase::Pkinase_Tyr; Domain location=138-317::135-401::135-400
MGRTPESSHRNRPEAAAAAEAEAEAEACSQSAIGPKHKPSSLDTLPHQRGEEFADYDSQDIIHPILRRWPPICSPRDDSRGGSSSATPEEARKLDLKLRALPRPIETKRMLECLPTRLECRIFTADDIANATNHFADELKIGEGGYGPVYKATLDDTLVAVKILYSNVTQGLKQFRQEVELLNNIRHPNMVRLVGACPVYGCLVYEYMPNGSLEDRLFCRGGTAPLPWRLRFRVAVEIASGLLYLHKMRPEAFVHRDLKPGNILLDAAFAAKIGDVGLARIIPRAVDVDGAATQYRETAAAGTFCYIDPEYQKTGLLCTKSDVYALGVILLQMVTAREPMGLAYAVSDALEEGTFPDLLDGNVAGWPVPEAQAFAELALKCCEMRRRDRPDLETVVMPELVRLHRVVSPSEYPSSSSSLPHSMDQAHHRSASNKDLRLDNDLVDILSEGRLKGGASFAM

SEQ ID NO: 43629 - protein, 830 aa, Zea mays
  Coding DNA Sequence Number=SeqID_1850
  Gene Ontology: Mol. function=metal ion binding; Cellular component =nucleus; Biological process=regulation of transcription, DNA -dependent
  Homolog annotation: Hit_ID=Q67IU4; Match level="QueryCoverage=81%, HitCoverage=99%, E-value=0.0, Identity=69%"; Hit description =Putative coiled-coil protein
  Pfam annotation: Domain name=fn3; Domain location=424-514; Score=3.2; E_value=0.075; Accession=PF00041.11; Description=Fibronectin type III domain
  Subcellular localization annotation: CTP_CleavageSite=35; ConfidenceScore=5.79e-01
MDPPRGGQRPSSPTTSTVSPPTSPARPLVRPVGLRARGRGRLGRCGAGFSVRVPYASRFHGALRPSSPPQSSLPANPRFIVHARRLAVPALQIAGRGTRVALVADAWWGGLGAACGDAGGASNVRFTRGFKFVSGVYFLPSIVAEALQVEGPVIDPAKCRLMSVDEKRELVRDLSKSPESAPDRLQSWTRREIVEILCSDLGRERKYTGLSKQRMLDYLFSYDDNKDPSLWLSCSSDQHLQKDTCGFSCHLECALKDERTAYLPDTTLYGPYLVKKFRSYYKSLSFSFAVMFFWIDPCTVIIYSRKRMLTDLTALVSRSWKKQLVIAKDARRLDVLCHRIYLSHKILVSTEKYLVLHEIVDTALKKLEAEVGPISGAPNMSRGIVSRLTVGAEVQKLCAQAIDAMESLFSGVSPAGSRIPRPCMVPPNFVKFEAITQTSVMVFLDLVHYPMLAQEATSFNIWHRMAVTEAYLTNPTGIILPPSKKLPVTGLAPATSYIFKIIAFKNSIELGSWEIRTKTSYQKDDPRGSMPGGTRLGHNSESLKANSDGQSDPSSEGVDSNNNTAVYADLNKSPESDFEYCENPEILDSDKASRRLSEHIDDLQNIQMAADRVTEVTELEESPGLSASALDEEPNACVQAVLLREPNPLGHNQRTVVPRSQHASNVLGGNELVIVGPRYAGSVPPIATRGLENSKESGGRGFKPKPCNNIFQNGSSKPEREPGNSSNKRTAGKTEDLGHKDSSSEVSYEYCVRVVRWLECEGYIETNFRVKFLTWFSLRATPQERKIVGVYVDTLIEDPVSLSGQLVDSFSEAVYSKKRTPSGFCMDLWH

SEQ ID NO: 43630 - protein, 642 aa, Zea mays
  Coding DNA Sequence Number=SeqID_1851
  Homolog annotation: Hit_ID=Q2QLK7; Match level="QueryCoverage=98%, HitCoverage=98%, E-value=0.0, Identity=71%"; Hit description =Expressed protein
MEKGDVLVDLDKLPMKRLEAIDETGNEHYPPDTSNEEQRLAAIRRIDFSWVIEKDAKKAKKAAEADTTQQAWPWQGLMESLQQAHQELSVVIDLIGTVEANDAMAVASTTKPKSQPNEILVDMAVCAATKLQCLRHLSRYFKQSATTMEQQFQKETRFYSSLIRLQQNWKVKRQRSVGSPGSEGFMFDLVDTSQLDTTTMPRLSPLSLIPIDQDSSGTLSVQIPQKCFHSLSLRFHGDIANNAESSAVKRKEGTLTNTTTGAENDVLENDDVNKSTEHAHSILRDIHKSIFEEQVFDMVIQETFIQSQGINVTGMCEDFLQLAIGQECSLCLSHDLSGQNNNSGTVGQEDHMDIDHTGNLAVATVNGKESSNKDVRGFPNPKSLEIYLLHVFHEGILRKLREKSRHVVRYQSSAQGTPDECGLLSHFCMTVSHRIFSSKVHLELESVVSRVPYLHLCSLPTWHSRTSSWSLCLKVPQPILATDRVRRPSDYSELKCKSRSQFGTKVILKDGQISLMGEGSPSIAGSLAGKPSDGRLVASQVIHWLHDEAVVLGMNATIDFLCLYLDLDQGETLGLVAHVDPDDTYGCVSWYLTLDHHPTEEGKMSAGSPELEERRFLGYLSPELLYSTLMDLVKLCSTGVQR

SEQ ID NO: 43631 - protein, 128 aa, Zea mays
  Coding DNA Sequence Number=SeqID_1852
MGKRPQPAAGRARECSRTEGSPKCHGCARKKAREEGVRETRVLTLATLDVANGDVEEAQRQAPNARNQGSRKGDAGHDVEASRHEARRCDGSGVGKEREDGGWRFWQGKRRRERQLGVGRAEAMVGGR

SEQ ID NO: 43632 - protein, 505 aa, Zea mays
  Coding DNA Sequence Number=SeqID_1853
  Gene Ontology: Mol. function=RNA-directed DNA polymerase activity; Cellular component=exocyst; Biological process=exocytosis
  Homolog annotation: Hit_ID=Q6Z421; Match level="QueryCoverage=88%, HitCoverage=90%, E-value=0.0, Identity=81%"; Hit description=Exocyst subunit EXO70-like protein
  Pfam annotation: Domain name=Exo70; Domain location=1-439; Score =203.5; E_value=4.8e-58; Accession=PF03081.6; Description=Exo70 exocyst complex subunit
MPQPGAAAGSTAPSRVPAAAVHKLTLILDRLVANGRQDRCVAVYIDARGGVVSASLRALGLDYLREPSQDAQALGPALELWGRHLEFVVRRLLESERQLCAKVFGLHKDVASACFAEVAAQAGVLEFLRFGRAVADAKKDPIKLQRLLEVFDSLNKLRLDFNRLFGGKACAEIQSQTRDLVKLLIDGAVEIFEELIVQVELQRHMPPPVDGGVPRLVTFVVEYCNRLLGEQYRPMLGQVLTIHRSWRKEVFNDRMLVDVVLNIVKALEANFDVWSKAYDNATLSYLFMMNTHWHFFRHLKATKLGEILGDVWLREHEQYKDYYLSMFIRESWGALSPLLNREGLILFSKGQATARDLVKQRLKTFNSSFDEMHCRQSSWVIPDKDLRERTCNLVVQTIVPAYRSYLQNYGPLVEQDGNTSKYVRYTVDGLEKMLSALYMPRPRRAGSFQIKHSSGWMEGTKELEIMDTATLHYWAFAFRAIEASEIRLENFVCLFPIALRYLGAI

SEQ ID NO: 43633 - protein, 125 aa, Zea mays
  Coding DNA Sequence Number=SeqID_1854
  Gene Ontology: Cellular component=exocyst; Biological process =exocytosis
  Homolog annotation: Hit_ID=Q5Z4V4; Match level="QueryCoverage=80%, HitCoverage=14%, E-value=3e-22, Identity=60%"; Hit description =Putative Exo70 exocyst complex subunit
MDHGGEDRVVAASLAAARRTLRAGLDKSRALGHALARAGPRLKEIQAALPVLEAAVRPIRAPRAELAAAGPHIDRAVGPAAAVLKVFDAVHGLEPPLLAPGAAGSGAAGDLPGYLAVLAQLEEAH

SEQ ID NO: 43634 - protein, 234 aa, Zea mays
  Coding DNA Sequence Number=SeqID_1855
MDAMFARGILKCPNRSARPIWLMSTRNPRESSVKTKGTSDNHEERQEIGTERSDPNPRAGSDPPSPSTWGPKRKQKDREREGIIPEVGGVRRPVPGEPHERHLRAALPALAPAAGGGGTGERPPREQGEEEEEHHREMRADGGAGGGPHGPSSRMKRGVQGWGEGEPGSRGRGERMDERRGRRAREAARVLSFEFEESRGVDENDRGAVDVAGRRDWTVDAPDPGDPAVSWAER

SEQ ID NO: 43635 - protein, 174 aa, Zea mays
  Coding DNA Sequence Number=SeqID_1856
  Gene Ontology: Mol. function=protein serine/threonine phosphatase activity; Cellular component=protein serine/threonine phosphatase complex; Biological process=protein amino acid dephosphorylation
  Homolog annotation: Hit_ID=Q6IV73; Match level="QueryCoverage=99%, HitCoverage=54%, E-value=1e-80, Identity=99%"; Hit description =Protein phosphatase 2C
  Pfam annotation: Domain name=PP2C; Domain location=2-174; Score=18.5; E_value=5.1e-07; Accession=PF00481.12; Description=Protein phosphatase 2C
MEDFYEARIDDVDGEKVGMFGVYDGHGGVRAAEYVKQHLFSNLIKHPKFITDTKAAIAETYNRTDSEFLKADSTQTRDAGSTASTAIIVGDRLLVANVGDSRAVISKGGQAIAVSRDHKPDQTDERQRIEDAGGFVMWAGNGSSEFFNKKKPSISGHGEWVAFSLSLEHLVINS

SEQ ID NO: 43636 - protein, 112 aa, Zea mays
  Coding DNA Sequence Number=SeqID_1857
  Homolog annotation: Hit_ID=Q6IV73; Match level="QueryCoverage=38%, HitCoverage=14%, E-value=2e-15, Identity=97%"; Hit description =Protein phosphatase 2C
MVKPIQDPQEAANKLLEEASRRGSSDNITVIIVRFIDGTTGVKLALGLQYGLGLTLTALTSHCIRILSSVWYNLSHSFFVDLSRSRTKQQSLITSSASRTSRFSKEQQFKGF

SEQ ID NO: 43637 - protein, 62 aa, Zea mays
  Coding DNA Sequence Number=SeqID_1858
MSSLTTAASSSSSMEEHCYSVSAEEVVGTHLSLGIGGGGGGGDKRMLTTLPPSRTVVQLFGE

SEQ ID NO: 43638 - protein, 96 aa, Zea mays
  Coding DNA Sequence Number=SeqID_1859
  Subcellular localization annotation: CTP_CleavageSite=31; ConfidenceScore=5.21e-01
MASNRGVGPSMVQYCLGNTLDRLNVKSYFSQASSGSRPSTHASGVCNEPEIQVGVQENNSEEVAHVLEENGRIPDANGENINGQVEGIFGLESVSQ

SEQ ID NO: 43639 - protein, 79 aa, Zea mays
  Coding DNA Sequence Number=SeqID_1860
MGLGVCGSLCQECYETDISAVLAVMSAKGAPLIRDTLIRDGWFAGGDEDDGFDYDYGNGKEEGVEVDLQKFQDFDEFED

SEQ ID NO: 43640 - protein, 92 aa, Zea mays
  Coding DNA Sequence Number=SeqID_1861
  Subcellular localization annotation: CTP_CleavageSite=52; ConfidenceScore=5.18e-01
MAWPAGSLSGAASCLPARAPPGHGVHPRARVPYVAWPAPCGGRAPPPLRSPMAMEFERGDEDDGFDYDYGNGKEEGVEVDLQEFQDFDKFED

SEQ ID NO: 43641 - protein, 288 aa, Zea mays
  Coding DNA Sequence Number=SeqID_1862
  Gene Ontology: Mol. function=transporter activity; Cellular component= integral to membrane; Biological process=auxin mediated signaling pathway
  Homolog annotation: Hit_ID=Q5JLM1; Match level="QueryCoverage=97%, HitCoverage=72%, E-value=1e-102, Identity=72%"; Hit description =Probable auxin efflux carrier component 6
  Pfam annotation: Domain name=Mem_trans; Domain location=9-288; Score =17.6; E_value=2.6e-08; Accession=PF03547.8; Description=Membrane transport protein
MIGWGDVYKVVAATVPLYFALFLGYGSVRWWRIFTREQCDAVNRLVAFFALPFFTFEFTLHTDPFQVNYRAVAADVISKAVIVGVIGCWAGSRVGSAGKGKGAVGWSITGFSLSTLTNSLVVGVPMARAMYGEWAQQLVVQLSVFQAIVWLTLLLFVLETRKAAIGMYVVPGGAADSDGGVPDSPVKDKDVEAAAGDRRPAAGPAAAATVVVVVPVKPSLWALIKVVAHKLSRNPNTYASFVGITWACVANRLHIELPSAFEGSVLIMSKSGTGMAMFSMGESDFPVS

SEQ ID NO: 43642 - protein, 74 aa, Zea mays
  Coding DNA Sequence Number=SeqID_1863
  Subcellular localization annotation: CTP_CleavageSite=45; ConfidenceScore=5.16e-01
MVVVLDIGTATTLSGRGNRRASRELGNEVAASRAKGRMARCTRARAVSVSGVQAGVEAGSWAVSGWALQGGVVG

SEQ ID NO: 43643 - protein, 102 aa, Zea mays
  Coding DNA Sequence Number=SeqID_1864
  Homolog annotation: Hit_ID=Q8LHP0; Match level="QueryCoverage=31%, HitCoverage=37%, E-value=3e-07, Identity=78%"; Hit description =Transcription elongation factor 1 homolog
CVKNRITSKLKLDTTLYIALTEPIDIYSEWIDECERVNTVEGDDDAVNQMQPEYNLQRKIFIDTIVFSSFNAESGFGLEAELWIIGWHYAALAPGVPLISFS

SEQ ID NO: 43644 - protein, 99 aa, Zea mays
  Coding DNA Sequence Number=SeqID_1865
  Gene Ontology: Mol. function=transporter activity; Cellular component= integral to membrane; Biological process=auxin mediated signaling pathway
  Homolog annotation: Hit_ID=Q5JLM1; Match level="QueryCoverage=99%, HitCoverage=27%, E-value=2e-45, Identity=96%"; Hit description =Probable auxin efflux carrier component 6
MAQQEKVLACGPSFAALGLVLKFALGPAAMAIGSIAVGLRGDVLRVAIIQAALPQSITSFIFAKEYGLHADVLSTAVIFGMLVSLPLLVGFYIVLELIR

SEQ ID NO: 43645 - protein, 72 aa, Zea mays
  Coding DNA Sequence Number=SeqID_1866
MDGHATPDFSPAAGSFVHTTARSENSAEGEGGEPRATYPPPEKVFAGPFAASLPPTSTSQVLDVLIVFSTTA

SEQ ID NO: 43646 - protein, 173 aa, Zea mays
  Coding DNA Sequence Number=SeqID_1867
  Homolog annotation: Hit_ID=Q5N941-2; Match level="QueryCoverage=56%, HitCoverage=8%, E-value=3e-21, Identity=65%"; Hit description =Isoform 2 of Q5N941
MREASMFFCGDPSTPQWVDQHHQHVEIHRDANGSTLLKGFRKPSPNNNLLECTQHAYDICTVDQGSLLKQLANKSISGGVAAVLAERDKEEMEMDIAKLEVGSMETSVICRSDGPLILAYLRKWSLISSHSTIRSQIIDPFQVSVSKAQAIIVLTSDENADQVSIFVLHTSPE

SEQ ID NO: 43647 - protein, 331 aa, Zea mays
  Coding DNA Sequence Number=SeqID_1868
  Gene Ontology: Mol. function=oxidoreductase activity; Biological process=gibberellin metabolic process
  Homolog annotation: Hit_ID=Q9LWE4; Match level="QueryCoverage=99%, HitCoverage=99%, E-value=1e-100, Identity=61%"; Hit description =Putative GA 2-oxidase 5
  Pfam annotation: Domain name=2OG-FeII_Oxy; Domain location=179-281; Score=116.1; E_value=9.8e-32; Accession=PF03171.10; Description=2OG -Fe(II) oxygenase superfamily
MVVLAKGELEQIALPAAAPPRADVRSVDLSAPAGPAREAAARALVAACEEHGFFRVTGHGVPAELVRAAEAAAAGFFARPQGEKDGEAPTLGYGSKRIGGNGDLGWVEYLLLGVNPAVPAASASSSTLPLRGLLDEYTVAVRRMACAVLELMAEGLGIAGAGDGDGDTVLARLVARADSDCMLRVNHYPPRPALNYPCLTGFGEHTDPQIISVLRANGTSGLEVALRDGAWASVPPDGDAFFVNVGDTLQVLTNGRFRSVRHRVVVNSEKSRVSMIFFGGPPPDERLAPLPQLLGDDGGRSRYRDFTWSEFKTSGCRTRLAEDRLSRFEKQ

SEQ ID NO: 43648 - protein, 71 aa, Zea mays
  Coding DNA Sequence Number=SeqID_1869
MAPVADTTLYLRQGAPSTGDRTREGRLMRVMRHCGEQRWRCQAWSGDCRGVEATQQGADGVGVAHGGPMEA

SEQ ID NO: 43649 - protein, 216 aa, Zea mays
  Coding DNA Sequence Number=SeqID_1870
  Homolog annotation: Hit_ID=Q6QP51; Match level="QueryCoverage=19%, HitCoverage=19%, E-value=2e-12, Identity=78%"; Hit description =Putative growth-regulating factor 1
MEAQAHASCNRRAECFVHATAPPLAPPPRLLDCGTDTAGRSSGHVVSQAYVSSGGSERTLSHGVKTTRPCSIPQTARARATAAPRTTRPVALTPRRDRRRLWQEKRATLRLRHNDRVKKKGPGKGDNPKRILPREGTRFRASLLIRGSKAGPSEGFNSRLRARGLHTHYWSEVRRPAPRKGSTAASGYSGSAPTADQGFEGWPPKGSQPPQTQSEG

SEQ ID NO: 43650 - protein, 65 aa, Zea mays
  Coding DNA Sequence Number=SeqID_1871
MNAADDRKGMAGPGPRLRATAVAPDPYVPDDALIDIFDLLLANSLHRFKCVFKAWCGGFTDPLHR

SEQ ID NO: 43651 - protein, 172 aa, Zea mays
  Coding DNA Sequence Number=SeqID_1872
  Homolog annotation: Hit_ID=Q84LH6; Match level="QueryCoverage=26%, HitCoverage=35%, E-value=4e-18, Identity=75%"; Hit description =Putative Bowman-Birk serine protease inhibitor
  Pfam annotation: Domain name=Bowman-Birk_leg; Domain location=61-87; Score=24.3; E_value=0.00044; Accession=PF00228.10; Description =Bowman-Birk serine protease inhibitor family
MRTQALFFLALALIGAVLAQSSNRHHHHYHHAHVQGKGQGAGGGGGELASRAKAAARAWPCCDSCGGCTRSEPPRCQCLDAAPRGCHPACRDCVKSSLSADPPRDEHDGSLRFKKRVKETFAFLAVYTKLSTGKETRRQGQIVVDLSSGYFGSSRAEAELVPVQVEDDAPGR

SEQ ID NO: 43652 - protein, 474 aa, Zea mays
  Coding DNA Sequence Number=SeqID_1873
  Gene Ontology: Mol. function=sugar porter activity; Cellular component=integral to membrane; Biological process=carbohydrate transport
  Homolog annotation: Hit_ID=Q852B0; Match level="QueryCoverage=87%, HitCoverage=82%, E-value=1e-178, Identity=76%"; Hit description =Putative sugar transporter protein
  Pfam annotation: Domain name=DUF1228; Domain location=61-128; Score= -25.9; E_value=0.064; Accession=PF06779.4; Description=Protein of unknown function (DUF1228)
  Pfam annotation: Domain name=MFS_1; Domain location=37-431; Score =95.7; E_value=1.4e-25; Accession=PF07690.6; Description=Major Facilitator Superfamily
  Pfam annotation: Domain name=Sugar_tr; Domain location=33-472; Score =298.8; E_value=9.8e-87; Accession=PF00083.14; Description=Sugar (and other) transporter
  Pfam module annotation: Pfam domain module=DUF1228::MFS_1::Sugar_tr; Domain location=61-128::37-431::33-472
MEDVQVRTRAQQGDGGAAAEGDAAFSWAPVVLPFLFPALGGLLFGYDIGATSGATISVQSPDLSGTDWFSLSSLQLGLVASGSLYGALGGSLLAYRIADFLGRRIELVTAAALYILGALVTGFAPNFVALIIGRVLYGIGIGLAMHGAPLYIAETSPSQIRGTLISLKELFIVLGILLGYLVGSLEIDNVGGWRYMFGFSAPLAAIMAIGMWTLPSSPRWLLLRAVQGKASLEDNKKKAIQALRTLRGRTASEKVLADDVDDTIVSIKAAYAGQEAEGNVWDVFEGASLKAFTIGGGLVLFQQTAGFSAASDAAKVAILIGLFKLLMTGVAVFKVDDVGRRPLLIGGVGGIALSLFLLAAYYKILNNFPFVAVGALLLYVGAYQVSFGPISWLMVSEIFPLRTRGRGISLAVLTNFGSNALVTFAFSPLKELLGPANIFFLFGVIAVLSLVFVILVVPETKGLSLEEIESKILK

SEQ ID NO: 43653 - protein, 174 aa, Zea mays
  Coding DNA Sequence Number=SeqID_1874
  Gene Ontology: Mol. function=fatty-acid synthase activity; Cellular component=fatty acid synthase complex; Biological process=fatty acid biosynthetic process
  Homolog annotation: Hit_ID=Q9FJI2; Match level="QueryCoverage=75%, HitCoverage=83%, E-value=1e-22, Identity=40%"; Hit description =Arabidopsis thaliana genomic DNA, chromosome 5, TAC clone:K9B18
  Pfam annotation: Domain name=MaoC_dehydratas; Domain location=38-141; Score=30.7; E_value=1.6e-06; Accession=PF01575.9; Description=MaoC like domain
  Subcellular localization annotation: CTP_CleavageSite=32; ConfidenceScore=5.38e-01
ITQNSLPIGGATMRLRSRAIFPLVRTTATTTSAASSSPAVLSIGHALRERRLFTGDDVAAYAAISGDRNPVHLDDAVARELSGFQRGRVPGAVYASQTLKFAAPVYVGDEVVARVQALNIRTTAAATNSCTARRYVVKFATKCFMDEEEGSVAIEGEAMAVLPTLELSSQSTRN

SEQ ID NO: 43654 - protein, 168 aa, Zea mays
  Coding DNA Sequence Number=SeqID_1875
  Gene Ontology: Mol. function=structural constituent of ribosome; Cellular component=large ribosomal subunit; Biological process =translation
  Homolog annotation: Hit_ID=Q6ZC61; Match level="QueryCoverage=59%, HitCoverage=86%, E-value=2e-46, Identity=92%"; Hit description =Ribosomal protein L30p family-like
  Pfam annotation: Domain name=Ribosomal_L30; Domain location=19-71; Score=28.2; E_value=2.9e-05; Accession=PF00327.10; Description =Ribosomal protein L30pL7e
  Subcellular localization annotation: CTP_CleavageSite=41; ConfidenceScore=5.40e-01
MSGSAFNAFKSRVPVAWSPRLYITLVRGLPGTRRLHRRTLEAMRLRRCHRTVEHRTTPSLLGMLTQVKRLVAVETEEMYNARKQAEAERRAPRPPLVVSHQPQPPAPKPAAAAAGIRSLSSQFSGIIIDLPVFGSAGFQTIALGLLAQRDLATDLIDLLKIVVWCNLH

SEQ ID NO: 43655 - protein, 257 aa, Zea mays
  Coding DNA Sequence Number=SeqID_1876
  Gene Ontology: Mol. function=transporter activity; Cellular component= membrane; Biological process=transport
  Homolog annotation: Hit_ID=Q10BC0; Match level="QueryCoverage=93%, HitCoverage=97%, E-value=5e-97, Identity=76%"; Hit description =Permease I, putative, expressed
  Pfam annotation: Domain name=Xan_ur_permease; Domain location=36-257; Score=-165.2; E_value=0.058; Accession=PF00860.11; Description =Permease family
MAAPAPAPKQEELQPHAVRDQLPSVSYCLTSPPPWPEAVLLGFQHYLVMLGTTVIIPTALVPQMGGGNEEKARVVQTLLFVAGINTLVQSFLGTRLPAVMGASYTFVAPTISIVLAGRYSGIADPHEKFVRIMRGTQGAFIVASTLQIIMGFSGLWRIVVRLLSPLSAAPLVALVGFGLYELGFPSVAKCVEIGLPQILLLVALSQSTGAFIAVSRENAGLLGLTRVGSRRVVQISAGFMIFFSILAVIVNIAHYAI

SEQ ID NO: 43656 - protein, 187 aa, Zea mays
  Coding DNA Sequence Number=SeqID_1877
  Gene Ontology: Mol. function=calmodulin binding
  Homolog annotation: Hit_ID=P93370; Match level="QueryCoverage=78%, HitCoverage=27%, E-value=2e-34, Identity=47%"; Hit description =Calmodulin-binding protein
  Pfam annotation: Domain name=Calmodulin_bind; Domain location=1-149; Score=1.9; E_value=3.4e-10; Accession=PF07887.2; Description =Calmodulin binding protein-like
YKKHHPPFLEDEVWRLEKIGKEGAFHKRLNRENICTVKDFLTLLNLDASRLRKILGGGMSTKMWEATVEHAKTCVLTDKVHHYYPDGLNKAGVVFNVVGEVRGLISDKYVFVDDFTEKEKAEARAAVKQAYEHWKDTEESSANQFQSVLPPVGGHEVPREPQTLDKFSNSLLVSSAGFFSCTWAVSY

SEQ ID NO: 43657 - protein, 275 aa, Zea mays
  Coding DNA Sequence Number=SeqID_1878
  Gene Ontology: Mol. function=calmodulin binding
  Homolog annotation: Hit_ID=Q6YU05; Match level="QueryCoverage=81%, HitCoverage=34%, E-value=8e-61, Identity=53%"; Hit description =Putative calmodulin-binding protein
  Pfam annotation: Domain name=Calmodulin_bind; Domain location=107 -275; Score=83.7; E_value=5.9e-22; Accession=PF07887.2; Description =Calmodulin binding protein-like
MSQKRQPEEGDVPRRAADAGGGGGGDEPGGSSSRSSLPQRHGEPKRQRIALRDVITEVMRNTSIEKFLIALEPLIRRVVKEEIESAFANHASMMARSVTDSVPSVSKNLQLQFMTRLSLPIFTGSKIEGEGSLSITIALVDALTRQIVAPGKEFQIKVEIVVLEGDFESGEDDDWTAQEFNNNIVKEREGKRPLISGDAFIALVDGIGTVGELSFTDNSSWTRSRKFRLGARTEDGSFNGVRVREAKTESFVVKDHRGEWLVWEPHFPKGFSFSQ

SEQ ID NO: 43658 - protein, 136 aa, Zea mays
  Coding DNA Sequence Number=SeqID_1879
  Homolog annotation: Hit_ID=Q10J33; Match level="QueryCoverage=55%, HitCoverage=74%, E-value=2e-16, Identity=64%"; Hit description =Expressed protein
MNVCELTLAVSHPPTGQEQYSNPGEPPPTRQRLEATALPEMETETEAAAARRAKESLELAFQMSQILDTGLDRHTLSLLMALCDRGANPEALAALVRELSSAAPPTSAAASSPVSNGAAGPASAIAPTFSSGLRRP

SEQ ID NO: 43659 - protein, 303 aa, Zea mays
  Coding DNA Sequence Number=SeqID_1880
  Gene Ontology: Mol. function=methyltransferase activity; Cellular component=cytosol; Biological process=methylation
  Homolog annotation: Hit_ID=Q2HS71; Match level="QueryCoverage=72%, HitCoverage=22%, E-value=8e-79, Identity=65%"; Hit description =Methyltransferase small domain, putative
  Pfam annotation: Domain name=MTS; Domain location=44-225; Score= -66.9; E_value=0.00084; Accession=PF05175.4; Description =Methyltransferase small domain
  Pfam annotation: Domain name=Methyltransf_12; Domain location=80-202; Score=8.5; E_value=0.073; Accession=PF08242.2; Description =Methyltransferase domain
  Pfam module annotation: Pfam domain module=MTS::Methyltransf_12; Domain location=44-225::80-202
MADGDGAAATGKLAELPSGAEKGLPRRGKASSGRTLNTAQIPLVASHPDVYEPCDDSFALVDALLSDKAQLLTLQPRLCMEVGSGSGYVITSLAIMLRQLGSGAQYLATDINQHAAETTQATLEAHGVHADVIVTDIMSGLDKRLAGMVDVAVVNPPYVPTPVEEVGCRGIASSWAGGLNGRQVIDRILPAVREMLSERGWLYMVALEDNDPSDICHLMSEMGYASRVILKRCTEEESLYVLKFWRDPHAVTSVAKASKNHRRLARLGVQSIGQRLISTYALRTMHTLKDSVLYIFYVSSNVP

SEQ ID NO: 43660 - protein, 651 aa, Zea mays
  Coding DNA Sequence Number=SeqID_1881
  Gene Ontology: Mol. function=protein-tyrosine kinase activity; Biological process=protein amino acid phosphorylation
  Homolog annotation: Hit_ID=Q10BA4; Match level="QueryCoverage=55%, HitCoverage=83%, E-value=4e-97, Identity=53%"; Hit description =Protein kinase domain containing protein, expressed
  Pfam annotation: Domain name=Pkinase; Domain location=362-624; Score =28.6; E_value=2.9e-10; Accession=PF00069.15; Description=Protein kinase domain
  Pfam annotation: Domain name=Pkinase_Tyr; Domain location=362-622; Score=31.4; E_value=2.1e-14; Accession=PF07714.7; Description =Protein tyrosine kinase
  Pfam module annotation: Pfam domain module=Pkinase::Pkinase_Tyr; Domain location=362-624::362-622
  Subcellular localization annotation: CTP_CleavageSite=81; ConfidenceScore=5.18e-01
RKDNRRQKESGTSTRRQKVLSETTPHRRILANTSPAEVTLQMVRSNVSPGGSGAPPGSPRLRRAPEVSAQVDVEGAVAWARGAAAGELWAVRRRNRGIDVDEEQLRAVMLAVRQLRYELDPDDPDTPYPKAFRNCGFDAMGERVLKLWTAEDKKKLADIEKLIPQSHPRHATRGPYDPAVPAAGRRHQPRPVPLNSVESSPHIKRPRSAGDGARPAPDESCLPHMASWPAASRRRSSGGMKSAELSGSGASYGYGRTSSSPDACGYGRQFSAYSARSSQVSRSGSFSAAAQRVAGAFTGCFVPRRQVKAGEEEEEEEKKSKRSMDSGIAAVMSPLPFFLSSSVAGEGRALTIADVSKATSNFSEKNVIRQGRSSTMYRGKLRDGSQIAVKCVTKLNDQSPTAELWRELEKIQHRNLARLFGFFERAADSLVVVEYVGNGSLREHLDELAQRLNIAIDVAQAITYLHEYKERPIIHGGIRSSGVLLTDALAAKVAGFGLAGTAASGSGSGSDATPARSAAGYVDPEYLITYQLTDKSDVYAFGVLLVELATGRPPVERSRGGEARLTTKWKCRAGEAVVAMDPRMRRSPASVAAVERTLALAAQSVAAARDERPSMRRCSELLWTIRRDYHRQEEPRCGAVAAERSDEWVIR

SEQ ID NO: 43661 - protein, 93 aa, Zea mays
  Coding DNA Sequence Number=SeqID_1882
MTSHRRKGSTPYTAQTSEQSTWITQGDEGLHLAHALTRTRETNGLTPEEEPHKKASMQLQGLTKAHGLLLGTWEHGTQRRPQDTPRMARPSRM

SEQ ID NO: 43662 - protein, 79 aa, Zea mays
  Coding DNA Sequence Number=SeqID_1883
  Gene Ontology: Mol. function=voltage-gated ion channel activity; Cellular component=integral to membrane; Biological process =potassium ion transport
  Homolog annotation: Hit_ID=Q40648; Match level="QueryCoverage=60%, HitCoverage=14%, E-value=9e-20, Identity=93%"; Hit description =Probable voltage-gated potassium channel subunit beta (K(+) channel subunit beta)
MKHSGMSLPFCMTGIIHVESEFLPLYSTYGIGLTTWSPLASGVLTGKYTKGNIPADSRFALDNYKRYQYLATNKVTLSI

SEQ ID NO: 43663 - protein, 57 aa, Zea mays
  Coding DNA Sequence Number=SeqID_1884
MDVRAFSGIIYNVIDQQAFVEVAKGFVYKVWDWTDIRQLLNPDQTKHFISSLMVTAG

SEQ ID NO: 43664 - protein, 35 aa, Zea mays
  Coding DNA Sequence Number=SeqID_1885
MANYSIIQRTTRNYGTLWAMLQLFKGNLTSHMGIG

SEQ ID NO: 43665 - protein, 760 aa, Zea mays
  Coding DNA Sequence Number=SeqID_1886
  Gene Ontology: Mol. function=nucleic acid binding; Cellular component= beta-galactosidase complex; Biological process=DNA integration
  Homolog annotation: Hit_ID=Q7XBC6; Match level="QueryCoverage=99%, HitCoverage=47%, E-value=0.0, Identity=69%"; Hit description =Putative copia-type pol polyprotein
  Pfam annotation: Domain name=RVT_2; Domain location=334-589; Score =527.2; E_value=1.8e-155; Accession=PF07727.4; Description=Reverse transcriptase (RNA-dependent
  Pfam annotation: Domain name=rve; Domain location=1-121; Score=86.7; E_value=7.2e-23; Accession=PF00665.16; Description=Integrase core domain
  Pfam module annotation: Pfam domain module=RVT_2::rve; Domain location=334-589::1-121
EEDKSETQGTLKRFLRRAQNEFELKVKKIRSDNGSEFKNLQVEEFLEEEGIKHEFSAPYTPQQNGVVERKNRTLIDMARTMLGEFKTPECFWSEAVNTACHAINRVYLHRLLKKTSYELLTGNKPNVSYFRVFGSRCYILVKKGRNSKFAPKAVEGFLLGYDSNTKAYRVFNKSSGLVEVSSDVVFDETNGSPREQVVDCDDVDEEDVLTAAIRTMAIGEVRPQEQDERDQPSSSTTVHPPTQDDEQVHQKEACDQGGAQDDHMMEEEAQPAPPTQVRAVIQRNHPVDQILGDISKGVTTRSRLVNFCEHYSFVSSIEPFRVEEALLDPDWVLAMQEELNIFKRNEVWTLVPRPKQNVVGTKWVFRNKQDEHGVVTRNKARLVAKGYAQVAGLDFEETFAPVARLESIRILLAYAAHHSFRLYQMDVKSAFLNGPIKEEVYVEQPPGFEDERYPDHVCKLSKALYGLKQAPRAWYECLRDFLIANAFKVGKADPTLFTKTCDGDLFVCQIYVDDIIFGSTNQKSCEEFSRVMTQKFEMSMMDELNYFLGFQVKQLKDGTFISQTKYTQDLLKRFGMKDAKPAKTPMGTDGHTDLNKGVATPCFGIWYPKGSNFDLIGYSDSDYAGCKVDRKSTSGTCQFLGRSLVSWNSKKQTSVALSTAEAEYVATGQCCAQLLWMRQTLRDFGYNLSKVPLLCDNESAIRMAENPVEHSRTKHIDIRHHFLRDHQQKGDIEVFHVSTENQLADIFTKPLDEKTFCRLR

SEQ ID NO: 43666 - protein, 155 aa, Zea mays
  Coding DNA Sequence Number=SeqID_1887
EARVRLQIRVSQKSSSLLNEQDVLGNPPFSVDLPGIFWREKDEDSEWSKANDNADLEEGYDSSKDEVSSVSSYNPSKANREFSLGSSLSTQSLSSRLSTSEPFYNQVERPNFPSYSPIPGLSVSEISDDHDGGKELKLIVGYLDLRCFRILVFNS

SEQ ID NO: 43667 - protein, 430 aa, Zea mays
  Coding DNA Sequence Number=SeqID_1888
  Gene Ontology: Mol. function=transferase activity; Cellular component= membrane
  Homolog annotation: Hit_ID=Q2MGQ8; Match level="QueryCoverage=93%, HitCoverage=82%, E-value=9e-56, Identity=34%"; Hit description =Exostosin-like
  Pfam annotation: Domain name=Exostosin; Domain location=45-367; Score= 319.9; E_value=4.6e-93; Accession=PF03016.6; Description=Exostosin family
  Subcellular localization annotation: CTP_CleavageSite=30; ConfidenceScore=5.07e-01
MKRLPILVVPVLLLLLSISFFLFRPTTPPVLSSRQAFEPDRRLRVYVADLPRAFNYGLLDRYWSLRAADSRIQASSDPDHPPPHDHPPYPENPLIKQYSAEYWLLASLRAAATAPAAVRVVADWREADVVFVPFFATLSAEMELGWGTKGAFRKKDGNEDYRRQREVVDRVTSHPAWRRSSGRDHIFVLTDLSAYQLIVLLRAQHTQVSLLKDVIVPYTHLLPTLLLSENKDRRTLLYFKGAKHRHRGGLVREKLWDLLGNEPDVIMEEGFPNATGREQSIKGLRTSEFCLHPAGDTPTSCRLFDAIASLCIPVIVSDEVELPFEGIIDYTEISIFVSVSNAMRPKWLTSYLRNISKQQKDEFRRNLARVQPIFEYDTSYSSSRGSTSIDGAVSHIWKKIQQKLPMIQEAIIRDKRKPDGVSIPLRCHCT

SEQ ID NO: 43668 - protein, 543 aa, Zea mays
  Coding DNA Sequence Number=SeqID_1889
  Gene Ontology: Mol. function=oxidoreductase activity; Cellular component=nucleus; Biological process=electron transport
  Homolog annotation: Hit_ID=Q8LE44; Match level="QueryCoverage=77%, HitCoverage=86%, E-value=1e-155, Identity=64%"; Hit description =Putative amine oxidase
  Pfam annotation: Domain name=Amino_oxidase; Domain location=34-455; Score=301.9; E_value=1.2e-87; Accession=PF01593.14; Description =Flavin containing amine oxidoreductase
  Pfam annotation: Domain name=DAO; Domain location=26-359; Score=-9.2; E_value=2e-05; Accession=PF01266.14; Description=FAD dependent oxidoreductase
  Pfam module annotation: Pfam domain module=Amino_oxidase::DAO; Domain location=34-455::26-359
  Subcellular localization annotation: CTP_CleavageSite=41; ConfidenceScore=5.18e-01
MDQPPNGFAAGGFFTHIDGQNRSPPSVIVIGGGISGIAAARALSTASFKVTLLESRDRPGGRVHTDYSFGCPIDMGASWLHGVCNENSLAPLIRMLGLRLYRTSGDNSVLYDHDLESYALFDKHGQQVPQEIVSKVGETFERILKETVIVRDEHANDMPLFQAIAIVLDRNPHMKLQGLEYEVLQWCICRLEAWFATDMDNISLKTWDQEHVLTGGHGLMVNGYDPVIRALAQGLDIHLNHRVTKIIQRYNKVIVCVEDGASFVADAAIVTVPLGVLKANIIKFEPELPKEKLSAIADLGVGIENKIALKFDTVFWPDVEVIGRVAPTSNACGYFLNLNKATGNPVLVCMVAGRFAYEIEKLSDEESVNFVMSQLRNMLPQATDPVQYLVSRWGSDPNSLGSYSCDLVGKPADLYERFCAPVGSLFFAGEAACIDHSGSVHGAYSSGIAAAEDCRRRLSAQLGISAGLFQVGKAAMREEMTAEAMVPFQISRLPCLLEYSMVDAVFRQCLLGSLYFKRQASTNLKEPRAKSGGNGRTREARLD

SEQ ID NO: 43669 - protein, 181 aa, Zea mays
  Coding DNA Sequence Number=SeqID_1890
MADDRGTRWRQRGNQMLAAREPNGGGASTSGRRRGQNWTGAAECPRELDLKLLALYALVESSEHFFASDCPSKVASAGQRRHTDPSLRPLWPRQQSCVTPGLQHAALEAPEPCQAHVRVKAVTRQRSCPRERSGGTLRAGSGTRAEEPSRPLLPPCHDPYSHAWIKGSPVKVLPKKVDLTG

SEQ ID NO: 43670 - protein, 197 aa, Zea mays
  Coding DNA Sequence Number=SeqID_1891
MAPRTLYDDGGSQPPYGSEKIGSVAQRLYVRPIPHAYVMQSRPLDCTRVRVFPAPESRDPAVISLDPTQKGPGPISEPYIAKRQNRTTRLWALGGNFGNHGRVLAKFPGSRRTRSEIAIKERKTLWSHSPTAALISSPTVLPIGLLASPRLPQLSGFWAEDWGINSSIDTDPHHSCLLKLLEDTLISSRATSGSYTA

SEQ ID NO: 43671 - protein, 135 aa, Zea mays
  Coding DNA Sequence Number=SeqID_1892
MPKTVAQGLAPRARPRAREQEGDLELSEAGGAEADHGWIWARRRRVRPPETGGSCNGCREASALDLSSLVATRLLLSYAACGDIEAACWVFNGMPTKNASVFKDMAPSADPRSSFWKMLPVSQFKASLKETSVWC

SEQ ID NO: 43672 - protein, 107 aa, Zea mays
  Coding DNA Sequence Number=SeqID_1893
  Homolog annotation: Hit_ID=Q0ZPU8; Match level="QueryCoverage=65%, HitCoverage=15%, E-value=1e-07, Identity=39%"; Hit description=CXE carboxylesterase
MTMTTAPSASSSTRPHRRVCEGCGMSKVKNNNGYLGVTEPISLSYSSNSKIGSKHYGKFWSFPIVVRFHGCGFVTGSNTVVAKDAFCKKVTKLCDVIVFICSRSMFT

SEQ ID NO: 43673 - protein, 111 aa, Zea mays
  Coding DNA Sequence Number=SeqID_1894
MGGGRTKEQQQQQKLKADHLSRDLAERLTYHQKEHGLQGHFEDDRAVLPIADNGRAVDNRIVALDTLHKRLDHEQRSRHEETLGYDSSSMSKAWELLARVDHAEKVTASCR

SEQ ID NO: 43674 - protein, 179 aa, Zea mays
  Coding DNA Sequence Number=SeqID_1895
  Gene Ontology: Mol. function=protein translocase activity; Cellular component=integral to membrane; Biological process=protein transport
  Homolog annotation: Hit_ID=Q9XFJ8; Match level="QueryCoverage=99%, HitCoverage=100%, E-value=2e-44, Identity=59%"; Hit description=THA4
  Pfam annotation: Domain name=MttA_Hcf106; Domain location=88-149; Score=54.3; E_value=3.9e-13; Accession=PF02416.7; Description =mttAHcf106 family
  Subcellular localization annotation: CTP_CleavageSite=61; ConfidenceScore=5.64e-01
MGIPVVVPVAAAYSCSSSLAAPPRAAAAAARAPSRAHVAAAGMSSRASSFVGGSGGDLAAVAASVAARPRRAGSGGGGALGCKCLFGLGVPELAVIAGVAALVFGPKQLPEIGRSIGKTVKSFQQCDEWCGYRDAAKEFETELKKEPGEGGDQPPPATPTAVSGGEEKGLEASSSKESA

SEQ ID NO: 43675 - protein, 88 aa, Zea mays
  Coding DNA Sequence Number=SeqID_1896
  Gene Ontology: Mol. function=protein binding
  Homolog annotation: Hit_ID=Q75WU1; Match level="QueryCoverage=74%, HitCoverage=61%, E-value=4e-18, Identity=68%"; Hit description =Heterotrimeric G protein gamma subunit 1
EELEELDKADKVSSALQELTGLFYVARFLIAMERKADPLLPVSAGPVNQSWDRWFEGPQDLRGCKCCITSIHLRRGFWMASSKDPCKA

SEQ ID NO: 43676 - protein, 103 aa, Zea mays
  Coding DNA Sequence Number=SeqID_1897
  Gene Ontology: Mol. function=zinc ion binding
  Homolog annotation: Hit_ID=Q2QMP4; Match level="QueryCoverage=64%, HitCoverage=13%, E-value=1e-25, Identity=82%"; Hit description=LIM domain-containing protein, putative, expressed
METNECQPLYIDIQEFYEGMNMKVEQQAPLLLVERQALNEAMEAEKSVHHLPETRGLCLSEEQIVRTNHVFLESSPYNKDTFLVWQMRVEDLMRCLPLHRGHE

SEQ ID NO: 43677 - protein, 72 aa, Zea mays
  Coding DNA Sequence Number=SeqID_1898
MTEAQAGAMFYGDGDGFLTFRFNSDDAGACDWLDRLCNLLYRSSLVLSSRIMGIGVAITRDIVEIGVGTWDR

SEQ ID NO: 43678 - protein, 149 aa, Zea mays
  Coding DNA Sequence Number=SeqID_1899
MENNSRVKGYIAEEFKLKDVAHFTSCYFAQKKRMLPKTKKLTMNGLFKGPRRSITMRRCSTAPGGASLGMELGRVAPGVGPVATGVAPRGVALGMGLVAMADASGIELDGTCFVESLFVTLILEEAVAKALIIQLLVPWHEYHCMLLYI

SEQ ID NO: 43679 - protein, 97 aa, Zea mays
  Coding DNA Sequence Number=SeqID_1900
MTLGTSTAATQESPARATTAMGTTGRHSELGLKATLATRAELGTDGEGRSSGEVLRNTTKSSSSALAWELCEKQGERAWTSSWGKGGVRGRGVAFIS

SEQ ID NO: 43680 - protein, 107 aa, Zea mays
  Coding DNA Sequence Number=SeqID_1901
MALGPSAKGVSSDLIVVVSVDAMVRGHLQPLDYAQAATPTIANAQDAERWWEESSKGATEVGAVRGGRLDGAGVAQRGLGRGGQRRGQGWRRGVSGKAAARCGCWFG

SEQ ID NO: 43681 - protein, 700 aa, Zea mays
  Coding DNA Sequence Number=SeqID_1902
  Homolog annotation: Hit_ID=Q2QNC7; Match level="QueryCoverage=24%, HitCoverage=20%, E-value=5e-13, Identity=31%"; Hit description =Expressed protein
MAQLLHHQDSGFYDKELHGCRWGSRRRSRSYAPLKNEDSEILDDDKNTEVTKKQKASQKNSGKASLRSLILRKLYGKEGQEEKMLPVAPKLLRTISVYYLENNEYVLDGESTSSGDGSSHSTNSSMQNATNMNLHHARCSIPDGCGSDSSSSLLLKTDDISMKRKSHRSISMDGVLHKVPYGKKVSGDVISEGLPRSASATYDRDGVKPYFGTATKRHVNQGFRRSRSLSESWESYSRLLDSISSNESKRVLTSSKSTRVHSPDGPSVIASLQRTSEAFRSQGLDKRDENLVTAEDASAPHFEEKTDVDVDVEVAKGESSSDTVPGGSENPPLPDEYVDHKSEEDTCTAPSPSEAVDVSEEQTVSCDDNNQVPSSEVKLYGDCSTSSGIDIPEEHAEIYDDNQIHSSTQADSYTSLSSKGITISEEHTSTSHENQMHPFQISKPIEGTFCAPYPGGEFEADISLSCEQETESPMSILHVAFSDDPDSPVKHTPLDDTLLNPRILHLDNADASAGTAAIQKGDFDGLQVDPRHEIEFNHVKDIFKKSSFSNEILFDEWCSQNITALQEVDCQHYEAAAASFDFTDMSADQLLLFDLTNEGLLDIYKKYSVSESRFSWFSSFDRPKPVGNRVLKELWSGLSCHLDERPRSSIEVDTILSNDLVARSDPWTTFSGDADHVGNKLVDFVFDKLLTELVLQLAEF

SEQ ID NO: 43682 - protein, 160 aa, Zea mays
  Coding DNA Sequence Number=SeqID_1903
  Pfam annotation: Domain name=Metallothio_2; Domain location=1-80; Score=144.9; E_value=2.1e-40; Accession=PF01439.8; Description =Metallothionein
MSCCGGNCGCGSGCKCGNGCGGCSKMYPDMAEQVTTTTQALIMGVAPSKGHAEGGFEAAAGAENGGCKCGGNCQCDPCNCGNQLRAMACSESEMMMMADGGVVSSPGLLGRFWRAHEHDPKIRAQSTARHEIIWTGLARPEGGLGTGLNFRPVRPPARPA

SEQ ID NO: 43683 - protein, 78 aa, Zea mays
  Coding DNA Sequence Number=SeqID_1904
  Subcellular localization annotation: CTP_CleavageSite=60; ConfidenceScore=5.47e-01
MPPRPGRRRAPTAALALGPDAAAPHGRPRPRPQRRRASTLVLETSPCRGEVFLAAAGLPRVATAPTRHSPTSLTPPPP

SEQ ID NO: 43684 - protein, 48 aa, Zea mays
  Coding DNA Sequence Number=SeqID_1905
MGPLGTVVLGREENIFVENLLDFLDVEKPTNDGVSKDHKTQSSANVVW

SEQ ID NO: 43685 - protein, 513 aa, Zea mays
  Coding DNA Sequence Number=SeqID_1906
  Gene Ontology: Mol. function=trans-2-enoyl-CoA reductase (NADPH) activity; Cellular component=integral to membrane; Biological process=sphingolipid metabolic process
  Homolog annotation: Hit_ID=Q5ZED1; Match level="QueryCoverage=56%, HitCoverage=92%, E-value=1e-161, Identity=90%"; Hit description =Putative synaptic glycoprotein SC2
  Pfam annotation: Domain name=Steroid_dh; Domain location=380-512; Score=69.5; E_value=1.1e-17; Accession=PF02544.7; Description=3-oxo -5-alpha-steroid 4-dehydrogenase
MAAVVDGEDDPVVDGERRANHWQGCEFGIEWVRIGADEGQLSEKSCNFFYPSAALLNLYNSVTRHGKSVSVRGPCPGMIVGSAAELNGGRSPLGGRWAARATPQPTAARSRCAAQALFTQLSMLLLLRVWGAVDTVHIKMLSHITPVGVGPTPPTCTLPSPAPPRDQIRRLRPSTPSPPPSPLLSSPLPRIHGRRQQAATRRSSRLSPRSAASLPRLPVGGRMKVTVVSRSGREVVKGGIDLKDSAKVADLQEAIHARTKKYYPSRQRLTLPLQPGKGGKPVVLSPKASLLEYCEKGSGSLTVVFKDLGPQVYYSTLFFFEYLGPLIIYPMFYYLPVYKYFGHEGERAMHPVQTYAMYYWCFHYFKRIMETFFVHRFSHATSPLSNVFRNCAYYWTFGAYIAYYCNHPLYTPVSDLQMKIGFGFGVVCQVANFYCHILLRNLRSPSGSGGYQIPRGFLFNIVTCANYTTEIYQWVGFNIATQTVAGYVFLVVAAGIMTNWALGKHSRLKKART

SEQ ID NO: 43686 - protein, 170 aa, Zea mays
  Coding DNA Sequence Number=SeqID_1907
  Gene Ontology: Mol. function=ATP-dependent helicase activity; Cellular component=endoplasmic reticulum
  Homolog annotation: Hit_ID=Q5ZEI8; Match level="QueryCoverage=83%, HitCoverage=85%, E-value=1e-47, Identity=57%"; Hit description =Putative tyrosine phosphatase
  Pfam annotation: Domain name=PTPLA; Domain location=28-162; Score =35.7; E_value=9.9e-10; Accession=PF04387.5; Description=Protein tyrosine phosphatase-like protein, PTPLA
MAAGDDGSAVRRLYLSVYNWVSFFGWLQVLYHVTLALLGSGHQAVYAAVKLPLLFSQTAALAETQSHVLVTSLVLSWSITEVIRYPFFGLREAFGITPSWLLWLRYSTFTVLYPVGLISELGLIFTAMPHMKGRSFYICAALTTIYIPGEVHLPRSTPVAPSAADLRHRL

SEQ ID NO: 43687 - protein, 165 aa, Zea mays
  Coding DNA Sequence Number=SeqID_1908
  Homolog annotation: Hit_ID=Q5ZEI8; Match level="QueryCoverage=41%, HitCoverage=38%, E-value=1e-18, Identity=61%"; Hit description =Putative tyrosine phosphatase
  Pfam annotation: Domain name=PTPLA; Domain location=54-159; Score= -7.5; E_value=2e-06; Accession=PF04387.5; Description=Protein tyrosine phosphatase-like protein, PTPLA
MKIVRVGEVSSLCNSSTNWIQIIPHVRCLVEFSRGLKAFARTREHAVDGYVTFRTLRLVNYSIFKSDNGTQSHLLATALIISWSVTEIIRYSFFAMKEAFGSAPSWLSWLCSFMLFYPTCISSEVGLIYMALPYMKVSLSLLDRPPFFFLFASVPYKKKGTYNLI

SEQ ID NO: 43688 - protein, 925 aa, Zea mays
  Coding DNA Sequence Number=SeqID_1909
  Gene Ontology: Mol. function=RNA-directed DNA polymerase activity; Cellular component=intracellular; Biological process=RNA-dependent DNA replication
  Homolog annotation: Hit_ID=UPI00005A975E; Match level="QueryCoverage =99%, HitCoverage=52%, E-value=0.0, Identity=87%"; Hit description =PREDICTED: similar to Retrovirus-related Pol polyprotein from transposon 297
  Pfam annotation: Domain name=RVT_1; Domain location=56-225; Score =146.9; E_value=5.3e-41; Accession=PF00078.17; Description=Reverse transcriptase (RNA-dependent
  Pfam annotation: Domain name=RnaseH; Domain location=455-582; Score =15.7; E_value=2e-06; Accession=PF00075.14; Description=RNase H
  Pfam annotation: Domain name=rve; Domain location=787-925; Score =79.1; E_value=1.4e-20; Accession=PF00665.16; Description=Integrase core domain
  Pfam module annotation: Pfam domain module=RVT_1::RnaseH::rve; Domain location=56-225::455-582::787-925
MPGIPRDVAEHSLDIRAGARPVKQPLRRFDEEKRRAIGEEIHKLMAAGFIKEVFHPEWLANPVLVRKKGGKWRMCVDYTGLNKACLKVPYPLPRIDQIVDSTAGCETLSFLDAYSGYHQIRMKESDQLATSFITPFGMYCYVTMPFGLRNVGATYQRCMNHVFGEHIGRTVEAYVDDIVVKTRKASDLLSDLEVTFRCLKAKGVKLNPEKCVFAVPRGMLLGFIVSERGIEANPEKIAAITSMGPIKDLKGVQRVMGCLAALSRFISRLGERGLPLYRLLRKTECFAWTPETEEALGNLKALLTKAPILVPPADGEALLVYVTATTQVVSAAIVVERQEEGHALPVQRPVYFVSEVLSETKIRYPQVQKLLYAVILTRRKLRHYFESHPVTVVSSFPLGEIIQCREASGRIAKWAMEIMGETISFTPRKAIKSQVLADFVAEWVDTQLPTAPIQPELWTMFFDGSLMKTGAGAGLLFISPLGKHLRYVLRLHFPASNNVAEYEALVNGLRIAIELGVRRLDVRGDSQLVIDQVMKNSHCRDPKMEAYCDEVRRLEDKFHGLELNHIARRYNETTDELAKIASGRTTVPPNVFSRDLHQPSVKIDDSPEPEVPSAQPEAPSARPEAPSARPEAPSVQPEVPSASEGEALHVEEERSGATPDRNWQTPYLQYLRQGELPLDRAEARRVARRAKSFVLLGDEKELYHRSPSGILQRCISIAEGQELLREIHSGACGHHAAPRALVGNAFRQGFYWPTAVADATRIVRTCEGCQFYAKQTHLPAQALQTIPITWPFVVWGLDLVGPLQKAPGSYTHLLVAIDKFSKWVEVRPLNSIRSEQAVTFFTNIIHRFGVPNSIITDNGTQFTGRKFLDFCEDHHIRVDWAAVAHPMSNGQVERANGMILQGLKPRIYNDLNKFGKRWMKELPLV

SEQ ID NO: 43689 - protein, 407 aa, Zea mays
  Coding DNA Sequence Number=SeqID_1910
  Gene Ontology: Mol. function=oxidoreductase activity; Cellular component=intracellular; Biological process=auxin mediated signaling pathway
  Homolog annotation: Hit_ID=Q52QX9; Match level="QueryCoverage=84%, HitCoverage=99%, E-value=1e-146, Identity=76%"; Hit description =Aldo/keto reductase AKR
  Pfam annotation: Domain name=Aldo_ket_red; Domain location=71-377; Score=211.7; E_value=1.6e-60; Accession=PF00248.11; Description =Aldoketo reductase family
  Subcellular localization annotation: CTP_CleavageSite=78; ConfidenceScore=5.05e-01
MGAASRLVTYVPLGFGLRSCNIKATELRPRFTQHSSSQVEPPAPQPPGGQDSRDRESMAAAPMVVPRVKLGSQGLEVSAQGLGCMGMSAYYGPPKPEPDMIALIHHAVAAGVTLLDTSDVYGPHTNELLLGRALRAAGGVREKVQLATKFGIRADADDGAWEIRGDPAYVRAACEGSLQRLGVGCIDLYYQHRIDNRVPIEVTVGELKKLVAEGKIKYIGLSEASASTIRRAHAVHPISAVQLEWSLWSRDVEADIIPTCRELGIGIVAYSPLGRGFLSSGPTMVDKLSDQDFRKELPRFQPENLEKNAVIFERVNAMAARKGCTPSQLALAWVHHQGADVCPIPGTTKVENFNSNVAALSVELTPQDMAELESYASAGVQGDRYHDFLNTWKDSETPPLSSWKADE

SEQ ID NO: 43690 - protein, 218 aa, Zea mays
  Coding DNA Sequence Number=SeqID_1911
MGCYFTKDNLIKRSGQTLVGIGFGLTIVNPVANRTRNADCFDNKIIKDYMHGVFFHHRASLQMEGMKQQLIEMGKKTSLVFVNPATQETTVLASDDTTMAKELEADVQECSKEKNEVRLHRQKHDNVRVTGPGWAMLLEGANSLPQDDRQMNMTQPNVSNMSRETPEEAADEEETALSSKEQQRQTKKGESQPDLPEDHEVVQQHEEQEGDGDRKPKP

SEQ ID NO: 43691 - protein, 272 aa, Zea mays
  Coding DNA Sequence Number=SeqID_1912
  Gene Ontology: Mol. function=unfolded protein binding; Cellular component=prefoldin complex; Biological process=protein folding
  Homolog annotation: Hit_ID=Q7F099; Match level="QueryCoverage=98%, HitCoverage=33%, E-value=5e-93, Identity=69%"; Hit description =Plectin-like protein
MCRLRANLDETRLALEVRNSSLEKLQQSVLEKEQLLDKVQGSLQSAENKGMAIISELTAKHQKQIESLQAQLAEVSAERTKASETIQSLQVVLTEKDSEIAEIEAASTGEAARLRAALEEMKGELVHLKDEHEKERQSWESTCESLRSKLEASENACLRSEKESAEVKSQLELELSTRSQLLQTKDSDLMAAKHEISRLESEFSAYKVRAHALLQKKDAELTAAKSSDFIKEHEEAIREAEKEVAAALAERDKAIDDLQKAESRHGDEIEAR

SEQ ID NO: 43692 - protein, 175 aa, Zea mays
  Coding DNA Sequence Number=SeqID_1913
  Homolog annotation: Hit_ID=Q7F099; Match level="QueryCoverage=90%, HitCoverage=22%, E-value=8e-23, Identity=41%"; Hit description =Plectin-like protein
MDPEDTTPPAPSQGDAETTPPPVLEVAAGEDSLASGGEAAERAHEEEELAREVMELGLQNEYLRSQIAGVRPAGDADEVPGLVRGWKEQVERMSREVQEQRLTREATEKALEHVNVAYAEADGKVQELTAKLAQVCHIASKSLSLRVVSEKPKTQLTTEFFPAFIGKGATSLHVS

SEQ ID NO: 43693 - protein, 339 aa, Zea mays
  Coding DNA Sequence Number=SeqID_1914
  Subcellular localization annotation: CTP_CleavageSite=11; ConfidenceScore=5.09e-01
GQRRLRHSDCSATRQSESDRQSGLAKGATANSAPPDPRARTRAKTRKTANSAPPDPRARTRAKTRKTANSAPPDPRARTRAKTRKTANSAPPDPRARTRAKTRKTANSAPPDPRARTRAKTRKTTKLRLARPQGSDSALASAERLPPRPTPWLGLGHGNRRQTQPRLRRKPHVALPRAQTATSTGDAIIIPPRIDSGQRQQGLDRSNSCPSIRLRRTSDSHDITPAGCPDLSGCHIGMAFSEKVGRAGPRTGQALSWGRSLPSPAWTLVTPLLQAHLTWARDEHEGRGTSTSLTLGSGRLAFPPSRSPTRSTHLGWGTQRHSLVGLGTPRSRNADSWRA

SEQ ID NO: 43694 - protein, 139 aa, Zea mays
  Coding DNA Sequence Number=SeqID_1915
MSYRCRTVTEMQVEGMQRHRMTWDLLILAELHLWRCLARTFDDPFVAVAPSFDPCVEFEIAGAGNADWLQQGTVTRCQSCAGGALAEENGRDQVVRLRLQAGRTGGADGSTCAPATADHSCRWPIDEGDEDSRRVWRLR

SEQ ID NO: 43695 - protein, 511 aa, Zea mays
  Coding DNA Sequence Number=SeqID_1916
  Homolog annotation: Hit_ID=Q1SR88; Match level="QueryCoverage=16%, HitCoverage=18%, E-value=3e-07, Identity=34%"; Hit description=IMP dehydrogenase/GMP reductase
  Pfam annotation: Domain name=DUF674; Domain location=1-475; Score =81.4; E_value=1.5e-24; Accession=PF05056.3; Description=Protein of unknown function (DUF674)
MAKPEGPTIGVKLFVDKEKKKVLFAESDKEFVDVLFSFLTMPLGTIVRLLDKQSQMGCLDQLYKSVEDLNLEYFQTSACKAMLLKPLNAASGHCRRLKINVDGSVPRVVYVCKDTSCSALSDNAFSSFPGTVCKCGKVMESIGQCPKYDGDTETAAAAACSEDGVFVKGCLKFIVTHDLQVAPATTSLMMSLFEKFGVLDPAVLEQQVLQFSSEKITCLLKRLLTSKQPLTDHYFEAPVPQDDASLEALVQNLHPKQESEDQEMPGNLKIRVLQTKDDSALLYAEVGVDFVDSLFSLLSIPLGSAIKLYGQCSAKGCLGNVYRSIDGSVQEFVREECQSLLLDPKLPPFFGCCASKILQVDELAPRELTIKACFVCFKSLGFSGCSLCHGYYNSNYVFVKCGNMVKSIKLCEANPKQKGGCEKGEVYVSRKANFLVTDDLRVLPLSLASTVKIVSDSKIQTSNLVVKEITLTKSKVMELQRAVLLLSRNILSSVLLHPKKNKKLHHYHRMY

SEQ ID NO: 43696 - protein, 918 aa, Zea mays
  Coding DNA Sequence Number=SeqID_1917
  Gene Ontology: Mol. function=serine-type endopeptidase activity; Cellular component=nucleus; Biological process=proteolysis
  Homolog annotation: Hit_ID=Q9LFE2; Match level="QueryCoverage=92%, HitCoverage=93%, E-value=0.0, Identity=59%"; Hit description=WD40 -repeat protein
  Pfam annotation: Domain name=Utp13; Domain location=712-847; Score =226.9; E_value=4.4e-65; Accession=PF08625.1; Description=Utp13 specific WD40 associated domain
  Pfam annotation: Domain name=WD40; Domain location=107-145; Score =42.0; E_value=2e-09; Accession=PF00400.22; Description=WD domain, G -beta repeat
  Pfam annotation: Domain name=WD40; Domain location=149-189; Score =46.4; E_value=9.5e-11; Accession=PF00400.22; Description=WD domain, G-beta repeat
  Pfam annotation: Domain name=WD40; Domain location=193-231; Score =39.7; E_value=1e-08; Accession=PF00400.22; Description=WD domain, G -beta repeat
  Pfam annotation: Domain name=WD40; Domain location=355-394; Score =4.5; E_value=11; Accession=PF00400.22; Description=WD domain, G-beta repeat
  Pfam annotation: Domain name=WD40; Domain location=398-439; Score =38.7; E_value=2e-08; Accession=PF00400.22; Description=WD domain, G -beta repeat
  Pfam annotation: Domain name=WD40; Domain location=443-482; Score =39.7; E_value=9.9e-09; Accession=PF00400.22; Description=WD domain, G-beta repeat
  Pfam annotation: Domain name=WD40; Domain location=496-534; Score =31.7; E_value=2.5e-06; Accession=PF00400.22; Description=WD domain, G-beta repeat
  Pfam annotation: Domain name=WD40; Domain location=538-576; Score =37.3; E_value=5.1e-08; Accession=PF00400.22; Description=WD domain, G-beta repeat
  Pfam annotation: Domain name=WD40; Domain location=580-618; Score =39.6; E_value=1e-08; Accession=PF00400.22; Description=WD domain, G -beta repeat
  Pfam annotation: Domain name=WD40; Domain location=622-660; Score =23.1; E_value=0.001; Accession=PF00400.22; Description=WD domain, G -beta repeat
  Pfam annotation: Domain name=WD40; Domain location=65-103; Score =16.7; E_value=0.082; Accession=PF00400.22; Description=WD domain, G -beta repeat
  Pfam module annotation: Pfam domain module=Utp13::WD40::WD40::WD40::WD 40::WD40::WD40::WD40::WD40::WD40::WD40::WD40; Domain location=712 -847::107-145::149-189::193-231::355-394::398-439::443-482::496
MASSSTCVLKKNYRCDRSLQQFYTGGPFAVGLAPGGDGEGGAEAEAFLACACGGEVRVVSSADASAIGEPVDGDSEAITALALSPDSRLLFAAGHSRLIRAWDLASRACIRSWKGHDGPIMAMACHVSGGLLATAGADKKVCVWDVDGGFCTHFLRGHTGVVTSVMFHKDPKRLLLFSGSEDGTVRVWNLETKKCVAVLKEHFSAVTSLALSDDGQTLLSAGRDKIVTAWDIRKYSSKKTIPTYEMIEAVSFIGPGSEFLACLGIELANKKEKDTAYFLTVGERGVVRIWCLESCLCVFEQQTSDVTVNSENKETRRGFTSAVMLPNEQGLLCVTADQQFLFYCPKRTDDGTFELSLYRRLIGYNDEILDLKFIGEEEQYLAVATNLEQVRVYDVASMSCSYVLAGHTEIIVCIDTCVSASGKTLVVTGSKDNTVRLWDAERKSCIGIGKGHLGAVGSVAFSKKTKDFFVSGSSDRTIKVWTWDNTLGDAEDEVPLKAKAVVAAHDKDINYLTVSPNDGLVCSGSEDRTACIWKLPNLVFSVALKGHKRGIWSVEFSPVEQCVMTSSGDRTIKIWSVADGSCLKTFEGHTSSVLRASFLSRGTQVVSCGSDGLVKLWTIKTNECIATYDKHDGKVWALAVGRKTEMVATGGTDAVLNLWHDCTMEDKQEDFRKKASETFCDTLVFIIASKMLAFGKTVKYLTLDLEQEVLRGQELENAVSDSDYAKAIQLAFELRRPHKLLDLFSQLARRADAEDPIEKALLGLPKDGLRVLLEYAREWNTKPKFCHVAQFVLFRVLRSFSPTDILEIKGISELLEGLIPYSQRHFSRVDRLVRSTFLLDYTLTRMSVVDPDVDAGSIKDEMNGSSVENGELAEPRPASPVPEKSSKKRKSGKSSKKGKEKVMKLASSGLGKGVSVEA

SEQ ID NO: 43697 - protein, 297 aa, Zea mays
  Coding DNA Sequence Number=SeqID_1918
  Gene Ontology: Mol. function=DNA binding; Cellular component=nucleus; Biological process=regulation of transcription
  Homolog annotation: Hit_ID=Q2A704; Match level="QueryCoverage=99%, HitCoverage=99%, E-value=3e-64, Identity=46%"; Hit description =Transcription factor MYB2
  Pfam annotation: Domain name=Myb_DNA-binding; Domain location=15-83; Score=42.2; E_value=1.7e-09; Accession=PF00249.21; Description=Myb -like DNA-binding domain
MGRSPCCCHDAGVKKGPWTEEEDRTLVEHIKRHGGHVSSWRDLPKAAGLNRCGKSCRLRWSTIATHLDGRTDNEIKNYWNTHIRKKLVRMGIDPVTHQRLPPEDIIASPMAILSAAASLGGLHSALMQVQALQLLLQAVNNDGGRSAAAGGLIMPDILNAAADNAILINNASRSSVVPSLQDQTNLPAASHANYYGSPDHHLSSNIASFADQQHDDASAPVVGCAYAEPLAAALVSAAYPQEVAAAAEGWPVQGFAELLSGPIEMQVQTKARTCSLEEDDQDDFWKDMLLESSRLPL

SEQ ID NO: 43698 - protein, 284 aa, Zea mays
  Coding DNA Sequence Number=SeqID_1919
  Gene Ontology: Mol. function=protein serine/threonine kinase activity; Cellular component=chloroplast; Biological process=protein amino acid phosphorylation
  Homolog annotation: Hit_ID=Q5VRF2; Match level="QueryCoverage=89%, HitCoverage=62%, E-value=1e-112, Identity=79%"; Hit description =Putative serine/threonine protein kinase
  Pfam annotation: Domain name=Pkinase; Domain location=84-283; Score= -11.2; E_value=6.8e-08; Accession=PF00069.15; Description=Protein kinase domain
  Pfam annotation: Domain name=Pkinase_Tyr; Domain location=84-264; Score=-29.9; E_value=1.2e-10; Accession=PF07714.7; Description =Protein tyrosine kinase
  Pfam module annotation: Pfam domain module=Pkinase::Pkinase_Tyr; Domain location=84-283::84-264
MQHPAAGCSSWSNGKPGGIFDTAEERSQEGAVETRYLNASIRELGDHFQTKRDGENGVDASIEKRTPKLLQFTFQELKSATLNFRPGNILGEGGFGYVFNGWIEPNSTAPAKPGTGVTVAVKSLKPDALQGHREWVLHHKHLVKLIGYCIEDDQRLLVYEFMARGSLENHLFRRALPLPWSNRMKIVLGAAKGVAFLHGGPKPVIYRDFKTSNVLLDVEYNAKLSDFSLAKAGPQGDKTHVYTRVVGTYGYAAPEYVMTDAFFLGPSPMGNNGDDQRLGLSRGS

SEQ ID NO: 43699 - protein, 169 aa, Zea mays
  Coding DNA Sequence Number=SeqID_1920
MRNAGATLRVSLRSESDEVAAARFYRNRSIERRAEIQPCHGFAPSSESADGRVGRSAIHGAVLGGGSTAWYRRPSIAAMGFEGGGSALLKEATRMEGSAGFVGGDPRGWKRALGIRAVKAQNGRRGRQDEGGGWKERGRAAGCGARSGRGRDAGCARQNVHHGRCGRLH

SEQ ID NO: 43700 - protein, 631 aa, Zea mays
  Coding DNA Sequence Number=SeqID_1921
  Gene Ontology: Mol. function=small conjugating protein ligase activity; Cellular component=integral to membrane; Biological process=protein modification process
  Homolog annotation: Hit_ID=Q01EG5; Match level="QueryCoverage=48%, HitCoverage=73%, E-value=1e-42, Identity=31%"; Hit description=[O] KOG1815 Predicted E3 ubiquitin ligase
  Pfam annotation: Domain name=IBR; Domain location=408-504; Score =15.4; E_value=0.0005; Accession=PF01485.11; Description=IBR domain
  Pfam annotation: Domain name=RWD; Domain location=138-280; Score =88.7; E_value=1.8e-23; Accession=PF05773.12; Description=RWD domain
  Pfam annotation: Domain name=zf-C3HC4; Domain location=340-389; Score= 2.9; E_value=0.079; Accession=PF00097.15; Description=Zinc finger, C3HC4 type (RING finger)
  Pfam module annotation: Pfam domain module=IBR::RWD::zf-C3HC4; Domain location=408-504::138-280::340-389
  Subcellular localization annotation: CTP_CleavageSite=44; ConfidenceScore=5.10e-01
MPRKSHKARGAAAHAAVGLTAGPRPPLKATAPNPSAAAELPQVVVAEAEGLKVPDAGASAAADALERLHVAPAPDGDPPPPEPVHEPAAPPQPPPAEASSSGRSAAGGSWEEEAVRKLRELAEVSRDETELTEEEVRANDQRQEDEICALEAIFGDAVVILDRKGGQRSFQVLVHIEVPDYIDVSTKLSYGDGTLNYAATHDDDDLFYKFRVEHLPPILLTCLLPTSYPSHRPPFFTISTYWLDKGMISPLCRMLDMLWEEQQGMEVTYQWVQWLQSCSLSHLGFTNEVVLRKSYVTCYADGEDKRACPDYASPDVIIPRMMRYNDNKHHEAFLHAIHDCMICLSECPGVDFIKLPCHHFFCWKCMQTYCKMNVKEGNVVKLLCPDTKCEGAVPPNVLKRLLGEDEYERWEGLLLQKTLDAMKDVVYCPRCQTACLEDVGNEAKRQESGNVQGDQMKVLQELRSLKEIMKDSKQCPKCRMAISKTEGCNKMHCENCGEYFCYQCNRAITGYEHFRGSCVLFPQEELDRWEMQMNQRVGRQIVAHAHAAIHGQNGQAHPCPTCRQPSPKNQTNALALPLMYLLGNFGRSETTTTSSVGHARSIFVPCAIRLSKSPHSIMAPKDASNIRQIPE

SEQ ID NO: 43701 - protein, 156 aa, Zea mays
  Coding DNA Sequence Number=SeqID_1922
MKMTCGRTSPVVAAVLVALAVVAAAVGPAPKRRGQEIHLFEATVRFPDDGVDELDYNYRLLAKVLGRSHAWLMDLSILHSPPRLKQLYLPVFYPVFFLLDDLSVEAARRATYDSELGVFSALITNNQGRRLSKVPGVLKVTRLEDPPSLPETDGHL

SEQ ID NO: 43702 - protein, 168 aa, Zea mays
  Coding DNA Sequence Number=SeqID_1923
MTNKHMLEENVLNQVEMMLRGVVNARAPHSYSAWNLPPVPVTAPVVVNLDDNQLGAGLEDVVEGGGGVRTGRYVVEEGDDEEEEEVLPLVWHEQRSKACSNTSNLAAVEMMNIRGLTMSVVDGVLEDNIPEDLLLELLETRVVDVRTKCLVEVSSASLLAEPEVSLPV

SEQ ID NO: 43703 - protein, 257 aa, Zea mays
  Coding DNA Sequence Number=SeqID_1924
  Gene Ontology: Mol. function=nuclease activity; Biological process =response to DNA damage stimulus
  Homolog annotation: Hit_ID=Q2VZE7; Match level="QueryCoverage=46%, HitCoverage=89%, E-value=5e-24, Identity=47%"; Hit description =Uncharacterized protein affecting Mg2+/Co2+ transport
  Pfam annotation: Domain name=DUF525; Domain location=126-249; Score =166.2; E_value=8.2e-47; Accession=PF04379.5; Description=Protein of unknown function (DUF525)
  Pfam annotation: Domain name=UVR; Domain location=90-118; Score=8.7; E_value=0.051; Accession=PF02151.9; Description=UvrBuvrC motif
  Pfam module annotation: Pfam domain module=DUF525::UVR; Domain location=126-249::90-118
MKSQISLWTLFVLHSFNSPRKDEEGEEVVRREKEEKAVTVASDEKPEHSPKSGLFVDLYLGIGLAGLQGSSEVEGLAEVLRGEGAHVVPRRLMKKAIEEERFEDAAKYRDELKILAPHSLLKCSSDATTLGIRVQVRSVYIESRSQPLKGQFFFAYRIRITNSSQRPVQLLKRHWIVTDGNGRTENIWGVGVVGEQPVIFPKTGFEYSSACPLSTPNGRMEGDFEMKHIDKAGSSTFNVAFAPFSLSILGDDNDVLL

SEQ ID NO: 43704 - protein, 53 aa, Zea mays
  Coding DNA Sequence Number=SeqID_1925
MPLERYLEIWMYNIRFAKEDMLKATNEILQEKFKSQGLFAEGGCELKSLTIQN

SEQ ID NO: 43705 - protein, 143 aa, Zea mays
  Coding DNA Sequence Number=SeqID_1926
  Gene Ontology: Mol. function=oxidoreductase activity; Cellular component=anchored to membrane; Biological process=lignin catabolic process
  Homolog annotation: Hit_ID=Q9LX04; Match level="QueryCoverage=77%, HitCoverage=18%, E-value=2e-52, Identity=89%"; Hit description =Putative Bplo
  Subcellular localization annotation: CTP_CleavageSite=59; ConfidenceScore=5.07e-01
MEYRHVAMSNQIFMCTLNHVCLYALASHSTFLSHRMNVSTGAARPNPQGSFHYGSINVSQVYKMRNEPPVIINGKKQTTLSGISYSPPDTPLRLADLYDKKDVYTLDFPTMPIDGPLVIRTSVINSTYKNFLEIVFQNNDSTV

SEQ ID NO: 43706 - protein, 178 aa, Zea mays
  Coding DNA Sequence Number=SeqID_1927
MIGSKGGKGKHGRMDQYGKRKRPMTPPSEDFSDSKFSEEWFSFEGEESPPLARLEGSDDSKEEDSSEDFEEEGGGGDDGSDYDGDNDGNGGGRGSGGTSGGDDSGYDDINEGGNNKGGGGGSGNVGGGAPPMKKKQGNIVPVIPPSIPIVNSPSTGITVPTEDTHDSIVFVPFLIRGL

SEQ ID NO: 43707 - protein, 160 aa, Zea mays
  Coding DNA Sequence Number=SeqID_1928
  Subcellular localization annotation: CTP_CleavageSite=46; ConfidenceScore=5.40e-01
TFRQPAAAPPCSPPTAIADTARRPPTAPLPPATPRPRRPATGLPARAAPPPDGHGRAAPPPDGHARPAPPPDGHARAAPPPDGHARAAPARAGPARKLHRAAQEAPPPTPVPRPRPVPANPAKPSSLPAPAPGRRHTAPLLARIVVVHPRPRPSSYCDKC

SEQ ID NO: 43708 - protein, 154 aa, Zea mays
  Coding DNA Sequence Number=SeqID_1929
  Gene Ontology: Mol. function=RNA-directed DNA polymerase activity; Cellular component=mitochondrion; Biological process=RNA-dependent DNA replication
  Homolog annotation: Hit_ID=UPI00004C1731; Match level="QueryCoverage =99%, HitCoverage=14%, E-value=4e-48, Identity=52%"; Hit description =UPI00004C1731 related cluster
MEAYCDEVRRLEDKFYGLELNHIARRYNETADEMAKIASGWTTVPPDVFSRDLHQPSVKTDDTPEPEKKAPEGYTHLLVAIDKFSKWIEVRPLNSIRSEQAVAFFTNIIHRFVVPIFIITNNGTQFTGRKFLDFCEDHHIRVDWVAVAHPMMNG

SEQ ID NO: 43709 - protein, 365 aa, Zea mays
  Coding DNA Sequence Number=SeqID_1930
  Gene Ontology: Mol. function=Rab GTPase activator activity; Cellular component=intracellular; Biological process=regulation of Rab GTPase activity
  Homolog annotation: Hit_ID=Q6Z973; Match level="QueryCoverage=99%, HitCoverage=100%, E-value=1e-173, Identity=77%"; Hit description =GTPase activator protein-like
  Pfam annotation: Domain name=TBC; Domain location=129-331; Score =171.9; E_value=1.6e-48; Accession=PF00566.9; Description=TBC domain
MFGIQTRDVAEDFNSWRRTLRNTPTVSMPMNNHNIMYNTGKSLFNVHLMSVKFEDLYGFMVEGNVDDVNVLNEVRERIREQGRVWWALEASKGANWYLQPKISSNEGVISVTSLKLSVLTNTITLRRLIRKGVPPVLRPKIWLSVSGAAKKRSTVPETYYDELIRATEGKTTPATRQIDHDLPRTFPCHPWLNSDKGQASLRRVLVGYSFRDSEVGYCQTEEDAFWMLAVLLENVLVSDCYTDTLSGCHVEQRVFKDLLAKKCPRIAAHLEAMGFDVSLVATEWFLCLFSKSLPSETTLRVWDILFNEGANVLFRVALAIFKFAFDKIGSMPTNTITKERKKQETVVLAELDQRTRRLSSLKMDG

SEQ ID NO: 43710 - protein, 108 aa, Zea mays
  Coding DNA Sequence Number=SeqID_1931
MAHYAAACKQGNGAWAPRGVATAMEALAAGVQERGGAEPIWEQGVVQGARPQVKGDARACRGRHGKARPRPWERRGKEEGEPAALRGRGIGRAPGRGDGSRELGGHHG

SEQ ID NO: 43711 - protein, 408 aa, Zea mays
  Coding DNA Sequence Number=SeqID_1932
  Gene Ontology: Mol. function=RNA-directed DNA polymerase activity; Cellular component=mitochondrion; Biological process=RNA-dependent DNA replication
  Homolog annotation: Hit_ID=UPI00004C1731; Match level="QueryCoverage =99%, HitCoverage=25%, E-value=0.0, Identity=81%"; Hit description =UPI00004C1731 related cluster
  Pfam annotation: Domain name=rve; Domain location=227-386; Score =97.8; E_value=3.3e-26; Accession=PF00665.16; Description=Integrase core domain
MFFDGSLMKTGAGLGLLFISPLGKHLRYVLRLHFPASNNVAEYEALVNGLRIAIELGVRRLDARSDSQLVIDQVMKNSHYCNLKMEAYCDEVRRLEDKFYGLEQTPYLQYLHRGELPLDRAEARRLARRAKSFVLLGDGKELYHRSPSGILQRCISIAEGQELLQEIHSGACGHHAAPRALVGNTFRQGFYWSTAVADATRIVRTCQGCQFYARQTHLPTQALQTIPITWLFAMWGLDLVGPLQKAPGGYTHLLVAIDKFSKWIKVQPLNSIRSEQAVAFFTNIIHRFGVPNSIITDNGTQFTDRKFLDFCEDHHIWVDWAAVAHPMTNGHVEHANGMILQGLKPRIYNDLHKFGRRWMKELPLVVWSLRMTPSQATGFTPFFLVYGVETILPTDLEYDSPRMRAYND

SEQ ID NO: 43712 - protein, 101 aa, Zea mays
  Coding DNA Sequence Number=SeqID_1933
MALALAGLPHAASRLVPRVRQPPFRALCAAAAAGDASKRMLERDITTNPEWERLYQYEIPVLAKVLPDGTEYFDSWSSSLTSLFVVPYSYCRKYFPDYRHV

SEQ ID NO: 43713 - protein, 160 aa, Zea mays
  Coding DNA Sequence Number=SeqID_1934
  Gene Ontology: Mol. function=protein binding; Cellular component =integral to membrane; Biological process=transport
  Homolog annotation: Hit_ID=Q69TX8; Match level="QueryCoverage=84%, HitCoverage=64%, E-value=9e-53, Identity=68%"; Hit description =Putative transmembrane protein Tmp21
  Pfam annotation: Domain name=EMP24_GP25L; Domain location=54-117; Score=48.3; E_value=2.5e-11; Accession=PF01105.14; Description =emp24gp25Lp24 family
MAGALALAVLLAVASLHAEAVWLDVPQSGTKCVSEEIQSNVVVLTDYSIMYESHPYSHPTIAVKVTSPYGNTLHHSENSTVGQFAFTTAEAGNYVACFWVDSAEKGSGVSVNLDWKIGIATKDWDAIAKKEKIEVGMRIAVPSYSSKCHELKFNAIFGVC

SEQ ID NO: 43714 - protein, 401 aa, Zea mays
  Coding DNA Sequence Number=SeqID_1935
  Gene Ontology: Mol. function=metal ion binding
  Homolog annotation: Hit_ID=Q6ZGK4; Match level="QueryCoverage=79%, HitCoverage=78%, E-value=3e-61, Identity=45%"; Hit description=RING zinc finger protein-like
  Subcellular localization annotation: CTP_CleavageSite=23; ConfidenceScore=5.45e-01
MGKAGSVFPSPAPATRSSRCRCGCGAVVEKVVVNGKCVSVLFLAVSGFLSAFFLLLRLRTSGDVPDDPGILAEIEAGFILSVPHSQVASQTGMLEKEIYTQIGVPNSKVSVSMQPYVYADTTYVKFGVLPDPRNTSMSTESIDALRASLIKLTLQQLNLSLTPSVFGDTFCLEILGFPGGITVLLPHSAPHADLREPLFNVTFNSTIHEIRGVLEEMKIELGSTLEQTPDEELYVELTNMNGSTVATPVTVQVSISPVDHSIYLGNYRLEQLARIITNWSARNLGLNTSIFGEIIGLTLSPLLQAFLPSSAPSFSPISPPSMPWPPIPEGPKIYPSREISCPPLVKIQNATTQHRRLMRVPSKTISPQLSTRFHRKHTSEGKKNSIAVPATTFAAPAPKQK

SEQ ID NO: 43715 - protein, 99 aa, Zea mays
  Coding DNA Sequence Number=SeqID_1936
MRLKDADRSPKISSKKATIVKERDLDPFIVFALEKEICKAVENRPKALKRVSESFEAPGSYQRVPDELKARRLPRILQGLGRLPEAAGRRESFNKQTEL

SEQ ID NO: 43716 - protein, 83 aa, Zea mays
  Coding DNA Sequence Number=SeqID_1937
MEVAISYQKKRKKSSFKPNNLLTYPSQNKGIMVKGKMKEHKPENGNSQNRNEVWEEIRALGLCLTCVELPWSSVQGEDEHSNR

SEQ ID NO: 43717 - protein, 81 aa, Zea mays
  Coding DNA Sequence Number=SeqID_1938
MKMDKEIQRQRDQALTVVKKWFLSYFRIDCHQKVVREKEINIDYMSVVLQQLPTLCDARTTVTAIFAKRWVDSEHGRTVCT

SEQ ID NO: 43718 - protein, 572 aa, Zea mays
  Coding DNA Sequence Number=SeqID_1939
  Gene Ontology: Mol. function=transferase activity, transferring glycosyl groups; Cellular component=membrane; Biological process =cell wall biogenesis
  Homolog annotation: Hit_ID=Q6Z7Q2; Match level="QueryCoverage=99%, HitCoverage=99%, E-value=0.0, Identity=73%"; Hit description =Putative galactoside 2-alpha-L-fucosyltransferase
  Pfam annotation: Domain name=XG_FTase; Domain location=60-542; Score =866.9; E_value=9.9e-258; Accession=PF03254.4; Description=Xyloglucan fucosyltransferase
  Subcellular localization annotation: CTP_CleavageSite=56; ConfidenceScore=5.13e-01
MDIKERIRRSPPSSPQAVGEAAASAPGHPRGRKARVAVLPLSVACGVTLLLLAGVSAARRGAQFSGADPTTLSGNDDRGGFEQAGPRDGEHATTVSSKVQRDKLIGGLLAPGFDEQSCLSRYQSALYRKESPHLVSTYLLERLREHEVLQKKCGPYTDSYKKAIEQLNSGQDIMVGDCNYLVWVSYSGLGNRILTIASAFLYAILTNRVLLVDGDKGTADLFCEPFPETSWVLPPDFPITKFKNFSIGSPESYGNMAKTEAIHSDGSFKGPKPAFLYLHLAHDYDDHDKLFFCEHSQQHLQKIPWLILRSDNYFVPSLFLISSYQEELTRLFPQKDVVFHHLGRYLFHPTNAVWGLITRYYDSYLARADEKLGIQIRVFDTETGPFQHVLDQVLHCTLKEKLLPEINAQQPIISTGNIKSKVVLITSLNSGYYERIRNMYWEHPTENGEMISFHQPSHEEHQDSDKTMHNMKAWAEIYLLSLSDAMVTSAWSTFGYVAQGLSGSKTWLLFKPENRTAPNPPCRQVMSIEPCFHAPPFYDCKTRKGTDTGKLVPHVRHCEDMSWGLKLVDTGT

SEQ ID NO: 43719 - protein, 276 aa, Zea mays
  Coding DNA Sequence Number=SeqID_1940
  Gene Ontology: Mol. function=magnesium ion binding; Cellular component=membrane; Biological process=photosynthesis, light harvesting
  Homolog annotation: Hit_ID=Q6Z7Q1; Match level="QueryCoverage=68%, HitCoverage=72%, E-value=1e-94, Identity=89%"; Hit description =Putative light-harvesting chlorophyll-a/b protein of photosystem I
  Pfam annotation: Domain name=Chloroa_b-bind; Domain location=80-247; Score=226.8; E_value=4.8e-65; Accession=PF00504.12; Description =Chlorophyll A-B binding protein
  Subcellular localization annotation: CTP_CleavageSite=16; ConfidenceScore=5.02e-01
MEAPCVPVPPPQGRSRAGAADARFPRLHTTTTRGRHPELGLSPSEPPALSGRPGCPDWTRPHTSTARRLPDALISAGVITSACGDGVGDFGFDPLGLGEEPEALKWYVQAELVHCRFAMAGVAGILFTDLLRVSGNSDLPVWFEAGAAKFDFANTTALFFVQLFLMGFAETKRYMDFKNPGSQAEEGTFIGLEAALAGQQPGYPGGPLFNPLGLAKDIENAHDEKLKEIKNGRLAMVAMLGFMVQASVTHAGPIDNLLTHLSDPFNKNIIHTFSSS

SEQ ID NO: 43720 - protein, 91 aa, Zea mays
  Coding DNA Sequence Number=SeqID_1941
MAAGDVCLPGKLQSGMGVPCLLLSFERAGAGSSLGSGYGIRGVRSFIQKADWRKSAKVWLYDKVRTKENLGHMGLHERSYCLPVGGISFVG

SEQ ID NO: 43721 - protein, 495 aa, Zea mays
  Coding DNA Sequence Number=SeqID_1942
  Homolog annotation: Hit_ID=Q2QWE9; Match level="QueryCoverage=53%, HitCoverage=44%, E-value=1e-70, Identity=51%"; Hit description =Expressed protein
  Pfam annotation: Domain name=zf-XS; Domain location=173-211; Score =50.8; E_value=4.6e-12; Accession=PF03470.5; Description=XS zinc finger domain
  Subcellular localization annotation: CTP_CleavageSite=88; ConfidenceScore=5.16e-01
MGKKLKKPGQAEGRKWAPWSSTNVTPNTARPAWGGSGSSHPSGTSWAQAPDHGAATRGNPRPPSQTSRPVLTPPLANGWQWQSRPRPSGSEVKKDDAPPSGSVPEVENVDGNNTSDDDDDDDLSDDISDDYDSDASEKSFETRKTNKWFKEFFEVLNTLSLEQINGQTRQWHCPACKNGPGAIDWYKGLQPLVTHARTKGSTRVKLHRELAALLEEELSRRGTSVLPAGEQFGKWKGLQESTDREIVWPPMVIVMNTFLEKDEDDKKKVHFVFVCKGKHKRTTYKINNILYERTGSASEGETLRERMWSPAARYMASARRDPVADEEEKRPTVRGGARVQKLRVERKGLGVLPSTSGHWIRGGCDSNAVATTTAGVGVMPSWEVERLGFWEEVLNGEGRDSGEKQLGRESKGWQGQAGAEARVAGNARPGRVLWDRELRDGEGGAEERQGGGRGGGTRGCGRAPYVLNRSTDKPLHWISPASGMENDIVATVVVG

SEQ ID NO: 43722 - protein, 77 aa, Zea mays
  Coding DNA Sequence Number=SeqID_1943
MTVEPDDLVRPSLLHVISAKSDKEMVLMIMVGGYTNLFCSMHHTSNQPNIVCGLEFIFLLLFWRDDVAEAMARPRTD

SEQ ID NO: 43723 - protein, 236 aa, Zea mays
  Coding DNA Sequence Number=SeqID_1944
  Gene Ontology: Mol. function=transcription factor activity; Cellular component=nucleus; Biological process=regulation of transcription, DNA-dependent
  Homolog annotation: Hit_ID=Q6Z7P9; Match level="QueryCoverage=52%, HitCoverage=50%, E-value=1e-26, Identity=52%"; Hit description=AP2 domain-containing transcription factor-like
  Pfam annotation: Domain name=AP2; Domain location=109-173; Score =127.2; E_value=4.7e-35; Accession=PF00847.10; Description=AP2 domain
MAAPRLERGGFQLPNTEQENSLFLRALISVVSGDTAALLPEAAAVEAPAAPVACARCGADGCAAAGCCELVAGSSSDSDDAGCSGTRANGGGLGLGLGASKRRGRGRKVIQYRGVRRRPWGKWAAEIRDPRRAARKWLGTFDTAEDAARAYDVAAVELRGQRAKLNFPARAAAAAPAAVQPPHHRPLPDRSLRENCGSNAASPVHVALAPTTQQNIWEGLNEIMMMEEERSFWSMR

SEQ ID NO: 43724 - protein, 62 aa, Zea mays
  Coding DNA Sequence Number=SeqID_1945
MAGFRASAPAQPNHQQAAADNWICDGLMVIPNSPSTGAVQSLRGKLARTGGPRRAACSSKAF

SEQ ID NO: 43725 - protein, 250 aa, Zea mays
  Coding DNA Sequence Number=SeqID_1946
  Gene Ontology: Mol. function=sugar porter activity; Cellular component=integral to membrane; Biological process=transport
  Homolog annotation: Hit_ID=Q10SL9; Match level="QueryCoverage=86%, HitCoverage=59%, E-value=2e-81, Identity=87%"; Hit description=UDP -galactose transporter, putative, expressed
  Pfam annotation: Domain name=UAA; Domain location=74-244; Score= -83.2; E_value=2.9e-06; Accession=PF08449.2; Description=UAA transporter family
MDFFIRLLGQRGFLKLPQAKLFDEAFLSCRSTCTTGFSSGVRVPGADTAAGVHGEADGEPVADLRAPLGGAHGLQWPHQGIPRLPQLPCTDHVQVNQDSTAMNEKGAQVVYLASRFDVLVRFYRVMVMGAFIPGLRRKYAFQEYVSAVMLVVGLILFTLADAQTSPNFSMAGVAMVSGALVMDAFLGNLQEAIFKMNPDTTQMEMLFCSTVVGLPFLAVPMVLTGELVTAWTSCSQLVAEKGQTIDQADR

SEQ ID NO: 43726 - protein, 687 aa, Zea mays
  Coding DNA Sequence Number=SeqID_1947
  Gene Ontology: Mol. function=RNA-directed DNA polymerase activity; Cellular component=intracellular; Biological process=RNA-dependent DNA replication
  Homolog annotation: Hit_ID=UPI00004C1731; Match level="QueryCoverage =93%, HitCoverage=53%, E-value=0.0, Identity=66%"; Hit description =UPI00004C1731 related cluster
  Pfam annotation: Domain name=RnaseH; Domain location=261-389; Score= -4.9; E_value=0.00017; Accession=PF00075.14; Description=RNase H
  Pfam annotation: Domain name=rve; Domain location=401-558; Score =85.5; E_value=1.7e-22; Accession=PF00665.16; Description=Integrase core domain
  Pfam module annotation: Pfam domain module=RnaseH::rve; Domain location=261-389::401-558
MKESDQLATSFITPFGIYCYVTMPFGLRNAGATYQRCMNHVFSQHIGRTVEAYVDDIVVKTRKASNLLSDLEVTFRCLKAKGMLLGFIVSERGIEANPEKIAAITSMGPIKDLKGVQRVMGCLTALSRFISRLGERGLPLYRPLRKAECFTWTPEAEEALGNLKALLTNAPILVPPAAGEALLIYIAATTQVVSAAIVVERREEGHTLPVQRPVYFVSEVLSETKIRYPQVQKLLYAVILTRRKLRHYFESHPLPTAPIQPELWTMFFDGSLMKTGAGAGLLFISPLGKHLRYVLRLHFPASNNVAKYEALVNGLRIAIELGVRRLDARGDSQLVIDQVMKNSHCRDSKMEAYCDEVRRLEDKFYGLELNHIARRYNETVDELAKIALGLTTVPPDVFSRDLHQPSVKIDDTSEPEKAPGGYTHLLVAIDKFSKWIEVRPLNNIRSEQAVAFFTNIIHRFGVPNSIITDNGTQFNDRKFLDFCEDHHIWVDWAAVAHPMTNGQVERANDMILQGLKPRIYNDLNKFGKRWMKELPSVVWSLRTTPSRATGFTLFFLVYGAEAILPTDLEYGSPRTRAYADQSNQASREDSLDQLEEARDMALLHSARYQQSLRRYHARGVRSRDFQVGDLVLRLRQDARGRHKLTPPWEGPFVIAKVLKPGTYKLANSQGEVYSNAWNIQQLRRFYP

SEQ ID NO: 43727 - protein, 318 aa, Zea mays
  Coding DNA Sequence Number=SeqID_1948
  Gene Ontology: Mol. function=electron carrier activity; Cellular component=nucleus; Biological process=electron transport
  Homolog annotation: Hit_ID=Q6K882; Match level="QueryCoverage=74%, HitCoverage=69%, E-value=3e-92, Identity=75%"; Hit description =Putative nucleolar essential protein
  Pfam annotation: Domain name=Nep1; Domain location=161-315; Score =207.2; E_value=3.9e-59; Accession=PF03587.5; Description=Nep1 ribosome biogenesis protein
MGRPYAVKGRKKKRKLEEAAAASDAAPPVEEAEELPPPEVRSGEEKSSEEDEAAAGEEEHAAADGLPILPRTVDGKRRPGAIFVLERACLEVGKVGKDHCLHDTCEACHFHSTVYGKAYAYFFQQKIVRAHLELRCPFYHSVQTMQILNSDDHANYLRKQNRNPADYRPDIIHQALLAIFDSPLTKAGRLQAVYVRTEKGVLFEIKPHVRMPRTFKRFCGLMSQLLQKLSITAVGKREKLLNVVKNPVTRYLPVGARLSFSAEKSVNLFDYVAKSNDDEPLVFVVGAMAHGKIDKEYTDDYIQINGSLVATWADDQFG

SEQ ID NO: 43728 - protein, 356 aa, Zea mays
  Coding DNA Sequence Number=SeqID_1949
  Gene Ontology: Mol. function=hydrolase activity; Cellular component =intracellular; Biological process=base-excision repair
  Homolog annotation: Hit_ID=Q9LU56; Match level="QueryCoverage=92%, HitCoverage=90%, E-value=1e-109, Identity=61%"; Hit description =Arabidopsis thaliana genomic DNA, chromosome 5, P1 clone:MWD22
  Pfam annotation: Domain name=DUF676; Domain location=22-249; Score =277.3; E_value=3e-80; Accession=PF05057.5; Description=Protein of unknown function (DUF676)
MGDLGGGDWREAVAEKGLAEADGGPDHLVIMVHGIVGSTADWKFGAEQFGKLLSDKVIVHCSNRNMHKLTLDGVDVMGERLAQEVIEEINRRPYIKKISFVAHSVGGLVARYAIGRLYKPPKRTSENTPQTLDDNNIGTIHGLEAVNFITVASPHLGSRGNKQVPFLFGVTAIENFACYIIHLIFGRTGKHLFLTDNDDGKPPLLQRMVDNWGDLQFMSALQAFRRRVAYSNVGHDRILTSLLKLACNIVGWRTSSIRKDSELPKWVDSTNKIYPHIVYEELSKAEAPDQCADTDNCTLEEHLLQGLKRVSWEKVDVSFHNSKVRSAAHSVIQVKDPVMHSEGADVIQHMIDQFIL

SEQ ID NO: 43729 - protein, 235 aa, Zea mays
  Coding DNA Sequence Number=SeqID_1950
MTQGEARRDGGEEHSDTRLGFVEMDGRKSTMAGGSNTSQFPNIDTWNFDGCYYNITEGEDSHHNEHVHELKDAMKMFEGLQNHPFLFTHCWILLRNERKWRERSTATRPGRVVNEDQPTNMFPSSEPEVSISPEGRDSCKRKRANKNTTSADSTACVEVLKRMTKNRELVEVKCDGQYKELLARRDHELDLKEQEMEFKIMAVNIDEVAEEKRAYYRNMQRRIIEKSNKDNNSST

SEQ ID NO: 43730 - protein, 142 aa, Zea mays
  Coding DNA Sequence Number=SeqID_1951
  Gene Ontology: Mol. function=amino acid transporter activity; Cellular component=membrane; Biological process=amino acid transport
  Homolog annotation: Hit_ID=Q6H6H8; Match level="QueryCoverage=80%, HitCoverage=19%, E-value=5e-14, Identity=44%"; Hit description=Amino acid permease-like
MTQEPTSLLPIWARTPTTRRPKSRRHQLPIPSDAMEEARDHRLSSTAGRPFLSGFCAAALRRKPLGARASAAAAATGEGLVRQLGVLDLVLLGIGASIGAGIFVVTGTVARDAGPESSAVNTFMTTLKIIIVIVIVFAGNTF

SEQ ID NO: 43731 - protein, 122 aa, Zea mays
  Coding DNA Sequence Number=SeqID_1952
  Gene Ontology: Mol. function=L-aspartate oxidase activity; Cellular component=cytoplasm; Biological process=pyridine nucleotide biosynthetic process
  Homolog annotation: Hit_ID=Q6Z836; Match level="QueryCoverage=82%, HitCoverage=15%, E-value=1e-35, Identity=70%"; Hit description =Putative L-aspartate oxidase
  Subcellular localization annotation: CTP_CleavageSite=41; ConfidenceScore=5.38e-01
MKCRLRLSRLASVLLTTSLVQQKRLHISQASTPTMVGFHPRRNRNSSHSDSRSPSLHSAYFSRPIEHTMLTYSYITDCISTLAYLVRSTTSDSALSPNASPTSLAAPTAPPVSSTANGYHDQ

SEQ ID NO: 43732 - protein, 218 aa, Zea mays
  Coding DNA Sequence Number=SeqID_1953
  Homolog annotation: Hit_ID=Q6QP51; Match level="QueryCoverage=70%, HitCoverage=98%, E-value=2e-26, Identity=53%"; Hit description =Putative growth-regulating factor 1
MPRLLDCGTSAANRGSPACDPTMPTGCNDHGPVSRGRKRDGWDWERGYSERDPSPQRKRAPSPPTDQGFEDWPLGRVRQPPQSTRASRPLLIRGSKAGPSEGFDSRPRAHRVRDDSGYVRYVDEARATLPRVRLTTAKFNLGRKRRSPPRPTLGLGLNVGLGRWSPPRPTPGLGLNLGLGRWSPPHPTPGLGLRRSLRLARPWARTDRATGDTSLPYP

SEQ ID NO: 43733 - protein, 681 aa, Zea mays
  Coding DNA Sequence Number=SeqID_1954
  Gene Ontology: Mol. function=structural constituent of ribosome; Cellular component=intracellular; Biological process=translation
  Homolog annotation: Hit_ID=Q2QP85; Match level="QueryCoverage=95%, HitCoverage=94%, E-value=0.0, Identity=64%"; Hit description=Kelch motif family protein, expressed
  Pfam annotation: Domain name=Kelch_1; Domain location=105-155; Score =0.4; E_value=3.4; Accession=PF01344.15; Description=Kelch motif
  Pfam annotation: Domain name=Kelch_1; Domain location=196-242; Score =12.7; E_value=0.14; Accession=PF01344.15; Description=Kelch motif
  Pfam annotation: Domain name=Kelch_1; Domain location=248-293; Score =20.6; E_value=0.0056; Accession=PF01344.15; Description=Kelch motif
  Pfam annotation: Domain name=Kelch_2; Domain location=105-143; Score =4.3; E_value=10; Accession=PF07646.5; Description=Kelch motif
  Pfam annotation: Domain name=Kelch_2; Domain location=154-191; Score =1.5; E_value=24; Accession=PF07646.5; Description=Kelch motif
  Pfam annotation: Domain name=Kelch_2; Domain location=196-242; Score =16.3; E_value=0.11; Accession=PF07646.5; Description=Kelch motif
  Pfam annotation: Domain name=Kelch_2; Domain location=247-293; Score =25.0; E_value=0.00026; Accession=PF07646.5; Description=Kelch motif
  Pfam module annotation: Pfam domain module=Kelch_1::Kelch_1::Kelch _1::Kelch_2::Kelch_2::Kelch_2::Kelch_2; Domain location=105-155::196
  Subcellular localization annotation: CTP_CleavageSite=42; ConfidenceScore=5.21e-01
MAVAFWGAKILSLHLSALLGGIGSCPAQRSKGDPSDPLNSSRSSVGPSKHLSLPNGNDATMTSVSGHADDLSYRCSSDTFDPQGRTFDISENWTVLSTEGDKPIPRFYHAAAIVSSKMVVFGGDSGNRLLDDTKVPWGNSVILVGGKTEPASDHLSGHVFRNHIMLNHSICGAVWTFNTETELWSLIEAKGDIPAARSGHTVIRAGATLILFGGEDTKGKKRHDLHMFDLKSSTWLPLNYKGTGPSPRSNHIATLYDDRVLLIFGGHSKSKTLNDLYSLDFDTMVWSRVKTHGPHPSPRAGCSGTLCGTKWYIAGGASKKKLPPSSSITTKKGFSMVPFYHKDKIALIAFGGNKKEPCNKVEVLVVLQNEHSFSWRSAPEVDTMVYEYSPSNKELADHLHKCAPLYSNSSIARHSLTSVIEHPPRREPLSESLLKQSSLGTSLHTQLDHAEECSLGQKLQKPIDDDRYDDVDDSSSCQDSTGTAMSKWTCYLFLYITDCFLQPKGPYSKRTGPGFQNGAENMVTGGSKVRRIARCSSDVGQSHLYNTKIADLIRRNTTLEDQLATALASKDQLDKSLASVIHSRGQLEKMLANKDKEAEMLKEKIACLELAQEESNSLSNTVHADNVRLEREVAFLKAVTGETQKARKLDVYQYCLELHSTRRVLAGEQSRAFQLQGMVKL

SEQ ID NO: 43734 - protein, 148 aa, Zea mays
  Coding DNA Sequence Number=SeqID_1955
MGFDDVADGVAQHNKYSGGITAHCSLRSTPPRHLVEHLARAQCWQRGSKIGIGSARGGLLFCGEERRSRGLKLGGIGLSPWVDLGWGDDDMGEEEPSSLFVARRGQQREEEDRLLLREGGAGGVGMEQGNRGAGFLLAVEKGEGRKGK

SEQ ID NO: 43735 - protein, 136 aa, Zea mays
  Coding DNA Sequence Number=SeqID_1956
MAELLQPLLTSWPCSDRLSQMGRGAHQLISPLQQKFDVVYFLICEIEDTMLDAPEDLVLVPDPVPDTQAEDAAFHQFETQGTAVPDDDDDDFGIPPPPPQQTLLVAEQARQAAEQAQQVAIQQQMSERMLSMFQMI

SEQ ID NO: 43736 - protein, 197 aa, Zea mays
  Coding DNA Sequence Number=SeqID_1957
  Gene Ontology: Mol. function=protein binding; Cellular component =intracellular; Biological process=regulation of cyclin-dependent protein kinase activity
  Homolog annotation: Hit_ID=Q0WWY1; Match level="QueryCoverage=96%, HitCoverage=50%, E-value=2e-24, Identity=38%"; Hit description =Regulator of chromosome condensation-like protein
  Pfam annotation: Domain name=RCC1; Domain location=144-192; Score =30.5; E_value=6.1e-06; Accession=PF00415.9; Description=Regulator of chromosome condensation (RCC1)
  Pfam annotation: Domain name=RCC1; Domain location=17-68; Score=44.1; E_value=4.8e-10; Accession=PF00415.9; Description=Regulator of chromosome condensation (RCC1)
  Pfam module annotation: Pfam domain module=RCC1::RCC1; Domain location=144-192::17-68
MQDVAAGLWHTVCTSVDGDVYSFGGNQFGQLGTGSDQAETVPKLVDATSLENKNARSVSCGARHSAIITGISIVSSCTPICLSYKTTLLIHAHAGATHHYIKKKNKVSKIDQYQKECHLPVAKIEKYIKEVFSSDKGYTTIADEGEVFCWGWNKYGQLGLGDSMDRNVPCSVPVDAYHPLNVSCGWWHTLVLADSPT

SEQ ID NO: 43737 - protein, 227 aa, Zea mays
  Coding DNA Sequence Number=SeqID_1958
  Gene Ontology: Mol. function=acyltransferase activity; Biological process=metabolic process
  Homolog annotation: Hit_ID=Q1SFZ6; Match level="QueryCoverage=92%, HitCoverage=51%, E-value=2e-25, Identity=35%"; Hit description =Phospholipid/glycerol acyltransferase
MALSKLNSGGWVHIFPEGSRSRDGGKTIAPAKRGVGRLVIVVVGDPINFDDLLIDNCGDTQDIPRGILYDKVTQRIGQRLQELKVEVDRLAAEQEPELQNRNVGDDGYRLWQQVDWEGFGIGSSMLPSEPSAAAQVPSREAEPEPHLEVEQSVSPAPSAATFYDVAVPHWFQRHVDPSELMGFASHGLIKHGKFLEEGYREFQQSATTLHTWWVSRANNAAHRWSTA

SEQ ID NO: 43738 - protein, 204 aa, Zea mays
  Coding DNA Sequence Number=SeqID_1959
MAGGDRERDADEETRNLMMQNLFGDQSEDKDDADDDDVAEMVDEDDDHQPQLPPQSPPQRHQELDDDAYDDEEEDARSHAPARASEYHSVSLPVFLRPAIPIRLGSRRRGYLALGDEPQEGGHSLLAAARVCGGFGGGRVVVGADAEVSSREDKGTHWTVRCPSISKLIFLFSSNFLQIILAIFKEVLRTYTNVHMGVSNLSKE

SEQ ID NO: 43739 - protein, 67 aa, Zea mays
  Coding DNA Sequence Number=SeqID_1960
MDSIVFEVAELDGATMIYYTSSKMKGWEYGRPVTNAPSSISTRVYPGFMFNSPMVLVTKAEATRPCT

SEQ ID NO: 43740 - protein, 102 aa, Zea mays
  Coding DNA Sequence Number=SeqID_1961
  Homolog annotation: Hit_ID=Q5N794; Match level="QueryCoverage=45%, HitCoverage=30%, E-value=4e-12, Identity=72%"; Hit description =Integral membrane protein-like
MASAPGFTNYTAFWCRNWLYNASVHLWLGFQLHNPSLPLLPNFSYLVASMGLQALWSLGLGCLDYYALTLRRDLQQALLMSLFVVGDCVNYLRPPFIHVVHH

SEQ ID NO: 43741 - protein, 106 aa, Zea mays
  Coding DNA Sequence Number=SeqID_1962
MTTPRTITVPTASATINTRRPDNLRPHEEATADRLLSWPIKGRDQPPGRGVEEITLEDNRMPLDGDEPTKTNMRRSTGEDQEVGAPPSQDLATPSGVLLVVVLDKN

SEQ ID NO: 43742 - protein, 81 aa, Zea mays
  Coding DNA Sequence Number=SeqID_1963
MSDPELGVAGFDGGTDPSKVGAHVSSDGLTGQSDQGYFLSTLTDRWVPRTKGHSRDYMKRHVKKENIEIPSENELSNFAQA

SEQ ID NO: 43743 - protein, 141 aa, Zea mays
  Coding DNA Sequence Number=SeqID_1964
MVRRCGGSSEVEVESEPLDRARRRPSAEARAESEPWGWAKRSLSSSGAEPESELRVGRSGVRRLPEPSPSPSPRSGGAEFAVFRGLARVRALDNVPCAEVEEVAEEALEQQQFGAGGSSVSRVPFSKDLFVDRPPGIAVQP

SEQ ID NO: 43744 - protein, 145 aa, Zea mays
  Coding DNA Sequence Number=SeqID_1965
MGKNNKRKREPTPPSEEFGDSEYSEEEFSSESEGSPAPIPLRESSDDSDDSQGLAAEVWTYIRAVERSGLEGSDESEYSSDEEDSDGGGKDEDDDDDDDDDDGGDGDGDGSGKGGGGGSKGSNWGGSSRGSTRGGSGGGSNRASG

SEQ ID NO: 43745 - protein, 105 aa, Zea mays
  Coding DNA Sequence Number=SeqID_1966
MSGEHAKKELMTEEKPRSSRKKNEGKTPSQEADDKHKEDKDEPASSINSHKKGDKKKKKMKKVVYYETDSSTPSTSKAESTSSKRQECKLKGKCAHGPFLKCFGD

SEQ ID NO: 43746 - protein, 235 aa, Zea mays
  Coding DNA Sequence Number=SeqID_1967
  Gene Ontology: Mol. function=hydrolase activity; Biological process =aromatic compound metabolic process
  Homolog annotation: Hit_ID=Q40708; Match level="QueryCoverage=93%, HitCoverage=96%, E-value=1e-61, Identity=50%"; Hit description =Probable esterase PIR7A
  Pfam annotation: Domain name=Abhydrolase_1; Domain location=39-229; Score=20.5; E_value=0.0002; Accession=PF00561.10; Description =alphabeta hydrolase fold
  Pfam annotation: Domain name=DUF1234; Domain location=14-184; Score= -75.3; E_value=0.0067; Accession=PF06821.4; Description=AlphaBeta hydrolase family of unknown funct
  Pfam module annotation: Pfam domain module=Abhydrolase_1::DUF1234; Domain location=39-229::14-184
MESGTERRRRRHHFVLVHGTCHGAWCWYKVATLLSSAGHRVTALDMAACGASPGRAEEVPSFEEYSRPLLATVAGLAPEEKVVLVGHSFGGVSLALAMEQYPDRVAVAVFVATGMPSAGKPMAFVFEQYLKQRLYQLSPPEDLTLAMAMVRPSQRFRDDATMKGGILTAERYGGVRRVCVVAEDDASVPAGFQRRMASWNPGTEVTGLQGADHMSMLSKPGELSELLMEVANKYS

SEQ ID NO: 43747 - protein, 299 aa, Zea mays
  Coding DNA Sequence Number=SeqID_1968
  Gene Ontology: Mol. function=serine esterase activity; Biological process=aromatic compound metabolic process
  Homolog annotation: Hit_ID=Q43360; Match level="QueryCoverage=94%, HitCoverage=91%, E-value=8e-41, Identity=37%"; Hit description =Esterase PIR7B
  Pfam annotation: Domain name=DUF1234; Domain location=40-166; Score= -88.3; E_value=0.055; Accession=PF06821.4; Description=AlphaBeta hydrolase family of unknown funct
MESDRKRQHHFLLVHGVCHGAWCWYKVATRSCHPRATASQRWTWPRAAPAPGRAEEVPSLEEYSHPFLTALAGLAPEEKAVLVGHSFGGLSLALAMEHCPERVAVAVFVSFLMPAAGKPMVFVFEQLSQETRPEDRYMDCEFETNVAGDHQRPVETFRLGPQYLKQRLYQLSPAEVGDDGPATPHTHDTSFRWSVHHRAVSSGVGGRNATQDVNVTLAMAMVRPSQRFRDGMTMMNANVLTAERYGAVRRAGVVAEDDASFQRRMASLNPGTEVRGLQGADHMPTSDGQRGRPVRVQAR

SEQ ID NO: 43748 - protein, 813 aa, Zea mays
  Coding DNA Sequence Number=SeqID_1969
  Gene Ontology: Mol. function=sequence-specific DNA binding; Cellular component=nucleus; Biological process=regulation of transcription, DNA-dependent
  Homolog annotation: Hit_ID=Q9SWE0; Match level="QueryCoverage=99%, HitCoverage=100%, E-value=0.0, Identity=76%"; Hit description =Flowering-time protein isoform alpha
MELVLVKPAAGALVEVGSGSVAGAGSIPAMVAAQQEILHEQVDQLQRLVVAQCRLTGVNPLAQEMALKKPQKDLICKQRISEILRDESWKSEVDITEEVLALTDGANESRKPEPRKTPMLLTASAIETNKRSSVQTNDIQKAKMRAMFMQEKRGKIDINKLSDKPQAMDTKKAAGLVNSNPSAMPISPHTSAAQPVDPSPSTSKQSTDPQPDNTEISGGLKLNIGSKNNVIEKLDCKRVLWQIPPAVWIDPSWSVGAGDNSKELEVQTQRNRREKETFYTSQKDVPMNPKDPWDLEMDFDDSLTPEVPIDQVPDVDAMETESVGAAPSAVAPVKDKQIESASSTSGAVADDEEANTDYELLTVLLRNPELVFALTSNKGENMPNEQTIALLDTLKQTGLSLSELVNRLGNGAGLPKEPEPEPEPIPASLPSPTPPDRTSRAVWIPEHAMQVRAAPTLHLPSRGSTPPVANAVQQGFSNVVSSLPSQPYAPPVSVLPAQIQANAPPSLPLLAVSVNPPVQHVSPVNNLLNRASVHQHGQQQYALLSDPVATPLHQQAAGSKPAVAAHPSLPEPNASSHTAFPWQSNAADMTHAGRNATADPWAAARAANSYSTASASTVPSANQNAYGDQGKQGAYSSYGSSAASSRPVVPGHGHDRNGYSRSALVEYPWDGHHQRHSRSPDPGVVRDYDTDYGGAQGYSQQPLTQWSAGKVQQQGYNPEPSRQWSSSQAHQGGYAPAEPSRQWSSSQAHQSYAPELPRQWSSERRGYDDAEPSRTWSSGQQNPEAPRQWSRGKQDPYYSPSHSRRSYDQHRRR

SEQ ID NO: 43749 - protein, 69 aa, Zea mays
  Coding DNA Sequence Number=SeqID_1970
MEWDLNFWDATGLQDVPSIVAHCGGPGARGVDSGGEWMMDDMVNGAVTGGEADACWRIPGVVNVAVSGG

SEQ ID NO: 43750 - protein, 82 aa, Zea mays
  Coding DNA Sequence Number=SeqID_1971
MALGVEGGLGSGADCSTYAMRALMGGAAQGLGMKFHGGGSGAMVADLGAGACCCREIKVKSRCVEMATGKNSFAITCPNSYP

SEQ ID NO: 43751 - protein, 168 aa, Zea mays
  Coding DNA Sequence Number=SeqID_1972
  Subcellular localization annotation: CTP_CleavageSite=62; ConfidenceScore=5.53e-01
MCERAIHRTGQTWSRPGSRPNWSSRKAHRPKAATVSSSPICRRSIFDSLPDSRSARRRRRRRSGSGSGSQRRRGSPNFGGGVSGSPSRLLPIASRPRLRSSAHRPVTLRARLPLPSRLRWTVDSARPRRLHCAPRTAGGQREPAAAALPRRPHRFGSAYAPTKRYPSA

SEQ ID NO: 43752 - protein, 96 aa, Zea mays
  Coding DNA Sequence Number=SeqID_1973
MENMRYAEELVREFLVFRGFTSIEESTFSLEHPYKGATPLGPCKKSALYELVLRRSASSAAAASSLHSGKMSTLSEEDQQVLVTEEEFPEVKVDFQ

SEQ ID NO: 43753 - protein, 298 aa, Zea mays
  Coding DNA Sequence Number=SeqID_1974
  Gene Ontology: Mol. function=protein binding; Cellular component =membrane; Biological process=endocytosis
  Homolog annotation: Hit_ID=Q681Q7; Match level="QueryCoverage=94%, HitCoverage=92%, E-value=9e-67, Identity=54%"; Hit description =Uncharacterized protein At1g03900
  Pfam annotation: Domain name=DUF1681; Domain location=10-230; Score =360.7; E_value=2.4e-105; Accession=PF07933.4; Description=Protein of unknown function (DUF1681)
MASSLAEEEEAFEHTLLVVREVSVYKIPPRTTSGGYKCGEWLQSDKIWSGRLRVVSCGDRCEIRLEDPATGELFAACFVLPGQRESAVETVLDSSRYFVLRIEDGRGKHAFVGLGFNERNEAFDFNVALSDHEKYVKREQEKETTGAGGEETGGEIQSYILYNYVSRIVKLIKDWECKKHIQNKQILEGETIRITVKNKPSTGSGMLSAAGLSGGTTAKPKTSMLLAPPPGAAGKLRSPLPPPPNDPAAARMNSGHTAGIRAPKEPTKRNNDPFSDLSAIKVLKFADIGSSSTLGLYA

SEQ ID NO: 43754 - protein, 623 aa, Zea mays
  Coding DNA Sequence Number=SeqID_1975
  Gene Ontology: Mol. function=RNA-directed DNA polymerase activity; Cellular component=nucleus; Biological process=RNA-dependent DNA replication
  Homolog annotation: Hit_ID=Q8S472; Match level="QueryCoverage=99%, HitCoverage=57%, E-value=0.0, Identity=82%"; Hit description =Putative gypsy-type retrotransposon RIRE2
  Pfam annotation: Domain name=Retrotrans_gag; Domain location=111-202; Score=79.0; E_value=1.4e-20; Accession=PF03732.7; Description =Retrotransposon gag protein
MRNTAPAAPGRLGNEHHHHNRRAHLDERVRRGYHPRREGRYDSGEDRSPSPEPPGPQAFSHAIRRAPFPTRFRTPTTITKYSGETRPELWLADYRLACQLGGTDDDNLIIRNLPLFLSDTARAWLEHLPPGQISNWDDLVQAFAGNFQGTYVRPRNSWDLRSCRQQPGESLRDYIRRFSKQRTKLPNVTDSYVIGAFLAGTTCRDLVSKLGCKTPTRASELMDIATKFTSGQEAVEAIFRKDKQPQGRPPEDVPEASTQRGAKKKGKKKSQAKRDAADADLVVAAEYKNPRKPPGGANLFDKMLKESCPYHQGPVKHTLEECAMLRRHFHKVGPPAEGGRARDDDKKEDHQAGEFPEVRDCFMIYGGQVANASARHRKQERREVCSVKVAAPVYLDWSDKPITFDRDDHPDRVPSPGKYPLVVDPVIGDVRLTKVLMDRGSSLNIIYAETLGLLRVDLSSVWAGAAPFHGIIPEKRVQPLGQLDLPVCFGTPSNFRRETLTFEVVRFRGTYHALLGRPCYAKFMAVPNYTYLKLKMSGPNGVITVSPTYRHAYECDVECVEYAEALAESEALIADPESLSKEAPDVKRHAGNFEPAETVKSVPLDPSSDASKQIRIGFELDPK

SEQ ID NO: 43755 - protein, 775 aa, Zea mays
  Coding DNA Sequence Number=SeqID_1976
  Gene Ontology: Mol. function=cysteine-type peptidase activity; Biological process=proteolysis
  Homolog annotation: Hit_ID=Q2QME9; Match level="QueryCoverage=82%, HitCoverage=85%, E-value=1e-87, Identity=37%"; Hit description=Ulp1 protease family, C-terminal catalytic domain containing protein, expressed
  Pfam annotation: Domain name=Peptidase_C48; Domain location=280-473; Score=38.5; E_value=2.3e-08; Accession=PF02902.9; Description=Ulp1 protease family, C-terminal catalytic domain
MGQRIDINWTEVFGKSSSPDREADVCFASPSSASAAPRTRARALGAAKVLPGDERRRGSPDRHQRKRLGKLRIDDDWSVGGQRHTAVHGDDGARRPRTRGAAKVRALQMVGYRMLIPFLRMCMISVQKMSRRNVWATDSVRGIYLLKTIMREFWMQLPLNNLKRQGCAEKRKPISVDKMYSESDRPSSTSSSAKRTHAIDPEVSDHEKCHKTESSHPSRFSKRRKEQLQNSSSVYPRKVQDVVLLDDEDMQPEEEVNCDMSDGQNGPKIYYPSRDNRESVELSRSDIKCLDPGVYLSSPVINFYIQYIKRNRLSSEDFRDKFYIFNTYFYGKLEEALCRQKRYPINRFVASWSSNRKHLLRVKGSHRPQPKDEFSKLRRWWKGVNILNKAYIILPIHGIYLEKEWCQLSSWEDFKNNIHKQSVEVPRQNNEYDCGIFMLYYIERFIKEAPERFTIDKLDMFNRSWFKPEEASGLRRRIRELLLEEFESAKLDDALPGADASERDDSINDGELKPDASSDSSEMVVEVVGGLGGTDKSNEGIKVVASEEASGESGDAGKSTEGTVAASEEKSIEGINVAEPEDACESIGGIYVAESDEASGEFGEIGKTNKGTKVAVSEGASVSGYTDKNMEDISDSEVAVLDKAPTSSYRRGEKTTACVLSEAASLSDSVKDEQGMVKPDSGSSKAEREGDLIVIASPERSEGNDEIIGSMPITDVVCDSCDSDTETKQLTQGAMHRANLLVAFSRRCEIVTDFGNDILRFLWPYTKHIDDQARR

SEQ ID NO: 43756 - protein, 36 aa, Zea mays
  Coding DNA Sequence Number=SeqID_1977
EKFQYLTLSMRASPDLTPNIHATTLISPNGCSQPNG

SEQ ID NO: 43757 - protein, 167 aa, Zea mays
  Coding DNA Sequence Number=SeqID_1978
  Gene Ontology: Mol. function=calcium ion binding
  Homolog annotation: Hit_ID=Q6Z727; Match level="QueryCoverage=55%, HitCoverage=65%, E-value=2e-24, Identity=65%"; Hit description =Putative EF-hand Ca2+-binding protein CCD1
  Pfam annotation: Domain name=efhand; Domain location=76-104; Score =25.3; E_value=0.00022; Accession=PF00036.22; Description=EF hand
MAASASRARAGAGGAGEEYEDLLPVMGERLGVAGLLAELRAGFRLLADRERGAITPDSLRRGAAAALGVAGMAHADAAAMVREGDADGDGALSEAEFCVLMVRLSPGIMAHAEAWLADAIAADEMQLVDDAMPMDAAAADDYGGAGSRGHAAAAPDSDTAPARRSSV

SEQ ID NO: 43758 - protein, 286 aa, Zea mays
  Coding DNA Sequence Number=SeqID_1979
  Gene Ontology: Mol. function=magnesium ion binding; Cellular component=chloroplast; Biological process=metabolic process
  Homolog annotation: Hit_ID=Q29VN2; Match level="QueryCoverage=97%, HitCoverage=49%, E-value=1e-124, Identity=76%"; Hit description =Terpene synthase 2
  Pfam annotation: Domain name=Terpene_synth_C; Domain location=1-238; Score=151.1; E_value=2.9e-42; Accession=PF03936.6; Description =Terpene synthase family, metal binding domain
MPQGTLPCYECRVLKWYMWSMTALQGSSFSRFRVEMTKIISLVYVVDDIFDFVGTLEELSLFTEAVKMWDTVAADSLPSYMRSCYNALYTITNEIAEMAEKKHGLNSINHLRKAWATLFDGFMVEARWLAIDQVPTAEDYLRNGVVTSGVPLTFVHIFTLMGCEQSIEALIDQMPSVISCPAKILRLQDDMGSAKDEAQEGFDGSYRDFYLKENPRCNRNDAEAHMRSLIAREWEELNRECLYTRTFSSNCTRVCLNTARMIGVMYSYNKEQRLLVLEDYAKMLIL

SEQ ID NO: 43759 - protein, 245 aa, Zea mays
  Coding DNA Sequence Number=SeqID_1980
  Gene Ontology: Mol. function=translation initiation factor activity
  Homolog annotation: Hit_ID=Q6Z730; Match level="QueryCoverage=94%, HitCoverage=100%, E-value=5e-55, Identity=52%"; Hit description =Putative eukaryotic translation initiation factor 3, subunit 1 alpha, 35kDa
  Pfam annotation: Domain name=eIF3_subunit; Domain location=1-232; Score=274.1; E_value=2.8e-79; Accession=PF08597.1; Description =Translation initiation factor eIF3 subun
MEDWDSEEFQPVVPVVKAEPLKNQWADEDVEEDDVKESWEEEEEEEKPKPAPVEKVAAKPSTKAPAKKGKQQALTSAEEPDEPPLSPTSQKIRQQRLVEEADFKSTTELFAKKGSEQKSLDTFIPKSESDFAEYAELIANKLRPYEKSFHYMALLKNVMRLSMTSLKGADAKDISSSVTAIANEKIKAEKEAAAGKKKQGAKKKQLHIEKGDDDFIPGRGGGYDDPDEYDFITYLGLGATGYGAE

SEQ ID NO: 43760 - protein, 752 aa, Zea mays
  Coding DNA Sequence Number=SeqID_1981
  Gene Ontology: Mol. function=heat shock protein binding; Cellular component=integral to membrane; Biological process=protein folding
  Homolog annotation: Hit_ID=Q7XAR9; Match level="QueryCoverage=95%, HitCoverage=95%, E-value=1e-171, Identity=44%"; Hit description =Division protein
  Pfam annotation: Domain name=DnaJ; Domain location=89-150; Score= -11.5; E_value=0.058; Accession=PF00226.21; Description=DnaJ domain
  Subcellular localization annotation: CTP_CleavageSite=38; ConfidenceScore=5.53e-01
MEGVHSLLARPNSAPFAFSPLPLRRSHRPPPPGPSTCRAASRWADRLFADFHLLPAAADPPAAASSSSSSPFVPIFPEAADRALPLPVDFYKILGAEPHFLGDGIRRAFESRIAKPPQYGYSTEALVGRRQMLQIAHDTLTNQSSRTEYDRALSEDRDAALTMDVAWDKEAGEAQLVLATGEHLLQDRPPKRFKQDVVLAMALAYVDISRDAMAASPPDVICCCEVLERALKLLQEDGASNLAPELLAQIDETLEEITPRCVLELLALPTDEKHKNKRQEGLQGAKNILWSVGRGGIATVGGGFSREAFMNEAFLQMTSAEQMDFFSKTPNSIPPEWFEIYSVALAHIAQAIASKRPQFIMMADELFEQLQKFNIGSQYPYENEMDLALERALCSLLVGDICNCRMWLGIDNESSSYRDPKNIEFVVNNSSMNEENDLLPGLCKLLETWLVSEVFPRSRDTRGTQFRLGDYYDDPKVLSYLERMEGGGASHLAAAAAIAKLGAQATAALGTVKSSALQAFSKVFPLTEQLDMSGKDIPSDDLDKSLEKLAQGSVAGDAIHDSRNDALKIISAGTLLALFAVLGLKCLPRNKSLPALRGEYGSVAVVDSIDGPAADEEPLEIPRMDAKLAEDIVRRWQSIKSKALGPEHTVTALQEVLGGNMLKVWADRAAEIERHGWFWEYALSGVTIDSITVSVDGRRAAVEATIEEVGRLTDVTDPKNDDAYDTKYTARYEMTYSRPAGWRITEGAVLRS

SEQ ID NO: 43761 - protein, 186 aa, Zea mays
  Coding DNA Sequence Number=SeqID_1982
  Gene Ontology: Mol. function=protein binding; Cellular component =histone deacetylase complex; Biological process=regulation of transcription, DNA-dependent
  Homolog annotation: Hit_ID=Q6ZH90; Match level="QueryCoverage=58%, HitCoverage=72%, E-value=9e-50, Identity=87%"; Hit description =Putative P18
  Pfam annotation: Domain name=SAP18; Domain location=74-185; Score =162.2; E_value=1.3e-45; Accession=PF06487.3; Description=Sin3 associated polypeptide p18 (SAP1
MARLRPEPIDREKVSSYTPCVPLAHGVSLLNLPSAAQGFHKDSAERFESSNYDIFLKGQFTASLLTLGIILEMKKLIISYCFQVAGHHQNEEFSVRGKEPKDEVQIYTWKDATLRELTDLVKEVALPARKRNARLSFAFVYPDKNGRFVVRQVGSTFAYGHGRGDDAKTLAELGFQIGDYLSVAIM

SEQ ID NO: 43762 - protein, 625 aa, Zea mays
  Coding DNA Sequence Number=SeqID_1983
  Gene Ontology: Mol. function=magnesium ion binding; Cellular component=chloroplast; Biological process=metabolic process
  Homolog annotation: Hit_ID=Q29VN2; Match level="QueryCoverage=86%, HitCoverage=94%, E-value=0.0, Identity=71%"; Hit description=Terpene synthase 2
  Pfam annotation: Domain name=Terpene_synth; Domain location=98-302; Score=65.0; E_value=2.5e-16; Accession=PF01397.11; Description =Terpene synthase, N-terminal domain
  Pfam annotation: Domain name=Terpene_synth_C; Domain location=297 -577; Score=231.4; E_value=1.9e-66; Accession=PF03936.6; Description =Terpene synthase family, metal binding domain
  Pfam module annotation: Pfam domain module=Terpene_synth::Terpene _synth_C; Domain location=98-302::297-577
MTEKKIPRGQSKVSIKREVQIGLVLEFICWLLRSCMLATPHHINLEGLRTPRCISLTCILAPARRIGTSMSERCIFSFSTLASPAADGNNSRRGGRHRGDSIVTRSSAAANTLPLLRNDDFDLREGLTDVRNVLRQRQKSGCSSRDMMVTVDNLKRLCIDHYFQEEIERAMGACCMGLIHSDDLFDATLAFRLLREAGHGVSADDVLRRFTDDDDSGGEFRLDLSKDIRGLLSLHDMSHLDMGGEELLCKARVFSRHHLASAVRYLEPSLGEYVRQSLDHPYHLSLTQYKARHHLAYLQSLPVRDTALERLVAAEFQLNRSLHQKEMQAIKRWWMELGLVQEIPVVRDQVLKWYMWSMTALQGRSFSRHRVQITKIIALVYVVDDIFDLVATLDELSLFAEAVKMWNSTAAESLPSYMRSCYKALYTVTNEIADTAEKEHGLNHVNHLRKAWAALFDGFMVEARWLATDKVPTAEDYLTNGVVTSGVPLTFVHIFIMLGCDDDQSTQALVDHMPSVISCPAKILRLWDDMGSAEDEAQEGFDGSYRDFYLMENPRCSRSDAEAHMRSLIAREWEELNRECLCKRTFSSSFTHVCLNAARMISVMYSYNKEQRLLVLEDYARMLIL

SEQ ID NO: 43763 - protein, 160 aa, Zea mays
  Coding DNA Sequence Number=SeqID_1984
MNFVRISVKLGIADGGYDDHVVADSRRGGEPVVITHLDEDTKEQGGAGAGGPCSRVNEAEGMVGLWHGGGMMEASIPDDRLKIHTFNGSLISFKALGGGGHGRRGRGRVGRGGRGRWRPRRREWRTGVGAGAPAEACSGTRLRSWWKTREGERRMRRGYD

SEQ ID NO: 43764 - protein, 308 aa, Zea mays
  Coding DNA Sequence Number=SeqID_1985
  Homolog annotation: Hit_ID=Q10S69; Match level="QueryCoverage=33%, HitCoverage=36%, E-value=4e-43, Identity=80%"; Hit description=HVA22- like protein i, putative, expressed
  Pfam annotation: Domain name=TB2_DP1_HVA22; Domain location=1-54; Score=-19.1; E_value=0.0024; Accession=PF03134.9; Description=TB2DP1, HVA22 family
ILLAFLTVLERVGESFVSWLPMYSEAKLAFIVYLWYPKTRGTAYVYESFFKPYIAKHETEIDRNLLELRTRAGDMAVLYFQRVTNYAQTRSYEILQYIASQSPTQRQMLLSFSLASLNIYAIKLPKIFKILATNLLRVSAVDDVIHSFHLHEISLAVILLHGHPELPHVVMLIGVFAISSFLQAHQQQQRPPPPRTRQVNPAPPPIPAPSAPPMPPQPAQAQVPPTPPRPLVPVVPPGAVPPAPPPTAPEATATNGLQDTETMQVDPPRASLSGPPLPPEETLIEEAIRLTRGRLRRRLAGGSGPPQN

SEQ ID NO: 43765 - protein, 65 aa, Zea mays
  Coding DNA Sequence Number=SeqID_1986
  Homolog annotation: Hit_ID=Q10S69; Match level="QueryCoverage=65%, HitCoverage=14%, E-value=4e-16, Identity=83%"; Hit description=HVA22- like protein i, putative, expressed
MVFDGSAPASRLAASTTASGIKMIGSFITGMLTLVLGYAYPAYDCYKTVELNRPEVEQLRFWCQY

SEQ ID NO: 43766 - protein, 368 aa, Zea mays
  Coding DNA Sequence Number=SeqID_1987
  Homolog annotation: Hit_ID=Q9XEG0; Match level="QueryCoverage=90%, HitCoverage=97%, E-value=2e-35, Identity=43%"; Hit description =Shrunken seed protein
  Pfam annotation: Domain name=Pex16; Domain location=71-361; Score =0.8; E_value=1.4e-09; Accession=PF08610.1; Description=Peroxisomal membrane protein (Pex16)
MEAYKLWVRRNRDLVRSLESLANVLPRSRFPLCFRSVIIVSCYPLVGGGGRGSHGYSPSASPTLRSHRKQLIFYLAVSRESELIAHLCRVIKGQHILSVYALLGIVSSVNQHIIDAPTENHSFASKEQSIPWGLVVSVLKDVEAVVEVAAQHFVGDDRKWSFLAVTEAVKAGVRLAAFRESGYKMLLQGGEVVNEEEVTVLENSYGVNGNGVPAIYPMDGHAENGHKTMAKGLDGKNGFVSKSLEKRAVAALNKFGENAKMMSDPMWIRRLQPTPEPTVMVAEKPTLASIWSAKGGTGRLFVLGELKRRKMMWALYVMRDPFFASYSKRHLLKAEQVLNPVPLIGFLTGKLVELLEGIQTRYTYTSGS

SEQ ID NO: 43767 - protein, 354 aa, Zea mays
  Coding DNA Sequence Number=SeqID_1988
MAPPVDVAGLCPRQGDVGAPPKPRLSLSSVAEAESEPWGRARRRSFGRGQGGVRALGSGEAEFRRLPGLSPSPSPGVGRSGPESEPWGRAERSSVVFRVLARVRALGSGGAEFAVFRVLARVRALGSGGAEFAVAPSARPDCLVASERSQGLGRAGDVSAVKRGASGETELYADGGYQLRIRRLEARVGDLYVYYDWEVSYVSTPAFACESASVPHPVLGAFQPPLRARPAHRRRFGARVPILEQCSFSLLPSIVAPPTTSASLLHAFATLTVSDGRHPFHDRDGHMQHFRSRLMGRHISITFGLEGYYSTSPPSSGDLCMVGTESRSTSPTTSARGAATHSSGSASRTSTSAT

SEQ ID NO: 43768 - protein, 177 aa, Zea mays
  Coding DNA Sequence Number=SeqID_1989
MAPRWTWRLAGGEALQVLPCWRVGQLATGESASGDGLRARARVCRVRTCPAAPSASGDGLRSGSSGRWQSGTPPPAGGRLTEREQWISAEREQWSSGSVIQCRSGTGAVDQWTTGHGQWSRGVEAWSAVAPSGEHGAPEAAWQPPSRVCQFVAVSGLADLRIGIWEFGVAALPCLFA

SEQ ID NO: 43769 - protein, 266 aa, Zea mays
  Coding DNA Sequence Number=SeqID_1990
  Gene Ontology: Mol. function=nucleic acid binding; Cellular component= nucleus; Biological process=selenocysteine incorporation
  Homolog annotation: Hit_ID=Q9LEB4; Match level="QueryCoverage=58%, HitCoverage=38%, E-value=9e-59, Identity=69%"; Hit description=RNA Binding Protein 45
  Pfam annotation: Domain name=RRM_1; Domain location=141-213; Score =59.3; E_value=1.3e-14; Accession=PF00076.12; Description=RNA recognition motif. (a.k.a. RRM, RBD, or
  Pfam annotation: Domain name=RRM_1; Domain location=60-122; Score =9.6; E_value=0.019; Accession=PF00076.12; Description=RNA recognition motif. (a.k.a. RRM, RBD, or
  Pfam module annotation: Pfam domain module=RRM_1::RRM_1; Domain location=141-213::60-122
MTAIGWQSIGVACKFIANVAEQPGGSIDSKFMFYNGLPIFVYGGQCPGNLSEVAVYRFGIFLRFLCRCIYDCVQVQNVKLIRDKHTGQLQGYGFIEFISRAAAERVLQTYNGTMMPNVELPFRLNWASAGEKRDDTPDYTIFVGDLAADVTDYVLQETFRAHYPSVKGAKVVTDKLTMRTKGYGFVKFGDPNEQARAMTEMNGMLCSSRPMRIGPAANKKATVVQEKVNFLVVGLLLLPVPNVLKLGSVVEEVSSSTAFRSLIWII

SEQ ID NO: 43770 - protein, 162 aa, Zea mays
  Coding DNA Sequence Number=SeqID_1991
  Gene Ontology: Mol. function=nucleic acid binding
  Homolog annotation: Hit_ID=Q10HZ7; Match level="QueryCoverage=52%, HitCoverage=20%, E-value=2e-31, Identity=70%"; Hit description=RNA recognition motif family protein, expressed
  Pfam annotation: Domain name=RRM_1; Domain location=3-68; Score=78.0; E_value=3e-20; Accession=PF00076.12; Description=RNA recognition motif. (a.k.a. RRM, RBD, or
MEIFVGGLDPNVTEDMLKQVFTPYGDVVHVKIPVGKRCGFVQYANRSSAEEALVILQGTLVGGQNVRLSWGRSPSNKQVQPQQDSNQWAGANAGYYGYGQGYEAYGYPQSQDPNMYNYGAGAYAGYPNYQQQPVAQQPPQQQFLATMVKWNIDLVSAGFLYL

SEQ ID NO: 43771 - protein, 82 aa, Zea mays
  Coding DNA Sequence Number=SeqID_1992
MADNVAEAVRGEEMRRWAILASEGEGMDKLPNCLRGVGDRVSAHHAGGERMWGARADAASARRARRVGRGAVWRLGLLVGAR

SEQ ID NO: 43772 - protein, 118 aa, Zea mays
  Coding DNA Sequence Number=SeqID_1993
MLWKVGRRSGRRAMDEATLREVGRASGGVWWGGRALADGATGGGGFDGASGGVWWVATPRRMALRAATASALADVASTNECGCDFYMAVRAATMNSFGGAWSRGWAEKGRRSQAMVGR

SEQ ID NO: 43773 - protein, 729 aa, Zea mays
  Coding DNA Sequence Number=SeqID_1994
  Homolog annotation: Hit_ID=Q2UU79; Match level="QueryCoverage=35%, HitCoverage=17%, E-value=2e-28, Identity=29%"; Hit description=DNA replication helicase
  Pfam annotation: Domain name=Dna2; Domain location=302-477; Score =181.5; E_value=2.1e-51; Accession=PF08696.1; Description=DNA replication factor Dna2
  Subcellular localization annotation: CTP_CleavageSite=85; ConfidenceScore=5.55e-01
MPPKKRAAAAASSKKPQPSQPSQPAKFGILHFFERQTQASQNAKRQKPDPPAPPPPPPPPPEKEPSEVSPEVTKTLAPKRVRFSPGMLIKQSQDDGVAEVVTWKISPVNHRLGTTKSKQFLGMAPHPYSSEKNSSLDAMKKWHSSPLGLSRCTTLGSNSGVLGSAIVGCDGVGDTQSPFRTPPSLSYGCNEVTFLFLEQQVSSGVTSEGGAEPSGAGQHKKALLDLLDQVEDAIMEEELPADPGNKGGQTTNEDITNNSRSPVADTDLTIPSKKTIHVPPFNSFLVLEVSEKHKADDSSCDRYPVKVLRLLNEHSGTECAVHLCDEWFDSIVGPGDTVNVIGEFSNHGKCIVDHDNNLVIVHPEQLISGTRAGLLNDAPSWQFLEQQAKEVLLKNIETLYACGVNESNMYSTLIEAIPKMLNWFKCFLKGSKCSDVDFGHNEVRKTVGVTEVMDIEEMAWAPRYGMKGVIDASVRSRVESHNGGSYDRIMPLEFKTGKATSGQAAMEHSAQVMLYTLLMTERYLNEDIDLGLLYYLHTDQTLAHGGSGTTSGLGDLFDNLVNHLTVTHHNFLKHWDRLIDLEARASQVKKNILQPHNSNYGSGSSAVPYFVLDIKNGHSIDSSGKSKRYIYNFVQQKMQPETADQLDAQFDSIDFSLKVGDFVKVTHWKISTWYLELWLQQHSYVESRGGAALRLPTVNFTVPTNSFPHGATTSSTHAAQDVLGVASRV

SEQ ID NO: 43774 - protein, 113 aa, Zea mays
  Coding DNA Sequence Number=SeqID_1995
MPDAPPPCCRCAAPACWCWCRVRACGVRAGAGCVRAVCGVRADAAASRAVCGVRAGAASRAGARCGVRAACSVLEPGAELWREAGGGGESGEAMCRRPSVVAATCTCLSLGLS

SEQ ID NO: 43775 - protein, 66 aa, Zea mays
  Coding DNA Sequence Number=SeqID_1996
MGTPDSPVVHRTSTVHCPSTVGARLSLLCWLTGHVWCTPDSPMNYSRARPEKTREWPIESRLEGGE

SEQ ID NO: 43776 - protein, 130 aa, Zea mays
  Coding DNA Sequence Number=SeqID_1997
MAIRILSLTASASGCERNWSCFEGKKAKANNNNKVDPLLAADAVSAQGWIVEGGDEESSNVNIVTGLTWQQIADAWGPKEVTKLRKSARLAQPRDIEEEQLPSKNEEEEPINEEEIEFESDQDEVITTGY

SEQ ID NO: 43777 - protein, 45 aa, Zea mays
  Coding DNA Sequence Number=SeqID_1998
MDAFRIALDARVDYVEVDVSRSYDGVLFALHDSHSGCSGWDNHIS

SEQ ID NO: 43778 - protein, 159 aa, Zea mays
  Coding DNA Sequence Number=SeqID_1999
MVVMEMVVTEPATHGRGSTSRHRRSPNPRRITSPRKEICLLGKRKLVTMIDSVQCAGSRVKDNSEQGQGNGLVREEHWLSSLRLRLPLRQGLLFGVSACFQRCSHCRLGNVVSGIAIVRLTHCELKCEEPRAAEGDSHAGAPYRATIFEWGEDKDWHQR

SEQ ID NO: 43779 - protein, 122 aa, Zea mays
  Coding DNA Sequence Number=SeqID_2000
  Gene Ontology: Mol. function=protein serine/threonine kinase activity; Cellular component=cytoplasm; Biological process=protein amino acid phosphorylation
  Homolog annotation: Hit_ID=Q9LUL2; Match level="QueryCoverage=43%, HitCoverage=11%, E-value=8e-16, Identity=67%"; Hit description =Protein kinase
MNALSNVLEPGDIPTLVELGLTTPPGMAQVSTCACSASRNLGLQTLHLAPKLVSGSGHGNSVDWWAFDVFLYELVYGRTPFKGHTKEATLKNILSKQATYLGFSLCSFARYFVLVLLTYLFA

SEQ ID NO: 43780 - protein, 124 aa, Zea mays
  Coding DNA Sequence Number=SeqID_2001
  Gene Ontology: Mol. function=protein serine/threonine kinase activity; Cellular component=cytoplasm; Biological process=protein amino acid phosphorylation
  Homolog annotation: Hit_ID=Q9LUL2; Match level="QueryCoverage=72%, HitCoverage=17%, E-value=7e-17, Identity=50%"; Hit description =Protein kinase
MPMRRADSFDLADADSGGEEVLFGGSRWDFIPPRVFLGGSGLGVYISDAYTVSGLLGEDVLEGGLLGVALEGRAAVDELVEEDVEGPPVHAVAVATPAHELRREMESLQTEISRGRTRACGHLH

SEQ ID NO: 43781 - protein, 144 aa, Zea mays
  Coding DNA Sequence Number=SeqID_2002
  Gene Ontology: Mol. function=hydrogen ion transporting ATP synthase activity, rotational mechanism; Cellular component=proton -transporting two-sector ATPase complex; Biological process=ATP synthesis coupled proton transport
  Homolog annotation: Hit_ID=Q9SWE7; Match level="QueryCoverage=84%, HitCoverage=53%, E-value=1e-33, Identity=63%"; Hit description =Vacuolar ATP synthase subunit E
  Pfam annotation: Domain name=vATP-synt_E; Domain location=16-144; Score=72.1; E_value=1.7e-18; Accession=PF01991.8; Description=ATP synthase (E31 kDa) subunit
MEDVDVSRQLKQMTNFIRQEAVEKAAEIEAAAAEEFQIEKLQLVEAEKKKIRQEYDRKEKQVGIKKKIDYSMQLNASRIKVLQAQDDLVTDMLESARKELLCISRDHPTYKKLLKTLIVQSVRVLIAGDNTNPTKLNIAENWLF

SEQ ID NO: 43782 - protein, 494 aa, Zea mays
  Coding DNA Sequence Number=SeqID_2003
  Subcellular localization annotation: CTP_CleavageSite=94; ConfidenceScore=5.06e-01
MTAGAGEPRRIVLLLDLDTFLPTSSSSTPAAASYLAEVLPAATSLLAACRSPASLSAGRLFFSSLSPILSSSLLPRPLPAAPTPLSFDLHPATLASLAPLRCLALRATPAHPRAPASSSVAKSLLQLEHDYSWDHDPPRRRRCRGFDPPPNLVALFTPVTEFDLFGDDASFVEKFRKVFGPVRDRLSAIGLQVCWVVVPSASVSASAAASEGIRRAVTELGWWFTTADAVALGSAVAPPALVWGGVGLGGGEGGRRGEVVLEIADVEGKPLVCKGCEVEVVGSSRLQQASGNAVSRIHVRYINSMEDVIKKIYREMEFDLFDDDDGVDYSDSLPSSSNQDDGRCRSQRGSDSASASALHLLQRDARSSRQREDDDRHDKLTARARERRDRQRRLSSFTSWVPDLRRVWALKHPGKEPCAWVPRSRSRSCAKRRRAACTDVVLETPVTSGKRHMSGSESDDARQVAARRSAALGAVSKTLFDDEVVETDVSSSST

SEQ ID NO: 43783 - protein, 185 aa, Zea mays
  Coding DNA Sequence Number=SeqID_2004
  Gene Ontology: Mol. function=DNA binding
MSAPDPCLSKAWVFSAPESRNPARYQLLPSRLDVSRLDTSILKKELVTQPTEVLALGPDLRPEIPYYARTVGGSAWAPRRRDDRGLGLAKPECPMLSRRSTSSRHYFMDPGEAVELGGWHNNSLAIDKAPGVALDALDAYAGVCCRVERTAAAPGIGRLEARSVEEAASSSTGKSSGMKSWCSMV

SEQ ID NO: 43784 - protein, 82 aa, Zea mays
  Coding DNA Sequence Number=SeqID_2005
MAAQELIMAISPCAVLHIITARAEDFKCELQSQSQSQSQAAFRSQDTGGCGGNGAENPLWSPDTSTGLWQCVSVHNIEDIHL

SEQ ID NO: 43785 - protein, 798 aa, Zea mays
  Coding DNA Sequence Number=SeqID_2006
  Gene Ontology: Mol. function=protein-tyrosine kinase activity; Cellular component=integral to membrane; Biological process=protein amino acid phosphorylation
  Homolog annotation: Hit_ID=Q9LDG0; Match level="QueryCoverage=92%, HitCoverage=92%, E-value=0.0, Identity=60%"; Hit description =Putative receptor-like kinase
  Pfam annotation: Domain name=LRRNT_2; Domain location=176-222; Score =19.2; E_value=0.0086; Accession=PF08263.3; Description=Leucine rich repeat N-terminal domain
  Pfam annotation: Domain name=LRRNT_2; Domain location=25-73; Score =18.5; E_value=0.01; Accession=PF08263.3; Description=Leucine rich repeat N-terminal domain
  Pfam annotation: Domain name=LRR_1; Domain location=227-250; Score =1.8; E_value=1.3e+02; Accession=PF00560.23; Description=Leucine Rich Repeat
  Pfam annotation: Domain name=LRR_1; Domain location=252-274; Score =13.3; E_value=0.88; Accession=PF00560.23; Description=Leucine Rich Repeat
  Pfam annotation: Domain name=LRR_1; Domain location=276-298; Score =7.2; E_value=13; Accession=PF00560.23; Description=Leucine Rich Repeat
  Pfam annotation: Domain name=LRR_1; Domain location=300-322; Score =9.8; E_value=4.2; Accession=PF00560.23; Description=Leucine Rich Repeat
  Pfam annotation: Domain name=LRR_1; Domain location=324-345; Score =12.4; E_value=1.4; Accession=PF00560.23; Description=Leucine Rich Repeat
  Pfam annotation: Domain name=LRR_1; Domain location=346-368; Score =11.5; E_value=2; Accession=PF00560.23; Description=Leucine Rich Repeat
  Pfam annotation: Domain name=Pkinase; Domain location=489-759; Score =59.9; E_value=8e-15; Accession=PF00069.15; Description=Protein kinase domain
  Pfam annotation: Domain name=Pkinase_Tyr; Domain location=488-759; Score=59.0; E_value=4.3e-16; Accession=PF07714.7; Description =Protein tyrosine kinase
  Pfam module annotation: Pfam domain module=LRRNT_2::LRRNT_2::LRR _1::LRR_1::LRR_1::LRR_1::LRR_1::LRR_1::Pkinase::Pkinase_Tyr; Domain location=176-222::25-73::227-250::252-274::276-298::300-322::324
MPLPPLLLCVCLYLTHLPRLASSEPDADKAALLAFLAGVGRGATARARINWPTTPLACASPGHGPGWTGVTCSPDGARVVALHLPGLGLSGAVQSGTPFLVASHHHRNGGSRRSTTVQQRSFRCSTSTHQIHPRERPRQAAMPLPLPLPPLLLCVCVCVCLCLYLTHLPRLASSEPDADKAALLAFLAGVGRGATARARINWPTTPLACAGPGPGWTGVTCSPDGARVVALHLPGLGLSGAVQPGTLGRLTALQLLSLRSNNLSGPLPADLLRLPALAGLHLHRNAFSGALPPGLAGLAALQALDLSSNGFGGGIPGALTSLTRLVALDLSNNSLSGRVPDLGLPALQFLNLSNNRLDGPVPPSLLRFADAAFAGNDLTRPPAAAPPAAAAPAARTRRVRLSEAAILAVAVGGCVLAFAVAAVLLLAFCNREGRDDDDDDTGGAGGKGGEKKGRESPESKAVIGKAGEGNRMVFFEGPALAFDLEDLLRASAEVLGKGAFGTAYRAVLEDATTVVVKRLSKEVSAGRRDFEQQMELVGRIRHRNVVELRAYYYSKDEKLLVYDYYASGSVSNMLHGKRGEERTPLDWETRWKIALGAARGVAHVHAENNGRFVHGNIKASNVFVNRDGYGCISDLGLAQLANPIAARSRSLGYCAPEVADTRKASQASDVYSLGVLVLELLTGRSPVQVSGGRGSEVVHLVRWVQSVVREEWTAEVFDGALLRVPDIEEEMVEMLQIAMACVSRTPDRRPKVADVVRTVEEVRRSGTGTRPPSPPATAADADQSEMESSSSAAAAAAQ

SEQ ID NO: 43786 - protein, 180 aa, Zea mays
  Coding DNA Sequence Number=SeqID_2007
  Gene Ontology: Mol. function=hydrolase activity, acting on ester bonds; Cellular component=cellulose and pectin-containing cell wall; Biological process=lipid metabolic process
  Homolog annotation: Hit_ID=Q6H8W7; Match level="QueryCoverage=86%, HitCoverage=41%, E-value=3e-47, Identity=55%"; Hit description =Esterase precursor
  Pfam annotation: Domain name=Lipase_GDSL; Domain location=8-175; Score=-6.3; E_value=0.0058; Accession=PF00657.12; Description=GDSL -like LipaseAcylhydrolase
MSLLTPCVACGLAAARIAGDARVRLIVEHGAATVVVPGVIPVGCAPPVLATFADPDPAGYDPRTGCLRSINEVATRHNALLQDGLRELRARHAAATVVYADFFGPVIDMVTSPAKFGFDEDVLTLCCGGPGRFNYNRHVFCGDPGASECKDPSARLFWDGVHLTEAAYRYVAAGWLSAIT

SEQ ID NO: 43787 - protein, 355 aa, Zea mays
  Coding DNA Sequence Number=SeqID_2008
  Gene Ontology: Mol. function=protein serine/threonine kinase activity; Cellular component=cell surface; Biological process =protein amino acid phosphorylation
  Homolog annotation: Hit_ID=Q5NB61; Match level="QueryCoverage=96%, HitCoverage=52%, E-value=1e-129, Identity=59%"; Hit description =Putative S-domain receptor-like protein kinase
  Pfam annotation: Domain name=PAN_2; Domain location=1-33; Score=2.9; E_value=0.00066; Accession=PF08276.2; Description=PAN-like domain
  Pfam annotation: Domain name=Pkinase; Domain location=73-319; Score =107.3; E_value=4.5e-29; Accession=PF00069.15; Description=Protein kinase domain
  Pfam annotation: Domain name=Pkinase_Tyr; Domain location=74-319; Score=84.6; E_value=3e-22; Accession=PF07714.7; Description=Protein tyrosine kinase
  Pfam module annotation: Pfam domain module=PAN_2::Pkinase::Pkinase _Tyr; Domain location=1-33::73-319::74-319
MSECESACLRDCTCTAFAYNASCLLWFSELRNTIVLDSGLNGIRISKPYSARTVGDHGSLVVFSFAQIKNSTKRFSEKLGEGGFGCVFKGMLPGCTPVAVKKLKDHRQDEKQFRAEVRTIGMIQHINIVRLLGFCAEGSGRFLVYEYMANGSLSSHLFSKSSSKLSWELHYSIALGIARGLAYLHEGCVDDFGMAKLLGRDYSRVLTTVRGTIGYLAPEWISGLPITHKADVYSFGMILLEILSGRRNSEKIEEGRFTYFPSYVAVKLSEGDDVMWLLDSSLESNADAEQLQRACRVACWCIQDAEDHRPMMGQAVHMLEGAMDAQVPPVPRSLQNYVGVEDSTTAEFYISEGSC

SEQ ID NO: 43788 - protein, 56 aa, Zea mays
  Coding DNA Sequence Number=SeqID_2009
MAGDGYQAHETRENFEEGILPGLMKRRNMTTTGDRSVVEFVSDEKSTHHRGFRPLI

SEQ ID NO: 43789 - protein, 53 aa, Zea mays
  Coding DNA Sequence Number=SeqID_2010
MAEKALAGLIPRRDGLGQPVETSHNPRPTQFGGSCTGEMTRSHPRLHGVEFGS

SEQ ID NO: 43790 - protein, 161 aa, Zea mays
  Coding DNA Sequence Number=SeqID_2011
MATRRHQLDWKLYEKDINECLENALRDLDDDGAKHKQPEPELDEPPSSRPAVRRYISPTVVPVRELTPIYRGMETVAASYGGGGEKRELQQQNKQAGGCGHHHHFQMPLHYPRYRREDYEGMPEWQLDRLLSEYGLPVAGGSVQQKRAFAMGAFLWDAGDN

SEQ ID NO: 43791 - protein, 93 aa, Zea mays
  Coding DNA Sequence Number=SeqID_2012
MELLELLEVIMGPSFKILLLVTNVLKKLELDGFLKTNKVRMVWLLETKLGWLLKFLEIMSKELKNEYDRRIDLFLGLQIKQTNKGKIIARASS

SEQ ID NO: 43792 - protein, 37 aa, Zea mays
  Coding DNA Sequence Number=SeqID_2013
MATAAGLAGDLAVRLCRCSLSLRLSYVDSVNQTPHYR

SEQ ID NO: 43793 - protein, 233 aa, Zea mays
  Coding DNA Sequence Number=SeqID_2014
SCEWTYNNVVIRLLEILELCMCRDYSAALLVLVSQLGRSFVDDVGYEERSVSKLRNKLSLLLTGAHFTKSWSLSVQFTAIGALVSVLPLPFDKIVATGSRQLSGSFDVEMKQISEWELFKSSQKEAKKFGIKQEKLGQTGHIGQSGASLVSGPKLAAALGKDAEARWYKSSDNPIVWCPPEKEGGQSDDSVVLRIECPMCHRTVRCTHRQKATTAFQMEEQRLLGPWGYKRGP

SEQ ID NO: 43794 - protein, 452 aa, Zea mays
  Coding DNA Sequence Number=SeqID_2015
  Homolog annotation: Hit_ID=P02977; Match level="QueryCoverage=65%, HitCoverage=56%, E-value=8e-08, Identity=22%"; Hit description=M protein, serotype 5 precursor
  Subcellular localization annotation: CTP_CleavageSite=58; ConfidenceScore=5.02e-01
MAAEPREPTSSLDAQLAASSSSAAGVGGPNPCCATQWKNCQKLVRSRTALREAVKLLQAENEKLRKENSELSKVCKEEHLRGDSAEAARATESDARDLLEKEIIELKTQNMSLKQTQNTCKNNDELLRISELEEENRKLIQILGEERKKITSEKKKIEEEKCKTLEMQRIWKSEAQKSEEYRRVADTERKVANDWRASCERLRSEANELRAQLTAQIQKTEEILKRAEAEKQKVAREKKRADSEKSLSEKNRTLVEVEKKKVTEEKCRADNLFAKLEEQKKLNEHLRTSIQVETKNAIEEKKRGDHLFQKLEEMREQTECLQRKANEFSAGRDVISSGKCGRRHIDRISENANVKLLKEKLKLKKEQLKHVKNVSKLDKAKTALIRRELQSLKQDWTQLLGRFNMLDDHLARGVEDIHVLTQPSQAPSPYTPPYRPVHLVCTQPREPKIRDS

SEQ ID NO: 43795 - protein, 180 aa, Zea mays
  Coding DNA Sequence Number=SeqID_2016
  Homolog annotation: Hit_ID=Q75GP1; Match level="QueryCoverage=61%, HitCoverage=33%, E-value=1e-12, Identity=42%"; Hit description =Expressed protein
MALSPTPTAVAAPPPEPGPEPAPSAELPLPDAIAAALPPDPYEQLEVARKITAVAVASRASRLELEAARLRQRLADRDRLAAELADRAAKLEQALRDADARLRSALDDNAKLAKERDSLAQTSKKLARDLAKLETFKRHLMQSLGDDNSQETLRKADEIFGAENMDLFRSFQGLLSRSLS

SEQ ID NO: 43796 - protein, 937 aa, Zea mays
  Coding DNA Sequence Number=SeqID_2017
  Gene Ontology: Mol. function=homocysteine S-methyltransferase activity; Cellular component=nucleus; Biological process =keratinization
  Homolog annotation: Hit_ID=Q8LIX8; Match level="QueryCoverage=94%, HitCoverage=90%, E-value=0.0, Identity=55%"; Hit description =Putative nuclear matrix constituent protein 1
MCFFLCLGGIFKIYEYQHNLGLILLERKELTSKYEQLKASFEATEIILKRERASQQSALSETRKREENLKKNLAIQKECISNLEKALHDMRGETAEIKVSYEAKLAESLQMMETAQKKFDEAEEKLLTAKSLEADCIRTRNTSLRRLQDIEDREDQLRRYQTSFELENASKEKEINLLRKSLDDTKKILHEKEQCLLKEQVLLNQRDDSILERLAYITSSEKRLEEEKLNLEDERKVLLEEKNKLDLNMQAIISREEAIIQKESILDKRESELLILQETIASKERAEIERLRQEEEIALVRRRQEFDTDMEIKLTSFEEEIDARKALLDQRETTINEKEDAVAQREQNLNLRFAELANKEESLVKKSDELREEEKRLSSERETLHIDLQKEKEEIHNMKLDLEKEKSFFEEEKREAIQAQENLAITQNEREDLQSLQVKLKDEIDSLRAQKVDLMADAERLLSEKERFEIEWELIDEKKEELQKEAARIAEERRVIDEHLKSEFDIIKQEKEDLRVQLKISTESLAHEHAEFMNKMQQEHASWLSRIQLEREDLKKDIDIQRTELLNSAKARQMEIDSYLREKEEEFEQKKSKELEYINSEKETISSKLEHVRLELQKLEEERKRSMLERERREEELSETKKTIDALNEQREKLQEQRKLLHSDRKSITQQMQLLNELEELKIESENRQLSLRQCGKSKHAGVENLEDNGVHLSPDEDQNASPKQTTVKKLEVSPSVSTPISWVKKCAQVIFKRSPEKSADPNNDIPPKLGNVNDCTSLATAYSDGLFACHLENGAEKVPQAIDGLKVGKKRLNNALSHGDSEISQPKRKQQKSATQILRVIGGEIDSNCSPSVLEEKCSKNEHDAVPVGLCGKGPQNPQAEHSEDISVSASEPSNGPGVVDSEDKDGADEESDDEGEDEEEEKTSSAKKLWRFLIT

SEQ ID NO: 43797 - protein, 282 aa, Zea mays
  Coding DNA Sequence Number=SeqID_2018
  Homolog annotation: Hit_ID=Q10SF2; Match level="QueryCoverage=74%, HitCoverage=98%, E-value=7e-18, Identity=34%"; Hit description =Expressed protein
  Subcellular localization annotation: CTP_CleavageSite=48; ConfidenceScore=5.62e-01
MDIAPDATTTSPQRRTLRRAPISSLCPCRARPSSALPLPPRRLPSPVRARARTHAGQAQAQALMEVGPTQQRLGDSFSRGWLAKRGARAPSLEHLVADADLGHSFGSSRSSFIDMDPAALFSMRWTATAAPPPESDFEFGLIIPGGVGGGSDPPSPALVSASRRVIRDGRLVPGDPLFCSARSAPASPSPSPCCGGRAAAAGRRSSWWKMPLQYLRFLLPLYRKVRALRRLPAPRRRPRVAPASPARASASSLDWCHGNADTAVRDAILYCKKCSAAGQQDA

SEQ ID NO: 43798 - protein, 109 aa, Zea mays
  Coding DNA Sequence Number=SeqID_2019
MEQENCVLPFSNMLCNPNFATTTQFLTEQLSHYTKPFDKKGCRHQFNVWAFLGPYTLVGIMMPSALSKDITWWGAQCSTKGLPGCAIFKGMVGSYLCAAAVKCWEQDLW

SEQ ID NO: 43799 - protein, 479 aa, Zea mays
  Coding DNA Sequence Number=SeqID_2020
  Gene Ontology: Mol. function=kinase activity; Cellular component =membrane; Biological process=protein amino acid phosphorylation
  Homolog annotation: Hit_ID=Q10SF4; Match level="QueryCoverage=86%, HitCoverage=94%, E-value=1e-173, Identity=71%"; Hit description =Protein kinase, putative, expressed
  Subcellular localization annotation: CTP_CleavageSite=58; ConfidenceScore=5.45e-01
LSFNQIINPTPFRRSRFPQESQLNKSLPKSTSPPPTAMAPPPTSRCLALALILIGALCAAAAAARFAPADNHLLACGAAAPAVLPDGRRFVPDSGCASTRLRSSSPSLSSAAPPGSPPPPSSLLASARVFSCRASYDLDVRRRGHHILRLHFYPFVPALAAARFHVGAGGLLLLHNFTASSPVVKEFILPVDSDVLVLTFVPDSGSTAFVNAIELVSAPEELVGDIGTLVTSGGAAQIHELSSQVFETLYRINVAGRKVTPFNDTLWRTWVNDEKFLIDTDSSNYMVWSSSGRIAYPKGSKQMTREVAPDNVYNSARSVRPGVNVTWGFPVPASSRYLSRISISPSATGFLAYPYYIDFIVDVKDEGILKLAIGGLKKSRSDEVSGILNALEIMRMNKTSGGMDGDFPIDLHMEYVVSKGIGEFARSLLCGFIFVGLFVALVTLMVRLRTELRNNGTAWSWRQMNSDEGKLARTYQLVP

SEQ ID NO: 43800 - protein, 46 aa, Zea mays
  Coding DNA Sequence Number=SeqID_2021
MAAELQLHGEKVGERGPGETEGLGANQRVSRVVGEEAKLVTPLNPG

SEQ ID NO: 43801 - protein, 100 aa, Zea mays
  Coding DNA Sequence Number=SeqID_2022
MGTGKASLSSAMVLQQKWGVVAAGDADVNEDVPYSLRAQLPYLIIVLSSATVRQAWLDRRRRSRNATTMVTEYSDIGCRSRRAGGASQTPNVLRSHGVLH

SEQ ID NO: 43802 - protein, 188 aa, Zea mays
  Coding DNA Sequence Number=SeqID_2023
  Gene Ontology: Mol. function=protein binding; Cellular component =cellulose and pectin-containing cell wall
  Homolog annotation: Hit_ID=Q6F383; Match level="QueryCoverage=75%, HitCoverage=48%, E-value=6e-37, Identity=44%"; Hit description =Putative leucine-rich receptor-like protein kinase
MCLPSVRYVDLRFNDLCGPVPPALFDKPLDAIFLNDNRFDLELPDNLGNSPAFVLVLANLRLRGCIPRSMGRMAGTLVELLHVARNELWGHVPEGVCALPALCNFTNSYNYFCSEPSRCLDVRQVDDRQNCIAARFTRRVGDTLASASTVVPPSPGPSRRKRRIRICGADVWSQLLHGAGWRDRGGGC

SEQ ID NO: 43803 - protein, 52 aa, Zea mays
  Coding DNA Sequence Number=SeqID_2024
MAQPDPANELVRAIAKGGMMKFLWYSYQGALIVAPNPSAVIEFVSGPKYIKQ

SEQ ID NO: 43804 - protein, 99 aa, Zea mays
  Coding DNA Sequence Number=SeqID_2025
  Homolog annotation: Hit_ID=Q2A9Z4; Match level="QueryCoverage=98%, HitCoverage=19%, E-value=4e-07, Identity=30%"; Hit description=Zinc knuckle family protein
MNHPSYGVHDLPIQIYLARPRGDLPHATRPQADGGLENTWLMDFGCSHNMTKSSRWFSILNLVIGSLSLIWKWHRRLGHLSFDLLCHLSSLDLIKGLPN

SEQ ID NO: 43805 - protein, 187 aa, Zea mays
  Coding DNA Sequence Number=SeqID_2026
MDHPLGLSKYSEPIYLFGIFNRHWIEYYYEEQVESLGDEELALVASQFVRFHNNHQNRWGRFNKEALENKYLYGKVKERAFLASLSDLDHDSNKSASSLSGEEPERRVEDKLNELCFITNTTRGLCTMALSHETVGDDDKDIDDDSTSEVSHFIDDLVAEVEELNTALVNQDKLLRLATRERKESKS

SEQ ID NO: 43806 - protein, 115 aa, Zea mays
  Coding DNA Sequence Number=SeqID_2027
MKYNELVRYMYSCLNLTINELNSIGISKLGDADIVRKIISVLPQHKYGSIITIIYNMEDLSTMTPTIMIGKSATFEMLRKMGQQEKPTSSRPYVFPCDEKKKGKKKAPTPSYSSE

SEQ ID NO: 43807 - protein, 933 aa, Zea mays
  Coding DNA Sequence Number=SeqID_2028
  Homolog annotation: Hit_ID=Q84UR3; Match level="QueryCoverage=85%, HitCoverage=100%, E-value=0.0, Identity=80%"; Hit description =Proline-rich protein family-like
MAPTFLSGRWKLSVPETLDTDAPVPPTAYAPFYCFHLRHYSLAPPLVGPLSMGTREGRRLQTTGDGLDEIGDGLDAIEDGRSDACREMAWRQRNPRLQFSSLSCGLPLLPSPDDDRSPSPATHPSPGTSPPTTTLLMKEEIMFDNQTKPCRSRVDSKSNSSSLKPKFGSSWGSQIVKGFTTDKKTKKTAANASKKPPLPSVENVNQANQQIPYHSRVKRSLIGDFPCSPAGAQVHPHVFDCHNIRSPASHDLFLELDHLREQLRESKERELTLQSELRQCRENPKVSELEKELDSMRDEVDRLARLKISLEAEKTSISEQLSALSSMEEHHEENVRLDSHGNRILTVDGDNAPSENLEFEVVELRRLNKELQFQKRNLAIKLSSAESKLAGLEKNEESDIVAKVQAEASLLRHTNANLSKQVEGLQMSRLTEVEELAYLRWINSCLRHELCNSDQAARATTDIDYNGGMAFNEDDNSEGDAKTSEDSSDIKFSIAERIKQWSQNDKSCQASKKESLLDRAWIEAAEARSPTRRHSLGGPKGCAQDFNIIKRRQSDTFISLPDATDESFAFNKDPAIREKRDLLVDKYDFGRSESSRFVLSKPEVCKSQCLDVEKRALRIPNPPPRPSVSVSNSGPSNGSTVNPPRPPPPPPPPKFSSKSTGVMKRAPQVAELYHSLMRRDSKKDTSGGGICEAANSANVRSSMIGEIENRSSHLQAIKADVETQGEFVKSLIKEVTSAAYKDIEDVVAFVKWLDDELGFLVDERAVLKHFDWPERKADTLREAAFGYQDLKKLESEVSNYKDDPRLPCEIALKKMVALSEKTERGVYSLLRTRDAMMRQCKEFNIPTDWMLDNNLISKIKFASVKLAKMYMKRVAMELQYMGPLNKDPALEYMLLQAVRFAFRMHQFAGGFDPETMDAFEELRNLVHVRNSTQ

SEQ ID NO: 43808 - protein, 284 aa, Zea mays
  Coding DNA Sequence Number=SeqID_2029
MANDWITTYCINEDGFPKVLYAATVRLGIPERPEYMSREFTEHGTESCEVTVHIGASDKYLEMQPWSVTATGSRMQDTVQLVARKALKYLCQMFEWHLGSTPMKYFPPLDRNRPAWAARIRNLGSTTTEKDPTVVAMSGYLLSLDDLCDQLHQRVKDLIQRAEKAETCWHKAKLALAQADARAAEAESRLAVAEEDLREQANRHSQLLRGVYLVDRAKRKERQPRTAAESPPLEGIPLYPLSHPRRRICESVPPTPPASPREAEGRDPEDRAIGTSSQIVSADP

SEQ ID NO: 43809 - protein, 127 aa, Zea mays
  Coding DNA Sequence Number=SeqID_2030
MADSVYSDFLSFKTETTGTGAETTLEKQQCHSKTADMDGNASACPLYISLQLSHLTLPCARLNAHGDHRRNRKLAHSSPRLRSRSYPGSRRLYLPSALVLKHMLEQCWFDFADDKIGQASQSTSRAI

SEQ ID NO: 43810 - protein, 624 aa, Zea mays
  Coding DNA Sequence Number=SeqID_2031
  Gene Ontology: Mol. function=protein dimerization activity; Cellular component=nucleus; Biological process=regulation of transcription, DNA-dependent
  Homolog annotation: Hit_ID=Q8S975; Match level="QueryCoverage=98%, HitCoverage=97%, E-value=0.0, Identity=58%"; Hit description=Auxin response factor 16
  Pfam annotation: Domain name=AUX_IAA; Domain location=422-609; Score=- 107.3; E_value=0.085; Accession=PF02309.7; Description=AUXIAA family
  Pfam annotation: Domain name=Auxin_resp; Domain location=186-264; Score=69.0; E_value=1.5e-17; Accession=PF06507.4; Description=Auxin response factor
  Pfam annotation: Domain name=B3; Domain location=111-213; Score=93.0; E_value=9.3e-25; Accession=PF02362.12; Description=B3 DNA binding domain
  Pfam module annotation: Pfam domain module=AUX_IAA::Auxin_resp::B3; Domain location=422-609::186-264::111-213
MAQGAGRDPEELFEELWRACAGPLVELPQTNERVFYFLQGHLEQLQEPTDPALLAEQIKMFQVPNKILCKAETETDEMYAQITLQPEPDQVDLPQLPEPPLQETSRPVVHSFCKILTPSDTSTHGGFSVLRRHANECLPALDMSMPTPTQELITKDLHGSEWRFKHIYRGQPRRHLLTTGWSTFVTSKKLIAGDAFVYLRLSQSQYIVRLNKYLESSKIGFDVGMRFKMSFEGDDVPIKKFSGTVVDKGDLSPQWQGSEWKTLKVKWDEATNLNGPERVSSWEIEPFDASAPAITMPVQPSMKNKRPRETAEGLDIHALEPAQEFWLSGRPEQHEKTSVSSSEPKHQVAWTSERAGYSAMSSSICQNSAVTGSWFKGFNSSGSHPSLPEISQKLFQVTSNDARVPPWPGLSAYHADEPSSKLSCNTALCSYQTEEVAPRFSNAVEEEKKEPGMFRLFGVNLINHARSSATADKTSVGAGETSARAAGSFEDSAQLSRVTKDHTHMVNGSPREIQSHQSCSGRSRIKVQMHGNDVCRAVDLGNLDGYEQLMGEVGEMFEIKDLGSKEKEEWKVTFINDENETMEVGAVPWQEFCQMVRKIVIHSIGDRGHMEACPCLGQDGKRDY

SEQ ID NO: 43811 - protein, 652 aa, Zea mays
  Coding DNA Sequence Number=SeqID_2032
  Gene Ontology: Mol. function=RNA-directed DNA polymerase activity; Cellular component=intracellular; Biological process=RNA-dependent DNA replication
  Homolog annotation: Hit_ID=UPI00004C1733; Match level="QueryCoverage =98%, HitCoverage=47%, E-value=0.0, Identity=92%"; Hit description =UPI00004C1733 related cluster
  Pfam annotation: Domain name=RnaseH; Domain location=334-461; Score =1.6; E_value=4.1e-05; Accession=PF00075.14; Description=RNase H
  Pfam annotation: Domain name=rve; Domain location=553-650; Score=8.2; E_value=0.0012; Accession=PF00665.16; Description=Integrase core domain
  Pfam module annotation: Pfam domain module=RnaseH::rve; Domain location=334-461::553-650
MKESDQLATSFITPFGMYCYVTMLFGLRNAGATYQRCMNHVFGQHIGRTIEAYVDDIVVKTRKASDLLSDLEVTFRCLKAKGVKLNPEKCVFGVPRGMLLGFIVSERGIEANPEKIAAITSMGPIKDLKGVQRVMGCLAALSRFISRLGERGLPLYRLLRKAECFTWTPEAEEALGNLKALLTKAPILVPPAAGEALLIYVVVTTQVVSAAIVVERQEEGHALPVQKPVYFVSEVLSETKICYPQVQKLLYAVILTRRKLRHYFESYPVTVVSSFPLGEIIQCREASGRIAKWAVEIMGETISFAPRKAIKSQVLADFVAEWVDTQLPIAPIQPELWTMFFNGSLMKTGAGAGLLFISPLGKHIRYVLRLHFPASNNVAEYEALVNGLRIAIELGVRRLDARGDSQLVIDQVMKNSHCRDPKMEAYCDEVRRLEDKFYGLELNHIARRYNETADELAKIASGRTTVPPDVFSRDLHQPSVKIDDTPEPEAPSAQPEAPSAPEAPRALVGNAFRQGFYWPTAVADATRIVRTCEGCQFYARQTHLPAQALQTITITWPFVVWGLDLVGPLQKAPGGYTHLLVAIDKFSKWIEVRPLNSIRSEQAVAFFTNIIHRFGVPNSIITDNGTQFTGRKFLDFCEDHHIRWTGPPWLIP

SEQ ID NO: 43812 - protein, 84 aa, Zea mays
  Coding DNA Sequence Number=SeqID_2033
MTGEHAKREMVTGENPEASGRKNDERTPLKEVGDKHKEESADSIKSHRKGDKKKKNKGGGLLRDRLFITFHLWRRVYHFKAPRE

SEQ ID NO: 43813 - protein, 151 aa, Zea mays
  Coding DNA Sequence Number=SeqID_2034
  Subcellular localization annotation: CTP_CleavageSite=51; ConfidenceScore=5.00e-01
MTENDFSKIVVDSAITDRNRLGPARMKALCGFSFRSKRIPLPSRLPQALIRLAARHSLPLPVLVLVLVLSALPLRHFARNGTQAAADPATARRLGDRAAWPRPRDDASAPPYIHKPQHTHTHQGGGDDRAISGDELQLRLHIPHACQAVMP

SEQ ID NO: 43814 - protein, 84 aa, Zea mays
  Coding DNA Sequence Number=SeqID_2035
  Gene Ontology: Cellular component=integral to membrane; Biological process=vesicle-mediated transport
  Homolog annotation: Hit_ID=Q852J3; Match level="QueryCoverage=62%, HitCoverage=24%, E-value=9e-20, Identity=84%"; Hit description =Putative vesicle trafficking protein
  Pfam annotation: Domain name=Synaptobrevin; Domain location=7-84; Score=2.0; E_value=0.029; Accession=PF00957.11; Description =Synaptobrevin
MGKVFKSISRVESTRANRIKYANSCRQQPKKEVSEMSSRLTSDTRIYAEKAKDLNRQALIRKYAPVAIVIGIVVMLFWVKNKIW

SEQ ID NO: 43815 - protein, 304 aa, Zea mays
  Coding DNA Sequence Number=SeqID_2036
  Homolog annotation: Hit_ID=Q1SI69; Match level="QueryCoverage=47%, HitCoverage=75%, E-value=4e-21, Identity=37%"; Hit description =Harpin-induced 1
  Pfam annotation: Domain name=Hin1; Domain location=151-288; Score =53.4; E_value=7.5e-13; Accession=PF07320.4; Description=Harpin -induced protein 1 (Hin1)
MHHLPTGRRREPPGAGELTRQQPPPAGPAPAPGHHHRPPPADRGRPFFMPPPAPPGRSHSNEASPADPPIASASSSSSRLPPPPPPPPRPRPSPHPRVYGDYDPAEGLRRPPLPLPPPRRPPSPCSSALASCLAATAFLLLSAGGAGAALFLLFRPRPPDISVAGVRLPSFSASNGTVAFTFEQTAAVRNPNRSPLAHFDSSLRVAYAGGDLGAVYIPAGLIDGGRTKHVSAVFDVPAIPVAAQPQGAVEAAQQAQPPVIEVRSLLVVKGRVNVLRVLTHRVQAAKLCRVGVSPLDGTVLGFRC

SEQ ID NO: 43816 - protein, 581 aa, Zea mays
  Coding DNA Sequence Number=SeqID_2037
  Gene Ontology: Mol. function=DNA binding; Biological process =regulation of transcription
  Homolog annotation: Hit_ID=Q5NB82; Match level="QueryCoverage=99%, HitCoverage=61%, E-value=0.0, Identity=75%"; Hit description=Nodule inception protein-like
  Pfam annotation: Domain name=PB1; Domain location=487-569; Score =84.8; E_value=2.7e-22; Accession=PF00564.15; Description=PB1 domain
  Pfam annotation: Domain name=RWP-RK; Domain location=235-286; Score =108.3; E_value=2.2e-29; Accession=PF02042.6; Description=RWP-RK domain
  Pfam module annotation: Pfam domain module=PB1::RWP-RK; Domain location=487-569::235-286
MGEVCMSTSDVAFHVIDAHMWGFRDACVEHHLQRGQGVPGKAFISHKPCFSKDIRKFCKLAYPLVHYARMFGLAGCFAICLQSSYTGNDDYILEFFLPPDCSDEDDQNALLESVLTLMKRCLRSLKVVGDRDLSGVSLHLSNVLKLENEEFKTDAQFDNSDGSLCQSPNGDRHGGSHEFDGGNKKVLDVPEGQLLTDDFSQGNGTSAGRPNGSGASDSSVLHKTNKPPERKRGKAEKTISLEVLQQYFSGSLKNAAKSLGVCPTTMKRICRQHGISRWPSRKINKVNRSLSKLKQVIESVQGSDAAFNLTSITGPLPIPVGPSLDSLNVEKLTQSKVAELSNIAVDGDRDSLQKSLGNDGHFGIVMPQQGSTDHNNDTQLEADKASHSRSSSGEGSINSRTSEGSCQRSPANQTFVCKPIASTFAEPQLNPEEFNKEPFQEPQLPLSRMLIEDSGSSKDLKNLFTSTSDQPFLAPPNNLVPMKHSGSVTIKASFKEDIVRFRFSCSGSVIVLKEEVAKRLRMDVGTFDIKYLDDDHEWVKLTCNSDLEECMEISRLSGSHVIRLSVSDIATHFGSSCGSSG

SEQ ID NO: 43817 - protein, 147 aa, Zea mays
  Coding DNA Sequence Number=SeqID_2038
  Gene Ontology: Mol. function=beta-amylase activity; Biological process=polysaccharide catabolic process
  Homolog annotation: Hit_ID=Q5NB81; Match level="QueryCoverage=77%, HitCoverage=20%, E-value=2e-54, Identity=84%"; Hit description =Putative beta-amylase PCT-BMYI
  Pfam annotation: Domain name=Glyco_hydro_14; Domain location=1-144; Score=-243.7; E_value=0.0015; Accession=PF01373.8; Description =Glycosyl hydrolase family 14
MGASLAALAAAGVAGVAVELWWGVVERRSPGEYDWAGYLELAAMARRHGLRVRAILAFHQCGAGPHDLPWIPLPQWVLEEMDKIPDLSYTNRYQKRNKEYISLGCDILPVLKGRSPMQAYSDFMRSFHNTFEDYLGDTITVCIFPVS

SEQ ID NO: 43818 - protein, 67 aa, Zea mays
  Coding DNA Sequence Number=SeqID_2039
MDDTSLRPPIFAVHGMAPTTTSIGSGLDLSFQNCGIVNYGIVMTKVYCSISKTVVFKNFVPKQGLIV

SEQ ID NO: 43819 - protein, 111 aa, Zea mays
  Coding DNA Sequence Number=SeqID_2040
MAVALSRGILGQIQILVLATCLRSDVTSAEWVVGALGDGRGRRGKFFLKEGTNKASLSNTNPSCDDRAGRLHHHDITDDVIQCITTEYGPIDRIVPHPRNGFGFELELLAS

SEQ ID NO: 43820 - protein, 130 aa, Zea mays
  Coding DNA Sequence Number=SeqID_2041
  Subcellular localization annotation: CTP_CleavageSite=87; ConfidenceScore=5.58e-01
MNSQAPMNSDGDQGSSTSRWPPSPVDATLASARSQVALVWTRAPASSNMPLHQHVSKSQHLSPTPSVLPRLLAPARLLHGRALVDAPAMVLAGRDSHPISVLEVAHVSNINLMSSNQQQEYHRPYDSGQF

SEQ ID NO: 43821 - protein, 217 aa, Zea mays
  Coding DNA Sequence Number=SeqID_2042
MNPKILSNQVEYAFFSLLSPSLDASCPRGHHVFVATVASSELSLLCFLLIVVYLHVTLLELATRLETLDDRSGTPWPRAVRGGRWWRGLWGQEKEGAVGQSSPSKARPRRRGTASMGNQPLVTGKMEGYNDKSNTCNKYKRTYLAPFITIALYVYIFRTLKIIEELLLITLQSDNSCKICVVVLESNWGTIRFVFGRDAGEDSLRMVDHGDPSKLRH

SEQ ID NO: 43822 - protein, 153 aa, Zea mays
  Coding DNA Sequence Number=SeqID_2043
MGKNNKRKREPTPPSEEFGDSEYSEEEFSSESEGSPAPIPLRESSDDSDDSQGLAAEVWTYIRAVERSGLEGSDESEYSSDEEDSDGDGEDEDDDDDDDEGGGGGDGDGGGRGGGSGSKGGDGGGSRGGGSGGGSSRGSTRGGSGGGSNRASG

SEQ ID NO: 43823 - protein, 45 aa, Zea mays
  Coding DNA Sequence Number=SeqID_2044
MGQGERQGRELERALKRERMASQPQGACRGARRLDGVEQDANRPN

SEQ ID NO: 43824 - protein, 136 aa, Zea mays
  Coding DNA Sequence Number=SeqID_2045
  Homolog annotation: Hit_ID=Q657A2; Match level="QueryCoverage=43%, HitCoverage=19%, E-value=1e-23, Identity=91%"; Hit description=DNA repair protein radA (RadA)-like
MERRVVGDVQNRLRRVIRVRIVIIDSVTFHFRQDFEDLALRTRVLSGLSLKLMKIAKTYNLAVVLLNQVTTKFTEGSFQLTLALEQQEVSTKNFLAFVIKVAFLFWFWAHVSSDQVKIAEMHMGKHLLIAAKTSVP

SEQ ID NO: 43825 - protein, 123 aa, Zea mays
  Coding DNA Sequence Number=SeqID_2046
MNTAAPTSHGGGPAEDSHIAHPNPKTATVGPKRSRERGEFVGGSYQAFGVAENSGHDKVLPGGAETPVGNSWHPGPRAPGFYSPEEGISPLEEAETVGRIGAILLRERNPRRPLVVGEDDPTV

SEQ ID NO: 43826 - protein, 304 aa, Zea mays
  Coding DNA Sequence Number=SeqID_2047
  Homolog annotation: Hit_ID=Q9FLM4; Match level="QueryCoverage=68%, HitCoverage=92%, E-value=2e-13, Identity=28%"; Hit description =Arabidopsis thaliana genomic DNA, chromosome 5, P1 clone:MEE6
MAAMAPAAVSFLAMALLLLSDAEAKFLPNNITVVGSVYCDACSNNTFSKHSFFLKGQCRCYTISALPLTILASSCIAFFFLPNNGVTVPFSSQHCHKNVFKICVCTEEVGARVLIKCSFKVNSTSSEELSLEAERTTDQHGVYKLDVPPVDGFECREGHELRSACRATLVRSSSAACNVPGLGASTQHIELRSRATSACFLNLNALNFRPAKRDGALCHAQGGDDAFGSSLFFWPFLPLFWPPFRVPGGGAGGTVSFPWPFPVPAWLVPFLRPPFLPFPLYEPAPSPPPPFYRFPPPREAVSRP

SEQ ID NO: 43827 - protein, 167 aa, Zea mays
  Coding DNA Sequence Number=SeqID_2048
  Gene Ontology: Mol. function=nucleic acid binding; Cellular component= intracellular; Biological process=chromatin modification
  Homolog annotation: Hit_ID=Q7EZ27; Match level="QueryCoverage=69%, HitCoverage=60%, E-value=5e-16, Identity=38%"; Hit description =Putative zinc finger transcription factor ZFP2
  Pfam annotation: Domain name=zf-C2H2; Domain location=31-53; Score =21.1; E_value=0.0041; Accession=PF00096.16; Description=Zinc finger, C2H2 type
  Pfam annotation: Domain name=zf-C2H2; Domain location=77-99; Score =21.1; E_value=0.004; Accession=PF00096.16; Description=Zinc finger, C2H2 type
  Pfam module annotation: Pfam domain module=zf-C2H2::zf-C2H2; Domain location=31-53::77-99
MFSHGLRDGDTTDATRAVGMGPTSANMADGYKCSVCEKVFTSYQALGGHKTSHRKPPAAAAPSDKASSSGTAHEKLHQCSLCPRTFSSGQMLGEHMTSHRKPSPPVMVRDFDLNMPSEAEPEAAPPDVKRACTDDDVAGLSRSCFAERRHGQKSHVLVEWLSDNGPT

SEQ ID NO: 43828 - protein, 459 aa, Zea mays
  Coding DNA Sequence Number=SeqID_2049
  Gene Ontology: Mol. function=DNA binding; Cellular component =mitochondrion; Biological process=DNA integration
  Homolog annotation: Hit_ID=UPI00004C1731; Match level="QueryCoverage =90%, HitCoverage=33%, E-value=0.0, Identity=75%"; Hit description =UPI00004C1731 related cluster
  Pfam annotation: Domain name=RnaseH; Domain location=37-164; Score =6.8; E_value=1.3e-05; Accession=PF00075.14; Description=RNase H
  Pfam annotation: Domain name=rve; Domain location=166-330; Score =72.2; E_value=1.7e-18; Accession=PF00665.16; Description=Integrase core domain
  Pfam module annotation: Pfam domain module=RnaseH::rve; Domain location=37-164::166-330
MGETISFAPRKAIKSQVLADFVAEWVDTQLPTVPIQPELWTMFFDGSLMKTGASAGLLFISPLGKHLRYVLRLHFPASNNVAEYEALVNGLRIAIELGVRRLDARGDSQLVIDQVMKNSHCRDPKMEAYCDEVRRLEDKFYGLELNHIARRYNETVDELAKIASGRTTVPPDVFSRDLHQPSVKIDDTPEPEAPSAQPEKAPGGYTHLLVAIDKFSKWIEAVAFFTNIIHRFGVPNSIITDNGTQLTGRKFLDFCEDHHIRVDWAVVAHPMTNGQVERANGMILQGLKPRIYNDLNKFGKRWMKELPSVVWSLRTTPSRATGFTPFFLVYGAEAILPTDLEYGSLRTRAYADQSNQASREDSLDQLEEARDMALLHSARYQQSLRRYHARGVWSRDLQVGDLVLRLRQDARGRHKLTPPWEGPFVIAKVLKPGTYKLANSQGEVYSNAWNIQQLRRFYP

SEQ ID NO: 43829 - protein, 130 aa, Zea mays
  Coding DNA Sequence Number=SeqID_2050
MAALSPLTEARGRQQGLDIPNSCPSARLQRSSDGHDTTRTGCQNLSGCHDGMKDQGPLTGGWPRGEEDGTGARVRPLAPSPAWTLVTPYCKRTRPGRGTNTKAAGFPPPSLSGCLFPPSRSVSESSLEGG

SEQ ID NO: 43830 - protein, 489 aa, Zea mays
  Coding DNA Sequence Number=SeqID_2051
  Gene Ontology: Mol. function=dihydrolipoyllysine-residue acetyltransferase activity; Cellular component=chloroplast stroma; Biological process=acetyl-CoA biosynthetic process from pyruvate
  Homolog annotation: Hit_ID=Q9SQI8; Match level="QueryCoverage=78%, HitCoverage=88%, E-value=5e-82, Identity=44%"; Hit description =Dihydrolipoamide S-acetyltransferase
  Pfam annotation: Domain name=2-oxoacid_dh; Domain location=230-419; Score=90.3; E_value=5.9e-24; Accession=PF00198.13; Description=2 -oxoacid dehydrogenases acyltransferase (catalytic domain)
  Pfam annotation: Domain name=Biotin_lipoyl; Domain location=39-112; Score=63.1; E_value=9.1e-16; Accession=PF00364.12; Description =Biotin-requiring enzyme
  Pfam annotation: Domain name=E3_binding; Domain location=163-199; Score=64.6; E_value=3.1e-16; Accession=PF02817.7; Description=e3 binding domain
  Pfam module annotation: Pfam domain module=2-oxoacid_dh::Biotin _lipoyl::E3_binding; Domain location=230-419::39-112::163-199
  Subcellular localization annotation: CTP_CleavageSite=48; ConfidenceScore=5.43e-01
MASLIPPCLSVPTAPGRARLAAPGAPRRRRMAVVRAKIREIFMPALSSTMMEGKIVSWTAAEGDRVGKGDPVVVVESDKADMDVETFHDGIVAVVLVPAGGTAPVGAPIALLAESEEEVALARARAQALSQGQSQAPSPPHAAAALGPPPPAPVAPPATKGIATPYAKKLAKQHRVDIAGVVGTGPHGRVTAADVEAAAGIKHKRPPPPPPPASVDAAPLVPASAVLPPVPGGTVVPFTTMQAAVSKNMVESLRVPTFRVSYSMITDKLDALYEKVKSKGVTKTVLLVKAAAVALTQHPVVNASCRDGKSFSYNNDVNIGVAVALEGGLLTPVLEDADKGAIMAVGASRPTVVADKDGFFSIKSEMLLNLKAQIICDPSACSLEHVNVTADHRIIYGADLAAFLQTFAKIVEDPECLTLKFNRSFFPVLSKVKANEHSLSGRIRWTFRTVPRFFFWLLQQAFTVTEQNDAGFLNYKKVKDARQAYGYVL

SEQ ID NO: 43831 - protein, 1303 aa, Zea mays
  Coding DNA Sequence Number=SeqID_2052
  Gene Ontology: Mol. function=mismatched DNA binding; Cellular component=MutSalpha complex; Biological process=mismatch repair
  Homolog annotation: Hit_ID=Q6DQL6; Match level="QueryCoverage=87%, HitCoverage=92%, E-value=0.0, Identity=49%"; Hit description=DNA mismatch repair protein
  Pfam annotation: Domain name=MutS_I; Domain location=356-447; Score =95.1; E_value=2.2e-25; Accession=PF01624.10; Description=MutS domain I
  Pfam annotation: Domain name=MutS_II; Domain location=456-623; Score =22.2; E_value=0.0003; Accession=PF05188.8; Description=MutS domain II
  Pfam annotation: Domain name=MutS_III; Domain location=637-964; Score= 59.9; E_value=8.2e-15; Accession=PF05192.9; Description=MutS domain III
  Pfam annotation: Domain name=MutS_IV; Domain location=828-919; Score =114.3; E_value=3.6e-31; Accession=PF05190.8; Description=MutS family domain IV
  Pfam annotation: Domain name=MutS_V; Domain location=970-1192; Score =258.0; E_value=2e-74; Accession=PF00488.12; Description=MutS domain V
  Pfam module annotation: Pfam domain module=MutS_I::MutS_II::MutS _III::MutS_IV::MutS_V; Domain location=356-447::456-623::637-964::828- 919::970-1192
  Subcellular localization annotation: CTP_CleavageSite=51; ConfidenceScore=5.87e-01
MASRRASNGRSPLVRKQSQITAFFSSPTPSPSPSGPSPGASKPSPSPLNPSARTRSPLAAVSPSSPKLPQPQQKQKEVKKVKEEHDAALVPAPAAAEVVGRCLRVYWPLDDAWYKGKVEAYDAASRRHRVKYDDGDEEEVDLRKEKFEWAAVVEESTLLPARKLRRLRRMSDISVAKSPAEAEDGAGDSTEDEDWKRDTVVEDASEEVELDEEDEEEVVAVRSRKRNPKNSLMSGSTPSTLGSGLTSESEPRISKRRKNVDVASLDFAKRFTFEAVNTNRKVDPEVPMSCGQKGQTTGNDYTAPTGDAAERFGQRDAEKFKFLGEGRKDAKGRRPGNPGFDPRTLLLPPQFLKNLTGGQRQWWEFKSQHMDKVLFFKGEQPHCGFPEKNLSVNLEKLAEKGYRVLVVEQTETPDQLELRRKEMGIKDKVVRREICAVVTKGTLIEGEHLLANPDPSYLLSVTESYQRSPNKSQDTCTIGVSIVDVSTSKFIVGQFQDDPERHGLCSILSEMRPVEIIKPSKMLSPETEKALNNNTRKPLINELVPSTEFWDAEKTIDEIKQYYSSANKQKKADDIQDCVDCLPNLLRELIGAGDKTYALSALGGSLFYLRQTLLDEKILPCAEFEPLACSGFINNIRKHMILDTAALENLELLENTRTGGLSGTLYAQLNHCVTGFGKRLLKRWIAKPLYDRREILRRQSAVATFKGVGQDCAAQFRKDLSRLPDMERLLARLFSSCDENKRSSSVVLYEDASKKLLQQFTSALCGCQQMFHACSSISTLICSEGSQLIDLLSPGKGLSNISSILDRFRDAFDWSEADRNGRIIPSEGCDPEYDATCNAIEEIKSSLKEYLKEQRKLLRPASVNYVNVGKDMYLIEVPESLGGSVPRNYELQSTKKGFYRYWTPELKELILELSKAESEKESKLKAILQNLIQLFVEHHTEWRQLVSVVAELDVLTSLAIASGYFEGPSCCPTIKESNGTDDTPTFHARNLGHPILRSDSLGKGSFVPNDVKIGGPGNASFIVLTGPNMGGKSTLLRQVCLTIILAQIGADVPAEKLELSLVDRIFVRMGARDHIMAGQSTFLVELEETASVLSSATKNSLVVLDELGRGTSTSDGQAIALAMEHNDTKVSLCHMACEVVEGVGGLEEVTFLYRLTPGACPKSYGVNVARLAGIPTKLLQRANEKSSEFEANYGKRHKMTNDKHVSAQSDDKFSAIRDLFRIVKTWPRPEDQEASISMLRKLQKRAKLYYPFQQFCALTNSPTRPGAPRSEHRPSDPTNLLEKKLINANLINAMYGYMLVFDQ

SEQ ID NO: 43832 - protein, 57 aa, Zea mays
  Coding DNA Sequence Number=SeqID_2053
MDDLGIEAKEAAAREVVTEPKFYPTDDVKPRVHSIRKPKPTKLKEIGLHLFLIDFGG

SEQ ID NO: 43833 - protein, 71 aa, Zea mays
  Coding DNA Sequence Number=SeqID_2054
MPRTVLILLVGRFMVKRVVFLKQLKSGLLLRLGVIATQGILKHEVEYEIREVEAYVFLLPAGVFVAIMPKL

SEQ ID NO: 43834 - protein, 266 aa, Zea mays
  Coding DNA Sequence Number=SeqID_2055
  Gene Ontology: Mol. function=protein dimerization activity; Cellular component=nucleus; Biological process=regulation of transcription, DNA-dependent
  Homolog annotation: Hit_ID=P93426; Match level="QueryCoverage=59%, HitCoverage=76%, E-value=2e-26, Identity=50%"; Hit description =Leucine zipper protein
  Pfam annotation: Domain name=bZIP_1; Domain location=176-234; Score =49.1; E_value=1.5e-11; Accession=PF00170.11; Description=bZIP transcription factor
  Pfam annotation: Domain name=bZIP_2; Domain location=176-234; Score =39.7; E_value=9.9e-09; Accession=PF07716.5; Description=Basic region leucine zipper
  Pfam module annotation: Pfam domain module=bZIP_1::bZIP_2; Domain location=176-234::176-234
  Subcellular localization annotation: CTP_CleavageSite=24; ConfidenceScore=5.35e-01
MASSRVMPSSSPSHTASDLARLAQAASRPGGGGSGLGSMNVEELLRGIYSDMPTPAPPASEPERPRSPAPAPEVATRRTAEEVWKEITGGGGSGEPVPPVAAQAAVPAGGGGAGGPEMTLEDFLAREEGAVKEDGVRVSGPSAPAMGFLGGAEGVGVPGGGGGRGRKRQLMDPVDRAAMQRQKRMIKNRESAARSRERKQAYIAELESLVTHLEEENAELLREQEERHQKRLKENIVTISIYHHKIVIALGTGDASHSEEKTIRRS

SEQ ID NO: 43835 - protein, 255 aa, Zea mays
  Coding DNA Sequence Number=SeqID_2056
  Subcellular localization annotation: CTP_CleavageSite=70; ConfidenceScore=5.47e-01
MVAAQAPPGRGGPRGQPLGRGGPRGQPPNRDGPGASQNRRPTGQARRPTSRPEPARPKGEAETLAAPCCLAAAVRAVAQPPPRSLGASPCAVAMPSRSGRVLVAPGEGTRAGSPHDAGVDGRRAEPMAGLLHPWAGRARGGTPGLTEARAAMARGRRATAVGAASAARPHRAPRAWSEPPRSAPASRATGTEGPARPCRGRGRSCCRQAAEHPVGPHRARPCAEAPAVLAPAPGGRAKLSSAPWPRWPSPRQEAE

SEQ ID NO: 43836 - protein, 67 aa, Zea mays
  Coding DNA Sequence Number=SeqID_2057
  Gene Ontology: Cellular component=ribonucleoprotein complex; Biological process=mRNA metabolic process
  Homolog annotation: Hit_ID=Q5N9F1; Match level="QueryCoverage=57%, HitCoverage=37%, E-value=2e-13, Identity=100%"; Hit description =Small nuclear ribonucleoprotein-like
MAAAEEEIAVKEPLDLIRLSLDERIYVKLRSDRELRGKLHFGVERIGLAVVLVSAWFVPAVSRELQI

SEQ ID NO: 43837 - protein, 99 aa, Zea mays
  Coding DNA Sequence Number=SeqID_2058
MSGAAGVVAAKEPSGTAALGDQVRKKYRYCPILNKWLRLEEGTGPILHTDSIRARPNPDCQIVIGWLRNKRTLSTSWFCIRAPARLINPPSNPSKGLFG

SEQ ID NO: 43838 - protein, 127 aa, Zea mays
  Coding DNA Sequence Number=SeqID_2059
MPLKPSTSRLQKLHACVVASDGRASGQYWSTQTNSYGGVLHVSSENREECLLDILDRIRAAVEGGVHCGVAVTLAIAQLRSGHNLCHIVSLPEGMSRGLDDLVNDLNEVVDIIVDEVPVEDIICGAL

SEQ ID NO: 43839 - protein, 111 aa, Zea mays
  Coding DNA Sequence Number=SeqID_2060
  Homolog annotation: Hit_ID=Q5NB64; Match level="QueryCoverage=61%, HitCoverage=9%, E-value=3e-31, Identity=97%"; Hit description =Putative VHS1 protein
MDQSRRAVESYWRSRMVDGVTADDDKVAPVYKLEEICELLRASDASIVKEVADFVLKRLDNKSPLVKQKTCGIAVVAEVVSCGESDSCTLETELDFGDAVVDTFILVLLDT

SEQ ID NO: 43840 - protein, 92 aa, Zea mays
  Coding DNA Sequence Number=SeqID_2061
  Homolog annotation: Hit_ID=Q2QMD0; Match level="QueryCoverage=43%, HitCoverage=9%, E-value=4e-07, Identity=70%"; Hit description=Lectin protein kinase, putative, expressed
MECVLVVGLWCTQQDPTLRPSIRQAVSALRDEAPLPTIIVSKAPLLVGRLGSLLSSFVPDDGRVTVESATASIGSLNFGFNGYFGYRGVKPD

SEQ ID NO: 43841 - protein, 511 aa, Zea mays
  Coding DNA Sequence Number=SeqID_2062
  Gene Ontology: Mol. function=small conjugating protein ligase activity; Biological process=protein modification process
  Homolog annotation: Hit_ID=Q5NAY5; Match level="QueryCoverage=69%, HitCoverage=74%, E-value=1e-140, Identity=68%"; Hit description =Ubiquitin-conjugating enzyme-like
  Pfam annotation: Domain name=UQ_con; Domain location=232-376; Score =106.2; E_value=9.6e-29; Accession=PF00179.16; Description=Ubiquitin -conjugating enzyme
MGGGTRRSGPRGRRRGLRRRPALATAISVGVAPHAAAAKAEGRVQREQQEDDDERRTKWRLTSSASLQQGSSSSWHTTGAVSCGAAQQQKRQRCQGSSSDQAGSSSSSSLQISEPEPQQIQEEEDYYMEDDCDDDFDGYDEDDYDFDEADFNQHLADKFDDLDLPPGVEATVPWLQKTTPKEDVKEPPKSNTADENANKYTQFKQFDTVQNFSDHYYAKNSHGEPNRAWSKRVQHDWKLLEKDLPAYIFVRVAEDRMDLLRAAIIGPKGTPYHDGLFFFDIHIPSAYPCAPPLVYYHSGGLRINPNLYNNGKVCLSLLGTWDGRGCEKWNPAQSTMLQVLVSIQALILNDKPYYNEPGYESYANTPNGERLALDYNDNTFLHSCKTMLYSLRRPPEHFADLVAGHFRVHGHTILAACKHYMAGNDIGSVVPEEEEEEEEEESSEHKSGDAGASGSAPELGVIKAIPTKRRSSFNPSLKVLYEDLLMEFNVKGADTRKFIDEKLKKNKPAAA

SEQ ID NO: 43842 - protein, 180 aa, Zea mays
  Coding DNA Sequence Number=SeqID_2063
MARSNWLDRFVNGGKEVPMVLVGYLLGGKCQAYHAGKTTDLPLTYLPIKPFNHTLLLDISVIDGEPEIRSTNRKRGDEALVPRFYWSTVCAMEFPDGGFPLSMLIIARCSQVLESLLSWGEWDACLYAPGSIGATKSNPDFRATEFCWRIVRGIGKEEKRSCCSSGSTDQRPMKKMMTSP

SEQ ID NO: 43843 - protein, 239 aa, Zea mays
  Coding DNA Sequence Number=SeqID_2064
  Gene Ontology: Mol. function=protein serine/threonine kinase activity; Cellular component=cytoplasm; Biological process=protein amino acid phosphorylation
  Homolog annotation: Hit_ID=Q5NB70; Match level="QueryCoverage=63%, HitCoverage=40%, E-value=1e-38, Identity=51%"; Hit description =Putative dual specificity kinase 1
MSLKFYCQYTELWTCYNLGLKAATKAQKYDKICEKKISTPIERPDYAFVKRLFRDLFISQDYEFDYVFDWTVLKYKQGHKQKQSPGAPIARPIQAHGPKQAGVNGVINHNEAQEHVETSRPTGQAAWSQDKQATNNDRNPDVRHTVNLRQDMAAGKAQLTTSVALPSSQWKNYTHLTVGFLHSSTMPQENDRLDVSCIVTEVAPEALMHLMILLADNMEDVLALDTADTQPNRSRICHC

SEQ ID NO: 43844 - protein, 411 aa, Zea mays
  Coding DNA Sequence Number=SeqID_2065
  Homolog annotation: Hit_ID=Q9LKC2; Match level="QueryCoverage=64%, HitCoverage=62%, E-value=4e-30, Identity=32%"; Hit description =Arabidopsis thaliana genomic DNA, chromosome 5, BAC clone:F6B6
  Pfam annotation: Domain name=DUF828; Domain location=36-291; Score =106.5; E_value=7.7e-29; Accession=PF05703.2; Description=Plant protein of unknown function (DUF828)
  Pfam annotation: Domain name=PH_2; Domain location=301-406; Score =149.1; E_value=1.2e-41; Accession=PF08458.1; Description=Plant pleckstrin homology-like region
  Pfam module annotation: Pfam domain module=DUF828::PH_2; Domain location=36-291::301-406
MEQCADDHGGQVPRLEGIEEEGSPADKWAPTTVRPPETPTETMEFLARSWSLSAAEISKALRALSCGNAASDSPPAVVATSTAERPPLGSDHRRLSLPQKADAAAGAGGEAGGGTSQPISPRVHLGDVKLLRAAGRGKTVGAWIKEQREKKRAEARSRNAQAYAATSVAGVAAAVAALVAGAVFSSSSAAPEQRPAKGDGGGAKTAAAVASAAALVASHCVEMAQAIGASHDQILAAIHSAVNAQSSGDVMALTAGAATALRGAAMLRARLHKEIQATALPGDGREPERDISPLVFVSRGGELLKRTRQGALHWKLVTVYINSGFEVVLKMQSAHMAGTFIKTKKCVVLDVCSEIPAWAGREVGRRGYLGIRTVERVIEFEVRSRREQRKWVQGITGMLLRRDSINNAACL

SEQ ID NO: 43845 - protein, 483 aa, Zea mays
  Coding DNA Sequence Number=SeqID_2066
  Gene Ontology: Mol. function=ATP binding; Cellular component =ubiquitin ligase complex; Biological process=electron transport
  Homolog annotation: Hit_ID=Q1EPE0; Match level="QueryCoverage=76%, HitCoverage=78%, E-value=3e-54, Identity=37%"; Hit description=WD-40 repeat family protein
  Pfam annotation: Domain name=WD40; Domain location=153-191; Score =22.4; E_value=0.0017; Accession=PF00400.22; Description=WD domain, G- beta repeat
  Pfam annotation: Domain name=WD40; Domain location=195-233; Score =39.4; E_value=1.2e-08; Accession=PF00400.22; Description=WD domain, G-beta repeat
  Pfam annotation: Domain name=WD40; Domain location=241-290; Score =18.8; E_value=0.02; Accession=PF00400.22; Description=WD domain, G -beta repeat
  Pfam annotation: Domain name=WD40; Domain location=298-336; Score =24.8; E_value=0.00032; Accession=PF00400.22; Description=WD domain, G-beta repeat
  Pfam annotation: Domain name=WD40; Domain location=349-394; Score =33.1; E_value=9.6e-07; Accession=PF00400.22; Description=WD domain, G-beta repeat
  Pfam annotation: Domain name=WD40; Domain location=48-84; Score=9.7; E_value=2.7; Accession=PF00400.22; Description=WD domain, G-beta repeat
  Pfam module annotation: Pfam domain module=WD40::WD40::WD40::WD40::WD4 0::WD40; Domain location=153-191::195-233::241-290::298-336::349 -394::48-84
MSSAVPSHGRLGVEVPLPPVQLGGGCSPWVQSPLHGRSRFPPSPAAIYHCLAALHRLEGDVHALAVARGVLFTASDSGRVRAWAAPGCFNRGYLDVGRGRVPALAACGGTLVTSHARDHRVRVWTVCAAAVCDHVRAKKAATLPAKPSLLLHPFGKRRPQQHRDTVSCLVLHAVAGLLYTASYDHTVKAWRLSDGSCVDSFAAHDGPVNAMVVNEADGCVFTGSADGTVKMWRRVYGGTAHALIIVLRSELSPVNALALCHAVGGSGGGATRRCCFLYAGCSDGYVNVWEKEATVGRPTHAGYLKGHRLAVFCLASGCGGRVVVSGSEDATMRVWRREGISKGGGGAVHTCLAVIEGHRGPVRCLAVGGGEAGEVEGSMVVYSSGLDKSVKVWRIRVVGKEEEEDDDEELDEDGVEDNDHPEAAVAGEIFMEGGKGDGLDAHAIPVAMDDVVDGTEDEEAEFVGSTPVLSPVWVEKRRHTSRG

SEQ ID NO: 43846 - protein, 135 aa, Zea mays
  Coding DNA Sequence Number=SeqID_2067
  Gene Ontology: Mol. function=RNA binding; Cellular component =cytoplasm; Biological process=regulation of transcription
  Homolog annotation: Hit_ID=Q9LU22; Match level="QueryCoverage=95%, HitCoverage=44%, E-value=9e-28, Identity=38%"; Hit description =Arabidopsis thaliana genomic DNA, chromosome 3, P1 clone: MYA6
FGIDKSIFIKPETFHLTVLMLKLWNKERIDKASDVLQSVSTQVNEALENRPISIQLRGLLHATVMNVRHRKSSRNKRNTWTDSFDARGIFGRFGKAEWGAYPIHEIHLSQRFKFDRSGYYYCCSSIPLPAEMHTE

SEQ ID NO: 43847 - protein, 232 aa, Zea mays
  Coding DNA Sequence Number=SeqID_2068
  Gene Ontology: Mol. function=RNA binding; Cellular component =cytoplasm; Biological process=regulation of transcription
  Homolog annotation: Hit_ID=Q1SP68; Match level="QueryCoverage=78%, HitCoverage=69%, E-value=9e-09, Identity=27%"; Hit description=KH, type 1
MEGAQGSSIVTKHNKRQSPVQRWRPVSTEAVPQHHQDDIIETSNSGSKKIIEDCIASSENLPPDGTTNVVEVTANDASSSKNNLSFGYSSTKVVIEDHAELSGFNKDLAGSNVFGTHSSSVEAVQSRQLDYSHFISLPLALHPDLVNKLNYFQSSILGEENSNKDGSQSEGSIGEMDYDHKQAEAKMGAKGSQSRLKALLVCISALRPLMTIPRSIPSIYLWNKIPCLHDST

SEQ ID NO: 43848 - protein, 259 aa, Zea mays
  Coding DNA Sequence Number=SeqID_2069
  Gene Ontology: Mol. function=hydrolase activity, hydrolyzing O -glycosyl compounds; Cellular component=cellulose and pectin -containing cell wall; Biological process=carbohydrate metabolic process
  Homolog annotation: Hit_ID=Q5N863; Match level="QueryCoverage=97%, HitCoverage=98%, E-value=2e-76, Identity=79%"; Hit description =Putative latex cyanogenic beta glucosidase
  Pfam annotation: Domain name=Glyco_hydro_1; Domain location=11-255; Score=116.6; E_value=7e-32; Accession=PF00232.9; Description =Glycosyl hydrolase family 1
MGSTGREPEVTRADFPDGFVFGVATSAYQIEGARREGGKGDSIWDVFTDDKEHVLDRSNGEIAVDHYHRYKEDIELMASLGFSAYRFSISWARIFPDGLGGNVNDQGVAFYNDLINFMISKEACFANFGDRVKHWITINEPLQTAINGYGIGIFAPGGCQGMDEEDDQSATLDQVLNDTTRVGYFKGYLNSVAQAIKDGADVRGYFAWSFLDNFEWAMGYTKRFGIVYVDYKNGLSRHPKASALWFSRLLRGEAGTGTS

SEQ ID NO: 43849 - protein, 306 aa, Zea mays
  Coding DNA Sequence Number=SeqID_2070
  Gene Ontology: Mol. function=DNA binding; Cellular component =mitochondrion; Biological process=DNA integration
  Homolog annotation: Hit_ID=UPI00004C1731; Match level="QueryCoverage =99%, HitCoverage=23%, E-value=1e-120, Identity=67%"; Hit description= UPI00004C1731 related cluster
  Pfam annotation: Domain name=rve; Domain location=79-226; Score=71.2; E_value=3.4e-18; Accession=PF00665.16; Description=Integrase core domain
MEAYCDEVRRLEDKFYGLELNHIARRYSKTADELAKIASGRTTVPPDVFSRDLHQPSVKIDDSPEPEATSVQPEIPSAQPEAPSARPETPSVQPEKAPGGYTHLLVAIDKFSKWIKAVAFFTNIIHRFGVPNSIITDNGTQFTDRKFLDFCEDHHIRVDWAAVAHPMLNGQVERANDMILQGLKPRIYNDLNKFGKRWMKELPSVVWSLRTTPSRASGFTPFFLVYGAEAVLPTDLEYGSPRTRAYSDQSNQVSREDSLDQLEEARDKALLHSARYQQSLRRYHARGVRPRDIQVGDLVLRMRQDA

SEQ ID NO: 43850 - protein, 145 aa, Zea mays
  Coding DNA Sequence Number=SeqID_2071
MATAHAVTAESTSDTSPCQPLHADGTADPAFALALLSAEEPGITDTAKTTVRSSSIVLLPAYEAQSFVRSRSGRNSRTGNPATARAVCSWGVTYDDRAMRHRNAVDDGSLFLSSSSDEHRSMLFPVRLTNPDPAWRNGSQERSVQ

SEQ ID NO: 43851 - protein, 172 aa, Zea mays
  Coding DNA Sequence Number=SeqID_2072
  Subcellular localization annotation: CTP_CleavageSite=81; ConfidenceScore=5.09e-01
MSGAHRTVRCIFPTVGSATCRAPIARPTVGPADRWLTGQSGAHRTVRNGPRAHFPFTRALDADRSQALARRPWKPGDRAIPASERVRGRPEVPARSTLARAATAGLLATPPGEGPAANGLGGSPPGGWRCSGGPHEGALHKARAAFGEARQPAGLRPRRRWPGGHNIDSGGG

SEQ ID NO: 43852 - protein, 152 aa, Zea mays
  Coding DNA Sequence Number=SeqID_2073
MVGRGRGWGQGHEARTGADRPLHWHVSHSGSEQTHGARTTACVPAPERIGLAWCSGLAAALACPPAWHDCGLNEGPRPSATGRTGAAPWRSARAWLPTKRPARRLAEREPGAARQRRSPRPPRRLARCGSPPGARAAPRAGKVRAPRGGGGE

SEQ ID NO: 43853 - protein, 103 aa, Zea mays
  Coding DNA Sequence Number=SeqID_2074
MAPRVLHDDGGSQPLTEARRRQQGFDSPDRKVQGSRTRRLAARENGPAHKALALSLSHADACNPYFKRIHPPWAQDNTKATVSPYCSPPFVSRLAPTHLGCDT

SEQ ID NO: 43854 - protein, 97 aa, Zea mays
  Coding DNA Sequence Number=SeqID_2075
  Subcellular localization annotation: CTP_CleavageSite=72; ConfidenceScore=5.60e-01
MGKSENSVANFRLCLCPPQSLLGAPVCCSRSGSVAATSSSSSRGGIHHRTPSGRTVHTKNRRGWLLTRRGPGAGAASPLGKSEVEENAVTVDERGRL

SEQ ID NO: 43855 - protein, 261 aa, Zea mays
  Coding DNA Sequence Number=SeqID_2076
MAERATGSPFAAPDLLLFMAARPDALLDRAPAARAHALCALLTVAGSGAPASPQPRRPLFPLLTGTPCSDSARGAPFPQRRLPSWCKLLLPRPTGFLRALPAPCRVALAPAPLVSASSQHRDPSSLSPPARPTVLARLCVARHFPGPVMTPCRAPWFFPLRATVPSARIPVGRAPCSSGPVKFFPTKYKASGEDEASRVIFPKRSTNCLNQKITTDLADSSQLLKRCSITCVSHGTLADFAVLAIIEPDSVIASYVAIPVN

SEQ ID NO: 43856 - protein, 49 aa, Zea mays
  Coding DNA Sequence Number=SeqID_2077
MARVACTLRGKRLDGGFNFVLLLMVLSAGGLGLLISLSNSSILLMRMVT

SEQ ID NO: 43857 - protein, 130 aa, Zea mays
  Coding DNA Sequence Number=SeqID_2078
  Subcellular localization annotation: CTP_CleavageSite=19; ConfidenceScore=5.13e-01
MASLLAPLGSSLVRPWGFPAMAERPTGSPFVAPDLLLFMAARPDALLDRAPAARARALVRSALCSPSQAAAPLLLPNHGVLCSLCRPELPARIPLAELPSPSVACSPGASSYCRARLASCARSLLPTEWL

SEQ ID NO: 43858 - protein, 52 aa, Zea mays
  Coding DNA Sequence Number=SeqID_2079
MTSGFTAQKGLRSEINLIGDRLDVWLVEADGSQLDITLLCASMLLLIRLALQ

SEQ ID NO: 43859 - protein, 114 aa, Zea mays
  Coding DNA Sequence Number=SeqID_2080
MVRAYLRSIERAGLGGSDDSEEDSSEEVDSSDSSEEWSGGDGDSSSGDDDSEGGDDEADDDGKSNSNGDGEGDVGKGDGDGSEGDGDGGKGNGDDDDNNGDGGSDKASGIMPLI

SEQ ID NO: 43860 - protein, 84 aa, Zea mays
  Coding DNA Sequence Number=SeqID_2081
MPAAIAARCACLLLVVRLSCCDVELKQPRGDSPSHAKRAYRTHEEPTWLAPHQVGAPSSISAAARTSGSVDRKAWSALNRRIEI

SEQ ID NO: 43861 - protein, 226 aa, Zea mays
  Coding DNA Sequence Number=SeqID_2082
NFVSRTIVHRRLLSFNRFPSLDASTWFTFPSPLQFVDCSAIQPGGAWYQQNNLSALASYAYRLLPEDGQHRRHLLLQRHRHHDHQRPNARCGCLQLQLSVPVGASPPTNLSPSTGFTPPVGSSPPSSSEFAPPVAGTTPPSGSDLGPGFGTPSGSFNGTGSFRPSGTLNPYNGVSRGLPRVGLFTALSAAAVAVLLVSMDAILPRRHRCRANATTTMFRPSCACGS

SEQ ID NO: 43862 - protein, 150 aa, Zea mays
  Coding DNA Sequence Number=SeqID_2083
  Gene Ontology: Cellular component=extracellular region; Biological process=sexual reproduction
  Homolog annotation: Hit_ID=Q10S70; Match level="QueryCoverage=96%, HitCoverage=46%, E-value=2e-56, Identity=71%"; Hit description =Expansin-like A1 precursor
  Pfam annotation: Domain name=Pollen_allerg_1; Domain location=16-116; Score=-2.3; E_value=0.0078; Accession=PF01357.11; Description=Pollen allergen
MADYCRVPCEYKHRNLSVRVEERSHAAAPAPGDLAIRFLYQGGQTDIVAVDVAQVRSLLSFEECMQVGSSNWRFMTRDDGPAWSTRQAPPGPLQLRVVVTGGYDGKWVWADREVLPRWRRAGEVYDTGVQITDVAQEGCFPCDTHEWEEE

SEQ ID NO: 43863 - protein, 112 aa, Zea mays
  Coding DNA Sequence Number=SeqID_2084
  Subcellular localization annotation: CTP_CleavageSite=31; ConfidenceScore=5.52e-01
MRVGTKAGDTGLGGRTAGTKRKGPPAPPPLRSARATTTNMRGGKARRGVSAADHCASPYPLAACRPGRPTAGHQTQNGFRRPLNDGGAGGNGQLLQIQQRLPFWNKILEIVR

SEQ ID NO: 43864 - protein, 635 aa, Zea mays
  Coding DNA Sequence Number=SeqID_2085
  Gene Ontology: Mol. function=catalytic activity; Cellular component =peroxisome; Biological process=metabolic process
  Homolog annotation: Hit_ID=Q10S72; Match level="QueryCoverage=98%, HitCoverage=98%, E-value=1e-170, Identity=83%"; Hit description=AMP -binding enzyme family protein, expressed
  Pfam annotation: Domain name=AMP-binding; Domain location=60-560; Score=356.4; E_value=4.7e-104; Accession=PF00501.18; Description=AMP- binding enzyme
MAARPDARSGYCAATRTFRSKRADVPLPADADLDVVRFLASRRHAGVVALVDAATGHRVTFQELWRAVEGAATALAAPPLSLRKGQVALILSPNSVHFPVAALAAMSLGAVLTTANPLNTPAEIAKQVADARPVVAFTTRDLLPKLPRAGAGAGIRVVLLEPDRLPSDPSPVVATIGEISATPPDPTRRRDRVTQDDPATLLYSSGTTGPSKGVVATHRSLISMVQIIMSRFRLEASNRTETFLCTVPMFHVYGLVAFATGLLGCGATIVVLSKYELPEMLRAINEYGVTYLPLVPPILVAMLAHPNRLPLGGLRKVLSGGAPLSKELIEGFKEKYPQVEILQGYGLTESTAIGASTDSAEESSRYGTAGLLSPSTEAKIVDPETGEALPVNRTGELWIRGPYVMKAVLNCDGILVSPGTGSLLQSHIFKPSSGIGSNSFSTVAHSMLRCSGFSFLKKQKHKLDSKAVTEQLEKNSIVQVGRFHLTTFRTGYFKNAEATQSTLTPDGWLKTGDLCYIDEDGYLFVVDRLKELIKYKGYQVPPAELEALLLTHPEIEDVAVIPFPDREVGQFPMAYVVRKKGSNLSEREVMEFVAKQVAPYKKVRKVAFVAEIPKNASGKILRKDLIKLATSKSKL

SEQ ID NO: 43865 - protein, 146 aa, Zea mays
  Coding DNA Sequence Number=SeqID_2086
  Subcellular localization annotation: CTP_CleavageSite=54; ConfidenceScore=5.25e-01
MAEAATSPAYFPRLHRRPPIPKSNRAKQRLAHGRLNGTRHTSNRGEESPGRGVRRTRDSGERLAGAQSAFPHASATDSFPKGPRKAPVKPRVPATARGWIPRQRGVESRRGRGYLPPYWLRFRFVRKAEARTRRGVYSRGGVKIVT

SEQ ID NO: 43866 - protein, 70 aa, Zea mays
  Coding DNA Sequence Number=SeqID_2087
MEVGGDLQSLLEAIKSSEVRHRIPRIVRASISGSRSVPVRYSPLPRVWCLKIELGSSTDSRVPLSILRMI

SEQ ID NO: 43867 - protein, 920 aa, Zea mays
  Coding DNA Sequence Number=SeqID_2088
  Homolog annotation: Hit_ID=Q10RW2; Match level="QueryCoverage=97%, HitCoverage=96%, E-value=0.0, Identity=58%"; Hit description =Expressed protein
MVYDLNGNFRYLGMILDVQVALKCSYIETTGCLGQFLALGAKILPSAAKCVTVDMVHNIGDFISELLSLMESSIVDNDKKIHGAALDITKAAPVFLDETTKLCRAYSEATKVDNCTMSITDEDATVKHNKQGLASDVIRITSSTIQTMCRLGTYAASSGGSQVILLNVSWKGVVSLLQSGKGMIEGKVNVREIIVTLLSLSIESLRVAAETWCAPLLETLGATEARRAFLPIKFFLINAVRICSTYPSEAMIIYKNIINCAVVITSSSILFSKKPQLKAANETLVELLEPTLFVLLDTLMKSSDLTPESKCQLAHHFFENEEDKSPDLMGQANQREINLASLDCIFSMDSDVDHRNRALLPAELLVFLHFLNASSWLTEMVVITLSKKLQTLLNILTSEDIYSYVLGFQIPALNGADQSPAVVWQPVYTSIIQALKAFMISTVASSAAWNELEAFLLENIFHPHFLCLEIITELWCFFIRYAETETSINLVNQVSLLLKTVASPEDVLSPLSALRKVARSLCIILSYASSATVDQIYTCVLNGENSSKSSILHLALLMEGFPLDSLSDGTKELAMKKMFTSFAGYLESYSKNHRVINVPTCKLGVVGLPIHALASALQHSTFFGSVINVDSIVDENSITAMFKFTISLIKMFRIAPDSSKDNLAKHISSMLVIISNTRHLCAFSEMEKLTLQLRTLFVSTSDKSNAVLSQCKPSMASFMSTLGHLNVTEDDANELCSAIWDLYHLLLKERHWALIHLAMDSFGYFAARTSFTQLWRFVPRDAALSYNASTGTSIDENGFMLELRAYLQKEVALHTDKWSEEQIRLLVSEGRALKKLVEACCEIPVVAEPEKAPVAKDASTKKRKMPDGICEGMAMLQNGLKVMRGAFGEGDFADLKDRFAAHLSRLEDAVSQFASLSDEI

SEQ ID NO: 43868 - protein, 94 aa, Zea mays
  Coding DNA Sequence Number=SeqID_2089
  Subcellular localization annotation: CTP_CleavageSite=27; ConfidenceScore=5.03e-01
MSGLGTMKRAGPRAGPTDPAHLAISTLASAVPSGRRLQLHPAGRPAEPCMRELRPLKRKKGPANRDYGTGAYVGCLQQSERVYEHAISVYGREL

SEQ ID NO: 43869 - protein, 482 aa, Zea mays
  Coding DNA Sequence Number=SeqID_2090
  Homolog annotation: Hit_ID=Q2R9D1; Match level="QueryCoverage=63%, HitCoverage=45%, E-value=2e-34, Identity=33%"; Hit description =Expressed protein
  Pfam annotation: Domain name=DUF616; Domain location=122-441; Score =557.6; E_value=1.2e-164; Accession=PF04765.4; Description=Protein of unknown function (DUF616)
  Subcellular localization annotation: CTP_CleavageSite=32; ConfidenceScore=5.27e-01
EEWSSGASGGVRQSQASRQPRNSCICMGWPVRVRSPSVLQSKLLCLSLLYLLTTLPLALYVSFTDSGRRRRCLQPVPSPPKPLFQYPAGYGEHRHALPTSRALCSNPVAFADYKTALEEIHGLCRDTSASPALRYQSGRRATFAGNLSTQERRSFFNHTDDQVAVPCGFFREFPVPEPDRLAMEKCRGVVVASAIMNDHDKVRQPRGLGAETLRAACFFLFIDDATRAALARQGVLPARGGGGHTTVGAWRVVTVGRRRAGGGGLPYEDPAMNGVVAKHLLHRLFPGARFSVWVDGKVQLTVDPVLLVHALLVRERADVAVSRHPFNRHTMEEAIATARWRKCRDVDAVRAQMETYCGNGLRPWSPSKLPYPSDVPDTAVIIRRHGVASDLFSCLLFNELEAFSPRDQLAFAYVRDQMSPKLSINMFEVEVFEQIAVEYRHNLKPGRGKRQQGGTRMASSRDIAGSSCEEYLHQMWGESAAE

SEQ ID NO: 43870 - protein, 325 aa, Zea mays
  Coding DNA Sequence Number=SeqID_2091
MDKSKRWKKKRRREDRPPSDQLQTSDRQTELNDPAKRMEPSLCTPHATVTAANAAPLSVRAHRGARRARAAVRAHSHHQGAGAREPEPEPADPQGAVPAKGRGPPALPNAALRVGAGVALALALGGVSWTARGGSAGAGPGPVTQPAMVCALNAVTDAAVRASAEQRGSATMKTSVDALSDSLFRREDSPRDRATLMDLVFEQVTKEHITDRGKLTSLLQKEFSASRDSERKLDLGLLLTDVLINQRDWQRAKEVCQQITGRYQRDSRPYLHLAVINMMIAVEAMLSPDTATTDDIEKMTKTAVDAWKEFKNKSELAKGSADSTA

SEQ ID NO: 43871 - protein, 301 aa, Zea mays
  Coding DNA Sequence Number=SeqID_2092
  Gene Ontology: Mol. function=amino acid transporter activity; Cellular component=membrane; Biological process=amino acid transport
  Homolog annotation: Hit_ID=Q9LD96; Match level="QueryCoverage=88%, HitCoverage=43%, E-value=1e-113, Identity=78%"; Hit description =Putative amino acid permease
MTAITAIYCVMALVLSMMQPYTAIDRSAAYSVAFASVGMRWAQYVVALGALKGMTTVLLVGALGQARYTTHIARSHIIPPVFALVHPRTGTPVHATALIAVCSACIALFSSLDVLASLLSVSTLFIFMMMATALLVRRYYVRGVTSRTHALRLTALLLLIIASSIGIAACWGTSPERWQGYVVLVPAWAAGTLGIQLLVPAARAPKVWGVPLVPWLPSLSIATNLFLMGSLGKDAFIRFGVCTAVMLVYYVLVGLHATYDVAHGACGWEEEDDGDAAAADEDKKVVAAADVEKADAAGGTR

SEQ ID NO: 43872 - protein, 318 aa, Zea mays
  Coding DNA Sequence Number=SeqID_2093
  Gene Ontology: Mol. function=nucleic acid binding; Cellular component= chromatin; Biological process=DNA integration
  Homolog annotation: Hit_ID=Q60DN3; Match level="QueryCoverage=96%, HitCoverage=30%, E-value=3e-40, Identity=30%"; Hit description =Integrase core domain containing protein
  Pfam annotation: Domain name=GRP; Domain location=180-264; Score= -11.8; E_value=0.0011; Accession=PF07172.2; Description=Glycine rich protein family
MAPIPIHQAITTRHTKSNYLLWRAQLLPYLRSSKLIGFLDGSNPASKQFISTATTTGEIEEALNPAYDTWYDQDQQLLSGLLSLMTEEVLRDVMATTSSREVWTSLHRKFASSTEARTVQLRVDLATSKKQDLSAADFYRKITGLASKLAAIDAPLRDEEILAYLFAGLPVEYDPFVTAMTTKTEALSLDNVFAHLVSFEDRLLRHQAELQQSFEASANYAGRGGGRGGRDRGHGDHGRGARERGGGAPNRGGGAQHGGYSRNGSPRPQCQICEKFGHTALRCWYRMDESYQEEGPSANVASNSYKVNADWYNDTGGH

SEQ ID NO: 43873 - protein, 416 aa, Zea mays
  Coding DNA Sequence Number=SeqID_2094
  Homolog annotation: Hit_ID=Q9LD82; Match level="QueryCoverage=47%, HitCoverage=89%, E-value=1e-96, Identity=86%"; Hit description =Putative heme binding protein 2
  Pfam annotation: Domain name=DUF538; Domain location=4-148; Score =129.4; E_value=1e-35; Accession=PF04398.3; Description=Protein of unknown function, DUF538
  Pfam annotation: Domain name=SOUL; Domain location=226-409; Score =332.1; E_value=9.3e-97; Accession=PF04832.3; Description=SOUL heme -binding protein
  Pfam module annotation: Pfam domain module=DUF538::SOUL; Domain location=4-148::226-409
MGSQAIEAHRAGAEVYRGAALCAEKSTELLAEAHLPLGLLPLADMEEVGYNRATGFVWLRQRKSLTHTFRPIARQVSYAAEVTAFVEDRRMRRMTGVKTKELLIWVTLSDMFVDRDDPSKITFKTPTGLGRTYPVSAFAKEGAGDDGAAAKHKDDAPAPTAAANLTPADSSKSTNEGQALETQRRGSACAASILPERGAKAKQSLLLAAALLVAVAAAAVPPTCERIECPAYEVVDSANGFEIRRYTDAMWITTAPIEDISFVAATRTGFLQLFDYIQGKNAYNQTIEMTAPVLTRVSPSDGPFCASAFAVSFYVPAKNQADPPPAEGLRVDRWAGARYAAVRRFGGFVADADVGEQAARLEASLQGTRWAAAVNDARRADPASPYTVAQYNSPFEFTGRVNEIWMLFDADDDASM

SEQ ID NO: 43874 - protein, 516 aa, Zea mays
  Coding DNA Sequence Number=SeqID_2095
  Gene Ontology: Mol. function=monooxygenase activity; Cellular component=integral to membrane; Biological process=electron transport
  Homolog annotation: Hit_ID=Q9LDQ4; Match level="QueryCoverage=93%, HitCoverage=94%, E-value=0.0, Identity=87%"; Hit description=Sterol C-22 desaturase-like
  Pfam annotation: Domain name=p450; Domain location=48-506; Score =43.6; E_value=5.8e-13; Accession=PF00067.12; Description=Cytochrome P450
MAAQSLSVPVPMPSSLDLRAAAPFLVAAVALYFLMEQVSYHRKKGPLPGPALVVPFLGSVAHMIRDPTGFWDAQAARAKRSGAGLAADFLVGRFVVFIRDSELSHRVFANVRPDAFHLIGHPFGKKLFGDHNLIYMFGEDHKDLRRRIAPNFTPRALSTYAALQQRVILAHLRRWLDRSGGGGGGAFPIRVPCRDMNLETSQTVFVGPYLAGEARRRFERDYNLFNVGLMALPIDLPCFAFRRAREGVARLVRTLGECARQSKARMRAGGEPECLVDFWMQDTLREMDEAAAAGRPPPAHTDDEEIGGFMFDFLFAAQDASTSSLCWAVSALDSHPEVLARVRAEVSAAWSPDSGEPMTAETIQGMRYTQAVAREVVRHRPPATLVPHIAGEAFQLTEWYTVPKGAIVFPSVYESSFQGFPDAEAFDPERFFSEARREDVAYRRNFLAFGAGPHQCVGQRYALNHLVLFMALFVSVVDFRRERTPGCDDPVYMPTIVPKDGCSVYLKQRCAKLPSF

SEQ ID NO: 43875 - protein, 533 aa, Zea mays
  Coding DNA Sequence Number=SeqID_2096
  Gene Ontology: Mol. function=phospho-N-acetylmuramoyl-pentapeptide -transferase activity; Cellular component=membrane; Biological process=peptidoglycan biosynthetic process
  Homolog annotation: Hit_ID=Q5QNI0; Match level="QueryCoverage=56%, HitCoverage=100%, E-value=1e-116, Identity=69%"; Hit description =Putative phospho-N-acetylmuramoyl-pentapeptide-transferase
  Pfam annotation: Domain name=Glycos_transf_4; Domain location=278 -456; Score=30.4; E_value=2.3e-09; Accession=PF00953.11; Description =Glycosyl transferase
  Pfam annotation: Domain name=MFS_1; Domain location=59-455; Score= -46.5; E_value=0.043; Accession=PF07690.6; Description=Major Facilitator Superfamily
  Pfam module annotation: Pfam domain module=Glycos_transf_4::MFS_1; Domain location=278-456::59-455
  Subcellular localization annotation: CTP_CleavageSite=38; ConfidenceScore=5.47e-01
MASPAHRAPHRFRRPLRAPLPPPPPRLPTPSLYSRRPSAHQVKSQISRHLLPPHGRVLLVIVAFLAFMEVSQLRTIVPRPSRRRHAIQVVTAFDDDPGDFSLVHDDGDEQFGVPQYSSESEWSDDDVILTAFTDVELPMAVKSRAEGALTIAAHRFATIDKGHKKSRTQQGLMNNVGLVAFLVMLLFFVDWCSWKIVRLPLDSFYLTRPFLTSAVLSALAGFLFAPVADSLKIHHFRRRGKSVSPSSRKPTPGMGGLFFVPVGIFVAKREVGSNSNGVNGAAMITLIFAMVGLLDDISSLAVDHNYKIPRWIRFLVQIVAGIYFSNWLGSTDISTPYSMKYLVPLPPPFGLALIGKVYMVLAAACSLSMGPAVTLVDGLDGLAGGIAALALIALSVAALPICSEFSVFGASMSGACIGFLFHNRYRASVVMSRVGSFALGGAVATIASCSGMFLPMLIACSLFFVELLFAILQVPFHMAKNSFRGTSRHPLKIRPSHYYLRLLGIKEPYIVAGAYMISCFLTLLAGYLGLVSA

SEQ ID NO: 43876 - protein, 118 aa, Zea mays
  Coding DNA Sequence Number=SeqID_2097
MDWKGNERRLERESEVKGWLLGKGKGNCKGKRRWSFRLAGTAVADWLMAAARPGVEEMRPRRTTEPHGALSRSRSRSRLSRNEQVGRGAEEGSGSPSRIASQSQVMTRSQGGMERLTA

SEQ ID NO: 43877 - protein, 100 aa, Zea mays
  Coding DNA Sequence Number=SeqID_2098
  Homolog annotation: Hit_ID=Q94EF5; Match level="QueryCoverage=59%, HitCoverage=6%, E-value=4e-11, Identity=60%"; Hit description =Putative meiotic serine proteinase
MGVARREEHRAAAAAFLYALTVLGVLAGGAGVRAFEDGTAVYIVTMKQAPVSHRRLNLEKFGSSKAATAVGRGGSGGGGGGDTPTTSVLRKPRLFFVELY

SEQ ID NO: 43878 - protein, 73 aa, Zea mays
  Coding DNA Sequence Number=SeqID_2099
  Subcellular localization annotation: CTP_CleavageSite=37; ConfidenceScore=5.38e-01
MTSANNVYSDGSKFRLVQKLEPDPSNAYKSPLRRNAVAMTSANNGRVWFGFFLNSFSEKLAVEKSWLLGKAGG

SEQ ID NO: 43879 - protein, 60 aa, Zea mays
  Coding DNA Sequence Number=SeqID_2100
MACGPAVVISAAAPMSGRQMIADGQGWWRGQSHKASTSSLRFQVGDMADWSGGANNSTCN

SEQ ID NO: 43880 - protein, 521 aa, Zea mays
  Coding DNA Sequence Number=SeqID_2101
  Subcellular localization annotation: CTP_CleavageSite=58; ConfidenceScore=5.50e-01
MASCYNPWRLFPGMSTAVPAGPVTAPAHSRTCKSSKVFSALPHRRGLLFLGTRRARIKCVKDDSLHFDPSKIEPPPYSSYFDSTSGQLEPASGARASIPGKEYWPEGTAARVRAARAPAPVGESAGMPSFGTKPGSRRRGYKEQVTSASGTEGAQTDDRKDGDEPDVAIIGSGDDALEEIKDSVDEYVIYETPEEEELSEYDMDKMMGRPHPFIDPAKAMSLGEPKTSEELWWHWRRKSQEEEMWSRWQRRRPDVDTVFAKAMAETGQIKIFGDHPSRTEAALAKTRRHLYKEERLEAEQRRLEEIGPIAYYSEWVEAYKNKDTSREAIQKHFEETGEDENVQLIKMFQHQTAGEYRIMMGTDDPDEVIDYRGPEFHEPTPEVVPYLMEHGIMITKEELYARLNEEREDVNQDITYIPEAKDPMATAIDIGEHSYNEDSDDEDEDVDKAAAQPQSLEDEEDDRDDVAEVEEKVNQNWSALKSTGQAEKPKEKSKKDEMTLKEAIDDSENLTDFLMDFEETE

SEQ ID NO: 43881 - protein, 71 aa, Zea mays
  Coding DNA Sequence Number=SeqID_2102
  Pfam annotation: Domain name=DUF1298; Domain location=10-60; Score= -41.9; E_value=2.7e-06; Accession=PF06974.4; Description=Protein of unknown function (DUF1298)
MAHIVELQIKYELLTKALTVNFQSYVNTMMVNLAVDDAQFPDSHKLLDDFVESLRLIRAAASSLGKNQRND

SEQ ID NO: 43882 - protein, 799 aa, Zea mays
  Coding DNA Sequence Number=SeqID_2103
  Gene Ontology: Mol. function=protein serine/threonine kinase activity; Cellular component=membrane; Biological process=protein amino acid phosphorylation
  Homolog annotation: Hit_ID=Q6H7J9; Match level="QueryCoverage=97%, HitCoverage=86%, E-value=1e-145, Identity=41%"; Hit description =Putative wall-associated kinase 4
  Pfam annotation: Domain name=Pkinase; Domain location=462-740; Score =126.1; E_value=9.7e-35; Accession=PF00069.15; Description=Protein kinase domain
  Pfam annotation: Domain name=Pkinase_Tyr; Domain location=462-738; Score=115.1; E_value=2e-31; Accession=PF07714.7; Description=Protein tyrosine kinase
  Pfam module annotation: Pfam domain module=Pkinase::Pkinase_Tyr; Domain location=462-740::462-738
  Subcellular localization annotation: CTP_CleavageSite=77; ConfidenceScore=5.46e-01
MTVSASGSITALAAHVVRSVNMPAAATAYSVSWEGPGRPFAISGSSNMSLFVVGCGVLAALLDGGTGAVVGNCSVICAGEEVVMERLPDGLCGGVGCCRIDVRVPLRAFVLNLSRTGEGVTRDRVTFLVTGPDGYTFRASDLEQGIVAGEAAPALLDWAIPDPADCALAAADGASYACVSNNSECQNSSIGGYVCHCSPGFVGNAYVVGGCVPNQAWSSNIASAPPTVYGSRQPKADCPTTCGNVDIPFPFGMELGCFARIHLYLACNPGPTPPILQMTEHSAVTDISIDQGILRIQRLSDPGGFLDGGDSAFYLYVLSGESGVAKWAVDNSTCRDAMANKHQYMCVSTHSDCLEVTDNRTSGHVGYRCRCSSGFQGNPYLEDGCTGITVGISSGGGLLFLAAIAVLLNRRWKRGVQKQLRRRYFRKNKGILLEQLISSDQNASDGTKIFSLAELEKATNNFDQARVVGRGGHGTVYKGILTDQRVVAIKRSKQVATVEIEEFINEVAILSRINHRNVVKLHGCCLESEVPLLVYEFISNGTLYDLLHSGRRRDGGGLLSSPLPWEERLRIASEVAGALTYLHSAASMSVLHRDVKSMNVLLNDSYTAKVSDFGASRLIPIDQTHLVTAVQGTFGYLDPEYYHTGQLTDKSDVYSFGVILAELLTRNKPIIEKGNGEKENLSNYLWEANEKPLEEIVDGQVWEEASKEAVVCFARLALECLDLRREARPTMKDVEVRLQLLKAKARAYASGPRADGEFRPPGETGRRARRYGVVPVTAQDGTRRYSLEQEIASSLRIPR

SEQ ID NO: 43883 - protein, 154 aa, Zea mays
  Coding DNA Sequence Number=SeqID_2104
  Subcellular localization annotation: CTP_CleavageSite=85; ConfidenceScore=5.10e-01
MDATAFRVVMSDACVWMHSSCCNGVTVTVTVAAATFSSLRRYVRLPGTAAAAPPHAIDLAACTDLGDPFMVAAPTRRAVACCSCRVARRESLLPARALQRLPLLAWTDLGAGEFRGKSSVLTVTAPCGSHDDIMQEAQKKCWTSITTSLGVGPV

SEQ ID NO: 43884 - protein, 163 aa, Zea mays
  Coding DNA Sequence Number=SeqID_2105
  Gene Ontology: Mol. function=carboxyl- and carbamoyltransferase activity; Cellular component=ornithine carbamoyltransferase complex; Biological process=amino acid metabolic process
  Homolog annotation: Hit_ID=Q8SA97; Match level="QueryCoverage=56%, HitCoverage=13%, E-value=5e-11, Identity=59%"; Hit description =Ornithine carbamoyltransferase
MGRREAEHEGGRKVAGDGRERGGNPAAFVFVPRPSRPESEPWVGRSGVRCLPGLSLSPSPGSGGAEFVVFRGLARVRALGQAERSSSSSGAEPESEPWVGRSGVRRLQRLSPSPSPGSGGAELPMAPEVGPDCLSASLCQVALQSVRRRRRCPSVRSVSGAEK

SEQ ID NO: 43885 - protein, 127 aa, Zea mays
  Coding DNA Sequence Number=SeqID_2106
MALVLGGGTSSGCKDNYFNYGDPNHFIANYPKMKGQPKVSKHDYHFSYNKGKRDNLYNDFDNTSSSSSNDNLEVRVNNNMNRLCFFANTAGGFYAIALGEDAEKLLGLAMRERKEYKNKYKAMIKGL

SEQ ID NO: 43886 - protein, 121 aa, Zea mays
  Coding DNA Sequence Number=SeqID_2107
MVAARFAPISIHVSDGLSGVGSKPHQVTGEALGAVPSQEDCRGPGNSPSLPVCAMARALCCTNQGKNKSIVIAMACPSCYSVQLDNGARGRLMGVSPAFSTAWAWWRRRGLGQWGREGVER

SEQ ID NO: 43887 - protein, 150 aa, Zea mays
  Coding DNA Sequence Number=SeqID_2108
  Gene Ontology: Mol. function=monooxygenase activity; Cellular component=membrane; Biological process=electron transport
  Homolog annotation: Hit_ID=Q10S01; Match level="QueryCoverage=78%, HitCoverage=23%, E-value=3e-45, Identity=73%"; Hit description =Cytochrome P450 family protein, expressed
MGKANSLVYLHAALCESLRLYPPVPFERKTAVDADVLPSGKELMPGDSVLISNYCMGRMEGVWGKDCMEFRPERWFNDEGGLRYEPSYKFISNAGPRTCLGKEIAFVQMKTVAAALLWNFAVEVRWHHFKLVLCHGQGPVLDGGCNWLVN

SEQ ID NO: 43888 - protein, 328 aa, Zea mays
  Coding DNA Sequence Number=SeqID_2109
  Gene Ontology: Mol. function=monooxygenase activity; Cellular component=integral to membrane; Biological process=electron transport
  Homolog annotation: Hit_ID=Q10S01; Match level="QueryCoverage=84%, HitCoverage=66%, E-value=1e-39, Identity=53%"; Hit description =Cytochrome P450 family protein, expressed
MDPVLLLLEFFTSLCFLALYYRRLQSKKTSPLEPTEWPIVGQLPGLAANLHHFHDWATALLAGTGYNLEAKRRPRPAVLRHLRVCDPANVRHIFTSNFANYPKGHEFAEIFDVLGAGILNSDGESWRRQRRRHWVPGVRAAGGSLHARHGRCAGDDFPPPRHPHGVLEADEKAECWAREKVGCRRRTIDGFVSEMIARARRRADRVDEGASLLSSVLCHGNTAADEESTDKFLRDTTVNLLFAGRDGPATGLSWFFYLVSKNPRVEQKLLGELSAAVASSRDGAGYAAGTSGSGMVTVEHTFEPEAGRSAVRTVCACGLDGPRLRRAV

SEQ ID NO: 43889 - protein, 217 aa, Zea mays
  Coding DNA Sequence Number=SeqID_2110
  Homolog annotation: Hit_ID=Q6QP51; Match level="QueryCoverage=71%, HitCoverage=76%, E-value=1e-09, Identity=35%"; Hit description =Putative growth-regulating factor 1
MTSSKKVCHVVRFRILFLFLSLTTGTGKGDIPKGVLLREGSGPRAPLLIRGSKAGPSEGFDSHLRALGLRAHYWLAPEGFDSRLRRRASDDPRYVRYITKARATLPSAACVAATAVPLDRVRLTAAKSGLGRHRKLRLARPKGSDSASAPEDDELRLARPQGSDSTSAPEDDELRLARPQGSDSASAPEDDELRLARPQGSDSASAPEDDELRLARP

SEQ ID NO: 43890 - protein, 191 aa, Zea mays
  Coding DNA Sequence Number=SeqID_2111
  Gene Ontology: Mol. function=protein serine/threonine kinase activity; Biological process=protein amino acid phosphorylation
  Homolog annotation: Hit_ID=Q9LID3; Match level="QueryCoverage=51%, HitCoverage=13%, E-value=2e-35, Identity=67%"; Hit description =Casein kinase-like protein
MEQWRRGGWRTGLWSTGAAVTHWPVKQWSGSALPYGRREEGGGSALPYGQIYHPLKFLHFNPYIDMLVEHRRCSHTCLKQVHIGNSPTYRLERKLGKGGFGQVYVGRRISAPRLSDRNPGSNALEVALKFEHQSSKGCNFGAPYEWQVYNTLSGNHGVPRVHYKGKQGEFYIMVWAMNLLIFVSLVMHMLI

SEQ ID NO: 43891 - protein, 92 aa, Zea mays
  Coding DNA Sequence Number=SeqID_2112
MDEFDSGGRSGDRAGAAAAAAAGDDGATPPLPQTARALAQFSVLLGDCVTAETLVLRSPMTGVDRPHKAVGMRLRSYAAAYNHVGRDLSAPF

SEQ ID NO: 43892 - protein, 304 aa, Zea mays
  Coding DNA Sequence Number=SeqID_2113
  Gene Ontology: Mol. function=protein serine/threonine kinase activity; Biological process=protein amino acid phosphorylation
  Homolog annotation: Hit_ID=Q1T4M8; Match level="QueryCoverage=98%, HitCoverage=46%, E-value=1e-140, Identity=76%"; Hit description =Protein kinase-like
PENFLLGPPGTPEEKKLFLVDLGLATKWKDAGTGHHVEYDQRPDIFRGTVRYASVHAHLGRTGSRRDDLESLAYTLIFLLRGRLPWQGYQGENKGFLVCKKKMATSPESLCGICPQPFRNFVEYVVNLKFDEEPNYARCISLFDGIVGPNPDIRPINTDGAQKLVYQVGQKRGRLIVDENDDEQPKKKIRMGMPATQWISVYNARRPMKQRYHYNVADNRLVQHIQKGNEDGLFISSVASSSNLWALIMDAGTGFTSQVYELSSYFLHKEWIMEQWERNFYITALAGANNGSSLVIMSRASLKR

SEQ ID NO: 43893 - protein, 399 aa, Zea mays
  Coding DNA Sequence Number=SeqID_2114
  Gene Ontology: Mol. function=protein serine/threonine kinase activity; Cellular component=beta-catenin destruction complex; Biological process=protein amino acid phosphorylation
  Homolog annotation: Hit_ID=Q9LWN0; Match level="QueryCoverage=91%, HitCoverage=89%, E-value=0.0, Identity=94%"; Hit description =Putative shaggy-like kinase dzeta
  Pfam annotation: Domain name=Pkinase; Domain location=62-346; Score =308.1; E_value=1.6e-89; Accession=PF00069.15; Description=Protein kinase domain
  Pfam annotation: Domain name=Pkinase_Tyr; Domain location=62-346; Score=-14.1; E_value=1.3e-11; Accession=PF07714.7; Description =Protein tyrosine kinase
  Pfam module annotation: Pfam domain module=Pkinase::Pkinase_Tyr; Domain location=62-346::62-346
MELDAPTSRRRRRGDSSRRQRQGERVAQIWHKDGEGGDAVTGHIISTTIGGKNGEPKRTISYMAERVVGTGSFGIVFQAKCLETGETFAIKKVLQDRRYKNRELQLMRAMEHPNVICLKHCFFSTTSRDELFLNLVMEFVPETLYRVLKHYSNANQRMPLIYVKLYMYQLFRGLAYIHNVPGVCHRDVKPQNVLVDPLTHQVKLCDFGSAKVLIPGEPNISYICSRYYRAPELIFGATEYTSSIDIWSAGCVLAELLLGQPLFPGESAVDQLVEIIKVLGTPTREEIRCMNPNYTEFRFPQIKAHPWHKIFHKRMPPEAIDLASRLLQYSPSLRCSALDACAHPFFDELRTPNARLPNGRPFPPLFNFKHELANASPDLVSRLVPEHIRRQIGVNFGSS

SEQ ID NO: 43894 - protein, 646 aa, Zea mays
  Coding DNA Sequence Number=SeqID_2115
  Gene Ontology: Mol. function=protein-tyrosine kinase activity; Cellular component=integral to membrane; Biological process=protein amino acid phosphorylation
  Homolog annotation: Hit_ID=Q5QNM3; Match level="QueryCoverage=95%, HitCoverage=94%, E-value=0.0, Identity=63%"; Hit description=Leucine- rich receptor-like protein kinase-like
  Pfam annotation: Domain name=LRRNT_2; Domain location=36-77; Score =45.0; E_value=2.5e-10; Accession=PF08263.3; Description=Leucine rich repeat N-terminal domain
  Pfam annotation: Domain name=LRR_1; Domain location=104-126; Score =7.3; E_value=12; Accession=PF00560.23; Description=Leucine Rich Repeat
  Pfam annotation: Domain name=LRR_1; Domain location=128-150; Score =12.0; E_value=1.6; Accession=PF00560.23; Description=Leucine Rich Repeat
  Pfam annotation: Domain name=LRR_1; Domain location=80-102; Score =6.5; E_value=18; Accession=PF00560.23; Description=Leucine Rich Repeat
  Pfam annotation: Domain name=Pkinase; Domain location=366-615; Score=- 54.2; E_value=2.5e-05; Accession=PF00069.15; Description=Protein kinase domain
  Pfam annotation: Domain name=Pkinase_Tyr; Domain location=372-615; Score=-70.0; E_value=3.6e-08; Accession=PF07714.7; Description =Protein tyrosine kinase
  Pfam module annotation: Pfam domain module=LRRNT_2::LRR_1::LRR_1::LRR_ 1::Pkinase::Pkinase_Tyr; Domain location=36-77::104-126::128-150::80 -102::366-615::372-615
MGARRRLRQGSGRLQLLFSFLVLLLQAQASVGAASINGEGLALLELKVRVEADPHGVFQDWDPMDSSPCSWSGVRCFDDKVEILNLTGRQLAGTLAPEIGSLRGLKSLLLPKNNFRGQIPREFGGLSALEVLDLSSNNLDGTVPEELWAMPLLKQLSLLYKWDFKDWISLGGLREKDNTNVPNFSEADVMHNLQSFASVMRRRLLSENDNLAALLGNDDKSSDLQNLKEIQRSVDVNSVGSGSFSAFPGIYGQALAPLLPEDIDATTVQQLSTDVTQTTNVEMSGTTYSKWAYIITIPAAILLISLIVLILVLRKRGRAPVAPWKTGLSGPIQKALVTGAQKLNRAELEVACEDFSNIINTFPTCTVFKGILSSGVEIGVVSTTISSSKDWSRSAESCFKKKIDRLSRVNHKNFINLLGYCLENEPFTRMMVFEFAPHGSLSQHLHVKEFEHLDWAARMRVIMGVAYCLQYMHHELSPPMAIHDVRSDTTFISDDYAAKIADVGVWNELAAKAKAGKEDGSSRAEAPPDLPSNAYCFGALMIETISGRVPDPYDHKPICSWASEHLKDKNYGKLVDASLKEHKESELEAVCEVIQECIDPDPTRRPSMRDVVGKLRDALGISPEAAAPRLSPLWWAELELLSVKST

SEQ ID NO: 43895 - protein, 86 aa, Zea mays
  Coding DNA Sequence Number=SeqID_2116
MEAAAGCYHGAAAGILRLCFDRTIEVLSEPSQGLIEELFAWELSALVCRGVVSGELRRRGLVGAVRGGHEIGDGSGTVDPDFNGWD

SEQ ID NO: 43896 - protein, 198 aa, Zea mays
  Coding DNA Sequence Number=SeqID_2117
MAKPTTPQVYPINQLRASHSTLMVVLFSPVVIQRTGPYGEGPGRKKQDCRFYFQETEGLFNKKTTRRGTGCSRPSDHISTDKIISERERARGRGRALISGPGRSAARGEGGLTGWAQRQGAQATDGWDPGVVVHALSGIWRSTPLDWEQTVRIGRQGGNDTVTGAVPIHGGGVAGEGAGVASGGLGSPELARAGEGAR

SEQ ID NO: 43897 - protein, 187 aa, Zea mays
  Coding DNA Sequence Number=SeqID_2118
MVGSEGPGARTWEIGARQLAASREELAGKGLRLGAAARTSAAGSRDETVAERALAGTGVTTRELGTVPQPEAERAESAMGDNRESARHRGEQGVNWVELSQGASANEKPYADHGKRAVELEEQGRGAAALGACRRDAGRREAREGARALRRWAHGATTEKKMARARARKKQIRTSGKKSGEKKSGVG

SEQ ID NO: 43898 - protein, 68 aa, Zea mays
  Coding DNA Sequence Number=SeqID_2119
MDGYAWVLLSVVLLVARDAGRPPAEVQCKAGTADDAAAVRRENPAEQSTRSSSSNTASEHQLANRIGQ

SEQ ID NO: 43899 - protein, 69 aa, Zea mays
  Coding DNA Sequence Number=SeqID_2120
MVDGWGGREKKGLTFFPENSPVNFVLGFLESTQQALPNLCVEEQLGGHYSDAETSMHSSFLRGTPLSLP

SEQ ID NO: 43900 - protein, 112 aa, Zea mays
  Coding DNA Sequence Number=SeqID_2121
  Gene Ontology: Mol. function=protein phosphatase type 2C activity
  Homolog annotation: Hit_ID=Q10S32; Match level="QueryCoverage=90%, HitCoverage=25%, E-value=2e-49, Identity=87%"; Hit description =Protein phosphatase 2C, putative, expressed
MDYFSSCWGPRSGAGHRGKGSDAAGRQDGLLWYKDAGQLVTGEFSMAVVQANQLLEDQSQVESGSLSLADPGPQGTFVGVYDGHGGPETSRFINDHLFNHLRSKDSICQSYR

SEQ ID NO: 43901 - protein, 81 aa, Zea mays
  Coding DNA Sequence Number=SeqID_2122
  Subcellular localization annotation: CTP_CleavageSite=52; ConfidenceScore=5.24e-01
MGSTSSRGRHMAAPLAVLVRHHTAMWTLLVLSYAPTSGLLPSFLISSSPLCRCRQARGRNCEGGLLGSSLRRVAVCMVLKV

SEQ ID NO: 43902 - protein, 298 aa, Zea mays
  Coding DNA Sequence Number=SeqID_2123
  Gene Ontology: Mol. function=protein phosphatase type 2C activity; Cellular component=protein serine/threonine phosphatase complex; Biological process=protein amino acid dephosphorylation
  Homolog annotation: Hit_ID=Q10S32; Match level="QueryCoverage=88%, HitCoverage=69%, E-value=1e-127, Identity=82%"; Hit description =Protein phosphatase 2C, putative, expressed
  Pfam annotation: Domain name=PP2C; Domain location=3-237; Score=52.7; E_value=1.3e-12; Accession=PF00481.12; Description=Protein phosphatase 2C
MKIYLPEGGMRATKAGGFATEHKFMSADVIRKAFQATEEGFLSLVSKEWSLKPQIASVGSCCLVGVICAGTLYVANVGDSRAVLGRLVKATGEVVAMQLSSEHNACYEEVRQELQSSHPDDPHIVVLKHNVWRVKGLIQISRSIGDVYLKKPEYNREPLHSKFRLRETFQRPILSSEPQITEHRIQPNDQFVIFASDGLWEHLSNKEAVDLVQSSPRNGIARRLVKAAMQEAAKKREMRYSDLKKIDRGVRRHFHDDITVVVSIISRFFRVDMKGGSITARDNVCGAHDLTSSDQSYW

SEQ ID NO: 43903 - protein, 281 aa, Zea mays
  Coding DNA Sequence Number=SeqID_2124
  Gene Ontology: Mol. function=translation initiation factor activity
  Homolog annotation: Hit_ID=Q6ZI51; Match level="QueryCoverage=50%, HitCoverage=29%, E-value=4e-47, Identity=68%"; Hit description =Putative eukaryotic translation initiation factor
MAADSTMGFHQGITASLYNHHMLSFQSNNDVGIGGGDDATGGMVMAPGSVSGGSGNAGLFLSPNTGVVSNAPGVASSRNSSGDAFCGIGTPKYKYVTGSSSDWSDRETAPASARPTFGNPATIPTAIRPPQQTSARVISIVNPASFTPSPADFGSQIQYDGLESGAPASVGRADDDWSHGKKPLPSGPSRYPSLGSAGGDFRDSPISTNSSDRWSRATPSNDERERPRIVLDPPKRDALATPTPPAEVGRSRSSPFGAARPREDVLADKGMDWKKMETEID

SEQ ID NO: 43904 - protein, 135 aa, Zea mays
  Coding DNA Sequence Number=SeqID_2125
  Subcellular localization annotation: CTP_CleavageSite=46; ConfidenceScore=5.24e-01
MRVPLTAAATELWQAGITLGHGLRPPAPLQFVTPSPASVVALAGANAKNVSSPPVAAAWPGGGGAKEAVAGGKEEWQLTPLDMGLGAGEGWDAAVPPGLAPTTPSSGGSSTAGTRLRPWGLSWTRRSLSWTTRRP

SEQ ID NO: 43905 - protein, 60 aa, Zea mays
  Coding DNA Sequence Number=SeqID_2126
  Homolog annotation: Hit_ID=Q9XPS7; Match level="QueryCoverage=50%, HitCoverage=4%, E-value=1e-07, Identity=70%"; Hit description=DNA -directed RNA polymerase beta chain
MSVKMRTTCTWTERPYEALLFPGIGFGLFLSRIHIIRKNRVLAIDILSQIIEMQFRDLDL

SEQ ID NO: 43906 - protein, 382 aa, Zea mays
  Coding DNA Sequence Number=SeqID_2127
  Gene Ontology: Mol. function=protein transporter activity; Cellular component=membrane; Biological process=intracellular protein transport
  Homolog annotation: Hit_ID=Q9SUJ1; Match level="QueryCoverage=99%, HitCoverage=99%, E-value=3e-91, Identity=52%"; Hit description =Syntaxin-43
  Pfam annotation: Domain name=SNARE; Domain location=291-353; Score =82.8; E_value=1.1e-21; Accession=PF05739.9; Description=SNARE domain
  Pfam annotation: Domain name=Syntaxin; Domain location=132-228; Score= 64.4; E_value=3.6e-16; Accession=PF00804.15; Description=Syntaxin
  Pfam module annotation: Pfam domain module=SNARE::Syntaxin; Domain location=291-353::132-228
MATRNRTPLYRKYRDALRHVRAPPGAPSSSGGGGGGGGPVIEMASLLRSDRPYAPLSTDDPSASRCHHLQLSTALLTSRLVSRTFGNISEDRANVRLAIACRSTVISGLGSKAVVLCSDLQTQSRGAATVGLPPAWVDVSEEISANMQRARTKMAELAKAHAKALMPSFGDGRDDQRAIEVLTHEVTDLLKRSEKRLQKLSMKDSSEDSNVRKNVQRSLATDLQNLSMEFRKKQSSYLKQLRQQKEGQDGVDLEMNINGAKSTFEDDEFDDVGFTEVQMSKLKKSEAFTREREREIEQVVESVNELAQIMKDLSVLVIDQGTIIDRIDYNIQNVAASVEEGYKQLQKAERTQKKGGMVMCATVLVILIFIMIVLLILKEIIF

SEQ ID NO: 43907 - protein, 119 aa, Zea mays
  Coding DNA Sequence Number=SeqID_2128
  Gene Ontology: Mol. function=nucleic acid binding; Cellular component= nucleus
  Homolog annotation: Hit_ID=Q5NAW2; Match level="QueryCoverage=55%, HitCoverage=14%, E-value=7e-14, Identity=55%"; Hit description=Zinc finger CCCH domain-containing protein ZFN-like 1
  Pfam annotation: Domain name=zf-CCCH; Domain location=59-85; Score =26.4; E_value=9.8e-05; Accession=PF00642.15; Description=Zinc finger C-x8-C-x5-C-x3-H type (and similar)
MEPPHAVAAVAAGGEGGTASPGTGLEGPVLRRGLDGGGEGEDGELGAGQEADARIPERPSEADCGYYLCTGACGFRDRCRYNHPRDRGGTENLYVVVAISDCSNRQLKKRIDLFLWAKC

SEQ ID NO: 43908 - protein, 99 aa, Zea mays
  Coding DNA Sequence Number=SeqID_2129
MGRSALRPRPRWKLSRKALGVLSNWKWVQSLFLRVTDSLRKGPYQRGLATVKLCFAVAETNLGEKGNSLAMAAGDKEEYRRSEYVFNAVAAIPVSNGEL

SEQ ID NO: 43909 - protein, 123 aa, Zea mays
  Coding DNA Sequence Number=SeqID_2130
MGRSALRPRPRWKLSRKALGVLSNWKWVQSLFLRVTDSLRKGPYQRGLATVKLCFAVAETNLGEKGNSLAMAAGDKEEYRRSEYVFNAVAAIPVSNGELNSSAAKILYPATLSFYPTRESWRR

SEQ ID NO: 43910 - protein, 173 aa, Zea mays
  Coding DNA Sequence Number=SeqID_2131
  Homolog annotation: Hit_ID=Q9FK69; Match level="QueryCoverage=24%, HitCoverage=42%, E-value=3e-11, Identity=76%"; Hit description =Arabidopsis thaliana genomic DNA, chromosome 5, P1 clone:MRA19
MEIPNARAVLRVRCPRCHCVLEEAGAPVYQCGGCGASLQEIWDALRVAAESDLALAQTIVDSAGIIVSNPDMTLCYDERGWTEGVHHRTVPPPATLTPARVFLLPANHTRSRRPRRRVSRPRQAPLPRRAVMPAVGYPALVSAPLALTPVFEEPCFHPQRRQLAGILLILARC

SEQ ID NO: 43911 - protein, 818 aa, Zea mays
  Coding DNA Sequence Number=SeqID_2132
  Gene Ontology: Mol. function=nucleic acid binding
  Homolog annotation: Hit_ID=Q5QNF9; Match level="QueryCoverage=99%, HitCoverage=96%, E-value=1e-150, Identity=42%"; Hit description =Putative Not4-Np
  Pfam annotation: Domain name=RRM_1; Domain location=50-126; Score =24.7; E_value=0.00033; Accession=PF00076.12; Description=RNA recognition motif. (a.k.a. RRM, RBD, or
MAHLKELCADKSNYQKEQVKSHKQTSAKVQLGQSEPKDPNSIRVIQRKLVYIVGMPTEFASEKLLRQKSFLGQYGKIENIIIDNVGANQQVPDSGRVYVTFAKEVEAIRCIQAVDGYSLDGRPLKATFGVTRYCHIWLSNKDCYKPNCSYVHYKAPAEEICTKDDVSVVCARSSFCAVAMAAAVSNRLVVAIARKADETGEGFEVVRLQHSMGMSTKCLQHRSGRTLPPPCDCSSRNTTASGISKDICINDDRLLPNGAIKYTSLPSVTTPRDSSLSSGSPPSPASIVLHQRNDHERLHNNQQNLSDLKPQRYIPPGGRNCSSEMTTSVKHMQPIEGAWLHSSSNEHLGSNNDKSQASSQLGNDNSNPKQITSAENGTSDTVQQKPQYADVVSQGQVAPVRRLTVLNRPSIASSDTRPKATGQVVNGTSTSFTKLTLVQKAQGSCITIPRNHPVPQIPEEPAHLFASASVKSHAGVEIMNECSDIKEKIVLGGYKQLPESTVSHRLTASQNMSSGTLPSNLSASYAKTQGSAGSHNLSDLNMKLVAKNRSQLVNQQNAPVSVSNTGIARASFCCSTLNKNASLSDGDSSHNRRWDTIRSGHIVSSHSSDSTMLSRPASAVSSTDVASLHRKERRQACPPGFEKPHLYSGSGKACSGHCSAPDALVQDCGIPDQQDFTSLTTDCLKDDGDVTQNLSMNISSPPSLTDTNRNWSQSHRQFPGTLFGWSNDPQYSFYPGGSSHPRQEAENWDGTSTSYMATATGGYKVFSQGTTSDMRGGMAGTLLQQPIMSTHDRWTDGSSDSGRNCPQVDISYRMYSLF

SEQ ID NO: 43912 - protein, 115 aa, Zea mays
  Coding DNA Sequence Number=SeqID_2133
MEAQALASCNRRAECFVHATTPPLAPPSRLLDCAGRSSGHVASQAYVPSGGNERTLSHGVKTTRPCSVPRTARARATAAPPTTRPVALTPRRDRRRLWHEKRATLRLRHKDRVSK

SEQ ID NO: 43913 - protein, 55 aa, Zea mays
  Coding DNA Sequence Number=SeqID_2134
MTDADALRLVPGSVEFFAGEGHPPLPLKGGLTPHLAALRRQPTCFHRRGPGWIRA

SEQ ID NO: 43914 - protein, 78 aa, Zea mays
  Coding DNA Sequence Number=SeqID_2135
  Gene Ontology: Mol. function=DNA binding; Cellular component=nucleus; Biological process=regulation of transcription
  Homolog annotation: Hit_ID=P92948; Match level="QueryCoverage=74%, HitCoverage=6%, E-value=3e-28, Identity=100%"; Hit description=Myb -like DNA binding protein
  Pfam annotation: Domain name=Myb_DNA-binding; Domain location=7-53; Score=52.4; E_value=1.6e-12; Accession=PF00249.21; Description=Myb -like DNA-binding domain
MRIMIKGGVWKNTEDEILKAAVMKYGKNQWARISSLLVRKSAKQCKARWYEWLDPSIKKMTLSVISRYPFTNIRTGKL

SEQ ID NO: 43915 - protein, 56 aa, Zea mays
  Coding DNA Sequence Number=SeqID_2136
MEELGRTTQLRSHPSFSSSLERDDRVSLQEPHKSHSTSSCSSDSDTDDGRKRHDDD

SEQ ID NO: 43916 - protein, 99 aa, Zea mays
  Coding DNA Sequence Number=SeqID_2137
  Homolog annotation: Hit_ID=Q8W149; Match level="QueryCoverage=80%, HitCoverage=8%, E-value=3e-38, Identity=97%"; Hit description=CDC5 protein
MGHENESFEDFVKAHDACQDDLMFFPTSNSYGLASVAGNADKISALQNEFETVKKRMDDEAKKASRLEQKIKLLTQGYQLLPVRSCRGLPNAQLFSPFL

SEQ ID NO: 43917 - protein, 510 aa, Zea mays
  Coding DNA Sequence Number=SeqID_2138
  Gene Ontology: Mol. function=identical protein binding; Cellular component=cellulose and pectin-containing cell wall; Biological process=negative regulation of enzyme activity
  Homolog annotation: Hit_ID=Q10RX3; Match level="QueryCoverage=81%, HitCoverage=52%, E-value=1e-171, Identity=72%"; Hit description =Subtilase family protein, putative
  Pfam annotation: Domain name=Peptidase_S8; Domain location=213-498; Score=-14.3; E_value=5.1e-06; Accession=PF00082.12; Description =Subtilase family
  Pfam annotation: Domain name=Subtilisin_N; Domain location=116-206; Score=60.6; E_value=5.2e-15; Accession=PF05922.7; Description =Subtilisin N-terminal Region
  Pfam module annotation: Pfam domain module=Peptidase_S8::Subtilisin _N; Domain location=213-498::116-206
MTGGRGALEQREGGVALQSRSNARSLSPRSAMGWERCRRSPPARAMGAVGRDRKNETEKDSVALLVLAHAQPSAEKRIQWRYKKMDVPRVVLVCHSLFWLLLPAVVLGATAEETMQTYIVQLHPHHDGGSGEATLPASNSKVDWHLSFLERSVAWEQEKRPASRLLYSYHTVFDGFAAQLSDGEAAALRALPGVASVRADRRVELHTTYSYRFLGLGFCPTGAWARSGYGRGTIIGVLDTGVWPESPSFDDRGMPPAPVRWSGACQGGEHFNASNCNRKLIGARFYSKGHRANYPTNPSEAAALLEYVSPRDAHGHGTHTASTAAGAAVAGASVLGAGLGEARGVAPGAHVAAYKVCWFNGCYSSDILAGMDDAVRDGVDVLSLSLGGFPIPLFEDSIAIGSFRATARGVSVVCAAGNNGPARSSVANEAPWVLTVGAATMDRRFPAYVRLGDGRVLYGESMSMYPGETGLKKGGKDLELELVYAVGGTRESEYCLKGSLDKAAVAGKMV

SEQ ID NO: 43918 - protein, 65 aa, Zea mays
  Coding DNA Sequence Number=SeqID_2139
MNFCVLTLAIKLSPTCEEKVAPEEDKYEEFDEKFDRFPTSGFTKTVDLKSRFTILVELLKDCSTN

SEQ ID NO: 43919 - protein, 465 aa, Zea mays
  Coding DNA Sequence Number=SeqID_2140
MTNRIVHNFSFHPNNGITNSVLPSMPGSIAHDACMVRDLLDSTYRRHQTEGAQAPPGRGGLCGQPQGRGDPGVPARPGRPNNQPNAPRAGQSPCAAIKGEAVTLTAPIPSSRRPLGSRARSSHLPKPSNRAERPQPARPSRVCARAARFGDVRAVRRPQPGSARCRHGQGRTPAREPPRPALPELPRSAPRSQHGRRGREPGAPSASALGCLAEGLADCAHRRDRSAGAAPPAGSAPGPTGRRAEPPCSGGRAPLPARSSERLRAARARIQPTSGRSQRLRAARAKWIRLCRGPALGVALEASSPAAGRASRCRCAGAVRARARGPSEGAVGTQPLARGRGSQTPTSHGQDEEALRLLVPTLLWQHLVLVMNNGDVQNKASTTSDKAAFLRATGHWRKRGKSVPASPFVSALMHACMHASPAPCAQWASASSTRRSPICPSQAFRLARHCEVVSSALTMLLAGAS

SEQ ID NO: 43920 - protein, 122 aa, Zea mays
  Coding DNA Sequence Number=SeqID_2141
MAVANFIYSDQQFKVRQKGGLYWPQGATTIESVRAVLKLPHLQLDLATRGRIRDSLYRLANRLEQTHCVASTSGRMGSSGSNRFESDGWGETQATSPMDQLVAQLLLQKPSHRKTAPPHRVT

SEQ ID NO: 43921 - protein, 290 aa, Zea mays
  Coding DNA Sequence Number=SeqID_2142
  Homolog annotation: Hit_ID=Q2QQD4; Match level="QueryCoverage=46%, HitCoverage=46%, E-value=8e-30, Identity=54%"; Hit description=Helix- loop-helix DNA-binding domain containing protein
  Pfam annotation: Domain name=HLH; Domain location=155-204; Score =25.4; E_value=0.0002; Accession=PF00010.16; Description=Helix-loop -helix DNA-binding domain
MALSFHTTTAPLFGHRIPAPDMSFLHDDFHSEVTDALLGFVYDPLDASNAALDDLLGLPPSDDAAFLAPIDGATEAKWQCGKRQRIGGGNQQVPALAAAPMIDEFVLPLPVPLPLPQPPPPAAPLLPVPVPVPTQVPEPVVFVRGADGNKAGGACQSVQNSAARQRRKRISEKTAELARLIPGANKLNTAEMLEEASRHVKLLQAQVGMLALMRAAGSSEDDKMPSAITAQERMHALLACGSVQERLAAEGRCLVPTSLVDAVAKDYAVVKGNPVVRRDLGRFVASLQGQ

SEQ ID NO: 43922 - protein, 265 aa, Zea mays
  Coding DNA Sequence Number=SeqID_2143
  Gene Ontology: Mol. function=oxidoreductase activity; Cellular component=integral to membrane; Biological process=microtubule bundle formation
  Homolog annotation: Hit_ID=Q8GSQ1; Match level="QueryCoverage=54%, HitCoverage=30%, E-value=3e-37, Identity=59%"; Hit description =Cytochrome P450 85A1
  Pfam annotation: Domain name=ACT; Domain location=54-114; Score=16.8; E_value=0.026; Accession=PF01842.15; Description=ACT domain
GSNDRSIESWVLIKKPCIVVPGDDAGSPSWDSSGASPATNQLPEIEAWFLNKNVMVRIHCEDGKGVVVRVLAELEELPLSIVHANVIHHREVLDVSAPQRGPRRIATVALEKAEVDGNIVALKNYLKTYYILTPYIPVVITICKNNMLVRSQRARKKLVAMLRQMIADRRSSGCTRDDMLDALLSGNEGTRAKLSDDQIIDLLITLIYSGYETVSTTSMMAVKYLSDNPKALGQIRKEHLDIRKAKSPEDPLDWNDYKSMTFTKA

SEQ ID NO: 43923 - protein, 292 aa, Zea mays
  Coding DNA Sequence Number=SeqID_2144
  Gene Ontology: Mol. function=hydroxymethylglutaryl-CoA synthase activity; Cellular component=soluble fraction; Biological process =acetyl-CoA metabolic process
  Homolog annotation: Hit_ID=Q8H051; Match level="QueryCoverage=94%, HitCoverage=60%, E-value=1e-134, Identity=89%"; Hit description =Putative hydroxymethylglutaryl coenzyme A synthase
  Pfam annotation: Domain name=HMG_CoA_synt_C; Domain location=159-292; Score=12.1; E_value=5.7e-15; Accession=PF08540.1; Description =Hydroxymethylglutaryl-coenzyme A synt
  Pfam annotation: Domain name=HMG_CoA_synt_N; Domain location=1-158; Score=274.9; E_value=1.6e-79; Accession=PF01154.8; Description =Hydroxymethylglutaryl-coenzyme A synt
  Pfam module annotation: Pfam domain module=HMG_CoA_synt_C::HMG_CoA _synt_N; Domain location=159-292::1-158
MEELETHDGVSKGKYTIGLGQESMAFCTEVEDVISMRYWLSLTVVKSLLKNYNIDPMCIGRLEVGSETVIDKSKSIKTWLMQIFEESGNTDIEGVDSSNACYGGTAALFNCVNWVESKSWDGRYGLVVCTDSAVYAEGPARPTGGAAAIAMLIGPNAPICFESKYRGSHMAHVYDFYKPDLASEYPVVDGKLSQTCYLMALDSCYNVFCKKYEKHEGKQFSISDADYVVFHSPYNKISRPYQAARLMESQGKNWHPMQACHLKKATRVATLKSLLNIANILDISKKLKARHV

SEQ ID NO: 43924 - protein, 685 aa, Zea mays
  Coding DNA Sequence Number=SeqID_2145
  Gene Ontology: Mol. function=hydrolase activity; Cellular component =intracellular; Biological process=metabolic process
  Homolog annotation: Hit_ID=Q10S36; Match level="QueryCoverage=99%, HitCoverage=93%, E-value=0.0, Identity=57%"; Hit description =Pentatricopeptide, putative, expressed
  Pfam annotation: Domain name=PPR; Domain location=179-213; Score =33.9; E_value=5.6e-07; Accession=PF01535.11; Description=PPR repeat
  Pfam annotation: Domain name=PPR; Domain location=280-314; Score =26.6; E_value=8.6e-05; Accession=PF01535.11; Description=PPR repeat
  Pfam annotation: Domain name=PPR; Domain location=381-415; Score =47.0; E_value=6.3e-11; Accession=PF01535.11; Description=PPR repeat
  Pfam annotation: Domain name=PPR; Domain location=452-486; Score=4.0; E_value=2.5; Accession=PF01535.11; Description=PPR repeat
  Pfam annotation: Domain name=PPR; Domain location=518-552; Score =18.3; E_value=0.027; Accession=PF01535.11; Description=PPR repeat
  Pfam annotation: Domain name=PPR; Domain location=77-111; Score=22.4; E_value=0.0016; Accession=PF01535.11; Description=PPR repeat
  Pfam module annotation: Pfam domain module=PPR::PPR::PPR::PPR::PPR::PP R; Domain location=179-213::280-314::381-415::452-486::518-552::77-111
MLAASARPDRFTFPVVVKCCTRAGALGEGRAAHAAVIKLGLGADMYTANSLVALYAKLGLVGDAERVFDGMPARDIVSWNTMVDGYVSNGMGALALACFRDMNDALRVRHDGVGVIAALAACCLESALAQGREIHGYAIRHGLEQDVKVGTSLVDMYCKCGNVLYAENVFATMLLRTVVTWNCLIGGYALNERPVDAFDCFMQMRAEGFQVEAVTAINLLAACGQTESSLYGRSVHAYVVRRHFLPHVVLETALLEMYGNVGKVESSEKIFGQMTEKTVVTWNNMIAAYIYMEMYQEAIALFLELLNQPLYPDYFTMTTVVPAFVLLGSLRQCRQMHSYIIKLGYGDSTLIMNAVMHMYARCGDIVASREIFDKMPGKDVISWNTIIIGYAIHGQGKTALEMFDEMKCNGIEPNESTFVSVLTACSVSGLETEGWKEFNSMQHEYGMVPQIEHYGCMTDLLGRAGDLREVLRFIENMPIAPTSRIWGSLLTASRNKNDIDIAEYAAERIFQLEHNNTGCYVVLSSMYADAGRWEDVERIRSLMKEKGLRRTEARSLVELNAEECSFVNGDMSHPQSEKIHELSDILSRNIGEDLDSPTNLRDSDPFASGKTVLPNKHSVRLAVAFGLISSEPGTPILVKKNVRVCNHCHRALKLISKYSRRKIVVGDTKIYHIFSDGSCCCGDYW

SEQ ID NO: 43925 - protein, 127 aa, Zea mays
  Coding DNA Sequence Number=SeqID_2146
  Homolog annotation: Hit_ID=Q9XHE1; Match level="QueryCoverage=86%, HitCoverage=15%, E-value=2e-45, Identity=83%"; Hit description =CENPCA protein
  Subcellular localization annotation: CTP_CleavageSite=19; ConfidenceScore=5.43e-01
KQTITSSTPSPNGAKGQKRAQRRNQTKKRNQRKILGDADLACQPGVRKSSRTRSRPLEYWLGERLLYGPIHDNLHGAIGIKAYSPGQDGKRSLKVKSFVPEQYSDLVAKSASVMAHAVKVSCGVIVS

SEQ ID NO: 43926 - protein, 521 aa, Zea mays
  Coding DNA Sequence Number=SeqID_2147
  Homolog annotation: Hit_ID=Q9XHE1; Match level="QueryCoverage=93%, HitCoverage=70%, E-value=0.0, Identity=92%"; Hit description=CENPCA protein
MDATDPLCAISSTARLLPRTLGPAPAIGPSPSKARDALLEAIALARSLKGSEELVKQATMVPKEHGDIQALYHDDGVKGRPPANGSKEQQGRRPALDRKRARKPVPVVDQSKLSNISDPITFFMTLDRLEEAEEEIKRLNGEAEKRTLNFDPVDEPIRQPGLRGRKSVRSFKVIEDVGTQDPIEAPASQTATMTGSQLSQDVMHAVAGKNGRSVSSRSSEAISEKEVTVSLAEKDGRDDLTYILTSIQDLDESEEEEFIRKTLGIKETRKERVGLRNSILGVRSLRSNTEQKGSMKVHPPESHLPQTRQDRISELEKHLFPGGAANAKCTDDESKGSPDIVMGEPSLVHYSSDVLMTDENFTASDVDRETPNLGARAADPVLDPEPNLPDHAYERQPGGSSLGLYRDTEVGVAKENETCSRSIISVEEDDVPIDYITIGRSTDETEVSSSHPLEGSSTEELVTKPVRHAAPDGICRTSHAAEDSIQHLVLASWHGKRSKRVVSYKVHSFCYAPGYTIIRCI

SEQ ID NO: 43927 - protein, 82 aa, Zea mays
  Coding DNA Sequence Number=SeqID_2148
MEPQFPFPPTQITILQLTNPLHHVNQSIDYGEAVLLSVQAREVVLVDVAEAELARGHTGQRQLEHCELAGGCFTAHWLVAGG

SEQ ID NO: 43928 - protein, 129 aa, Zea mays
  Coding DNA Sequence Number=SeqID_2149
  Subcellular localization annotation: CTP_CleavageSite=40; ConfidenceScore=5.24e-01
MPDHAINKAGITLGHGLRPPAPLQFVTPSPASVVALAGANAKNVSSPPVAAAWPGGGGAKEAVAGGKEEWQLTPLDMGLGAGEGWDAAVPPGLAPTTPSSGGSSTAGTRLRPWGLSWTRRSLSWTTRRP

SEQ ID NO: 43929 - protein, 1144 aa, Zea mays
  Coding DNA Sequence Number=SeqID_2150
  Gene Ontology: Mol. function=4 iron, 4 sulfur cluster binding; Cellular component=mitochondrion; Biological process=metabolic process
  Homolog annotation: Hit_ID=Q10S34; Match level="QueryCoverage=94%, HitCoverage=94%, E-value=0.0, Identity=91%"; Hit description =Aconitate hydratase, cytoplasmic, putative, expressed
  Pfam annotation: Domain name=Aconitase; Domain location=146-656; Score=668.3; E_value=6.1e-198; Accession=PF00330.10; Description =Aconitase family (aconitate hydratase)
  Pfam annotation: Domain name=Aconitase_C; Domain location=942-1072; Score=212.1; E_value=1.3e-60; Accession=PF00694.9; Description =Aconitase C-terminal domain
  Pfam module annotation: Pfam domain module=Aconitase::Aconitase_C; Domain location=146-656::942-1072
  Subcellular localization annotation: CTP_CleavageSite=76; ConfidenceScore=5.75e-01
MPPLTSSLLSRSTTGGSSTRAAAAVAAISRPAAPSSSSPPARSTPRPRSSPASPFASGLASRLFGGHRAVARSASSAAAVFERRFASAATRNSYDEILTGLAKPGGGEEFGKYYSLPALSDPRIDRLPYSIRILLESAIRNCDDFQVTGKDVEKILDWEKSAPKQVEIPFKPARVLLQDFTGVPAVVDLACMRDAMSKLGSDPNKINPLVPVDLVIDHSVQVDVARSANAAQANMELEFHRNKERFGFLKWGSSAFRNMLVVPPGSGIVHQVNLEYLARVVFNNGGILYPDSVVGTDSHTTMVDGLGVAGWGVGGIEAEAAMLGQPMSMVLPGVVGFKLSGKLRNGVTATDLVLTVTQMLRKHGVVGKFVEFYGQGMSELSLADRATIANMSPEYGATMGFFPVDGKTLDYLKLTGRSDDTVAMVESYLRANKMFVDHSQVDAERVYSSYLELNLEEVEPCLSGPKRPHDRVTLKNMKSDWLSCLDSDVGFKGFAVPKESQGKVAEFSFHGTPAKIKHGDVVIAAITSCTNTSNPNVMLGAALVAKKACELGLEVKPWIKTSLAPGSGVVKKYLDKSGLQKYLDQLGFHIVGYGCTTCIGNSGELDESVSAAITENDIVAAAVLSGNRNFEGRVHPLTRANYLASPPLVVAYALAGTLTPSISSSLYSIDPKYLKHYIVWKKHTSRNILCMSFVIGKSSRQKDRYQYTSPLIRCWLPTRQKLPQSLRLLPHDSKFLTTISKTSINRLETRTRCAYMSIDVSYEKLLTNSCLCVPKLEAGITHLVCISDFLHLVSWTYKIFTRLPVVVSTNSLNLSVNIDFEKEPIGISKDGKEVYFRDVWPSTEEIAEVVKSSVLPDMFKSTYESITKGNPMWNELPVSTSTLYPWDPSSTYIHEPPYFKDMKMSPPGPRPVKDAYCLLNFGDSITTDHISPAGNIHPDSPAAKYLKERGVERKDFNSYGSRRGNDEIMARGTFANIRLVNKFLKGEVGPKTIHVPSGEKLAVFDAAMKYKNEGHDTIILAGAEYGSGSSRDWAAKGPMLQGVKAVIAKSFERIHRSNLAGMGIIPLCYKAGEDADTLGLTGHERYTVHLPTNVSEIKPGQDVTVTTDNGKSFTCTLRFDTEVELAYYDHGGILPYVARKIAEQ

SEQ ID NO: 43930 - protein, 371 aa, Zea mays
  Coding DNA Sequence Number=SeqID_2151
  Gene Ontology: Mol. function=heat shock protein binding; Cellular component=integral to membrane; Biological process=protein folding
  Homolog annotation: Hit_ID=Q10S35; Match level="QueryCoverage=77%, HitCoverage=97%, E-value=1e-92, Identity=64%"; Hit description=DnaJ domain containing protein, expressed
  Pfam annotation: Domain name=DnaJ; Domain location=94-161; Score =61.9; E_value=2.1e-15; Accession=PF00226.21; Description=DnaJ domain
  Pfam annotation: Domain name=RRM_1; Domain location=272-332; Score =14.5; E_value=0.0065; Accession=PF00076.12; Description=RNA recognition motif. (a.k.a. RRM, RBD, or
  Pfam module annotation: Pfam domain module=DnaJ::RRM_1; Domain location=94-161::272-332
MVTSGEAGICLRLETLGEMPRVRRYLSCFPLESDEARQEFGSPGRDGQTALVVPQLGNSPSAHPDLGFVHPPLTRLPTKQLPMAATGQEGDDVDHYEVLCLPSGEEGAALTIEHIEKAYRTQSRLRHPDKRPDDPNATADFQLLSSSYKLLRDESLRRQFDARLRGRREAAARAAATGVKRRKAVSDLEERERAAAAGHPADPEELAKREAQRMAADIERELAAFRAAKQASAFGATSTSAHGDKKGGTPQDGVKTDKGKILKVSWDGSADSYSAAKLEEIFQKFGKVEDIVIKTRKSRSKGSAIVVMGSKEAALLAIQNHFSLFPLNVAPVQESGGLSTRPTETYESRTNNTDGTGFNDLEASVFRKLRE

SEQ ID NO: 43931 - protein, 632 aa, Zea mays
  Coding DNA Sequence Number=SeqID_2152
  Homolog annotation: Hit_ID=UPI000065F62C; Match level="QueryCoverage =13%, HitCoverage=7%, E-value=4e-18, Identity=51%"; Hit description =Homolog of Homo sapiens "BRD1 protein
  Pfam annotation: Domain name=Bromodomain; Domain location=122-209; Score=91.0; E_value=3.7e-24; Accession=PF00439.15; Description =Bromodomain
  Subcellular localization annotation: CTP_CleavageSite=46; ConfidenceScore=5.62e-01
MAKTRKPPAPPSPPPPPAETPSPQRRRKKKGRPSLLDLQRRSLRLQAQNPSPAASPTRRDPNPSDDDEDGTGSGRRRQKRLKSVLSGVVKEEQGEGKKDAAKATGKEDAASDGGPTGTPLPDKKLLLFILDRLQKKDTYGVFSEPVDAEELPDYFDIIDHPMDFSTIREKLLNDSYSKLEQFEDDVFLLTSNAMSYNSADTIYFRQARSIEALAKKDFENLRQPSDEEEPKPPARRGRPPKNPKTEGDVSPDLSNVKANKPEDNVDTFRKRSTGDRTRNTNTPMKDLSSFHDTFGSFSAKRTDKIGDYSGSSKWGKKPVSLDDDRRSTYDQHYSRNSSLFAALDDERKLLVPVGVQQPHAYARSLARFASKLGPVGWDVAANRIRRALPPGTSFGPGWVVDGEPPQNSQWAPAASTNPSSEPTAPPNMPSKNDVLDHKSGPSSNGDVTGEEHLTRTQTVASTSTSFDKSSDISSKVTKLENGVTESCGGTDNTGSAAPPMQQHSHSREIHSNINGFTAMSNAMSQYAGQGLFGSGIHMTHAQVLGMFSGMNGKVNGYIHRHPVTADSLKTAGQNGDVGKATVNPVQSAGQDPKTATENSSAHPGLNSRAQSSGSSPRGKLTNPKHPDLALQL

SEQ ID NO: 43932 - protein, 83 aa, Zea mays
  Coding DNA Sequence Number=SeqID_2153
MDTEAAVVNQPLTMLWSMGLGRDTEHSVGRQQGQKGWSTLESWSRLVHPAAAPHGRRCLVALRVLAERPTVISKGPPLAFRQV

SEQ ID NO: 43933 - protein, 45 aa, Zea mays
  Coding DNA Sequence Number=SeqID_2154
MSAPPLTSGEPFRVFVGYDPREHEAYEKWGKVSRELKLMPETHYG

SEQ ID NO: 43934 - protein, 125 aa, Zea mays
  Coding DNA Sequence Number=SeqID_2155
  Gene Ontology: Mol. function=nucleotide binding; Cellular component =intracellular; Biological process=small GTPase mediated signal transduction
  Homolog annotation: Hit_ID=Q6Z8E3; Match level="QueryCoverage=45%, HitCoverage=29%, E-value=2e-27, Identity=100%"; Hit description =Putative ADP-ribosylation factor
  Pfam annotation: Domain name=Arf; Domain location=45-122; Score=-5.5; E_value=2.2e-09; Accession=PF00025.11; Description=ADP-ribosylation factor family
MEYRRIEFVHPNKCFHFAGKSDFERIFKEVFEDCQTRTRGSWTSTPATSLPSWFTSFNVEKVQYKNVMFTVWDVGGQEKLRPLWRHYFNNTDGLIYVVDSLDRERIGKAKAEFHVCRLSVRAAYR

SEQ ID NO: 43935 - protein, 219 aa, Zea mays
  Coding DNA Sequence Number=SeqID_2156
  Homolog annotation: Hit_ID=Q10NZ3; Match level="QueryCoverage=90%, HitCoverage=60%, E-value=3e-73, Identity=70%"; Hit description =Expressed protein
RKYLVPSGPFLLPLVLLALARGQRVNAVFPLAQLGPALLLLLQASALAFRNEADGDVRRPRCPACCTPALYLDAVVLPYYTGLEALRWSRFSGECASCLCRMEPLLVGGSAVRYRGLSKTALAVIFALCSRMVCRIYGEERLSAWTRSALEAAGWVLVAADAVYLVGWVAAEGGGVGVAAYSLVAGLVFLSVFGKAYRFLAWVEARQSQWKSSLCHSAV

SEQ ID NO: 43936 - protein, 86 aa, Zea mays
  Coding DNA Sequence Number=SeqID_2157
  Subcellular localization annotation: CTP_CleavageSite=24; ConfidenceScore=5.05e-01
MSLAKPAACRLETGACAFHGPAPRGARASQPLPQRALVSHQARQPTLARAGEQGHIRGTSRRKRPCQESTRPACGAGGTLCTVKPL

SEQ ID NO: 43937 - protein, 731 aa, Zea mays
  Coding DNA Sequence Number=SeqID_2158
  Gene Ontology: Mol. function=identical protein binding; Cellular component=cytoplasm; Biological process=negative regulation of enzyme activity
  Homolog annotation: Hit_ID=Q8H047; Match level="QueryCoverage=97%, HitCoverage=96%, E-value=0.0, Identity=50%"; Hit description =Putative serine protease
  Pfam annotation: Domain name=PA; Domain location=338-437; Score =102.7; E_value=1.1e-27; Accession=PF02225.12; Description=PA domain
  Pfam annotation: Domain name=Peptidase_S8; Domain location=108-559; Score=65.8; E_value=1.4e-16; Accession=PF00082.12; Description =Subtilase family
  Pfam annotation: Domain name=Subtilisin_N; Domain location=26-101; Score=56.2; E_value=1.1e-13; Accession=PF05922.7; Description =Subtilisin N-terminal Region
  Pfam module annotation: Pfam domain module=PA::Peptidase _S8::Subtilisin_N; Domain location=338-437::108-559::26-101
MESFKLSLLPILFLAVAAAVSGDELRTFIVHVQPHKSHVFGTTDDRTAWYKTFLPEDERLVHSYHHVASGFAARLTEQELDALSAMPGFVTAVPNQVYKLLTTHTPKFLGLELPQSGRNYTSGFGEGVIIGVLDSGVYPFHPSFSGDGMPPPPAKWKGRCDFNASACNNKLIGARSFESDPSPLDKDGHGTHTSSTAAGAVVPGAQVLGQGAGTASGMAPRAHVAMYKVCGEECTSADILAGIDAAVGDGCDVISMSLGGPTLPFYRDSIAIGTFGAVEKGVFVSLAAGNAGPEDSTLSNDAPWMLTVAAGTMDRLISAQVRLGNGSTFDGESVFQPNISTTVTYPLVYAGASSTPDANFCGNGSLDGFDVKDKIVLCDRGNRVDRLDKGAEVKRAGGFGMILANQIADGYSTIADAHVLPASHVSYVTGVAIKEYINSTANPVAQIIFKGTVLGTSPAPAITSFSSRGPSIQNPGILKPDITGPGVSVLAAWPFQVGPPSPGPTFNFESGTSMSTPHLSGIAALIKSKYPDWSPAAIKSAIMTTADPDDRSGKPIMNEQYVPANLFATGAGQVNPDKALDPGLVYDIAPAEYIGFLCSLYTSQEVSVIARRSIDCSTITVIPDRILNYPSITVTLPSTTNPTAPVVVSRTVKNVGEAPAVYYPHVDLPGSVQVKVTPSSLQFAEANQAQNFTVSVWRGQSTDVKIVEGSLRWVSENDKYTVRSPVSISFV

SEQ ID NO: 43938 - protein, 77 aa, Zea mays
  Coding DNA Sequence Number=SeqID_2159
  Homolog annotation: Hit_ID=Q1SGL9; Match level="QueryCoverage=64%, HitCoverage=13%, E-value=5e-08, Identity=62%"; Hit description =Protein phosphatase 2C-like
MTDEIDTEIASALQHQRDDDLPSQELLVLAISRAFYDYYIKDCGIISASEVTQRRTDSNDQFVILATDEVAFVPVCL

SEQ ID NO: 43939 - protein, 761 aa, Zea mays
  Coding DNA Sequence Number=SeqID_2160
  Gene Ontology: Mol. function=identical protein binding; Cellular component=cytoplasm; Biological process=negative regulation of enzyme activity
  Homolog annotation: Hit_ID=O65836; Match level="QueryCoverage=96%, HitCoverage=96%, E-value=0.0, Identity=47%"; Hit description=P69F protein
  Pfam annotation: Domain name=PA; Domain location=359-462; Score=85.5; E_value=1.7e-22; Accession=PF02225.12; Description=PA domain
  Pfam annotation: Domain name=Peptidase_S8; Domain location=114-604; Score=87.6; E_value=3.8e-23; Accession=PF00082.12; Description =Subtilase family
  Pfam annotation: Domain name=Subtilisin_N; Domain location=30-106; Score=46.9; E_value=6.9e-11; Accession=PF05922.7; Description =Subtilisin N-terminal Region
  Pfam module annotation: Pfam domain module=PA::Peptidase _S8::Subtilisin_N; Domain location=359-462::114-604::30-106
MQSFNFSMLTTLVPFLLLAAVAVVARDELTTFIVHVQPLQENRMLATDDDRNAWYRSFLPEDGRLVHGYHHVASGFAARLTRQEVDALSSMPGFVTAAPEQIYELHTTHTPQFLGLDAREARKSYPVAERGAGVIIGVLDTGVVPSHPSFSGDGMPPPPPRWKGRCDFNGRAVCNNKLIGARSFVPSPNATSNSTSNDWRAPPVDDNGHGTHTASTAAGASVPGAQVLGQAMGTATGIAPRAHIAVYKVCTETGCPDSAILAGVDAAVGDGCDIVSMSIGGVSKPFYQDSIAIATFGAIEKGVFVTMSAGNSGPNVSSVTNEAPWMLTVAASTMDRSIRSTVRLGNGFVFHGESLYQPHAWTPTFYPLVYAGASGRPYAELCGNGSLDGLDVRGKIVLCELGGGPGRNITRVLKGAVVQSAGGAGMVLLNRFAQGYSTPADAHVLPASHVDYAAASAIKSYVNSTSNPTAQILFEGTILGGTAPPAPSIVFFSSRGPSLENPGILKPDITGPGVNVLAAWPFQVGPPSSAPLLPGPTFNVISGTSMSAPHLSGVAALIKSKHPRWSPAAIKSAIMTTADATDRAGNPILDEQRVAADWFATGAGHVNPEKAADPGLVYDIAASDYVGYLCSMYNSQNVSVIARRPVDCSAVTLIPESMLNYPSISVAFQQTWNRSAPAVVERTVKNVGEAPSVYYAAVDIFDDDVTVAVYPRELVFTQVNQERSFKVVVWPRQNGAPLVQGALRWVSDTYTVRSPLSISFA

SEQ ID NO: 43940 - protein, 84 aa, Zea mays
  Coding DNA Sequence Number=SeqID_2161
MAGIAEQMGRRALMAAAHLLPTPSTREHRDGMRAEDGRSAAAGCGAAADDGRSSAAGCGAAGGMRGRVRPRAYAAAGGYGLRGG

SEQ ID NO: 43941 - protein, 36 aa, Zea mays
  Coding DNA Sequence Number=SeqID_2162
MEAGVASGFSHAKYYVTVSIKEALGKGSVFAESQLN

SEQ ID NO: 43942 - protein, 359 aa, Zea mays
  Coding DNA Sequence Number=SeqID_2163
  Gene Ontology: Mol. function=protein serine/threonine kinase activity; Biological process=protein amino acid phosphorylation
MSNRESLVKDISQRRENRYRHGRHSCLSVRLKLKASQPHGTRGFERPRPRRPRPDPLTRCAIPAASPSSAATPPPDPFPPGHPALSAATAWLAVARSRGAPRKLDLSGGGVSRQRRRSAAAGAAALRRFLSPRVSGASDSAGLGAGLRRVLPSAPLRHHCKRFRVLASGWGYLILEGNMSENIDLVLEFLRKNRFAKAEAALRGELTGRADSNDMATQRRVAELKEGEEQQEGLVGSNVGPKGAAAARSADSSREFIVKEIDVGALPNGSDGKKGSGIGQPQDNVGDLYPWTFSIANSTAEQLAELLVSEEVPRHRRGAVLAEKRDRGVGTEQPGPVLEQKVSFGRGKGKVDAAGRTEN

SEQ ID NO: 43943 - protein, 802 aa, Zea mays
  Coding DNA Sequence Number=SeqID_2164
  Gene Ontology: Mol. function=protein serine/threonine kinase activity; Cellular component=cytoplasm; Biological process=protein amino acid phosphorylation
  Homolog annotation: Hit_ID=Q9FX38; Match level="QueryCoverage=99%, HitCoverage=70%, E-value=0.0, Identity=62%"; Hit description=Protein kinase, putative
  Pfam annotation: Domain name=Pkinase; Domain location=491-793; Score =211.9; E_value=1.4e-60; Accession=PF00069.15; Description=Protein kinase domain
  Pfam annotation: Domain name=Pkinase_Tyr; Domain location=491-793; Score=-69.2; E_value=3.2e-08; Accession=PF07714.7; Description =Protein tyrosine kinase
  Pfam module annotation: Pfam domain module=Pkinase::Pkinase_Tyr; Domain location=491-793::491-793
MNWEEKINHHGSGAKQSSADHAFMIGSYLDVPIGQEITSSGGRRTIGSSWLSVSQGIAEDTSDLVSGFATLADDSLEYPIGEYWDSDEYDDDDDVGYTRQPIEDETWFLAHEIDYPSDNEKATGHTRGNDRHDRPTKDEDDDQSFVEEDSYISGEQYFHGKNIAQIGTSEGPMVHGIPDNDMIAQYDGQLLDSEELNLMHSEPAWQGFVSQNSELGMLGNGKFLNDSERPHPDDLFVEDDQHGSVRSIGVGISSDAADIGSEVRESLIGGSSEGDIEYFNESSLSVSGKRHPHQDTEKKRVGAKGVKHDQIIYAADIQKGNLPPGAADVGFSFPPPLHSGKNHESDAKSLWSKKDEMYCINDPDDCQNGMVSDDMLATWRKKNSESSLRSSRDEMTSDVVRSRNSSASYDETEDTSNARHHKLDDAQEEDTGTNLDDEEAAALQEQVRQIKAQEEEFETFNLKIVHRKNRTGFEEDKNFHVVLNSVIAGRYHVSEYLGSAAFSKAIQAHDLHTGMDVCVKIIKNNKDFFDQSLDEIKLLKYVNKHDPADKYHLLRLYDYFYYREHLLIVCELLKANLYEFQKFNRESGGEVYFTMPRLQSIAIQCLEALQFLHGLGLIHCDLKPENILVKSYSRCEIKVIDLGSSCFETDHLCSYVQSRSYRAPEVILGLPYDKKIDVWSLGCILAELCTGNVLFQNDSPATLLARVMGIIGSIEQAMLAQGRDTYKYFTKNHMLYERNQESNRLEYLIPKKTSLRHRLPMADQGFIEFVAYLLEVNPKKRPSASEALKHPWLSFPYEPISS

SEQ ID NO: 43944 - protein, 811 aa, Zea mays
  Coding DNA Sequence Number=SeqID_2165
  Gene Ontology: Mol. function=RNA-directed DNA polymerase activity; Cellular component=nucleus; Biological process=RNA-dependent DNA replication
  Homolog annotation: Hit_ID=Q8S472; Match level="QueryCoverage=99%, HitCoverage=77%, E-value=0.0, Identity=83%"; Hit description =Putative gypsy-type retrotransposon RIRE2
  Pfam annotation: Domain name=Retrotrans_gag; Domain location=328-419; Score=77.7; E_value=3.7e-20; Accession=PF03732.7; Description =Retrotransposon gag protein
MRDFMTACDYCLSDCSDGSHSLDDEDCGPSRECFHVELGDPSEGNHLGMPEDGDFPRPVPRADISRELAVVPVLAGGHDPQLEQVRGAQARLDEGTGALETIHRDVGQVWAGQPPAGEIRHLPQGLQHRVANDVRLRPPPASSGVGQNLAAAAMLLRTMPEPSTTEGRRIQGELKNLLEGAAARRAESNASRRQGYPSEPHVTTSRFMREASVYTGRTRNTAPAAPGHLGNEHHRRDRRAHLDERVGRGYHPRRGGRYDSGEDRSPSPEPPGPQAFSRAIRRAPFSTRFRPPTTITKYSGETRPELWLADYRLACQLGGTDDDNLIIRNLPLFLSDTARAWLEHLPPRQISNWDDLVQAFAGNFQGTYVRPGNSWDLRSCRQQPGESLRDYIRRFSKQRTELPNITDSDVIGAFLAGTTCRDLVSKLGRKTPTRASELMDIATKFASGQEAVEAIFRKDKQPQGRPSEEAPEASTLRGAKKKGKKKSQSKRDAADADLVAAAEYKNPRKPPGGANLFDKMLKEPCPYHQGPVKHTLEECVMLRRHFHRAGPPAEGGRAHDDDKKEDHQAGEFPEVRDCFMIYGGHAANTSARHRKQERREVCSVKVAAPVYLDWSDKPITFDQADHPDHVPSPGKYPLVVDPIVGNVRLTKALRPSTGSSLGSASSPSVDSTSPSASERPPNFRRETLTFEVVGFRGTYHAVLGRPCYAKFMAVPNYTYLKLKMPGPNGVITVGPTYKHAFECDVECVEYAEALAESKALIADLENLSKEVPDVKRHASNFEPAETVKAVPLDPCGDTSKQIRIGSELDPK

SEQ ID NO: 43945 - protein, 275 aa, Zea mays
  Coding DNA Sequence Number=SeqID_2166
  Homolog annotation: Hit_ID=Q10QM2; Match level="QueryCoverage=89%, HitCoverage=88%, E-value=1e-62, Identity=53%"; Hit description =Expressed protein
  Pfam annotation: Domain name=Hin1; Domain location=118-251; Score =6.4; E_value=0.00044; Accession=PF07320.4; Description=Harpin -induced protein 1 (Hin1)
  Subcellular localization annotation: CTP_CleavageSite=34; ConfidenceScore=5.26e-01
MAERSLPPAVPASPEPASSSAVSTTFSSPLEPVSAPAAATPVHSTYVVQVQKDQIYRVPPPENAYFAERYRNERGGGGKKKKRGSSEWSAACSPCVLRTLGALLAAAALVGAAVLISLVVLRPGVPGFSVERIAVINSTRQQRVDYDLFLTAVNPNKMTALWYRSGRARLTHHGTTLAKGDVGQPADGGEDATDFSVLLQGQKHNGRTPRAVEKGFSGSKDHLALQLAVEVTVQVHVGAFGFGQRRLAVDCGITAAGLSKDVHIASQNCRSSFRN

SEQ ID NO: 43946 - protein, 81 aa, Zea mays
  Coding DNA Sequence Number=SeqID_2167
  Gene Ontology: Mol. function=GTP binding; Cellular component =membrane; Biological process=small GTPase mediated signal transduction
  Homolog annotation: Hit_ID=Q10QM5; Match level="QueryCoverage=81%, HitCoverage=31%, E-value=7e-28, Identity=88%"; Hit description=Ras -related protein Rab-6A, putative, expressed
  Pfam annotation: Domain name=Ras; Domain location=4-79; Score=-29.4; E_value=4.6e-07; Accession=PF00071.12; Description=Ras family
MLNNLQTKDRQSFLNTSKWIEEVNTQRGGDVLIFLVGNKTDLVDKRKVSTDEGEAKAQEHGAMFMETSAKAGFNVKVPTLY

SEQ ID NO: 43947 - protein, 122 aa, Zea mays
  Coding DNA Sequence Number=SeqID_2168
  Gene Ontology: Mol. function=RNA binding; Cellular component=cytosol
  Homolog annotation: Hit_ID=Q10QM3; Match level="QueryCoverage=98%, HitCoverage=15%, E-value=9e-36, Identity=63%"; Hit description =Pumilio-family RNA binding repeat containing protein, expressed
  Pfam annotation: Domain name=PUF; Domain location=12-45; Score=23.3; E_value=0.00087; Accession=PF00806.9; Description=Pumilio-family RNA binding repeat
  Pfam annotation: Domain name=PUF; Domain location=52-84; Score=8.5; E_ value=0.52; Accession=PF00806.9; Description=Pumilio-family RNA binding repeat
  Pfam module annotation: Pfam domain module=PUF::PUF; Domain location =12-45::52-84
KIPYANARLASLFEGKYIYLSKQKVSSNVVQRCIEFFPDDAKAVIVHEFLLLRGSHFEQLVTDPYANYVINTALNNTRVCNIIYLNHSGHLLNALVEAIRPHEDAIRTHPCCKRICRFLSRW

SEQ ID NO: 43948 - protein, 518 aa, Zea mays
  Coding DNA Sequence Number=SeqID_2169
  Gene Ontology: Mol. function=RNA binding; Cellular component=cytosol
  Homolog annotation: Hit_ID=Q10QM3; Match level="QueryCoverage=98%, HitCoverage=74%, E-value=7e-88, Identity=41%"; Hit description =Pumilio-family RNA binding repeat containing protein, expressed
  Pfam annotation: Domain name=PUF; Domain location=410-444; Score =20.3; E_value=0.0068; Accession=PF00806.9; Description=Pumilio -family RNA binding repeat
  Pfam annotation: Domain name=PUF; Domain location=453-484; Score =14.0; E_value=0.096; Accession=PF00806.9; Description=Pumilio-family RNA binding repeat
  Pfam annotation: Domain name=PUF; Domain location=486-518; Score=9.3; E_value=0.42; Accession=PF00806.9; Description=Pumilio-family RNA binding repeat
  Pfam module annotation: Pfam domain module=PUF::PUF::PUF; Domain location=410-444::453-484::486-518
MRTAKAAAEWTEDRELDLLLGEIPQVTSPQGRQRGVGVIGDGNGVHGASGCDGYASPMRLGGRRVHCPPGGDGYDAQRHAKDAYYDMVLNRRENGAPLRGGGGGGDAEGVGFPAPSPVPGPFIGSVVPPPLALGVDYPEQQLVVNQLQSLRIGDAQAALLRQGPAPVMSTTPIEVPAAHGAYHGYNFAASGSSIRHEHVFLDQAKADGYVAARPHRLVSDVGLDNFGVFPRTLDTSTGIGWGQGFVQPDFAQSYLLSSQAGNAYGGVPVADNGFVRGRNQFEAFHPDSSPTEAGAEFFSSNPAALDFRGGPKRHYAYGAIPVAEAYHCENSLMFGGKNMNFLERERKRSFRRVNNRAPELGNLRTLRFDDVVRVKEGSIYYHMAKDKNGCRYLQDKFLEGKHHVDAIFEGIINHIADLMISSAGNYLVQEMVEVCDEGQRLRIILALTQDPVKMIAISLNTHGTRVVQRLIEKVTSRELIILIISALQPGFMLLVNDPNGTHVIQKCLANFGAEDNKE

SEQ ID NO: 43949 - protein, 550 aa, Zea mays
  Coding DNA Sequence Number=SeqID_2170
  Homolog annotation: Hit_ID=Q6Z1K3; Match level="QueryCoverage=27%, HitCoverage=31%, E-value=2e-13, Identity=30%"; Hit description=Zinc knuckle domain containing protein-like
  Pfam annotation: Domain name=zf-CCHC; Domain location=174-191; Score =16.3; E_value=0.0021; Accession=PF00098.13; Description=Zinc knuckle
  Pfam annotation: Domain name=zf-CCHC; Domain location=193-210; Score =13.0; E_value=0.007; Accession=PF00098.13; Description=Zinc knuckle
  Pfam module annotation: Pfam domain module=zf-CCHC::zf-CCHC; Domain location=174-191::193-210
  Subcellular localization annotation: CTP_CleavageSite=30; ConfidenceScore=5.59e-01
MADASAPCPGASAPCPGAAPSTSEFQPACSASIPSPLPTSPSPAISPVPATTTLFPTSSASASWSSRRLSPQEGRSKAQRWRGDASAGGSSPSSRSFKAALLSSSVCAAGLSPLASHVSPSPSPSALAAPVFPAKVSSEVTLPAVEGGWQVVDRRQRNRGVHLPRRGSRVDLRGRCYNCLSTSHRAATCRRPTRCFRCLCFGHRVADCSSLPADSQKQPVWQRLGIVKRCLSGSQDSSQRALVRPRTPVRPPVWQRLSGMDKVHSLGGARKTSVWRRLASSHDRAAMEPVMDLEKQPSLQPKRKRRRSRRGKGAAVVGNSQSPPADLVPLTSNLPSCVLELSTDMAREEAALRRALFVTVTGTRPAVLGSEVLEEVGRRYCINIDDMSIHQSKPEDFLLFLPDEEVATRVLNEGKPFRGPLFSLVFKQWTRFAHASATSFSHLMDIEIRGIPAHAWGLNTAKTLLRGSCHILELHPASACKTDLSSLKLRAWCLDPKKLCREMDLHIIEREPFIQEARCLTYKISIAASPAPLQLPSDSSLSPSDENAFH

SEQ ID NO: 43950 - protein, 87 aa, Zea mays
  Coding DNA Sequence Number=SeqID_2171
MLASSFEVEILPPVSPSEAGPGSAKGGNVAEGEVHDGVARNRTPVSTCTGRLGQRLGDREHNGYTVVFPATRGLLVQLRGSVNITEL

SEQ ID NO: 43951 - protein, 56 aa, Zea mays
  Coding DNA Sequence Number=SeqID_2172
MASSLAPADRSQCQSRQDTSMGKCTKNEVMFMLGIARCISFRACLGNLGLQWIEVV

SEQ ID NO: 43952 - protein, 46 aa, Zea mays
  Coding DNA Sequence Number=SeqID_2173
MTSRGLTKIAMLKSRHHHASSDVQCGDAAAVRTTTTVTAPSEAAEV

SEQ ID NO: 43953 - protein, 80 aa, Zea mays
  Coding DNA Sequence Number=SeqID_2174
MERERGSRAVAAIRGRGVPNPRVASPSMETMDATMRTRIEGGGDDPGQRGTCRGRRLRADAAKGEEGADGVGLEVVQDDS

SEQ ID NO: 43954 - protein, 588 aa, Zea mays
  Coding DNA Sequence Number=SeqID_2175
  Homolog annotation: Hit_ID=Q94GE4; Match level="QueryCoverage=87%, HitCoverage=62%, E-value=0.0, Identity=69%"; Hit description =Putative dex1 protein
  Pfam annotation: Domain name=FG-GAP; Domain location=121-150; Score =21.3; E_value=0.0036; Accession=PF01839.13; Description=FG-GAP repeat
  Pfam annotation: Domain name=FG-GAP; Domain location=366-390; Score =17.2; E_value=0.042; Accession=PF01839.13; Description=FG-GAP repeat
  Pfam annotation: Domain name=FG-GAP; Domain location=447-476; Score =21.1; E_value=0.004; Accession=PF01839.13; Description=FG-GAP repeat
  Pfam annotation: Domain name=FG-GAP; Domain location=493-522; Score =25.2; E_value=0.00024; Accession=PF01839.13; Description=FG-GAP repeat
  Pfam annotation: Domain name=FG-GAP; Domain location=73-98; Score =20.7; E_value=0.0051; Accession=PF01839.13; Description=FG-GAP repeat
  Pfam module annotation: Pfam domain module=FG-GAP::FG-GAP::FG-GAP::FG- GAP::FG-GAP; Domain location=121-150::366-390::447-476::493-522::73-98
MRPLLALAAACALLVAAGAAAAEQAKNSTNKFRQREASDDMLAYPHLDEDALLKTKCPKHVELRWQTEVSSSIYATPLIADINSDGKLEVVVPSFVHYLEVLEGTDGDKLPGWPAFHQSNVHSSPLLYDIDKDGVREIALATYNGVVNFFRVSGYMMMDKLEVPRRKVRKDWYVGLNPDPVDRSHPDVNDSSIAKVATSNETPLIDQNKSGSMKGGEALKNSSEQHSAETKLNSTQVQENVQLPNNVNDTHSESISSVTTKAENTSQTHTQRRLLETADKSDDQTGSSETHESDSGAKAAATVENSEPLDEDADASFDLFRDPEDLPDEYNYDYDDYVDDRLWGDEDWKEQEHEKEEDYVSIDAHILSTPVIADIDKDGVQEMVIAVSYFFDHEYYRDSDHAKELEGIDMGKYVASSIVVFNLDTRQVKWAADLDLSTDAVNFRAHVFSSPTVVDLDGDGYLDILIGTAYGLFYVIDHRGKVRNKFPLEMAEIHAPVIAADINDDGKIEMVTTDSHGNVAAWTAEGEEIWEVHLKSLIPQASFMYFFCKMLIDGCLVSSLSICMARRYIPCDYLCTAIDACAEVAFLV

SEQ ID NO: 43955 - protein, 478 aa, Zea mays
  Coding DNA Sequence Number=SeqID_2176
  Gene Ontology: Mol. function=transferase activity, transferring hexosyl groups; Cellular component=cytoplasm; Biological process =metabolic process
  Homolog annotation: Hit_ID=Q8H3X8; Match level="QueryCoverage=97%, HitCoverage=96%, E-value=1e-136, Identity=56%"; Hit description =Putative UDP-glucosyltransferase
  Pfam annotation: Domain name=UDPGT; Domain location=13-477; Score =18.0; E_value=1.6e-11; Accession=PF00201.9; Description=UDP -glucoronosyl and UDP-glucosyl transferase
MAAGDAVHVGRRRHVLLFPLPYQGHINPMFRLAGLLHARGFAVTVFHTQLNAPDPARHPEYRFVPVPNGSPVPVAIEDVVAHILELGRACEAAFRDRLASVLEEYSRDTVACLVADAHLLPIFEAAARLSVPTLALRTGSAACCACFLAYPMLFQKGYLPVQGKAACMRVCSLLLCPVSTYHHTQSQRDMPVLELPPYRVRDLLVIGEDGGGLARELITRATAAVKTSSGLILNTFDALERRELEGLRRDLAVPVFDIGPLHKFSPAGDSSLLLPDRSCLEWLDAWPPESVLYVSFGSVACMSARDLVETAWGIAGSGVPFLWVVRPGMVSGPADHRQQQLPEGFGAATHGRGMVVTWAPQEDVLGHRAVGGFWTHAGWNSTVESICDGVPMLCSPYFGDQMGNTRYVEHAWRVGIEVGGNIERGSVEAAIFRLMTHEDGAQMRTRAGELKKAAAECTAEGGSSCLAVDKLFTHMMSL

SEQ ID NO: 43956 - protein, 146 aa, Zea mays
  Coding DNA Sequence Number=SeqID_2177
  Homolog annotation: Hit_ID=Q41852; Match level="QueryCoverage=32%, HitCoverage=59%, E-value=3e-14, Identity=75%"; Hit description=40S ribosomal protein S21
  Pfam annotation: Domain name=Ribosomal_S21e; Domain location=40-109; Score=55.9; E_value=1.4e-13; Accession=PF01249.9; Description =Ribosomal protein S21e
MARAPGGARRREGGSDRRDEGEAVQKGHWNTEDGAVLLEHNGKSKMVDLCVPKNCSATNRIITTKDHCSVQINIGHLDVNRIYDGHFTIVQHKCLSVKLYQMVGKVQIKCKAKTLRSLGAPDCPVAPNSVRCARLAYANWLLSGSN

SEQ ID NO: 43957 - protein, 453 aa, Zea mays
  Coding DNA Sequence Number=SeqID_2178
  Gene Ontology: Mol. function=cation transporter activity; Cellular component=membrane; Biological process=cation transport
  Homolog annotation: Hit_ID=Q6Z7K5; Match level="QueryCoverage=99%, HitCoverage=100%, E-value=1e-154, Identity=65%"; Hit description =Putative cation diffusion facilitator 8
  Pfam annotation: Domain name=Cation_efflux; Domain location=113-439; Score=162.8; E_value=9e-46; Accession=PF01545.11; Description=Cation efflux family
MEGDDRRAPLLAAGGGRPPSLRRRDSARSLRSSFLSRLPDKVRAGLDPEHLADVDLSRAKGMSRGVRQYYEKQLATLKTFEQVEARCMPGEFDSDVEASDSEDAEQKQSEFAMKISNYANIVLLVFKVYATIRTGSMAIAASTLDSLLDFMAGGILWFTHLSMKRVNIYKYPIGKLRVQPVGIIVFAAIMATLGVPSVKKRVTFAVCQTDAKRKVSVQMRCNVELSIEMNNMSSFAYVLGFQVLVQAVEQLVENKPGEKMTSEQLIWLYSIMLSATAVKLALWLYCKSSGNSIVRAYAKDHYFDVITNVVGLVAAVLGDKFLWWIDPAGAVILAVYTIVNWSKTVLENAATLVGQCAPPDMLQLLTYLAMKHDTRVRRVDTVRAYSFGALYFVEVDIELAEDMRLREAHAIGESLQERIEKLPQVERAFVHIDFESTHKPEHKVRSRLPSTDP

SEQ ID NO: 43958 - protein, 106 aa, Zea mays
  Coding DNA Sequence Number=SeqID_2179
MRLELTVVVLRSSKKLRLTFLVSSTGHIVVAGVASVADVKGSSPDEALVFATSCWGTVEGSTVRVVYMAPQLHSLPLGSRSGRCGRHWSRLLDHRVRVVRDGHEFG

SEQ ID NO: 43959 - protein, 119 aa, Zea mays
  Coding DNA Sequence Number=SeqID_2180
MEASEILHHKPRAGEPLFRLDAATALRSSAPPPWVLGRRNRVVEQAAVEERDARREKIEQGFGYAIARLLVRAPLVNSYLLPLCVTPFGFRDECLLGGLAVHRRVCRRSGQDSAVPTVR

SEQ ID NO: 43960 - protein, 165 aa, Zea mays
  Coding DNA Sequence Number=SeqID_2181
MLSRGVLGGLLIPRQTLGSLLPDGVPPAGKIQVTFGERFHPTHARTVQPPGVDHSARAQGTLLLLSRLWTFRATAESPTSEKFPIFGVRIGANTLFGNYVLETEIGFTRSTHMAGLKDNFNVSPSNIIKSTMDNLSVEEYQRLEDAGTKMQAELDELFLVDFKVD

SEQ ID NO: 43961 - protein, 245 aa, Zea mays
  Coding DNA Sequence Number=SeqID_2182
  Gene Ontology: Mol. function=metal ion binding
  Homolog annotation: Hit_ID=Q9LRB7; Match level="QueryCoverage=30%, HitCoverage=25%, E-value=1e-16, Identity=50%"; Hit description=E3 ubiquitin-protein ligase EL5
  Pfam annotation: Domain name=zf-C3HC4; Domain location=118-159; Score= 35.3; E_value=2.1e-07; Accession=PF00097.15; Description=Zinc finger, C3HC4 type (RING finger)
MSASPENVVAGGSGPPVAWWSAASPVGGDVVLCSVALLFVALALAFVLYHYSTATVSRRGGGAGVGAAPTSAQQHQQHGTLGRGRDATGGLDPSVLRALPVTVYEAKDDHRAGEALECAVCLAELADGEPARFLPRCAHGFHAECIDQWLRGHSTCPLCRVDVGLLPAPAPAPPSSALPPALPAPATYPTDLPTNVLFWGSQGAVTVARAALLIMVLTEYEQHNLERLRAAEAARTIRAAGDADE

SEQ ID NO: 43962 - protein, 112 aa, Zea mays
  Coding DNA Sequence Number=SeqID_2183
MTYTDSCGATLGDDGQENAGHNNKSRARHGIATGEPDGLGAARRVADVTEVGGVVAAARRVSRESAVGGGGGRSTSGRCGLYCGVAMSQSERTARSCGQGGTKRPWSGIGGV

SEQ ID NO: 43963 - protein, 105 aa, Zea mays
  Coding DNA Sequence Number=SeqID_2184
MGLYICLFFWCMEANLVQGYKNTSLALFYTFKINCHGLAALRTCPQTILSSSFLDFPAAEDEDGEAEDDELDADAEDKENIESKAGSSLPNKRKRNNEDDANGYK

SEQ ID NO: 43964 - protein, 279 aa, Zea mays
  Coding DNA Sequence Number=SeqID_2185
  Homolog annotation: Hit_ID=Q3E0G9; Match level="QueryCoverage=70%, HitCoverage=22%, E-value=1e-07, Identity=25%"; Hit description=Ig -like, group 1
EAPPRPTPGLGLNLDLGRRTPPRPTPGLGLYLDLRKTDSASPDPRARTQPRPRKTDSASPDPQGSDSTSTSDDGLRLARPLGLRLYLDLGRRTPPRPTPRARTLPRPRTTVSASPDPRARTLPRPRKTDSASPDPRARTQPRPRKTDSASPDPQGSDSTSTSDDGLRLARPPGLGLYLDLGRRTPPRPTPRARTLPRPRTTVSASPDPQGSDSTSTSDDGLRLARPPELGLYLDLGRQSLPRPTPGPGLSFDLEGASASPDLGLGPTTSHGGHHYPTPS

SEQ ID NO: 43965 - protein, 53 aa, Zea mays
  Coding DNA Sequence Number=SeqID_2186
MLIVRGSRLPRRSGKGFETALDESVKNCKALAEAVEQKEADRVAMSEAISAFC

SEQ ID NO: 43966 - protein, 181 aa, Zea mays
  Coding DNA Sequence Number=SeqID_2187
  Gene Ontology: Mol. function=RNA-directed DNA polymerase activity; Cellular component=integral to membrane; Biological process=RNA -dependent DNA replication
  Homolog annotation: Hit_ID=Q2QZN1; Match level="QueryCoverage=87%, HitCoverage=24%, E-value=2e-48, Identity=61%"; Hit description =Retrotransposon protein, putative, unclassified
MVMSKLHLLNSAYVILLAKKIEALEVKYFCPISLIHSFAKLVTKILANRLAARLPELVSPNQNAFVKGRSIHDNFLLVQQIAKAIYKQKLSGILLKLDIGKAFNSVSWPFLLEVLGHLGFGPIWCNIISKLLCSSSTRVLMNGMPGELISHQRGLRQGDALSPMLFIHSHGCVALSVLESQ

SEQ ID NO: 43967 - protein, 68 aa, Zea mays
  Coding DNA Sequence Number=SeqID_2188
MEGVQLRFKQRAAETQHGGRRGGWRQWRRGDDTREGGGALENGARATVRYVMRVPYWYSRSSRVKDPN

SEQ ID NO: 43968 - protein, 179 aa, Zea mays
  Coding DNA Sequence Number=SeqID_2189
MSLTHVDPHVRINDLAHHFKHCVALVKEMWSSDEAVRVRSRFLCLIHVVQRIVLRRIELCGEVELLSILQYVKRCLTFAGLAPALGGCFVEVGAGTATSEASCSDVFREGLGASSVRLMRVARRQGRHRRFSCLTVLSFLFFLGTGQIGTRRVWLWDLFGSGHGERHERSAAVAANSSD

SEQ ID NO: 43969 - protein, 61 aa, Zea mays
  Coding DNA Sequence Number=SeqID_2190
MATRVALPGTSQQPLASGKRLAEVYRAGLFVPWFITYIVLWSKVDIADVVSQQQQIYPAES

SEQ ID NO: 43970 - protein, 298 aa, Zea mays
  Coding DNA Sequence Number=SeqID_2191
  Gene Ontology: Mol. function=zinc ion binding
  Homolog annotation: Hit_ID=Q9FHE4; Match level="QueryCoverage=33%, HitCoverage=35%, E-value=1e-13, Identity=44%"; Hit description =Arabidopsis thaliana genomic DNA, chromosome 5, TAC clone:K17O22
  Pfam annotation: Domain name=zf-C3HC4; Domain location=251-285; Score= 8.9; E_value=0.019; Accession=PF00097.15; Description=Zinc finger, C3HC4 type (RING finger)
MAVEAHRLLLAGGHRQQQQQQQLASAGWPWAGADEDRCATTARPSQHHHHQQQQPQQELRLHNASCVGVLAPRVSTIAAGGQMFLGDAAESDVTFGGGGAAARQEVTAVAPAPKRRKRAEQQQTPPVFQTANMWAALTELRRRQARQVVAAVEAAAATRLRAREEEVQRTARINGTLEERARSLYVEAQLWRDLARANEATANELRAELQQALDDQRTRGAPGAGADADDAGSCCRGGEDGGTGTSLARTCAVCGLSAADVLLLPCRHLCACAPCAGAARACPACGCAKNGSVCVNFS

SEQ ID NO: 43971 - protein, 158 aa, Zea mays
  Coding DNA Sequence Number=SeqID_2192
MAAENMDMRVYVYVVGPRKAEDERARSWNVDNEKEVGMLIMKGKLECDSRLYGLLEMEMASEESGLGVLANAKKPTVPFHPIPSHTDTAPCRAECRCRRKKVPDGRVQSVRQDLDAATAACRWRQGQALQSYGWTTNASLFPWIYAAALPSHPPSASL

SEQ ID NO: 43972 - protein, 318 aa, Zea mays
  Coding DNA Sequence Number=SeqID_2193
  Gene Ontology: Mol. function=transcription regulator activity; Cellular component=nucleus; Biological process=regulation of transcription
  Homolog annotation: Hit_ID=Q10FD6; Match level="QueryCoverage=97%, HitCoverage=91%, E-value=3e-52, Identity=42%"; Hit description=Helix- loop-helix DNA-binding domain containing protein, expressed
  Pfam annotation: Domain name=HLH; Domain location=143-192; Score =54.1; E_value=4.8e-13; Accession=PF00010.16; Description=Helix-loop -helix DNA-binding domain
MEDSSLFMQWAMDTLQHENNPAPASAAAVHGGFSEATFPSLKALREASHAAEMVQELIADADVVRHAPNSWNSGDNTTANYNVPAGWGFGGATAASALPGSHGMMEAPPAMATRGRPPPGLVYRLPPTRRAGLKSLGSMAAAYAKDHIIAERKRREKINQRFIELSTVIPGLKKMDKATILLDATRYLKELQEKLKDLEQRKEAGGGSIETLVLVKKPCLHAAAARDDDGGSSLPASPPAGTPTEGKRLPEIEVQFSELEKTVAVRVHCENRKGVVVHVLAELEDLHLSNIHANVMPFTACTRIITITAKASFPCPAF

SEQ ID NO: 43973 - protein, 141 aa, Zea mays
  Coding DNA Sequence Number=SeqID_2194
  Gene Ontology: Mol. function=GTP binding; Cellular component =intracellular; Biological process=small GTPase mediated signal transduction
  Homolog annotation: Hit_ID=Q9ZPX1; Match level="QueryCoverage=98%, HitCoverage=67%, E-value=8e-55, Identity=76%"; Hit description =Probable ADP-ribosylation factor At2g18390
  Pfam annotation: Domain name=Arf; Domain location=5-133; Score=103.3; E_value=7e-28; Accession=PF00025.11; Description=ADP-ribosylation factor family
MTLQIWQPRFFYVTAGQKTIRSYWRNYFEQTDGLVWVVDSSDIRRLDDCRAELHNLLKEERLVGASLLVFANKQDIQGALKPDEIAKADSPSIFFQVLNLEVMDRSRHWKIVGCSAYTGEGLLEGFDWLVQDVASRIYVLD

SEQ ID NO: 43974 - protein, 568 aa, Zea mays
  Coding DNA Sequence Number=SeqID_2195
  Gene Ontology: Mol. function=translation elongation factor activity; Cellular component=intracellular; Biological process=translation
  Homolog annotation: Hit_ID=Q40581; Match level="QueryCoverage=78%, HitCoverage=73%, E-value=3e-94, Identity=74%"; Hit description=EF-1 -alpha-related GTP-binding protein
  Pfam annotation: Domain name=GTP_EFTU; Domain location=105-353; Score= 146.8; E_value=5.9e-41; Accession=PF00009.17; Description=Elongation factor Tu GTP binding domain
  Pfam annotation: Domain name=GTP_EFTU_D2; Domain location=372-439; Score=56.3; E_value=1e-13; Accession=PF03144.15; Description =Elongation factor Tu domain 2
  Pfam annotation: Domain name=GTP_EFTU_D3; Domain location=445-561; Score=102.5; E_value=1.3e-27; Accession=PF03143.7; Description =Elongation factor Tu C-terminal domain
  Pfam module annotation: Pfam domain module=GTP_EFTU::GTP_EFTU_D2::GTP_ EFTU_D3; Domain location=105-353::372-439::445-561
MAASREMGLDSSGGMGREDHMAHVVCGHVGAVEPAAARPGRARVRVSAPAGDGEEEHERGAETRGQIRAGRTVAAAARTMRARMEAALGAESRGRRTMVEGGVCCGVAESKTPRYMAYIMDTNEEERVKGKTVEVGRAHFETEHTRFTILDAPGHKSYVPNMISGASQADIGVLVISARKGEFETGYERGGQTREHVLLAKTLGVAKLVVVINKMDEPTVKWSKERYDEIEAKMVPFLKSSGYNVKKGCPWLARFNFFQPEPTQSKSPTHLLQETSDDFVNCFDSPRRKFSCAFEKKNERLEVLFTKLFQDVQFLPISGLVGTNMKTRMDKSICSWWDGPCLFEVLDRIEIPLRDPKGPVRMPIIDKYKDMGTVVMGKIEAGTIREGDSLLIMPNKSHVKVIGLNLDESKVRRAGPAENVRVKLSGVEEEDVMSGFVLSSVANPVGAVNEFIAQLQILELLDNAIFTAGYKAVLHIHSVVEECEIVELIEEIDMKKKKGDPKKKKPKRKPLFVKNGAIVVCRIQVNNLICIEKFSDFPQLGRFTLRTEGKTVAVGKVVDVPPAGSPTF

SEQ ID NO: 43975 - protein, 141 aa, Zea mays
  Coding DNA Sequence Number=SeqID_2196
MCKPMPPRQSAYPSGASQCEDRWEAHGDNHTRNEDVGTAGHNELRFFRRGLIPASDSHRHSANPRPGMQRTPSTTSNASPIRVSGGRTTVVTPCARYGSEERRRAITTMLSSLAQFRNLEHGPRHGAVTLDHKARFVRPWG

SEQ ID NO: 43976 - protein, 412 aa, Zea mays
  Coding DNA Sequence Number=SeqID_2197
  Homolog annotation: Hit_ID=Q10JZ5; Match level="QueryCoverage=34%, HitCoverage=90%, E-value=7e-24, Identity=44%"; Hit description=ZIM motif family protein, expressed
  Pfam annotation: Domain name=Zim; Domain location=77-112; Score=60.4; E_value=5.9e-15; Accession=PF06200.4; Description=ZIM motif
MVIPFETMFSGFEFSIPFSGLFSFPFSGEVEQQRTLATINLPSGAEGEEAKKRKESMELFPRSAGVKDDAAPREQEDKEKPKQLTIFYGGKALVFDDFSTDKAKDLMQLASKGSPVVQNAVLPQPSATAAVTTDKAVLDPVISLAAAKKPTHTDTSASVQRPYQTAPSDVAPVKETESQPWLGLGPNAVKSNLNLSCDSEIFANSFLLHHLQIVVPICAPTPGRAISLRTITRPPPPLAMAPSDLPPPHAVDDTAALTTADHEARLQASARRDAALAQALQAEQEAASAAQERNVAAERVRATLARAAHARALAAQVATNDIPNDDAQSHISETAGDANKGLHDVILLHEAAAIVNVHSQVVVVQNMRSLVHVVLDLATNYSCWRDEILLVVGKYSLDSHILDDAPAPTFPD

SEQ ID NO: 43977 - protein, 110 aa, Zea mays
  Coding DNA Sequence Number=SeqID_2198
MGAMNDGINEGVVGSSPGLLLSTAVRSLLASCGGGQLNGCRKGSGTELAGKTCGVEKTSGMTGTDAGRARMPPHHGRPYYSRGGAEGNDRLTTAAKGREGTAAGAMGMPP

SEQ ID NO: 43978 - protein, 120 aa, Zea mays
  Coding DNA Sequence Number=SeqID_2199
MKESYDTGAVGDMLVAAAPEVAEMKKGYQTSGTTYHLGESVRVDTLTSSTQKLKPLGEGLEPPASSAPFTGDCSCSKCSGVCHRRLLLLQSPFPLLPLVAPADLLPNRFYTFTELLLVYY

SEQ ID NO: 43979 - protein, 55 aa, Zea mays
  Coding DNA Sequence Number=SeqID_2200
MAEKADAADCSRLKWGRRLDVSEGIGRPLASPRQHLSLKWLLDYQAYRLIAQHGD

SEQ ID NO: 43980 - protein, 181 aa, Zea mays
  Coding DNA Sequence Number=SeqID_2201
  Homolog annotation: Hit_ID=Q1W2L0; Match level="QueryCoverage=78%, HitCoverage=68%, E-value=2e-20, Identity=41%"; Hit description =Putative CPF 0172 family protein
  Pfam annotation: Domain name=UPF0172; Domain location=4-180; Score =167.9; E_value=2.5e-47; Accession=PF03665.4; Description =Uncharacterised protein family (UPF0172)
MGAECRYEVAQAAYIKLALHALKHPATAVNGLLVGRLVEPSSSPAVVSVIDAVPLSHHPHHLPLLPTLELALTLVEDHFATQGEGLAVVGYYHANPRCDDTELPPVAKRVGDHIFRYFPRSAVLLVDNKKLEEAVKGKFSDAVIQTDGPQACPHFPSKPTLWLLTLGKPSKNRDLHGVMLI

SEQ ID NO: 43981 - protein, 138 aa, Zea mays
  Coding DNA Sequence Number=SeqID_2202
MDAIAYDGIGDGDAGMDSMRKSCMAAIDRDRSWTAVATDSSVSIGVGVVETGGEMVVDGPGTVEGDGGGGWLVNGGSLDIADTRLIGFLFLPGTSLKLYWCTAGGWRGTGREGRRDAVFTAWENRLAQVPASTGKTAR

SEQ ID NO: 43982 - protein, 232 aa, Zea mays
  Coding DNA Sequence Number=SeqID_2203
MAKAWSPSVRTREHPRTMPRNQTPVNRDHGDGGRSPRFQARRTRWLGSWCICRMEVCKVMPEGSLPRHLYTDVGVMSVQTRAASQERGPRRRLTQPSHMAEAVGSGPQQESRGTWSSAGASAGLRVIGVNWASSWKLAQVAETELYLVHCKLKFSTRVSGLELYVLDCCMACEQPKIRTEVKKISRKDIFPLSTSYFWDVMDKKGCCLESRLLGVSFSTEGPQDEETICDSS

SEQ ID NO: 43983 - protein, 135 aa, Zea mays
  Coding DNA Sequence Number=SeqID_2204
MNRKRGDEVVIELVTMMFWVTPEDERTMRNYSPKLSLELGDTRTSTSWLVDGRSYGTRYDQRGISSRLRLAPNRWIKHVTGFGFYTPDGQSPIARELRRFCLADSKFATKITASTRTIPGVRLAIDLMDDIDMKW

SEQ ID NO: 43984 - protein, 112 aa, Zea mays
  Coding DNA Sequence Number=SeqID_2205
MSELEALNLEKDERLVALEAEMKQLKENSEAETDKIRGVAAEAVINFKLEKCARSTALALLRVGYGYMKACLDPDFKLPVENVRRSTVEALEWGKILSDIWSKGGKEIALEE

SEQ ID NO: 43985 - protein, 145 aa, Zea mays
  Coding DNA Sequence Number=SeqID_2206
MPEPLGRASARAAPRPCRLACPRVGQSYALSTPDPQDLCACMSTIVVVVRPSWITPPTRVGFFVAQPSQPPQPHGAPRNREIGRARTGPAATTGSCTTNTPAGQLSRAQLATPSLDSPTRKGKAAVARSANAARAGSTSPQPLPR

SEQ ID NO: 43986 - protein, 101 aa, Zea mays
  Coding DNA Sequence Number=SeqID_2207
MAIQGYISHQVKVINNIHRMKGIVPQFLCILLIATTSSSSTALARKLAENQRGLQAGQVQAEPAINVDGRPSTGYGDHVCPRNMFPNCNRLDQASSNNNLG

SEQ ID NO: 43987 - protein, 135 aa, Zea mays
  Coding DNA Sequence Number=SeqID_2208
MGWPCAQAVGLTGDARSGLLTAVESNESARGSSGEVSDGVGARNRKMTHRVTRSTRGGGRPKSGEVVLASPVRKCLGSSLGKLLRRSRKLSRGKGEARGRREELATAAERSGGLAGGAELARAKDWAGAVRASAQ

SEQ ID NO: 43988 - protein, 155 aa, Zea mays
  Coding DNA Sequence Number=SeqID_2209
MMVLASVATTSFAILLLFSLPSCLCLHATPFSIEGMGAGASSPYSSDTSPDTDPRSGYCTPMRTFHNICAPSFSSLSDVLFVFSAFALFFLPNLLPPPTVAATSRPTLVDTGPGLRRHSNSLALRGLTPGAGTSQFRAALAGLLSLLACSLTICI

SEQ ID NO: 43989 - protein, 131 aa, Zea mays
  Coding DNA Sequence Number=SeqID_2210
MARRSGEEWARSRWWRSCPFGLALGWFEGGCRDLRCAGGRTVRLGHGGVCRFAACGYLHGESKMVGQRLASGKGKRGDADHELADPRRDAVNKWQYCQNNFGRTILASSAWIRILVSAEDMFLGIYSTNLV

SEQ ID NO: 43990 - protein, 72 aa, Zea mays
  Coding DNA Sequence Number=SeqID_2211
  Subcellular localization annotation: CTP_CleavageSite=46; ConfidenceScore=5.05e-01
MADDHENPTPKPKLLCVGYITKRMTRRSSLRDLHRRSSPQSHRRRRRAEVWKTPNFDEKSDLPRDPNPVSNV

SEQ ID NO: 43991 - protein, 73 aa, Zea mays
  Coding DNA Sequence Number=SeqID_2212
  Gene Ontology: Mol. function=monooxygenase activity; Cellular component=membrane; Biological process=electron transport
  Homolog annotation: Hit_ID=Q09J79; Match level="QueryCoverage=91%, HitCoverage=14%, E-value=1e-34, Identity=97%"; Hit description=(+) -abscisic acid 8'-hydroxylase
MRVASILSFTFREAVEDVEYQGYLIPKGWKVLPLFRNSHHNPDHFPCPDKFDPSRFEVAPKPNTFMPFMPKCF

SEQ ID NO: 43992 - protein, 112 aa, Zea mays
  Coding DNA Sequence Number=SeqID_2213
MAGWLYKNKGAKMQIRAHEGVRGNIGRWIRYGRARLDSLPSEPARGRSWRRNHPARMARGHPPSSVRPLGGDADKADPRDSETTSMRGITAGLTQGSRPSAIEYGRVMVKHG

SEQ ID NO: 43993 - protein, 138 aa, Zea mays
  Coding DNA Sequence Number=SeqID_2214
  Subcellular localization annotation: CTP_CleavageSite=61; ConfidenceScore=5.40e-01
MASSSCPDDVEVKLGPRSSAKPAVRGRPSARHARWRVAVSGRGQSLRDSGGVAARGREGVRGSRRRDSAASGIAASGSVSDGASRCDDGKERQFVKARSCGHMERGVVACGDAPVATPMPPRWRLAWDLSHRARRLDE

SEQ ID NO: 43994 - protein, 124 aa, Zea mays
  Coding DNA Sequence Number=SeqID_2215
  Gene Ontology: Mol. function=hydrolase activity; Biological process =metabolic process
  Homolog annotation: Hit_ID=Q0ZPW5; Match level="QueryCoverage=71%, HitCoverage=30%, E-value=3e-14, Identity=40%"; Hit description=CXE carboxylesterase
MAWAGAAAATSALLNPHAAIDPDSELEFDMPDVLRVYKIDYVKRFDGTETVPSPPNGNSTNGAASKDFATGMSSRLYLPVGVDPRKQLPIIVFFHDGAFMVHSASFPVYHIYAASVDVAVPASH

SEQ ID NO: 43995 - protein, 181 aa, Zea mays
  Coding DNA Sequence Number=SeqID_2216
MAVMDSTLEKMYLCQWKSKTDKKTKRKTYLGHDPHFWPILTSLTALAQLAAPFTGCGSRCPAVWEGTPTCGTHLQASSSTKLLIPTDGAALNSEQYDPRCVSILATARSNGASSWCLGLGHGGVGLQGIAHRKFLEAARKVSPWVALTATSVTGRIYSIMLDRAARTSRYPFGRDFLLKRP

SEQ ID NO: 43996 - protein, 152 aa, Zea mays
  Coding DNA Sequence Number=SeqID_2217
MGKSKKGGSSSHHSGDKRKREPSPPSEDFGDSEYSEEEFSSESKGSPVYASPPVSFDDSDDSQGIAAEVWTYIRVVERSGLEGSDELEISSDEEDSSAHPRRGEVATAMTRATATVARATATTATAAAARATATAAAARAAAAAVGPVAKRH

SEQ ID NO: 43997 - protein, 100 aa, Zea mays
  Coding DNA Sequence Number=SeqID_2218
MVLGGGMEVVVVVGDNTVVMLLGAAECDDITVTVNCPNQNDLAATSATPSRVRSPHHSRQYVLFPLASSDGTQINSIESPLSRSISARKRFVCPAFPSRL

SEQ ID NO: 43998 - protein, 86 aa, Zea mays
  Coding DNA Sequence Number=SeqID_2219
MSGAPGPYRVQLVTLGFLQAHSAIIHQTVWVEDALRDSDWVLAMQEELNNFTRNEAYALEISLLFSGVQDSLGAPEVHPMGVAPEL

SEQ ID NO: 43999 - protein, 708 aa, Zea mays
  Coding DNA Sequence Number=SeqID_2220
  Gene Ontology: Mol. function=protein binding; Cellular component =small nucleolar ribonucleoprotein complex; Biological process =establishment and/or maintenance of chromatin architecture
  Homolog annotation: Hit_ID=Q0KIN0; Match level="QueryCoverage=43%, HitCoverage=17%, E-value=9e-46, Identity=36%"; Hit description =Integrase core domain containing protein
  Pfam annotation: Domain name=Sas10_Utp3; Domain location=208-691; Score=-51.4; E_value=6.7e-07; Accession=PF04000.5; Description =Sas10Utp3 family
MGKRPRTTLRRTPARGLPKSKRADELPSMPDSDNDEIDAFHKQRDMIPFDANDVRESEDDDVEQPVFDLKLAIGALLDRLGPVLANKLWPGLGSWPTREAARTREKRRQGNLALEWVNWKKKEHVHSTSEGRSVEQRVGVDGQINIWWRCYKRSKVPLLLALLSAASTRESARCGGAVEPWGVSDSSSCAPSCGNWWMEHAFAGVSDSESDDSKGELSGDMAEADYEGWDKGYISKLKRAQRAVKQIAGGDDSMDEQEDETQENVWGRGKNAYYAPGEQSGDDEVDYEEAQRIQKNKEKRLSMKDFGLEDGESDEEGNATKVSNHESKMKEDFAVLSGDEKMDVLYSLLSELKDAHEELRAIGQLTSEVTSCLGKDKMQPFEVKKACLLAHCQAITFYLLMKSEGLSVQDHPVISRLIETKNMVEKGAEVSESRKSEPCNNDYHEVNEQKNKDERMGLHSLEMLKVRANLEERLKKKGLYNLTRSKPEKSSKTRTTSDKSGLQTLDDFDDEVLKNNQMMKPSKLVAAAAKSNKSMFVSGDDDLPKRDNIGERRRKHELRVLSRVGANSAEDHELPDGDASEEEDHHELPEGGDESEDDIHRDVKRKRTEKLSTKNALYSPTPGVEHLEEETEGDGKRTISYQILKNRGLTRSRNKKKKNPRKNYRDKHKNKLVKRKGQVRDIKKQSGPYGGETSGINPNVSRSVRFKS

SEQ ID NO: 44000 - protein, 259 aa, Zea mays
  Coding DNA Sequence Number=SeqID_2221
  Homolog annotation: Hit_ID=Q5JLE4; Match level="QueryCoverage=20%, HitCoverage=47%, E-value=2e-07, Identity=53%"; Hit description =Putative transcription factor IIA small subunit
  Pfam annotation: Domain name=TFIIA_gamma_C; Domain location=66-104; Score=20.8; E_value=5.2e-05; Accession=PF02751.5; Description =Transcription initiation factor IIA, gamma subunit, beta-barrel domain
MPRGGCGKSLTSSGPPWRRHPDPTIESLDVAAYSYIAAGKKPVAGRQQTSARQRQYEACHLARKEGHLHTNRVCDNVWTFILIDATFKSAEIQETLSKVNRWVSMPWWPPATSFQYLSLCSQSASSTYCGTVANQSQGCAPLDCVVSLSLAPKRSKLPAPGDADELYVIEDQIAWIVHIIASIVKKSPHRGRGAALAVSLTLIKASTSRGLGHLPLIRVIVEPVMIHWYGCKLREKDMETVMQHVHTKMATMVTFALVL

SEQ ID NO: 44001 - protein, 59 aa, Zea mays
  Coding DNA Sequence Number=SeqID_2222
MALDKDTTFVECLGNDTRQSKVLRGLGDSMITIRQFIYSDLRLVAKSTFSDLRLVAKDL

SEQ ID NO: 44002 - protein, 48 aa, Zea mays
  Coding DNA Sequence Number=SeqID_2223
MPKYIGDELVALGKSPRTLRLKFIGLSGGSLDCPRKVTGVEMHSARFV

SEQ ID NO: 44003 - protein, 718 aa, Zea mays
  Coding DNA Sequence Number=SeqID_2224
  Gene Ontology: Mol. function=structural constituent of ribosome; Cellular component=intracellular; Biological process=translation
  Homolog annotation: Hit_ID=Q2R0M9; Match level="QueryCoverage=94%, HitCoverage=95%, E-value=8e-53, Identity=26%"; Hit description =Expressed protein
  Pfam annotation: Domain name=DUF594; Domain location=632-691; Score =97.1; E_value=5.2e-26; Accession=PF04578.4; Description=Protein of unknown function, DUF594
MGDSTSTGFAAALELWQEHQLSILVVASLAIQWFLFVFAPLRQHRIPGLLRLSIWLAYLGSDAVAIYALATLFNSHRCDTDTGRPGVELLWAPILLVHLGGQDSITAYNIEDNELWRRHVVTAVSQVAAAIYVFVKAWPKSLVTTAHQAVNQATLDKVNAIQAHNEEMEAYGRIFTPALLLFFCGITKCVFKPWDLKRVSVNSLVDSSSGSEEKGGESEMNSLQGYVGAATRYFESRGHGRGAGLQEDDGDDDTCKAGEVWKPYNLCVDLAPPYSGRLSCLKHLARSPADEAHRLVKSSLSATFHQLYTKESLKLHDISHFVFTNNAALNRWKVLTSARGLRTVAAATLLGAIAVFHYGGGAADQVKADVTVTYALLWSAFVMEYVLPTVIHHTFGRVQRLFTGHRTWPDQVAQYNLMGYVARRRKHSWLMEVVGWLGCRDLVDQLWTMDPCKGASSREITGLVHGHVAGGWMEGHIAGADSFRAFNDYRGQWTLNNSSVPSMVLMSVSRPFDESVLVWHLATDFCFHLLQEDPSPSSATARRCREMSNYMAYLLFVKPEMLMPGARRSLFRDTCGELVGLLGEDRPGAPRARGKRGLAHKVVQLLKRDDGGGVLGSAGVGVVRRAWCVAEDLMDSHRGSEEKMWAVIQGVWVEMLCFSASRCKGYLHAKGLGTGGEYLSYVWLLLLYMGMETLAEKMQRTELYEGPTAAASSISGHN

SEQ ID NO: 44004 - protein, 66 aa, Zea mays
  Coding DNA Sequence Number=SeqID_2225
MEAYGRIFTPALLLFFCGITKCVFKPWDLKRVSVNSLVDSSSGSEEKGGESEMNSLQGYGEQGRIR

SEQ ID NO: 44005 - protein, 124 aa, Zea mays
  Coding DNA Sequence Number=SeqID_2226
MASGTLAFELSNALEDIYHTATAVLCENSRNKAALMSGGSRLPISASGPRRFASFPVEVSLSWTDQLRRTNGEKHGLPIRFNSVADFLVVLYVSRSLNLGENLSNVNADLTKHEQPKRSKRLNT

SEQ ID NO: 44006 - protein, 894 aa, Zea mays
  Coding DNA Sequence Number=SeqID_2227
  Gene Ontology: Mol. function=protein serine/threonine kinase activity; Cellular component=integral to membrane; Biological process=protein amino acid phosphorylation
  Homolog annotation: Hit_ID=Q5KQI5; Match level="QueryCoverage=99%, HitCoverage=100%, E-value=0.0, Identity=58%"; Hit description=Unkown protein
  Pfam annotation: Domain name=LRRNT_2; Domain location=30-70; Score =45.1; E_value=2.4e-10; Accession=PF08263.3; Description=Leucine rich repeat N-terminal domain
  Pfam annotation: Domain name=LRR_1; Domain location=103-125; Score =11.1; E_value=2.4; Accession=PF00560.23; Description=Leucine Rich Repeat
  Pfam annotation: Domain name=LRR_1; Domain location=127-149; Score =11.8; E_value=1.8; Accession=PF00560.23; Description=Leucine Rich Repeat
  Pfam annotation: Domain name=LRR_1; Domain location=151-173; Score =15.5; E_value=0.19; Accession=PF00560.23; Description=Leucine Rich Repeat
  Pfam annotation: Domain name=LRR_1; Domain location=175-197; Score =15.2; E_value=0.23; Accession=PF00560.23; Description=Leucine Rich Repeat
  Pfam annotation: Domain name=LRR_1; Domain location=199-221; Score =8.4; E_value=7.5; Accession=PF00560.23; Description=Leucine Rich Repeat
  Pfam annotation: Domain name=LRR_1; Domain location=223-246; Score =9.3; E_value=5.3; Accession=PF00560.23; Description=Leucine Rich Repeat
  Pfam annotation: Domain name=LRR_1; Domain location=248-269; Score =8.3; E_value=7.9; Accession=PF00560.23; Description=Leucine Rich Repeat
  Pfam annotation: Domain name=LRR_1; Domain location=271-291; Score =4.0; E_value=52; Accession=PF00560.23; Description=Leucine Rich Repeat
  Pfam annotation: Domain name=LRR_1; Domain location=294-316; Score =17.6; E_value=0.045; Accession=PF00560.23; Description=Leucine Rich Repeat
  Pfam annotation: Domain name=LRR_1; Domain location=318-341; Score =10.3; E_value=3.4; Accession=PF00560.23; Description=Leucine Rich Repeat
  Pfam annotation: Domain name=LRR_1; Domain location=347-368; Score =6.1; E_value=20; Accession=PF00560.23; Description=Leucine Rich Repeat
  Pfam annotation: Domain name=LRR_1; Domain location=79-101; Score =3.6; E_value=60; Accession=PF00560.23; Description=Leucine Rich Repeat
  Pfam annotation: Domain name=Pkinase; Domain location=552-832; Score =137.6; E_value=3.5e-38; Accession=PF00069.15; Description=Protein kinase domain
  Pfam annotation: Domain name=Pkinase_Tyr; Domain location=552-832; Score=109.9; E_value=7.6e-30; Accession=PF07714.7; Description =Protein tyrosine kinase
  Pfam module annotation: Pfam domain module=LRRNT_2::LRR_1::LRR_1::LRR_ 1::LRR_1::LRR_1::LRR_1::LRR_1::LRR_1::LRR_1::LRR_1::LRR_1::LRR _1::Pkinase::Pkinase_Tyr; Domain location=30-70::103-125::127
  Pfam module annotation: Domain location=199-221::223-246::248 -269::271-291::294-316::318-341::347-368::79-101::552-832::552-83
MTNLVGVLYAVILLVLCAGYVDVARGQTTDPTEVNALKAIKASLVDPSNKLKNWGSGDPCTSNWTGIFCDKIPSDSYLHVTEIQLFKMNLSGTLAPEIGLLPQLKTLDFMWNNLTGNIPKEVGNITTLKLITLNGNLLSGSLPDEIGYLMNLNRLQIDENNISGPIPKSFANLTSIKHLHMNNNSLSGQIPSELSSLPALLHLLVDNNNLSGPLPPELADTRSLEILQADNNNFSGSSIPAEYSNIRTLLKLSLRNCSLQGAVPDLSVVPKFGYLDLSWNQLKGSIPTNRLASNITTIDLSHNFLQGTVPSNFSGLPNIQYLSVNGNLLNGSVPPTIWSNITFTGNRALVLDFQNNSLDTIPPVFEPPQNVTVLLYGNPVCTASNAARAANLCQPTSVTDAPSGEGKQLYIERYIWEAGPRLNTHLKLFPNNTNLFDMAEVVRLREVLAGWQITLLDVFGPYELLNFTLGFYADEFRTAASPGLKGGALAGILVGTIVAAIAVSVFSTVFIMKRRRKQRTISRRSLLSRFSVKVDGVKCFTFDEMAVATRDFDISAQVGQGGYGKVYRGNLADGTTVAIKRAHEDSLQGSKEFCTEIELLSRLHHRNLVSLVGYCDEEDEQYVPLIENCVLQMLVYEFMPNGTLRDHLSAKTERPLSFGQRVHIALGAAKGLLYLHTEANPPIFHRDVKASNILLDSKFVAKVADFGLSRLAPVPDIEGTLPAHISTVVKGTPGYLDPEYFLTHKLTERSDVYSLGVVFLELLTGMKPIQHGKNIVREVNIAYQSGDVSGIIDSRMSSYPPECVKRFLSLAIRCCRDDTEERPYMADIVRELETIRSMLPEGEDVLSSTSGSGLLAKSMSSSSTTTTGALYVSSHISGSGQADSGIPSGMVAPR

SEQ ID NO: 44007 - protein, 76 aa, Zea mays
  Coding DNA Sequence Number=SeqID_2228
MGASVHSPPHRLLTGLSYYAYGTFPIEFQQQAQARSDQSASRTSGRGEALESRAGEQTADARAGSFPSPSAPVAGT

SEQ ID NO: 44008 - protein, 229 aa, Zea mays
  Coding DNA Sequence Number=SeqID_2229
  Gene Ontology: Mol. function=sequence-specific DNA binding; Cellular component=nucleus; Biological process=regulation of transcription, DNA-dependent
  Homolog annotation: Hit_ID=Q9ZRZ4; Match level="QueryCoverage=47%, HitCoverage=43%, E-value=2e-22, Identity=52%"; Hit description=HB2 homeodomain protein
  Pfam annotation: Domain name=Homeobox; Domain location=1-53; Score =46.6; E_value=8.5e-11; Accession=PF00046.19; Description=Homeobox domain
MQLQILENIFDQGNGTPSKQRIKEITAELSHHGQISETNVYNWFQNRRARSKRKQAASLPNNAESEAEVDEESLTDKKPKSDRSLQDNKAMGAHNADRISGMHHLDTDHDQIGGMMYGCNDNGLRSSGSSGQMSFYGNIMPNPRIDHFPGKVESSRSFSHLQHGEGFDIRGREAASACFGDCRLTSPIPWRHRPPGPGSSSSPVGSRHPNLGSDRAPISSTKLASPSGA

SEQ ID NO: 44009 - protein, 165 aa, Zea mays
  Coding DNA Sequence Number=SeqID_2230
  Gene Ontology: Mol. function=hydrogen ion transporting ATP synthase activity, rotational mechanism; Cellular component=proton -transporting ATP synthase complex, catalytic core F(1); Biological process=ATP synthesis coupled proton
  Homolog annotation: Hit_ID=P26360; Match level="QueryCoverage=86%, HitCoverage=44%, E-value=8e-63, Identity=82%"; Hit description=ATP synthase gamma chain, mitochondrial precursor
  Pfam annotation: Domain name=ATP-synt; Domain location=9-165; Score =18.4; E_value=2.2e-13; Accession=PF00231.9; Description=ATP synthase
  Subcellular localization annotation: CTP_CleavageSite=35; ConfidenceScore=5.31e-01
MAPIGARSISTQVVRNRMKSIKNIQKITKAMKMVAASKLRAVQTRTENSRGLWQPFTALLGDTPSVDVKKNVIVAITSDKGLCGGINSTSVKVSRALHKLTSGPEKESKYVILGEKGKVQLLRDSKNSIEMTASELQKNPINYTQAQMKLSAVTIMTTNDQTTYG

SEQ ID NO: 44010 - protein, 137 aa, Zea mays
  Coding DNA Sequence Number=SeqID_2231
  Gene Ontology: Mol. function=protein serine/threonine phosphatase activity; Cellular component=protein serine/threonine phosphatase complex; Biological process=protein amino acid dephosphorylation
  Homolog annotation: Hit_ID=Q9SM39; Match level="QueryCoverage=49%, HitCoverage=25%, E-value=2e-23, Identity=77%"; Hit description =Putative serine/threonine phosphatase type 2c
MEHSPQRKCSIALAEFAKERRRDTTSWAYQILNSLLLILLGGPMVRGEHLCLPCSAEHHMIVSNIGDDQSTLSEKGYDAARAPALAPLEELLVRLEEKIFVRKYLDLSAIYSIPGPLVNNFFVAFLKRRDKRRQVDH

SEQ ID NO: 44011 - protein, 40 aa, Zea mays
  Coding DNA Sequence Number=SeqID_2232
MGETSSKHRYNARLRSILMPRPQDRVCSATTVTNPVALSS

SEQ ID NO: 44012 - protein, 73 aa, Zea mays
  Coding DNA Sequence Number=SeqID_2233
  Subcellular localization annotation: CTP_CleavageSite=18; ConfidenceScore=5.21e-01
MKPWKETSRSSKTTTSSRCGLAATPSRLPVKAAVIYVSFPHFDLLAISSLSEVINFLQFVIKVMIVVNLKVKM

SEQ ID NO: 44013 - protein, 178 aa, Zea mays
  Coding DNA Sequence Number=SeqID_2234
MDDPDLDRLFALRGCRRKVLIGVAAVMLVLVHVGFAFSLTGKKSLVSTVIGDTCVAIDEWVAQPQGQSHTALDDILLWADAAVTVEALWWSKVNYQLVTKLNQLLIGAGCGRRRGRVGVGVRRPSVGASQGAAGGSGELGRGAAGEVRRPGGRAGVAGGPQGGRVREGAERLNDGMER

SEQ ID NO: 44014 - protein, 273 aa, Zea mays
  Coding DNA Sequence Number=SeqID_2235
MDDARVVTGAARTTRVQLCYSPFALPPRINVPAPRSRIEALDLNSQSQGTDFPYLSSYQDVLQSGDGGSDLGLPPLGRCRSARTLFQSTRSILAPISHARGAIPGCCGVRGRGTSSRGGGQSAISAPIDPVLIEDFGDEPTNEMDSRALVKRKECRKFQHAIPTYMEQLAEMFHGIIVDGSSSCIPGDLSRNAYTDVFNQLKTIQENISLQAIDQFNPCLDLAVETGADKDLDQYFVATKLFKDEYNRAIFNRFDTAAQRMKWLQRFCKEYFG

SEQ ID NO: 44015 - protein, 194 aa, Zea mays
  Coding DNA Sequence Number=SeqID_2236
MVAFVSEVEVEAVKIVGKLSSKTELSKSLEICDSNTRLNRVFKLNELEYGLYPKDAEDEEDSSANVKGKVAVTEDDDGKAASEDFVSLNVVMSRFGEELADVASEVTSPLSLVSMHVRAATIIGAKYIPNAAALLEKDRKTKSRKRKDVIRIMDPQKSKAQAMKEVVVKSSPATAVKIEMPRVEVQQPLQNVSR

SEQ ID NO: 44016 - protein, 162 aa, Zea mays
  Coding DNA Sequence Number=SeqID_2237
  Gene Ontology: Mol. function=electron carrier activity; Cellular component=mitochondrial respiratory chain; Biological process =electron transport
  Homolog annotation: Hit_ID=P00055; Match level="QueryCoverage=50%, HitCoverage=73%, E-value=7e-35, Identity=79%"; Hit description =Cytochrome c
  Pfam annotation: Domain name=Cytochrom_C; Domain location=58-153; Score=52.1; E_value=1.9e-12; Accession=PF00034.11; Description =Cytochrome c
MHLFLATFLRDPGRFLFLDPIWSEKLRASRAGVLLRATHQGAGHGDPSAPVDVQRLLAVAVRRSGVLCHTVERGGAHRQGPNLHDLFGRQSGTTLGYAYSTTNKNMVVVWEEGTLYDYLFNPKKYIPGTKMVFPGLKKPKERTDLIAYLTYRRNRGYSHCHP

SEQ ID NO: 44017 - protein, 816 aa, Zea mays
  Coding DNA Sequence Number=SeqID_2238
  Gene Ontology: Mol. function=calcium ion binding; Cellular component =mitochondrion; Biological process=protein amino acid phosphorylation
  Homolog annotation: Hit_ID=Q76C99; Match level="QueryCoverage=94%, HitCoverage=96%, E-value=0.0, Identity=46%"; Hit description=Rf1 protein, mitochondrial precursor
  Pfam annotation: Domain name=PPR; Domain location=114-148; Score =23.3; E_value=0.00086; Accession=PF01535.11; Description=PPR repeat
  Pfam annotation: Domain name=PPR; Domain location=185-219; Score =23.6; E_value=0.00068; Accession=PF01535.11; Description=PPR repeat
  Pfam annotation: Domain name=PPR; Domain location=222-256; Score =53.2; E_value=8.5e-13; Accession=PF01535.11; Description=PPR repeat
  Pfam annotation: Domain name=PPR; Domain location=257-291; Score =42.7; E_value=1.3e-09; Accession=PF01535.11; Description=PPR repeat
  Pfam annotation: Domain name=PPR; Domain location=292-326; Score =47.2; E_value=5.6e-11; Accession=PF01535.11; Description=PPR repeat
  Pfam annotation: Domain name=PPR; Domain location=327-361; Score =34.7; E_value=3.2e-07; Accession=PF01535.11; Description=PPR repeat
  Pfam annotation: Domain name=PPR; Domain location=362-396; Score =35.4; E_value=2e-07; Accession=PF01535.11; Description=PPR repeat
  Pfam annotation: Domain name=PPR; Domain location=397-431; Score =47.6; E_value=4.1e-11; Accession=PF01535.11; Description=PPR repeat
  Pfam annotation: Domain name=PPR; Domain location=432-466; Score =44.5; E_value=3.5e-10; Accession=PF01535.11; Description=PPR repeat
  Pfam annotation: Domain name=PPR; Domain location=467-501; Score =29.5; E_value=1.2e-05; Accession=PF01535.11; Description=PPR repeat
  Pfam annotation: Domain name=PPR; Domain location=502-536; Score =20.9; E_value=0.0044; Accession=PF01535.11; Description=PPR repeat
  Pfam annotation: Domain name=PPR; Domain location=537-571; Score =52.1; E_value=1.9e-12; Accession=PF01535.11; Description=PPR repeat
  Pfam annotation: Domain name=PPR; Domain location=572-606; Score =48.6; E_value=2.1e-11; Accession=PF01535.11; Description=PPR repeat
  Pfam annotation: Domain name=PPR; Domain location=607-641; Score =23.2; E_value=0.00094; Accession=PF01535.11; Description=PPR repeat
  Pfam annotation: Domain name=PPR; Domain location=642-676; Score =32.4; E_value=1.6e-06; Accession=PF01535.11; Description=PPR repeat
  Pfam annotation: Domain name=PPR; Domain location=677-711; Score =29.0; E_value=1.7e-05; Accession=PF01535.11; Description=PPR repeat
  Pfam annotation: Domain name=PPR; Domain location=712-746; Score =46.1; E_value=1.2e-10; Accession=PF01535.11; Description=PPR repeat
  Pfam module annotation: Pfam domain module=PPR::PPR::PPR::PPR::PPR::PP R::PPR::PPR::PPR::PPR::PPR::PPR::PPR::PPR::PPR::PPR::PPR; Domain location=114-148::185-219::222-256::257-291::292-326::327-361::36
  Pfam module annotation: Domain location=432-466::467-501::502 -536::537-571::572-606::607-641::642-676::677-711::712-746
  Subcellular localization annotation: CTP_CleavageSite=33; ConfidenceScore=5.51e-01
MPSCARISSAVSTAAASSSSPPPHPPRCSRRILAAATARVREGTLRPEEAHDLLDELQRRGTPVLDRDLNGFLAALARAPSSAACGSGPALAVALFNRAASRAQGPRVLSPTSYTYAILMDCCTRAHRPELALAFFGQLLRTGLRVDAIIASHLLKGFCEAKRTDEALDILLHRTPELGCVPDVFSYNILLKSLCNQGKSGQADDLLRMMAEGGTVCSPDVVAYNTVIDGFFKEGDVNKACDLFKEMVQRGIPPDLVTYSSVVHALCKARAMDKAEAFLRQMVNKGVLPDNWTYNNLIYGYSSTGQWKEAVRVFKEMRRQSILPDVVALNTLMGSLCKYGKIKEARDVFDTMAMKGQNPDVFSYTIMLNGYATKGCLVDMTDLFDLMLGDGIAPDIYTFNVLIKAYANCGMLDKAMIIFNEMRDHGVKPHVVTYMTVIAALCRIGKMDDAMEKFNQMIDQGVVPDKYAYHCLIQGFCTHGSLLKAKELISEIMNNGMRLDIVFFGSIINNLCKLGRVMDAQNIFDLTVNVGLHPDAVVYNMLMDGYCLVGKMEKALRVFDAMVSAGIEPNVVGYGTLVNGYCKIGRIDEGLSLFREMLQKGIKPSTILYNIIIDGLFEAGRTVPAKVKFHEMTESGIAMNKCTYSIVLRGLFKNRCFDEAIFLFKELRAMNVKIDIITLNTMIAGMFQTRRVEEAKDLFASISRSGLVPCAVTYSIMITNLLKEGLVEEAEDMFSSMQNAGCEPDSRLLNHVVRELLKKNEIVRAGAYLSKIDERNFSLEHLTAMLLVDLFSSKGTCREQIRFLPAKYHFLAEASP

SEQ ID NO: 44018 - protein, 79 aa, Zea mays
  Coding DNA Sequence Number=SeqID_2239
  Subcellular localization annotation: CTP_CleavageSite=58; ConfidenceScore=5.15e-01
MGQDHSPVRVGAHWGFGGLGALAGGGGIPRRRGSCAAGPPATVAMTTCATIRDEQTTVDSEVQQVEIAEQELTEGKLCP

SEQ ID NO: 44019 - protein, 120 aa, Zea mays
  Coding DNA Sequence Number=SeqID_2240
MEFQVTLEESADPRRTRCSRILIRGHLFVSCGDIHSVIGTWSNSGVGFLWHLHMLCFCVMETNLYCISDSEEFQLVVPVVKAEPLKNQWADEDVEEDDVKESWEEEEEECRSDFLFTLPF

SEQ ID NO: 44020 - protein, 204 aa, Zea mays
  Coding DNA Sequence Number=SeqID_2241
  Gene Ontology: Mol. function=DNA binding; Cellular component =nucleosome; Biological process=chromosome organization and biogenesis (sensu Eukaryota)
  Homolog annotation: Hit_ID=Q1RX14; Match level="QueryCoverage=73%, HitCoverage=97%, E-value=3e-23, Identity=50%"; Hit description =Histone H2A; Histone-fold
  Pfam annotation: Domain name=Histone; Domain location=92-166; Score =71.9; E_value=2e-18; Accession=PF00125.14; Description=Core histone H2AH2BH3H4
MGSGEAETTISWRGDLGWDENFPEYVPGAFAAAARRRRSMAGKGGGKSLVAAKIAAGMDKDKKSPLRFVPPSLSRRGLVSFLGVTYARVLLSVRSLAYGFPVGLIHRHLKDSAQVDERVGATAAVYAAAVLEYLTVEIMELAGNTCRDLKVKRITPRHLQLAVRGGRGAGHPDQGHHRRRRRHPPHPQGAHRQGCLGMTKEQAV

SEQ ID NO: 44021 - protein, 933 aa, Zea mays
  Coding DNA Sequence Number=SeqID_2242
  Gene Ontology: Mol. function=RNA binding; Cellular component =mitochondrion; Biological process=protein amino acid phosphorylation
  Homolog annotation: Hit_ID=Q76C99; Match level="QueryCoverage=81%, HitCoverage=94%, E-value=0.0, Identity=47%"; Hit description=Rf1 protein, mitochondrial precursor
  Pfam annotation: Domain name=PPR; Domain location=211-245; Score =22.0; E_value=0.0021; Accession=PF01535.11; Description=PPR repeat
  Pfam annotation: Domain name=PPR; Domain location=282-316; Score =19.4; E_value=0.013; Accession=PF01535.11; Description=PPR repeat
  Pfam annotation: Domain name=PPR; Domain location=319-353; Score =53.2; E_value=8.5e-13; Accession=PF01535.11; Description=PPR repeat
  Pfam annotation: Domain name=PPR; Domain location=354-388; Score =41.4; E_value=3e-09; Accession=PF01535.11; Description=PPR repeat
  Pfam annotation: Domain name=PPR; Domain location=389-423; Score =48.3; E_value=2.6e-11; Accession=PF01535.11; Description=PPR repeat
  Pfam annotation: Domain name=PPR; Domain location=424-458; Score =32.4; E_value=1.6e-06; Accession=PF01535.11; Description=PPR repeat
  Pfam annotation: Domain name=PPR; Domain location=459-493; Score =35.2; E_value=2.2e-07; Accession=PF01535.11; Description=PPR repeat
  Pfam annotation: Domain name=PPR; Domain location=494-528; Score =52.5; E_value=1.4e-12; Accession=PF01535.11; Description=PPR repeat
  Pfam annotation: Domain name=PPR; Domain location=529-563; Score =41.7; E_value=2.5e-09; Accession=PF01535.11; Description=PPR repeat
  Pfam annotation: Domain name=PPR; Domain location=564-598; Score =33.7; E_value=6.4e-07; Accession=PF01535.11; Description=PPR repeat
  Pfam annotation: Domain name=PPR; Domain location=599-633; Score =22.3; E_value=0.0017; Accession=PF01535.11; Description=PPR repeat
  Pfam annotation: Domain name=PPR; Domain location=634-668; Score =49.6; E_value=1.1e-11; Accession=PF01535.11; Description=PPR repeat
  Pfam annotation: Domain name=PPR; Domain location=669-703; Score =51.6; E_value=2.6e-12; Accession=PF01535.11; Description=PPR repeat
  Pfam annotation: Domain name=PPR; Domain location=704-738; Score =24.8; E_value=0.00031; Accession=PF01535.11; Description=PPR repeat
  Pfam annotation: Domain name=PPR; Domain location=739-773; Score =34.4; E_value=3.8e-07; Accession=PF01535.11; Description=PPR repeat
  Pfam annotation: Domain name=PPR; Domain location=774-808; Score =33.4; E_value=7.9e-07; Accession=PF01535.11; Description=PPR repeat
  Pfam annotation: Domain name=PPR; Domain location=809-843; Score =45.8; E_value=1.5e-10; Accession=PF01535.11; Description=PPR repeat
  Pfam module annotation: Pfam domain module=PPR::PPR::PPR::PPR::PPR::PP R::PPR::PPR::PPR::PPR::PPR::PPR::PPR::PPR::PPR::PPR::PPR; Domain location=211-245::282-316::319-353::354-388::389-423::424-458::45
  Pfam module annotation: Domain location=529-563::564-598::599 -633::634-668::669-703::704-738::739-773::774-808::809-843
MDCNATHLPLEEPSAGSHHLPHPLAITGSLQLQNRTKSRDLIYFILEYSKYVSIRDPPRPDEFGVVEVYNHLIWTEERDGNPDAPKNPPTPPARPMPSCARISSAVSTARRILLLARPPHPPPRCRRRILAAATARVREGTLRPEEAHDLLDELQRRGTPVLERDLNGFLAALARAPSSAACRSGPALAVALFNRAASRAQGPRVLSPTSHTYAILMDCCTRAHRPELALAFFGQLLRTGLRVNIIIANHLLEGFCEAKRTDEALDILLHRTPELGCVPDVFSYSILLKSLCDQGKSGQADDLLRMMAEGGAVCSPNVVAYNTVIDGFFKEGDVNKACDLFKEMVQRGIPPDLVTYNSVVHALCKARAMDKAEAFLRQMVNKRVLPNNWTYNNLIYGYSSTGQWKEAVRVFKEMRRHSILPDVVTLSMLMGSLCKYGKIKEARDVFDTMAMKGQNPDVFSYNIMLNGYATKGCLVDMTDLFDLMLGDGIAPDFYTFNVLIKAYANCGMLDKAMIIFNEMRDHGVKPDVVTYRTVIAALCRIGKMDDAMEKFNQMIDQGVAPDKYAYNCLIQGFCTHGSLLKAKELISEIMNNGMHLDIVFFSSIINNLCKLGRVMDAQNIFDLTVNVGLHPDAVVYSMLMDGYCLVGKMEKALRVFDAMVSAGIEPNVVVYCTLVNGYCKIGRIDEGLSLFREMLQRGIKPSTILYSIIIDGLFQAGRTVPAKMKFHEMTESGIAMDICTYNIVLRGLFKNRCFDEAIFLFKELRAMNVKINIITLNTMIDGMFQTRRVEEAKDLFASISRSRLVPNVVTYSIMITNLIKEGLVEEAEDMFSSMQNAGCEPNSRLLNHVVRELLKKNEIVRAGAYLSKIDERNFSLEHLTAMLLIDNATRAKPQEVSGLVDELLWMRGMTPPPLAAMVALIRVSSSSFPWIAS

SEQ ID NO: 44022 - protein, 268 aa, Zea mays
  Coding DNA Sequence Number=SeqID_2243
  Gene Ontology: Mol. function=peroxidase activity
  Homolog annotation: Hit_ID=Q014B2; Match level="QueryCoverage=66%, HitCoverage=40%, E-value=2e-15, Identity=31%"; Hit description =Homology to unknown gene
  Subcellular localization annotation: CTP_CleavageSite=42; ConfidenceScore=5.61e-01
MEVAAATCTLLAAVALPVSSSAAAARSATKQSYSRRKTTAVRAVMARPHQVPPPATATATATTYRDNWFDKLAIGYLSRNLQEASGMKNGKDGYEGLIEAALAISALFRIKVMMPPSRFSREYFAAFTTVFFPWLVGPCEVVRVIIVSPNICKVRESQVDGREERNVVYIPKCRCPITNTELAAVCEIDRFLESTNCVGMCTNLCKIPCQRFIQDSLGTAVYMSPNFEDMSCEMIFGQQPPEDDPALKQPCFRTKCIAKQNHQVNCSI

SEQ ID NO: 44023 - protein, 67 aa, Zea mays
  Coding DNA Sequence Number=SeqID_2244
MDKWAAHMASPSGPKCGKPAQDSDPKLGKHLVTCRYQALEESPARRLLHALATLASTVCARAPRTSA

SEQ ID NO: 44024 - protein, 405 aa, Zea mays
  Coding DNA Sequence Number=SeqID_2245
  Gene Ontology: Mol. function=protein serine/threonine kinase activity; Cellular component=membrane; Biological process=protein amino acid phosphorylation
  Homolog annotation: Hit_ID=Q8H8W2; Match level="QueryCoverage=71%, HitCoverage=34%, E-value=2e-82, Identity=56%"; Hit description =Putative receptor-like protein kinase
  Pfam annotation: Domain name=Pkinase; Domain location=31-298; Score =120.4; E_value=5e-33; Accession=PF00069.15; Description=Protein kinase domain
  Pfam annotation: Domain name=Pkinase_Tyr; Domain location=31-298; Score=95.7; E_value=1.4e-25; Accession=PF07714.7; Description =Protein tyrosine kinase
  Pfam module annotation: Pfam domain module=Pkinase::Pkinase_Tyr; Domain location=31-298::31-298
MGLMRRLMGKPKRKDEHYISLHDVREATNNFNDENVIGSGGFGKVYRGYLKDGTEVAVKRRDKDSRQGAEEFEFEKELLFRLEHPNLVSLIKYCDEKGEMILVYEYMKEGTLQSHLYGSNKPPLSWEQRLEASTGAAKGLNYLHSNGIIHRDVKSLNILLDENLCAKMGDLGMSKAGPELDKTHVSTRVIGTIGYLDLQYWMTGHLSVKSDVGSFGAVLLEVLCGRAVIDHRLSAEKVNLVCWGKKMLEEGNVAEIVDEKIRDTTHPHNLAMFGSIVLRCLAEENAERPTMEEVLRDLEWELGMVRAGNPPDESVHGSASVAAENSGESGHAAVSSQEKKVKALERSQGKTYERSPSVSHELSATSTSRAARLSGSRFLQGRNGNAMKMKGPVELESISEDENCF

SEQ ID NO: 44025 - protein, 325 aa, Zea mays
  Coding DNA Sequence Number=SeqID_2246
MGRCYTELATIRNNLEAEPTDNPTPERPEKVSDHLRRTRREANAAVDSDGGSLVLCPLPFLSAGYRGGFKAMATDPPGLIGARHGVLDPQITTLIGEASAAIPRDARGVRCAPVPCPPHLFPAHVVVECGIGLLQTQGLVELPDKGIEGGVGAGVDALRRVEWEERVGDVHQAGLSGSTPKAERGRGSGGCRLCQVIVGVDMHSLERARHLGQIELVAAPSIGVWRPRILKGSSTNLGPGRAATWRKELDSVVVQLNSTSQEVEVHQEALVVEALAQLLVDSAEHSHEALLEPRLHVATTTAARQAGPHVTYPSAFISLRLKGER

SEQ ID NO: 44026 - protein, 254 aa, Zea mays
  Coding DNA Sequence Number=SeqID_2247
  Gene Ontology: Mol. function=protein serine/threonine kinase activity; Cellular component=membrane; Biological process=protein amino acid phosphorylation
  Homolog annotation: Hit_ID=Q75IR9; Match level="QueryCoverage=58%, HitCoverage=16%, E-value=5e-19, Identity=39%"; Hit description =Putative receptor-like protein kinase
MTGHLSVKSDVGSFGAVLLEVLCGRAVIDHRLSAEKVNLVCWGKKMLEEGNVAEIVDEKIRDTTHPHNLAMFGSIVLRCLAEENAERPTMEEVLRDLEWELGMVRAGNPPDESVHGSASVAAENSGESGHAAVSSQEKKVKALERSQANQDRRELTSASPRLCPLVLHITRPTRPPSHMSLPREGRLPFPDPPTASSALPSFVSRMPVKWEPPSSQMLEYSPNNEDMWEPDLRGGGGRGERRARAGAGAGERGI

SEQ ID NO: 44027 - protein, 97 aa, Zea mays
  Coding DNA Sequence Number=SeqID_2248
MPPKSDPRGALQQGHEGEMKGRGLTKHGRCRGLRPRRRACAVHMRPFKYAGVDEEDDKWGPSDSVFMVDERQAGGPPMGPSAEANEPNWPRPSAGGK

SEQ ID NO: 44028 - protein, 130 aa, Zea mays
  Coding DNA Sequence Number=SeqID_2249
MDPWGCVVYEMKLKYGLTCRYMCQAFERIKHMPRNMVNRFSGGYGCWSDLAIYLATGKTEKVEGEGVTKIPIRDEVPLASMEPKGLILSKSLKAQKDAEDEIEISKREITEAEHDRVQKNVDELRESKEQ

SEQ ID NO: 44029 - protein, 71 aa, Zea mays
  Coding DNA Sequence Number=SeqID_2250
MRRPSCRCRRAEAWGNIGGSLTREGSHSLCFQVTGDRGRKMRGSPVPQPMLGRIEGRGEDDSWAIDHEISD

SEQ ID NO: 44030 - protein, 429 aa, Zea mays
  Coding DNA Sequence Number=SeqID_2251
  Gene Ontology: Mol. function=protein serine/threonine kinase activity; Cellular component=membrane; Biological process=protein amino acid phosphorylation
  Homolog annotation: Hit_ID=Q8H8W2; Match level="QueryCoverage=67%, HitCoverage=34%, E-value=2e-82, Identity=56%"; Hit description =Putative receptor-like protein kinase
  Pfam annotation: Domain name=Pkinase; Domain location=55-322; Score =120.4; E_value=5e-33; Accession=PF00069.15; Description=Protein kinase domain
  Pfam annotation: Domain name=Pkinase_Tyr; Domain location=55-322; Score=95.7; E_value=1.4e-25; Accession=PF07714.7; Description =Protein tyrosine kinase
  Pfam module annotation: Pfam domain module=Pkinase::Pkinase_Tyr; Domain location=55-322::55-322
MDKMVLKQNMAPGRRAILHLEVIIMGLMRRLMGKPKRKDEHYISLHDVREATNNFNDENVIGSGGFGKVYRGYLKDGTEVAVKRRDKDSRQGAEEFEFEKELLFRLEHPNLVSLIKYCDEKGEMILVYEYMKEGTLQSHLYGSNKPPLSWEQRLEASTGAAKGLNYLHSNGIIHRDVKSLNILLDENLCAKMGDLGMSKAGPELDKTHVSTRVIGTIGYLDLQYWMTGHLSVKSDVGSFGAVLLEVLCGRAVIDHRLSAEKVNLVCWGKKMLEEGNVAEIVDEKIRDTTHPHNLAMFGSIVLRCLAEENAERPTMEEVLRDLEWELGMVRAGNPPDESVHGSASVAAENSGESGHAAVSSQEKKVKALERSQGKTYERSPSVSHELSATSTSRAARLSGSRFLQGRNGNAMKMKGPVELESISEDENCF

SEQ ID NO: 44031 - protein, 97 aa, Zea mays
  Coding DNA Sequence Number=SeqID_2252
MALPLAVASLLGACSSQPRLCLWLLLRYSTPGMLVEVGFFNVKSELLCQGMWLDNNNMRRTSLIRGPECFEGRAKPEAGRRAKIGSRSCSVPCARQR

SEQ ID NO: 44032 - protein, 167 aa, Zea mays
  Coding DNA Sequence Number=SeqID_2253
MSGYRGTPALRKDAEWRHTGGREWGSFFVAGSGTTVMYPEHAVVPHLERAPVTVVDAECGTLGERKGHMWCVEVGREEGEQWGEGSRETSWMRSLRERMGRKRARRERLPWMEGGGRSAAAMKGERGATDGRFAADLWLDLWAGTEASGVRLVGDLRESLVLFSMKL

SEQ ID NO: 44033 - protein, 72 aa, Zea mays
  Coding DNA Sequence Number=SeqID_2254
  Gene Ontology: Mol. function=GTPase activity
  Homolog annotation: Hit_ID=Q1SFH4; Match level="QueryCoverage=61%, HitCoverage=6%, E-value=1e-11, Identity=66%"; Hit description=Zinc finger, RanBP2-type; AAA ATPase; Translation elongation factor Tu
MAKEEKSVGWTKEHAQLLKSFGVQHLVVAVNRMDVVAYAKERFDFIKRQLGGFQSLPIFVVTKKALASTLAI

SEQ ID NO: 44034 - protein, 95 aa, Zea mays
  Coding DNA Sequence Number=SeqID_2255
  Subcellular localization annotation: CTP_CleavageSite=28; ConfidenceScore=5.19e-01
MSPTNTNRPQVRNILAKHPPALVMTPVECPARRAQSRDTLTVEFQPSMRRASRTHQVLGACTKPLGEDTGWSVDGEVVHGAGLPRRDDVLDSTPW

SEQ ID NO: 44035 - protein, 106 aa, Zea mays
  Coding DNA Sequence Number=SeqID_2256
MSRDHDQVWGPDHAKPDDPLFGSDPDHRSGQPDPGDQPVSKQRDVRPQLQLRQHQPSAPERKIAWELRSMGKAAQGDQAVQESVAEYCVWFYKRDAEKAILDLRFD

SEQ ID NO: 44036 - protein, 633 aa, Zea mays
  Coding DNA Sequence Number=SeqID_2257
  Gene Ontology: Mol. function=catalytic activity; Cellular component =intracellular; Biological process=metabolic process
  Homolog annotation: Hit_ID=Q337S8; Match level="QueryCoverage=97%, HitCoverage=88%, E-value=0.0, Identity=76%"; Hit description =Pentatricopeptide, putative
  Pfam annotation: Domain name=PPR; Domain location=127-161; Score =28.8; E_value=1.9e-05; Accession=PF01535.11; Description=PPR repeat
  Pfam annotation: Domain name=PPR; Domain location=228-262; Score =23.2; E_value=0.00093; Accession=PF01535.11; Description=PPR repeat
  Pfam annotation: Domain name=PPR; Domain location=263-297; Score =15.2; E_value=0.12; Accession=PF01535.11; Description=PPR repeat
  Pfam annotation: Domain name=PPR; Domain location=329-363; Score =35.9; E_value=1.4e-07; Accession=PF01535.11; Description=PPR repeat
  Pfam annotation: Domain name=PPR; Domain location=364-398; Score =21.9; E_value=0.0023; Accession=PF01535.11; Description=PPR repeat
  Pfam annotation: Domain name=PPR; Domain location=399-433; Score=1.7; E_value=4.7; Accession=PF01535.11; Description=PPR repeat
  Pfam annotation: Domain name=PPR; Domain location=61-95; Score=2.1; E_ value=4.2; Accession=PF01535.11; Description=PPR repeat
  Pfam module annotation: Pfam domain module=PPR::PPR::PPR::PPR::PPR::PP R::PPR; Domain location=127-161::228-262::263-297::329-363::364 -398::399-433::61-95
MKKHHKFLFFFHRYIHRRTSKPYTSAAHRAVPISFPSSPASSTGLRELDLLHAGELAPTPRLYHSIIAACAQFKNLAGARAIHAHLSRSCLAGDAFLLNSLIHMYCKCGAVSDARHVFDKMPSRDVVSWTYLIAGYAQNYMPAEAIGLLPDMLRARFRPNGFTFTSLLKATGACGGCSIGEQMHALAVKYNWDEDVYVGSALLDMYARCEQMDMAIMVFDRLVSKNEVSWNALIAGFARKADGETTLMKFAEMQRNGFGATHFTYSSMFSAFARIGALEQGRWVHAHLIKSGQKLTAFVGNTMLGMYAKSGSMVDARKVFDRMDKRDLVTWNTMLTALAQYGLGKEAVAHFEEIRKCGIQLNQITFLSVLTACSHGGLVKEGKHYFDMMKDYNVQPEIDHYVSFVDLLGRAGLLKEALIFVFKMPMEPTAAVWGALLGACRMHKNAKMGQYAADHVFELDPDDTGPPVLLYNIYASTGKWNDAARVRKMMKATGVKKEPACSWVQIENSVHMFVADDDTHPKSGDIYRMWEEINMRIKKAGYVPNTAHVLLHINEQERETKLKYHSEKIALAFALINMPAGASIRIMKNIRICGDCHSAFKYVSKVFKREIVVRDTNRFHHFSEGSCSCGDYW

SEQ ID NO: 44037 - protein, 475 aa, Zea mays
  Coding DNA Sequence Number=SeqID_2258
  Gene Ontology: Mol. function=phenylalanine-tRNA ligase activity; Biological process=phenylalanyl-tRNA aminoacylation
  Homolog annotation: Hit_ID=Q2L3C2; Match level="QueryCoverage=35%, HitCoverage=89%, E-value=8e-51, Identity=61%"; Hit description=Kh1 protein
MANDVGVSTPDVGHEAAALSGGTGDEEPLVSTGTEEPPATEDGVPAEIEEEGKGPAAPLEGSPAVITVEGEEEVKWLGHYSSAQTILIVGDGDFSFSLALATAFDSGANLVATSLDTYEVLKRKYSKAEANIVILKRLGATVLHGVDAKRMRFHTDLKNRRFDRIVFNFPHGGFKGKENDLRMINLHKELVWVFFRNARHLVRQLGEVHVTHKSGEPYDSWDLEHLASESSFAMFDKVPFRREDYPGYNQKRGDGKRCDKPFDLGACCTFKFQIRNLKKQKQMNRRSRLIPNLVGSNFHPGHSVTDRGVFHPVAPVEARSWHHFSPPAHTESMLMSPQPYTVNQWQRSGFPLNSDGIVAGPYLHKQESCHPVVSMPGPWLNDLPAQGGIPPPLPMSRIPSPDLLAPREQPWYQQRTILDHPGVDDYFFAREHQMSLQREYEMKRQVIPLEHRRRDRESVEKLEWLHRMIALYGRK

SEQ ID NO: 44038 - protein, 229 aa, Zea mays
  Coding DNA Sequence Number=SeqID_2259
  Gene Ontology: Mol. function=phenylalanine-tRNA ligase activity; Biological process=phenylalanyl-tRNA aminoacylation
  Homolog annotation: Hit_ID=Q2L3C2; Match level="QueryCoverage=62%, HitCoverage=70%, E-value=1e-35, Identity=58%"; Hit description=Kh1 protein
MRHGPWPNKERNTGHGDCNSSGSSALWGPLNRVVQEKVLNALRRLDSDSPCIVHYQSTTLPTRVHGVRGSLTTSPAVGHDSAPAANGGGSREGAGPAEEGVLGMRVVEGAPEADEEEEKWLGQYSSTQSILLVGDGDFSFSLALATGFGSGANLVATSLDTYEALGNKFCRAKSNITALKSLGATVLHGIDVKTMKLQIDLKNRRFDRIIYNFPHSGFKGKEHEVHMIK

SEQ ID NO: 44039 - protein, 193 aa, Zea mays
  Coding DNA Sequence Number=SeqID_2260
  Gene Ontology: Mol. function=DNA binding; Biological process=DNA integration
  Homolog annotation: Hit_ID=O24587; Match level="QueryCoverage=71%, HitCoverage=12%, E-value=3e-57, Identity=80%"; Hit description=Pol
MSGAPATSPKPLGFDRWSSDFWARLDVRWRTGHSTCPIPEAAKFQSRVLLEHRTLSGYDSNTKAYRVFNKSSGLVEVSSDIVFDETNGSPREQVVDCDDVDEEEVPMAAIRTMAIGDVWPQEQDVRDQPSSSTMVHPPTQDDEQVHQEEASDQGGAQDDHVMEEEAQPAPPTQVRAMIQRDHPVDQILGDIST

SEQ ID NO: 44040 - protein, 651 aa, Zea mays
  Coding DNA Sequence Number=SeqID_2261
  Gene Ontology: Mol. function=peptidase activity; Cellular component =cytoplasm; Biological process=proteolysis
  Homolog annotation: Hit_ID=Q2L3T0; Match level="QueryCoverage=99%, HitCoverage=87%, E-value=0.0, Identity=74%"; Hit description =Subtilisin-like protease
  Pfam annotation: Domain name=PA; Domain location=217-320; Score =100.3; E_value=5.9e-27; Accession=PF02225.12; Description=PA domain
  Pfam annotation: Domain name=Peptidase_S8; Domain location=16-477; Score=-0.5; E_value=9.4e-07; Accession=PF00082.12; Description =Subtilase family
  Pfam module annotation: Pfam domain module=PA::Peptidase_S8; Domain location=217-320::16-477
MGPAPPGWRGICQDQQASDDAQVRCNRKLIGARFFNKGYLATVGRRQQQQEVNPASTRDTDGHGTHTLSTAAGRLVPGANLFGYGNGTAKGGAPAAHAAAYKVCWRPVNGSECFDADIIAAFDAAIHDGVHVLSVSLGGSPADYFRDGLAIGSFHAARHGVTVVCSAGNSGPGAGTVSNTAPWLLTVGASTMDREFPAYLVLDNNKRIKGQSLSRTRLPANKYYQLISSEEAKGANATVTQAKLCIGGSLDKAKVKGKIVVCVRGKNARVEKGEAVHRAGGAGMVLANDEASGNEVIADAHVLPATHITYADGVTLLAYLKATRLMPEPLFDGPFAHFGLMLASGYITVPYTALDAKPAPFMAAFSSQGPNTVTPEILKPDITAPGVSILAAFTGEAGPTGLAFDDRRVLFNAESGTSMSCPHVAGIAGLLKAVHPDWSPAAIKSAIMTTARVQDNMRKPMSNSSFLRATPFGYGAGHVQPNRAADPGLVYDANTTDYLSFLCALGYNSSVIATFMAGAGDGHEVHACPARLRPEDLNYPSVAVPHLSPTGGAHTVTRRVRNVGPGGATYDAKVHEPRGVAVDVRPRRLEFAAAGEEKQFTVTFRAREGFFLPGEYVFGRLVWSDGRGRHRVRSPLVARVVNTKKKHISIA

SEQ ID NO: 44041 - protein, 57 aa, Zea mays
  Coding DNA Sequence Number=SeqID_2262
MATCSTPIDTPNKPVRYHRATIEAPIHLPLMAYEPLGPQHIYGSHVPSYDALMTYQD

SEQ ID NO: 44042 - protein, 139 aa, Zea mays
  Coding DNA Sequence Number=SeqID_2263
MALTSTGDRNQWIPRWCMQVVVEKRMDDTHSSTDSLTRCRDWGLNSSTPLRLIYLHLEIGLRPKQVVVGLIPQKGCYKRHSGTYAILKSEVDHLLAAVAMLKKWGLSGARLGIGPPVRYPLPLLEVVFANKDQKRKRGA

SEQ ID NO: 44043 - protein, 153 aa, Zea mays
  Coding DNA Sequence Number=SeqID_2264
MVLKANARFLKSQEELRRSDDGSTTIGDAKEEVVAAIIVVKSSTLFQSIIRGNLQYASLSALRRLSLDPAGYEVLYHGEDFDLLNMLKKEEEMLLAVKESKANRTSKELVEYGEQLLGIFREELAGYEVLYHAEVGRNFESPQIMTEIGSLKL

SEQ ID NO: 44044 - protein, 121 aa, Zea mays
  Coding DNA Sequence Number=SeqID_2265
MSKVKNNNGYLGVTEPISLSRQTEKDLMQIAEVKKEYLILDFICILPQLSWKKMEGPPPPPAPSMEGKPNLLARSPRKVHHLTTCRAATSMEELENCWVLCVTNTLGIRELLGACVTDVLL

SEQ ID NO: 44045 - protein, 112 aa, Zea mays
  Coding DNA Sequence Number=SeqID_2266
MVRLLFQSHAETKRAGDNRNAAAAVDSGIVLGSEQEGDKLTAGRVELSRVPDVQSVAEQRCLGEAVTWTHMWMGRVEGAASMIVWRSTIQIEQQRWTIQIERRQNGRLPLEP

SEQ ID NO: 44046 - protein, 64 aa, Zea mays
  Coding DNA Sequence Number=SeqID_2267
MGLLGIYSLGSDPYETDLESYVCHIDLRPGKVRCYHVPGTKQVEHVPPSAIRAPNLERSRGATG

SEQ ID NO: 44047 - protein, 139 aa, Zea mays
  Coding DNA Sequence Number=SeqID_2268
  Subcellular localization annotation: CTP_CleavageSite=40; ConfidenceScore=5.33e-01
MSSLIRLLFTLAAAIGAASLLVASLRRRAPPPGLPAKLVPSSHMAGRNRSFVLWLHGLGDSGPANEPIRNLFSAPEFRLAKWSFPSAPRAPVSCNSALTLASVLLYPKKLGGGAVFSGWVPFSSSVTERISPEARKMWF

SEQ ID NO: 44048 - protein, 315 aa, Zea mays
  Coding DNA Sequence Number=SeqID_2269
  Gene Ontology: Mol. function=calcium ion binding; Cellular component =cellular_component; Biological process=endosome transport
  Homolog annotation: Hit_ID=Q9LTR4; Match level="QueryCoverage=95%, HitCoverage=97%, E-value=1e-79, Identity=66%"; Hit description =Similarity to EH domain containing proteins
  Pfam annotation: Domain name=efhand; Domain location=18-46; Score =13.5; E_value=0.42; Accession=PF00036.22; Description=EF hand
  Pfam annotation: Domain name=efhand; Domain location=52-80; Score =23.0; E_value=0.001; Accession=PF00036.22; Description=EF hand
  Pfam module annotation: Pfam domain module=efhand::efhand; Domain location=18-46::52-80
MGPDSSPKKLSLKEQRAAYLQWFALADEDGDGRLTGNDALRFFAMSNLSKPELKQVWAIADSKRQGYLGFYEFMTAMQKKNSGSKVESAIVACHPSEAPTMTASWFNSKSGKKFNLFYNKGAHIGPEPTTDRFVVITLMRVYGALLWSLGKVLNTPEVMRVYIGSFNDKPIRETAAGPLGMELFQKEQDDLLSDLNDIPKKACDRRINEFVKRARAAKVHAHIISHLKKEMPALMGKAKAQQKLLDGLDQQFAKVQKELHLPPGDFPSVEEYRELLSAYNFDRFEKLRPKMVQGVDDMLAYDIPDLLKKFRNPYD

SEQ ID NO: 44049 - protein, 34 aa, Zea mays
  Coding DNA Sequence Number=SeqID_2270
MAQGRVTPCWNIYLTPGRGAGMTQFHAPYVPNLR

SEQ ID NO: 44050 - protein, 98 aa, Zea mays
  Coding DNA Sequence Number=SeqID_2271
  Subcellular localization annotation: CTP_CleavageSite=68; ConfidenceScore=5.61e-01
MQAACNRAKWVHISDSQRAQHGSPGPRVTQPVRRMLRASNCTATRAAVTPPRLRNQYRDSRQPYARPSSASLARWDQERGIPRKGSFSVKEPGSEPPY

SEQ ID NO: 44051 - protein, 196 aa, Zea mays
  Coding DNA Sequence Number=SeqID_2272
  Gene Ontology: Mol. function=peptidase activity; Cellular component =cytosol; Biological process=electron transport
  Homolog annotation: Hit_ID=Q5T2D3; Match level="QueryCoverage=58%, HitCoverage=28%, E-value=5e-27, Identity=47%"; Hit description=OTU domain-containing protein 3
  Pfam annotation: Domain name=OTU; Domain location=50-156; Score =118.2; E_value=2.3e-32; Accession=PF02338.9; Description=OTU-like cysteine protease
MVQKKKKAAAAPKLRKLPKRDADKKLGKKGDMAEFRAQLDSLGLKIVQVTADGNCFFRAMGDQLEGDEEEHMKYRDMVVDYIVKHREEFEPFIEDEVPFEEYCNSMLKDGTWAGHMELQAASLLTRRNICIHMLNSPRWYINNFSGREATNMVHLAKGGQGKGQRGKKQKKKEQAEAAAAKAKESAIVPDLGALCI

SEQ ID NO: 44052 - protein, 377 aa, Zea mays
  Coding DNA Sequence Number=SeqID_2273
  Gene Ontology: Mol. function=cysteine-type endopeptidase activity; Cellular component=endoplasmic reticulum; Biological process =proteolysis
  Homolog annotation: Hit_ID=Q0WXG8; Match level="QueryCoverage=91%, HitCoverage=87%, E-value=7e-99, Identity=46%"; Hit description =Triticain alpha
  Pfam annotation: Domain name=Granulin; Domain location=324-372; Score= 20.2; E_value=5.8e-05; Accession=PF00396.9; Description=Granulin
  Pfam annotation: Domain name=Inhibitor_I29; Domain location=52-110; Score=90.5; E_value=5.2e-24; Accession=PF08246.2; Description =Cathepsin propeptide inhibitor domain (
  Pfam annotation: Domain name=Peptidase_C1; Domain location=142-286; Score=202.3; E_value=1.1e-57; Accession=PF00112.13; Description =Papain family cysteine protease
  Pfam module annotation: Pfam domain module=Granulin::Inhibitor _I29::Peptidase_C1; Domain location=324-372::52-110::142-286
MAALGLLLLLLLAVVGAANAAAPGGRMSIISYNEEHAARGLERTEPEARTLYELWLAEHGRAYNALGERDRRFRVFWDNLRFVDAHNERAAEHGFRLGMNQFADLTNDEFRAAYLGARIPASRRRGTAVGERYRHGGGAEELPESVDWREKGAVAPVKNQGQCGSCWAFSAENAKVVSIDGFEDVPENDEKSLQKAVAHQPVSVAIEAGGREFQLYKAGVFTGTCTTNLDHGVVAVGYGTENGKDYWIVRNSWGAKWGEDGYIRMERNVNATTGKCGIAMMASYPTKKGANPPKPSPTPPTPPPPPVAPDNVCDENFSCAAGSTCCCAFGFRNVCLVWGCCPMEGATCCKDHASCCPPGYPVCNVRAGTCSVGSFEM

SEQ ID NO: 44053 - protein, 168 aa, Zea mays
  Coding DNA Sequence Number=SeqID_2274
MVVRRLGGTGRALLTLPNIRRRASNSWAAVCDTFFSTKVTTDNLSPCVPIAPDVILLDPLTRSKCSRATASSSPSAPQSPPSSRLGPVRVRLARRCLVRSKGLQKRAAKADDGSHEVVTEQVALAALQQAQEQQYIKVIMHPTACMEQLTDDRIELRQPYGGRSFDFP

SEQ ID NO: 44054 - protein, 167 aa, Zea mays
  Coding DNA Sequence Number=SeqID_2275
  Homolog annotation: Hit_ID=Q10AM8; Match level="QueryCoverage=60%, HitCoverage=62%, E-value=2e-09, Identity=43%"; Hit description =Immutans protein, putative, expressed
  Subcellular localization annotation: CTP_CleavageSite=64; ConfidenceScore=5.71e-01
MAVASTSPLSAKPATAPSPPAPGSGLLALGVRRAPATAAWRRLRVEAIRTQRTEVPVEESAPARDAAAAAPLDGNGAGADGSVVPSSDDSWVVKLEQSFNIFATDSVIMVLKGVYGDRYYARFFALETIARVPVGGRRAMSASDTARPQPIAAASRLRLRLGLDVRV

SEQ ID NO: 44055 - protein, 63 aa, Zea mays
  Coding DNA Sequence Number=SeqID_2276
MEDAKPIKILMGTNEHLDLDAGGKSVDQKNVFLGPHKSLCIDAYVEGEDLLQLDPLRLMFLFE

SEQ ID NO: 44056 - protein, 62 aa, Zea mays
  Coding DNA Sequence Number=SeqID_2277
MSWGMEPSFFLIIKPSLAIAGIPNWRAATASATKLTAATTSATKLDGGHRVGEDEEEWRMRA

SEQ ID NO: 44057 - protein, 155 aa, Zea mays
  Coding DNA Sequence Number=SeqID_2278
  Gene Ontology: Mol. function=nucleic acid binding
  Homolog annotation: Hit_ID=Q5JL01; Match level="QueryCoverage=92%, HitCoverage=11%, E-value=4e-31, Identity=56%"; Hit description =Putative rad8
MAAAGERRKLCGYLRAVVSIPGGDVAAAASILPLSPCTLSACGAVALAPLPDDVRAQPRWPRSRAPGVVRLLRTLVANRCVEVEGTLLRVVTRRRPGEGEGDGAAVEARAVVLLDVYIPVAAWSGWQFPRSRSAAAAVFKHVRCNFVDPIAISEE

SEQ ID NO: 44058 - protein, 34 aa, Zea mays
  Coding DNA Sequence Number=SeqID_2279
  Homolog annotation: Hit_ID=Q0MRQ9; Match level="QueryCoverage=86%, HitCoverage=21%, E-value=1e-07, Identity=90%"; Hit description=Late embryogenesis abundant protein
MASGQESREELARMAEEGQTVVPGGTGGKTNGDR

SEQ ID NO: 44059 - protein, 304 aa, Zea mays
  Coding DNA Sequence Number=SeqID_2280
  Gene Ontology: Mol. function=RNA-directed DNA polymerase activity; Cellular component=intracellular; Biological process=RNA-dependent DNA replication
  Homolog annotation: Hit_ID=UPI00004C1734; Match level="QueryCoverage =98%, HitCoverage=76%, E-value=1e-110, Identity=69%"; Hit description= UPI00004C1734 related cluster
MPFGLRNAGATYQRCMNHVFGKHIGQTVEAYVDDIVVKTRKAFDLLSDLEVTFRCLKAKGVKLNPEKCVFGVPRGMLLGFIVSEWGIEANPEKIAAITSMGPIKDLKGVQRVMGCLAALSRFISRLGERGLPLYRLLRKAECFTWTPEAEEALGNLKALLTNAPILVPPAAGEALLIYVAATTQVDTQLPIAPIQPELWTMFFDGSLMKTGAGAGLLFISPLGKHLRYVLRIHFPVSNNVAEYEALVNGLRIAIELGVRRLDARGDSQLVIDQVMKNSHCRDPKMEAYCDEVRRLEDKFYGNTK

SEQ ID NO: 44060 - protein, 68 aa, Zea mays
  Coding DNA Sequence Number=SeqID_2281
MTPIQVGEDDEDITPIQTMNLGEDEQGLYKGQDIKEEKLGRSQQEKVKFDPTSSPPWSSGQVCTKTDA

SEQ ID NO: 44061 - protein, 86 aa, Zea mays
  Coding DNA Sequence Number=SeqID_2282
MALNATTYAEFRVGQARTPPLCYKTEADPPSNSSHGCAGGEAPVTQEFLNRNPRPPSTAHNRGSPAYAHHLRYGSLNGIRFRTRIV

SEQ ID NO: 44062 - protein, 111 aa, Zea mays
  Coding DNA Sequence Number=SeqID_2283
MASKKVTTRAITSLDDAMKVTLADDAFQVATKNNKAGFRGTPQNDVPLGFAPVEAEGIMEEGEVLGISVEDQLKLRALCVKNNHLQKAKGDTHSQEAANQHASQSKADGPR

SEQ ID NO: 44063 - protein, 93 aa, Zea mays
  Coding DNA Sequence Number=SeqID_2284
MRKKTTLHIVYNGEQSASPRPNQRRQAFSRRTSREGYFDRTSVEDLNRDLKRGQTKGHTRREGSLQLPIHVPKAQFFPRQRSPSLDEVKGVTR

SEQ ID NO: 44064 - protein, 58 aa, Zea mays
  Coding DNA Sequence Number=SeqID_2285
MEDTKGVSRMPPTILCSHFYVAFPQFKGRDAVAFFREVEAEAVKIVGKYSLKKEMLRS

SEQ ID NO: 44065 - protein, 109 aa, Zea mays
  Coding DNA Sequence Number=SeqID_2286
MCITVVVTKVRRAIADAPTHDSAQRGHGNVPCDLVKLLCHPQSPNIVDLVVQRLSSLRSLGYDMLPARSEDFQLVSRVRDAWDLYFEPGGGRGTHSQREFVVDSVAHNL

SEQ ID NO: 44066 - protein, 70 aa, Zea mays
  Coding DNA Sequence Number=SeqID_2287
MTQFFEFHEIEDPEHLFEELSVVRFAIVTLMGLGRWLGGDEDDDFDYDYGNGEDEVVEEDFQEFQEYDEF

SEQ ID NO: 44067 - protein, 268 aa, Zea mays
  Coding DNA Sequence Number=SeqID_2288
  Gene Ontology: Mol. function=peptidase activity; Cellular component =extracellular region; Biological process=proteolysis
  Homolog annotation: Hit_ID=Q8RWB6; Match level="QueryCoverage=99%, HitCoverage=70%, E-value=7e-96, Identity=55%"; Hit description =Putative serine protease-like protein
MQSEAWNGYRKPPSEQKYSEDVGHIHQGLNFEPTREELDSLSKACSRLWELDMNRIVPGKDYIIDCGEGKKVYQKGDMASESLFSWLGDDVLRKPTYSRFCALLDNYNPHQDKHEEIVFVEEIARTSLIKYLHRYLVQKGVVPQDYEDFKKMLTSLWFDLYGRGGNSSCSTAFEHVFVGEIKGPGQGESEPDSEIQLLIVQFEWHGVLKSVSNTLIGVSPKFEVALYTLCFFVGGEDNRVDIGPYSVNVKCYRLGNNKIGSTFPIAEN

SEQ ID NO: 44068 - protein, 126 aa, Zea mays
  Coding DNA Sequence Number=SeqID_2289
  Homolog annotation: Hit_ID=Q75J71; Match level="QueryCoverage=36%, HitCoverage=7%, E-value=3e-07, Identity=71%"; Hit description =Putative L-ascorbate oxidase
MVACTLFIHDAKSASTLIRYAGSSGASPAPNITEPPAGWATGPGPSTRPGAEVTIGRSYNTQVIEVEEALENHAKSGGLLKQYDIGFQISVLVALTTTLMLFCSHIHQIDGDLAVRKMTPLDSNLV

SEQ ID NO: 44069 - protein, 132 aa, Zea mays
  Coding DNA Sequence Number=SeqID_2290
MGKSKKGGSLSHHSGDKRKRELSPPSEDFSDSEYSEEEFSSESEGSPAYASPPVSSDDLDDSQGIAAKVWTYIWAVEHSGLEGSDESEISSDEEDSFDSSEEGSGDDDDDEGDSDNKGDGGSGRASGKAPPA

SEQ ID NO: 44070 - protein, 75 aa, Zea mays
  Coding DNA Sequence Number=SeqID_2291
MGEYYRIRPPEDAEADRSKRTLGVPSSQICCHLGIYSLGATKLRPIITKMGLVRFACTMKRGYLDALGIVGSRLL

SEQ ID NO: 44071 - protein, 239 aa, Zea mays
  Coding DNA Sequence Number=SeqID_2292
  Subcellular localization annotation: CTP_CleavageSite=50; ConfidenceScore=5.63e-01
MIAGFGPRGELPSPSLSSPPPSPSYSSRAAPWRVPHGPLTAPSALPGGPRRAPAWPTGTRPAQPPAHSPRDPSVRPARPPTHSRAPPRRASARPPGALPAQPPDALPPPPASQHAPAWPPDGAPSWPWQRPSRPPAPPSPRAPWRRPCVTPSWPPGGAPTRALAAPRTRPRAAPARPLPGGARPVPDTAARPRRDSRVPGAASRSPSGDEDDGFGYDYGNGEDEVVEEDFQEFQEYDEF

SEQ ID NO: 44072 - protein, 225 aa, Zea mays
  Coding DNA Sequence Number=SeqID_2293
  Homolog annotation: Hit_ID=Q6QP54; Match level="QueryCoverage=47%, HitCoverage=32%, E-value=7e-07, Identity=44%"; Hit description =Putative kinase
MAGSRDNSEVSPSNTIEPTWETLSADEHLQFEEHKEQLIQEAKAKFLVNFKVDRNNKVVRQWVTDLASLRPTTTTPEEMQVDTEPFPMNVIDFEGKKVGRCGSSSEAEVESVFRGRGRVCLPWPRSNLPSVAEVESEPLGRARRRPSAEARAEPEPWGRAERSSSSSRAEPKSEPWVGRSGVRRLPGLSPSPSPRSGGAEFAVFRDLARVRALGRAERSSPSSRT

SEQ ID NO: 44073 - protein, 266 aa, Zea mays
  Coding DNA Sequence Number=SeqID_2294
  Gene Ontology: Mol. function=copper, zinc superoxide dismutase activity; Cellular component=chloroplast; Biological process =superoxide metabolic process
  Homolog annotation: Hit_ID=P07505; Match level="QueryCoverage=76%, HitCoverage=64%, E-value=2e-50, Identity=56%"; Hit description =Superoxide dismutase [Cu-Zn], chloroplast precursor
  Pfam annotation: Domain name=Sod_Cu; Domain location=54-265; Score =237.9; E_value=2.2e-68; Accession=PF00080.10; Description=Copperzinc superoxide dismutase (SOD
  Subcellular localization annotation: CTP_CleavageSite=50; ConfidenceScore=5.49e-01
MAAQSFLLAATAAARSPAVFAAPYSSARPFHSVHFVAGPWGAAAARALVVADATKKAVAVLKGASEVEGVVTLTQDDDGPTTVNVRITGLTPGLHGFHLTAQVGKNRKTNYSLYGAPTKKLKPFAPAKHQILATSNNSTNHLLKSLRERFFGNLLLFKLPSLTLKNNLFYLTGPHFNPNNLTHGAPEDEVRHAGDLGNIVANAEGIAEATIVDTQIPLTGPNSVVGRAFVVHELEDDLGKGGHELSLSTGNAGGRLACGVVGLTPL

SEQ ID NO: 44074 - protein, 63 aa, Zea mays
  Coding DNA Sequence Number=SeqID_2295
  Subcellular localization annotation: CTP_CleavageSite=27; ConfidenceScore=5.46e-01
MAEEGHCRSPFGSPTTHAPVQPALSARASSRSVTCFAERLRTASPSTVEIHINMIARDQMFSN

SEQ ID NO: 44075 - protein, 118 aa, Zea mays
  Coding DNA Sequence Number=SeqID_2296
MELTSDDEDRVRTGRAPTDDGAPELLWKLDEGAHPTITGARNKATGAPVPVLGRRGQDGCAHCGEAVERDDMYGPLTGSGGAPLYARERALGRSKSEAWGYGGPERRPHGAGREGRKI

SEQ ID NO: 44076 - protein, 119 aa, Zea mays
  Coding DNA Sequence Number=SeqID_2297
MPGMDAFAAVSLLATLFLVRAAAAHPPAAAADAMTPTDYWRAVLPETPMPRAILDLLTTSTVLFDSLCRVSEKILDKEPFADEMSAEYSMPRVTLGKGFAECLRHSAKNAILIVIVTEF

SEQ ID NO: 44077 - protein, 175 aa, Zea mays
  Coding DNA Sequence Number=SeqID_2298
  Subcellular localization annotation: CTP_CleavageSite=80; ConfidenceScore=5.52e-01
MGRKYSPRGKKWVKTNPHRGWRGRPGPNNASTLASMRPAIVSQFPLPSPPPLARRHAARRARALGYVVVPPSAPSVDCACASTPWSLQASIAVPCRPLLPPRLLRAARPVARRPQRVACSGARAQLLLLPAHGRVDLLLLLGFLRCTTQPADQRPRAHLLLLLGFFQSPASNNRK

SEQ ID NO: 44078 - protein, 39 aa, Zea mays
  Coding DNA Sequence Number=SeqID_2299
MSFGHSKERAPQRLPPASASPWSGCVAVGMAPTDVLDGG

SEQ ID NO: 44079 - protein, 695 aa, Zea mays
  Coding DNA Sequence Number=SeqID_2300
  Gene Ontology: Mol. function=RNA-directed DNA polymerase activity; Cellular component=intracellular; Biological process=RNA-dependent DNA replication
  Homolog annotation: Hit_ID=UPI00004C1731; Match level="QueryCoverage =99%, HitCoverage=47%, E-value=0.0, Identity=80%"; Hit description =UPI00004C1731 related cluster
  Pfam annotation: Domain name=RnaseH; Domain location=312-439; Score =12.1; E_value=4.4e-06; Accession=PF00075.14; Description=RNase H
  Pfam annotation: Domain name=rve; Domain location=519-669; Score =85.1; E_value=2.1e-22; Accession=PF00665.16; Description=Integrase core domain
  Pfam module annotation: Pfam domain module=RnaseH::rve; Domain location=312-439::519-669
MSFGLRNAGATYQRCMNHVFGQHIGQTVEAYVDDIVVKTRKASDLLSDLEVTFRCLMAKGVKLNPEKCVFGVPRGMLLGFIVSERGIEANPEKIAAITGMGPTKDLKGVQRVMGCLAALSRFILRLGERGLPLYRLLRKAECFTWTPEAEEALGNLKALLTNAPILVPPAAGEALLIYIAATTQVVSAAIVVERREEGHALPVQRPVYFISEVLSETKIRYPQVQKLLYAVILTQRKLRHYFESHPVTVVSSFPLGEIIQCREASGRIAMWAVEIMGEAISFAPRKAIKSQVLADFVAEWVDTQLPTAPIQPKLWTMFFDGSLMKTGAGAGLLFISPLGKHLRYVLRLHFPASNNVAEYEALVNGLRIAIELGVRRLDARGDSQLVIDQVMKNSHCHDPKMEAYCDEVRRLEDKFYGLELNHIDRRYNETADELAKIASGRTTVPPDVFSRDLHQPSVKIDDTPEPEAPSAQPEVPSAQSEAPSARPATPSARPEASSVQPEVPSAPEGEALRVEEERSGVTPNQNWHPGGYTHLLVAIDKFSKWIEVQPLNSIRSEQAVAFFTNIIHRFGVPNSIITDNGTQFTGRKFLDFCEDHHIRVDWAAVAHPMTNGQVERANGMILQGLKPRIYNDLNKFGKRWMKELPSVVWSLRTTLSRATGFTPVLSSLWGRGHLAHRLRIRFPEDKGLHRPKQPS

SEQ ID NO: 44080 - protein, 159 aa, Zea mays
  Coding DNA Sequence Number=SeqID_2301
  Subcellular localization annotation: CTP_CleavageSite=82; ConfidenceScore=5.11e-01
MAMPRLAQVPRPQGKSWRWTPLHSWRLRSIARKVSRQWCHPPLLLRRLGMARGTVLVASHPLSPIAPSKRRKGKELVTTPPPASSVLAVVVPLGLVWVILDWSGLRCVYMSCKMVKEATLATKGGADYCGDEHPSHTDHTNLAGRSRGPKHVRPRRGSS

SEQ ID NO: 44081 - protein, 48 aa, Zea mays
  Coding DNA Sequence Number=SeqID_2302
MSVALWGGAHGRWSTVEVKVMRARADGPRVVHTSPVNILYPVQTLCEV

SEQ ID NO: 44082 - protein, 249 aa, Zea mays
  Coding DNA Sequence Number=SeqID_2303
  Homolog annotation: Hit_ID=Q10PI5; Match level="QueryCoverage=46%, HitCoverage=28%, E-value=5e-51, Identity=83%"; Hit description =Haemolysin-III related family protein, expressed
MLIYCDGVQIVLMLPDTESLWVMVVALPPSLDLSLALFMGLMAVVTPTLLQFLPPKSDKRTCLSSLSVVFAGSVCRAATWIPTVMPIARYLELVPCRLHISLHKTQQQWVCHLKEPVDEFTRHLIGFFIFLALTIYTATQVPNAVDIRSLQHLPDVLRKADIHKIQAELVSCLPSLPHLSDLQKLKDELKTSWNSMEVLPSLSRWHLLELLANCLPHRFTHPNETSLSVLVYIRENLKINVIDLSDLRN

SEQ ID NO: 44083 - protein, 239 aa, Zea mays
  Coding DNA Sequence Number=SeqID_2304
MSVMWPEGFVGYKWDADRRSHHGSMLGVVNATSYLRWVSLGPEAGSTRVVPLRHARPPLGSTTSDPSLGATGFDRGRVLSRLTYPPLSADQRALAARALSLVHSLTGGSQGSGIISPTVAPEGRPETPSDLRESLAATNIVLQAIDSEVAGQADRRVPGQYCFSLSQRHLIGCFFDFFPLLLMALPELELEVVGLREGVDEVVAFVHGRGANREERILGVANWVRLAVRHGARRGGAWL

SEQ ID NO: 44084 - protein, 293 aa, Zea mays
  Coding DNA Sequence Number=SeqID_2305
  Gene Ontology: Mol. function=RNA-directed DNA polymerase activity; Cellular component=mitochondrion; Biological process=RNA-dependent DNA replication
  Homolog annotation: Hit_ID=UPI00004C1731; Match level="QueryCoverage =64%, HitCoverage=13%, E-value=4e-94, Identity=85%"; Hit description =UPI00004C1731 related cluster
  Pfam annotation: Domain name=rve; Domain location=92-239; Score=63.4; E_value=7.3e-16; Accession=PF00665.16; Description=Integrase core domain
MKKVVYYETDSSSPSTSGSESTSVTSKRHERKKYSKPPFFDGEDYCMWSDKMRHHLTSLHKSIWDIVEYGAQVPKVGDNDYDSEEVDQIRHFNSQATTILLASLSPLQKAPGGYTHLLVAIDKFSKWIEAVAFFTNIIHRFGVPNSIITDNGTQFTGRKFMDFCEDHHIRVDWAAVAHPMMNGQVERANGMILQGLKPRIYNDLNKFGRRWMKELPLVVWSLRTTPSQATGFTLFFLVYGAKAILPTNLEYDSLRTRAYDDQSNRTNPEDSLDQLEEARDMALLHSARYQQSL

SEQ ID NO: 44085 - protein, 39 aa, Zea mays
  Coding DNA Sequence Number=SeqID_2306
MATVACFACFGYAGDSIRLVPAVSTIGLPNDGSSQYQPC

SEQ ID NO: 44086 - protein, 82 aa, Zea mays
  Coding DNA Sequence Number=SeqID_2307
MVGLPVVMRMMVLVMTMVAFGAIYAQEHCMPVGDDGHVLLLPLPCDAAADDGGVRRRMGARRWGRGRCQAPPIGEALMVGEI

SEQ ID NO: 44087 - protein, 651 aa, Zea mays
  Coding DNA Sequence Number=SeqID_2308
  Homolog annotation: Hit_ID=Q10A91; Match level="QueryCoverage=99%, HitCoverage=55%, E-value=1e-147, Identity=46%"; Hit description =Expressed protein
  Pfam annotation: Domain name=MFMR; Domain location=282-401; Score= -71.2; E_value=0.049; Accession=PF07777.2; Description=G-box binding protein MFMR
MRPGARLDSVVFQLTPTRTRFDLVLIANGRKEKFASGLLKPFLAHLKAAQDQIAKGGYSITLEPISEFDVSLFTRGAVERFVRFVSTTEVLERVTTLESEILQLEDAIAIQRNDSLRLKCELYDYAPYLSQPAISFYIYFYHMPNTIHPLIGGPANYDPNSATAIVVYKKAVNKTALQFAEFKTVLRKEQAMAFTRAVAAGFDIDNLDVNNCTIARFLPWKACSHFIELWKQKHETGQWIEVEPEAISTRSEFPPFNASGIVLMGDNMKQNLESGSINGEPNGEDGAKADQKSSQQMGSHAAYPPWAMHPASGAVLYPPYPMQGMPFYPGVNPYYPPYPPVDDPSSGGGNSHGHKSHRKGKRSGKKPSVVVIKNVNVTSKKCGSSESESQSSSEVESADSDNSHSKSRERKHKSSCSKEGRRTTFDPGDEYNKDETSNGHGVEQGNWSAFQNFLLRAEEKTRSSDADLFAGEKEPPSRRKQNVNTADPIILVERDGGNVCEQNKIGFDSANGRTRVIRVMSNDELVMSGEGRIYMDCEMKEIEAGGGRYRRGTGDDYMVYGQGCQIDRHCLLDPLAEAQYKNPVQQDNNRNGVTDESFMIPLRSSSQDNIGAESRTTMDIDVELPSSIHKASDKKAGHQLFYEPDELVPER

SEQ ID NO: 44088 - protein, 586 aa, Zea mays
  Coding DNA Sequence Number=SeqID_2309
  Gene Ontology: Mol. function=beta-glucosidase activity; Cellular component=smooth endoplasmic reticulum; Biological process=bile acid metabolic process
  Homolog annotation: Hit_ID=Q9LTY0; Match level="QueryCoverage=75%, HitCoverage=52%, E-value=1e-152, Identity=54%"; Hit description =Arabidopsis thaliana genomic DNA, chromosome 5, TAC clone:K9P8
  Pfam annotation: Domain name=DUF608; Domain location=89-452; Score =782.1; E_value=3.3e-232; Accession=PF04685.4; Description=Protein of unknown function, DUF608
MTHAAGAGPLLDSEYKHWEEEIDKWQTPVLQDERLPEWYKITLFNELYFLVAGGTVWIDSGSLVSDADNKSNPEESNLSHEIDDKENVGKFLYLEGIEYFMWCTYDVHFYASFALLDLFPKIELSIQRDFARAVLREDNRRVRFLADGTWGIRKVIGAVAHDLGAHDPWHELNAYNIHDTSRWKDLNPKFVLQIYRDFAATGDKSFGKDVWPAVCTAMEYMEQFDHDGDGMIENDGFPDQTYDAWTVQGVSAYCGCLWLAALQAAAALAGSLGHDDYAERCMTRFVKAKTVFEARLWNGSHFNYDSGTSYSSRSIQADQLAGQWYTASSGLPPLFDEDRIKCTLQKIFDYNVMRVKGGRMGAVNGMHPNGKVDETCMQSREIWTGVTYSLAATMLLHGMEHQAFTTAEGIYTAGWSEEGYGYWFQTPEAWTIDGHYRSLIYMRPLAIWAMQWALSPPRSILEAPKTLYHLDVWIEKSLKLPLLKNNILSIWMKELVGMQQLGSDAFRNPQVGVQQKFENLLRVNDYQNLGKKATFAECCGLGVGKASLQSAVASGLSKEATFAECLLVHSAKVLTKGPAGDLFAER

SEQ ID NO: 44089 - protein, 187 aa, Zea mays
  Coding DNA Sequence Number=SeqID_2310
  Gene Ontology: Mol. function=hydrolase activity, acting on glycosyl bonds; Cellular component=integral to membrane; Biological process =sphingolipid metabolic process
  Homolog annotation: Hit_ID=Q9LTY0; Match level="QueryCoverage=80%, HitCoverage=18%, E-value=2e-37, Identity=45%"; Hit description =Arabidopsis thaliana genomic DNA, chromosome 5, TAC clone:K9P8
MVSGNLLYRRKRSWRADEFVSRSTLQLLDFDDGSPPEHAWRRKLSSHANRLKEFNVTFREAIRMKAPIDPFTREGNKPSASQGVPLGGMGSGSISRGFRGEFKHWQITPGSCEMSPVMANQFSIFVTRGGTKKYASVLSPGQLDGLKKSTDDGISSWDWKLKGDRSTYHALFPRAWTVYDGNDANYL

SEQ ID NO: 44090 - protein, 48 aa, Zea mays
  Coding DNA Sequence Number=SeqID_2311
MAQMPVGYVRTNEMEGNHQTYNNELMTDVPVAKYWTSRIRTQTHHTDS

SEQ ID NO: 44091 - protein, 82 aa, Zea mays
  Coding DNA Sequence Number=SeqID_2312
MASTDDSWLGCQTKCTPGLISEKKETAGPARREMGYKATPRRNVLWALNNAEANGGTTSVPRMEAAPMIKFSGRQDVERLLK

SEQ ID NO: 44092 - protein, 50 aa, Zea mays
  Coding DNA Sequence Number=SeqID_2313
  Homolog annotation: Hit_ID=Q10I53; Match level="QueryCoverage=92%, HitCoverage=35%, E-value=4e-15, Identity=80%"; Hit description =Expressed protein
MTKTTPPAFVYRISTADEWAEFQRTGATLGGDLDSSTGCIHLSDLNQNSG

SEQ ID NO: 44093 - protein, 91 aa, Zea mays
  Coding DNA Sequence Number=SeqID_2314
MDGHSRGPNYVTIIVGHPEPGEFVENAQSPYMARQLSVFRTCAPTSKFLCACSGLQTVCSVGVTFILVQAECPYIQSLVAHATGTIIARCS

SEQ ID NO: 44094 - protein, 78 aa, Zea mays
  Coding DNA Sequence Number=SeqID_2315
MVSTLNQEAFPINGICIHMLSKDDYPDNEEDDKGLNEKCSNWALIMQIIDVHVLCIIVFKVSDQNSESCTRALFFVRG

SEQ ID NO: 44095 - protein, 261 aa, Zea mays
  Coding DNA Sequence Number=SeqID_2316
  Gene Ontology: Mol. function=D-arabinono-1,4-lactone oxidase activity; Cellular component=membrane; Biological process=electron transport
  Homolog annotation: Hit_ID=Q10I64; Match level="QueryCoverage=82%, HitCoverage=35%, E-value=9e-96, Identity=81%"; Hit description=FAD -binding domain-containing protein, putative, expressed
  Pfam annotation: Domain name=FAD_binding_4; Domain location=77-227; Score=69.5; E_value=1.1e-17; Accession=PF01565.13; Description=FAD binding domain
  Subcellular localization annotation: CTP_CleavageSite=91; ConfidenceScore=5.25e-01
MGTTAPVAGAVVVRVKQSMLLVLVIVTSVLVVGPTADRGAFASPPPEPVQCSSGGGTANCTVSSAYGVFPDRSTCRAAAAVFPASEDELVRAVAAAAAASGTKMKVATRYSHSIPKLACPGNGTGEGLVISTRRLDRVVSVDAATGHVTVESGVTLRQLIAEAAKAGLALPYAPYWWGLTVGGMLGTGAHGSSLWGNGSAVHEYVVGMRIVTPAPAAEGYAKVRVLTAGNPDLDAAKVSLGVLGAISQELQIEHIDVNQNA

SEQ ID NO: 44096 - protein, 326 aa, Zea mays
  Coding DNA Sequence Number=SeqID_2317
  Gene Ontology: Mol. function=oxidoreductase activity; Cellular component=vacuole; Biological process=hydrogen peroxide catabolic process
  Homolog annotation: Hit_ID=Q43729; Match level="QueryCoverage=91%, HitCoverage=91%, E-value=2e-59, Identity=41%"; Hit description =Peroxidase 57 precursor
  Pfam annotation: Domain name=peroxidase; Domain location=40-289; Score=331.9; E_value=1.1e-96; Accession=PF00141.13; Description =Peroxidase
MALLPPRRSLLLLLALAVHAAAAVQLHFYARSCPRAEAIVRRAVRRRAAHDRSVLPALIRLHFHDCFVRGCDGSVLIDSTPGHPAEKDAPPNLTLRMLDVIDDAKAAVERTCPGVVSCADIVALAARDAAAMAGKVRYEVPTGRRDGTVSSAAEVSLPGPSASFADAMSAFRSAGLGVVDLTALLGSHTMGFCHCGLIMGRLYGYNRTCESDPAMDPGLLAALRRRCPPPQNESRDAVVPMNFVAPLGPFGLDNALYPSVLAGRAVLQIDQELASSGVARRIAAMFATLPGSFRRQFAKSMVRLGNVNVLTGRQGEVRLNCRRFNS

SEQ ID NO: 44097 - protein, 94 aa, Zea mays
  Coding DNA Sequence Number=SeqID_2318
MPPIQQGSCFGGCGEVYGDFIAAGNWKPVVSDTYTFSSLEIQLHPTTATTHTIQVPTTATTHTATTHPTPSSTINMDALLTSLKMDGALDYTGK

SEQ ID NO: 44098 - protein, 151 aa, Zea mays
  Coding DNA Sequence Number=SeqID_2319
  Homolog annotation: Hit_ID=Q6QP51; Match level="QueryCoverage=34%, HitCoverage=30%, E-value=2e-14, Identity=79%"; Hit description =Putative growth-regulating factor 1
MQVACNRTVEAHPSGFVASSMEAQAHTSCNRHAGYYVRETAPPLAPISRLLDCGTGAATRGNPSHGPTVSIKHIDHGDRERGYFERDPSPRRKRAPSPPTDQGFEGWPLRRVRQPPQSTRASGSLLIRGSKAGPSEGFDSRLRALGLRAHY

SEQ ID NO: 44099 - protein, 610 aa, Zea mays
  Coding DNA Sequence Number=SeqID_2320
  Gene Ontology: Mol. function=hydrolase activity, hydrolyzing O -glycosyl compounds; Cellular component=anchored to membrane; Biological process=carbohydrate metabolic process
  Homolog annotation: Hit_ID=Q8H822; Match level="QueryCoverage=77%, HitCoverage=94%, E-value=0.0, Identity=89%"; Hit description =Putative beta-1,3-glucanase
  Pfam annotation: Domain name=Glyco_hydro_17; Domain location=134-456; Score=345.8; E_value=7e-101; Accession=PF00332.9; Description =Glycosyl hydrolases family 17
  Pfam annotation: Domain name=X8; Domain location=471-556; Score =171.9; E_value=1.6e-48; Accession=PF07983.3; Description=X8 domain
  Pfam module annotation: Pfam domain module=Glyco_hydro_17::X8; Domain location=134-456::471-556
MRKLLFISFVLSLSAAAVHGEDGKPQCQANDIDGLSLRDCAKFVSDLTARAALLPSRYWDHLTVSCSGLLPGPTPLQLNKSQSFADAAQLLAWPVGRATTAATAAGINVVTGHCTLPRIFCGWPGPGQQHGAYIGVNIGTAMSSVPAPTQITTLLRSQNIRHVRLYDADPAMLAALSNTGIRVIVSVPNEQLLAIGNSNATAANWVARNVAAHFPAVNITAIAVGSEVLSAQPSAAPLLMPAMRYLQNALVAAALDRYIKVSTPHSSSIILDSFPPSQAFFNRSLDGVLVPMLRFLQSTGSPLMLNVYPYYDYMRSNGVIPLDYALFRPLPPNKEAVDANTLLHYTNVFDAVVDAAYFAMAYLNVTNVPVMVTETGWPHKGDSSSEPDATSDNADTYNSNLIRHVMNSTGTPKHPGVAVPTYVYELYDEDTRPGSTSEKYWGLFDMNGVPAYTLHLTGSGVLLANDTTNQTYCVAREGADPKMLQAALDWACGPGKVDCSVLMQGQPCYDPDTVDAHATYAFNAYYHGMGMGSGTCYFSGVAVVTTTDPSHGSCVYAGKNGTSLMNGTSLAPSSNSTEGGSGAHRAFGDVSSLVRIVSTALLFSVVLLLL

SEQ ID NO: 44100 - protein, 788 aa, Zea mays
  Coding DNA Sequence Number=SeqID_2321
  Gene Ontology: Mol. function=protein serine/threonine kinase activity; Cellular component=cell surface; Biological process =protein amino acid phosphorylation
  Homolog annotation: Hit_ID=Q8H821; Match level="QueryCoverage=97%, HitCoverage=97%, E-value=0.0, Identity=63%"; Hit description =Putative receptor-like protein kinase
  Pfam annotation: Domain name=B_lectin; Domain location=69-183; Score =130.3; E_value=5.3e-36; Accession=PF01453.15; Description=D-mannose binding lectin
  Pfam annotation: Domain name=Pkinase; Domain location=471-742; Score =182.8; E_value=8.4e-52; Accession=PF00069.15; Description=Protein kinase domain
  Pfam annotation: Domain name=Pkinase_Tyr; Domain location=472-742; Score=120.9; E_value=3.5e-33; Accession=PF07714.7; Description =Protein tyrosine kinase
  Pfam annotation: Domain name=S_locus_glycop; Domain location=197-322; Score=71.8; E_value=2.1e-18; Accession=PF00954.11; Description=S -locus glycoprotein family
  Pfam module annotation: Pfam domain module=B_lectin::Pkinase::Pkinase_ Tyr::S_locus_glycop; Domain location=69-183::471-742::472-742::197-322
MLLILVFLLSFSSLDLQISGATTDTLTLGQSLPWNQTLVSKGGNFELGLFSPGNSKKHYIGIWFKKVSKQTVVWVANRDSPILDPSASRFTLSNRGELLLHATPSNTLLWSSNASSPSPRTTVATLQDDGNLVVRSNASSALVAWQSFDHPTDTWLPGARLGYDRARGVHSFLTSWTDADNPAPGAFSMEIDPRGQAKFDLLAGGTHQYWTTGVWDGEVFENVPEMRSGYFEGVTYAPNASVNFFSYKNRVPGIGNFVLETNGQMQRRQWSPEAGKWILFCSEPHDGCDVYGSCGPFGVCSNTSSAMCECPTAFAPRSREEWKLGNTASGFRAVRQRRPEPRGATRCALSPACETAPALPTLTRQPSAWCGTASSSALGHSLTIKASRGAVVLHVRVAASEVPPSAAHHSWRKSMVILSSSVSAVVLLLAGLIIVVAVAVVVRKRRGKGKVTAVQGSLLLFDYQAVKAAARDFTEKLGSGSFGSVYKGTLPDTTPVAIKKLDGLRQGEKQFRAEVVTLGMIQHINLVRLRGFCSEGNKRALVYDYMPNGSLDAHLFKNSSGSKVLSWSQRFGIAVGVARGLSYLHEKCRECIIHCDIKPENILLDEEMGAKVADFGMAKLVGHDFSRVLTTMRGTMGYLAPEWLAGAPITAKADVYSFGLLLFELISGRRNNGSSETGSNSAVYFPVHAAVRLHAGDVVGLLDDKIAGDANVELERVCKVACWCIQDEEGDRPTMGLVVQQLEGVADVGLPPIPSRLHMLAMMNKCAVGGEAEVEPCSNSGSKIDTEV

SEQ ID NO: 44101 - protein, 374 aa, Zea mays
  Coding DNA Sequence Number=SeqID_2322
  Homolog annotation: Hit_ID=UPI0000163432; Match level="QueryCoverage =37%, HitCoverage=14%, E-value=2e-50, Identity=71%"; Hit description =protein binding
  Subcellular localization annotation: CTP_CleavageSite=17; ConfidenceScore=5.46e-01
MGQTARARNRTTALAIRAPTQKNAPSRQPPHSKLAALLLQPTGPTKRQRAHSRNRARSSMPAPETAKHGQTHARSRRPPVRPARFRPFSSNKPSLWRTKPRIANRGCFVHLHRVAFRSLSSTAPQLARVSPNHTYHRGGVSACILLPPPSRLHPPPPLASAPPLADAPARSHPQTLASIPMGTPRAGSPASPVTGDHYLDLLVRFVARNAGALLDGTVTLRLHPVGLHYVASRLEALRELEAVGAGAPVDYLRAYVADLGDHRALEQLRRILRLLTSLKVVAPGPRRDPAPLSILPFARLRVLELRGCDLSTSAARGLLELRHTLEKLVCFNSTSISSPEHLQGFIYINACAADTIYATAATIPAALDIFILTV

SEQ ID NO: 44102 - protein, 706 aa, Zea mays
  Coding DNA Sequence Number=SeqID_2323
  Gene Ontology: Mol. function=protein binding
  Homolog annotation: Hit_ID=Q10PT8; Match level="QueryCoverage=99%, HitCoverage=73%, E-value=0.0, Identity=55%"; Hit description=Leucine Rich Repeat family protein, expressed
  Pfam annotation: Domain name=LRR_1; Domain location=101-121; Score =3.6; E_value=61; Accession=PF00560.23; Description=Leucine Rich Repeat
  Pfam annotation: Domain name=LRR_1; Domain location=11-32; Score=0.5; E_value=2.3e+02; Accession=PF00560.23; Description=Leucine Rich Repeat
  Pfam annotation: Domain name=LRR_1; Domain location=34-54; Score=6.4; E_value=18; Accession=PF00560.23; Description=Leucine Rich Repeat
  Pfam annotation: Domain name=LRR_1; Domain location=56-76; Score =11.5; E_value=2; Accession=PF00560.23; Description=Leucine Rich Repeat
  Pfam annotation: Domain name=LRR_1; Domain location=79-99; Score=5.4; E_value=28; Accession=PF00560.23; Description=Leucine Rich Repeat
  Pfam module annotation: Pfam domain module=LRR_1::LRR_1::LRR_1::LRR _1::LRR_1; Domain location=101-121::11-32::34-54::56-76::79-99
MDIKDSPVWSKLSYVSCASNGVVLMDESLQLLPATETLDLSRNKFAKVDNLQKCTKLRNLDLGFNHLRSISSLSEVSSRIVKLVVRNNALTTVNGIENLKSLMGLDLSYNIISIFSELEILGTLPLLQNLWLEGNPICCARWYRAHVFSFFRNPENLKLDDKGMNTQEYWEKQVLFACRQNQPAGYGFYFPAIDDHEDEDILNLKMFSHATKKRKFSRLVSIVEEERNLCDGVEQQSTHCDSDSSKKDETAAVDHDLIIASLINTAEMLKKEKSSNWLCEFKEWMDDNTEKTEGDNLSVGLTNGNGKYIKQKKRQKAHKETSNNMSDLVQVSEGGSSSNLLESDSSFTDNAFSGSNGVIKQSSNELNFDQDHLKMHLNSFQRPPPLELVATSQTDPFSELENGSRNMLANGTPSNTMSKLIESSPPHTYSSPQSPPQYKEDILHRRLFMEEEFLQISGHLHSIGSLGSGSSCSDGSSSDFGSCNSEDDYEEIQTKMELSLNGQMVLFPSVNGDDHEANNNLEHFSGENTLSDHPEEGEPSCSDHREFDIEEFHNSNQRNGHLGHYLGHLIGQKGKEKFKWRVFPFKNHNGTKLENPKMNDDQVAEHVLVEGNGQLTCNPSKSTHKEGSKSHSSNILHKNNSSVCTINTGEHNTLEDFFNLEIADKDGFETCEQVACCAHMFQDSSGLVQRRVVFSVFSISENVISI

SEQ ID NO: 44103 - protein, 128 aa, Zea mays
  Coding DNA Sequence Number=SeqID_2324
  Gene Ontology: Mol. function=metal ion binding
  Homolog annotation: Hit_ID=Q69V56; Match level="QueryCoverage=43%, HitCoverage=12%, E-value=4e-23, Identity=94%"; Hit description =Putative copine I
  Subcellular localization annotation: CTP_CleavageSite=41; ConfidenceScore=5.46e-01
MGQKDSKPSHGYGYSSYDYGSASSGYTSRNTGNSSSSYSVRYAPSSENSVQPETHARLQRKYSKIGDDYRSLSQVTEALAQAGLESSNLIVGIDFTKSNEWTDAYLCFSMSTLCCTGTHYTLSYQTIS

SEQ ID NO: 44104 - protein, 63 aa, Zea mays
  Coding DNA Sequence Number=SeqID_2325
MPQFLFCSGGGGWVERFLVHRFSDPAAGKTTHGGGSFGAGEEKTRIFLAAITRPSSTRFAGGD

SEQ ID NO: 44105 - protein, 71 aa, Zea mays
  Coding DNA Sequence Number=SeqID_2326
  Homolog annotation: Hit_ID=Q10RW4; Match level="QueryCoverage=93%, HitCoverage=5%, E-value=3e-29, Identity=92%"; Hit description=PIROGI, putative, expressed
MYDVFGKGYEGILEAMRKARRLNNHVFSMLRARCPLEDKVACAIKPSGAPLHRMKFMNTVSAFETLPQRVT

SEQ ID NO: 44106 - protein, 100 aa, Zea mays
  Coding DNA Sequence Number=SeqID_2327
MEAATQLGAVRSAVGEERRTQGRPVGDPRQSGRDPDFGYDHGASTTSASSLGSEDEDVLQSAILAGFTTDAASHYINDRNLVTQTSKSNASGPPLTDDRK

SEQ ID NO: 44107 - protein, 110 aa, Zea mays
  Coding DNA Sequence Number=SeqID_2328
  Pfam annotation: Domain name=Gamma-thionin; Domain location=46-88; Score=2.2; E_value=0.031; Accession=PF00304.11; Description=Gamma -thionins family
MSFSKRVAVAAALALALQLILASHRITMVAVAAAGAKKDETIAPLQTCETMIKVPCWGKNAICIPICIAMRYTGGFCDVATCMCTKQCLAAAEAEADGASQQAVATPRLN

SEQ ID NO: 44108 - protein, 425 aa, Zea mays
  Coding DNA Sequence Number=SeqID_2329
  Gene Ontology: Mol. function=hydrogen ion transporting ATP synthase activity, rotational mechanism; Cellular component=proton -transporting two-sector ATPase complex; Biological process=ATP synthesis coupled proton transport
  Homolog annotation: Hit_ID=Q8S237; Match level="QueryCoverage=97%, HitCoverage=76%, E-value=1e-150, Identity=64%"; Hit description =Lustrin A-like
  Subcellular localization annotation: CTP_CleavageSite=55; ConfidenceScore=5.23e-01
MSLAGRRKSSHAGAGAGAGAGALDASATKHATTSLRKGGRLPVYVASVFFFLCVVVMYGEDIRSLTIEPLTRVPAPAVPGTTGAGGRQVVVVPRRDISASEKPAAVLHRGEQEKPKKHAVTTTTTTTAPPVAVEKPQQKVVATAAAKSERNTAKKAAAKKKKKPRRQQRAAKKTVVPPALGVPETCDLSKGRWVFDNTSYPLYREEECEFLTSQVTCMKNGRRDDTYQKWRWQPKGCSMPRFDAKLFMERLRGKRFMFVGDSLNRNQWESMVCLVQSASPPGKKYVTWEGQRVVFHAWEYNATVEFYWAPFLVESNSDDPKIHSIQHRIIKADTIGAHAENWRGVDYLVFNTYMWWMNTLDMKVMRPGAKSWEEHDEVVRIEAYRKVLTTWASWVNDNVDPARTSVFFMSMSPLHIRYPGPLPTT

SEQ ID NO: 44109 - protein, 157 aa, Zea mays
  Coding DNA Sequence Number=SeqID_2330
  Homolog annotation: Hit_ID=Q10QB5; Match level="QueryCoverage=45%, HitCoverage=20%, E-value=2e-24, Identity=74%"; Hit description =Radical SAM enzyme, Cfr family protein, expressed
MASSSKAPSSRRSVFDAVHIRSEFSAAGISAHFIPLIWNDLDGVPSLPAAAYALLRQKFRPTTSTLTAAADSKDRTTTKLLICLQPSLGEPASTRPVKRYKNDPDRKPVPSMERLELGHGLARAVLAIELGHVLVKPVLVTGLGQKEAEAGRTTKVI

SEQ ID NO: 44110 - protein, 264 aa, Zea mays
  Coding DNA Sequence Number=SeqID_2331
  Homolog annotation: Hit_ID=Q10QA8; Match level="QueryCoverage=68%, HitCoverage=61%, E-value=2e-57, Identity=62%"; Hit description =Somatic embryogenesis related protein, putative, expressed
MTTREPREASRRDGRDSHGRRPHSSFRSRRDDPSPRRRDDRRRESDRAHHRSRDGEFLEVVDHDQKRNRDAAQSADPPNAESNTMSVEVLGKVVGIMTARLVGKIELDQQKKDGDSTWKHDGFFQLEEAAPLAKKRPPFQEMKIQESADTVTEPDSRSRNYQARGYGNHRPFLRPDDRGFRRGFPDHRSDGQRNGHDIRGRFSVRGGMDRDRFNNSYGGRSNAEQASGDQEEKWKHDLYDQTNRSPPPKTEEEQIAKVEALLAL

SEQ ID NO: 44111 - protein, 439 aa, Zea mays
  Coding DNA Sequence Number=SeqID_2332
  Gene Ontology: Mol. function=voltage-gated ion-selective channel activity; Cellular component=mitochondrial outer membrane; Biological process=anion transport
  Homolog annotation: Hit_ID=Q7Y1C6; Match level="QueryCoverage=53%, HitCoverage=85%, E-value=1e-119, Identity=91%"; Hit description =PgPOR29
  Pfam annotation: Domain name=Porin_3; Domain location=63-432; Score =141.9; E_value=1.8e-39; Accession=PF01459.12; Description=Eukaryotic porin
MDLGLAEATAPTACRAEDATTAIGLVEERRWAGQHTTAGGGGMDRSDSEVCAARVGGEIAGGEGTGEQMRDLLSKDYTYDQKLTISTASASGLVRSDRARVIPFPCCLVPVRLSVLVTPDLVVVAVFSVGMSPCGVRLPPRHYIKKISRRLRKPPNPCPIHTHRHRSPCEYDLDRASNSKPIYLYILFIVCFYSTILKHVKRGLTSTAVKKGGLYSLDVSSVYKYKNTTVDVKVDTESNISTTLTVLDALPCTKLVTSVKLPDYNYGKVELQYFHENATFATVVGTKPSPVIDLSGTVGAQGVAFGAEAGYDTATGKFTKYTAAIGVTKPDYHAAFILADKGDTIKVSGVYHLDEKQKASAVAELTRRLSTNQNTLTVGGLYTVDSQTAVKARLNNNGTLAALLQHELKPKSLLTISGEFDTKALDRPPKFGLALALKP

SEQ ID NO: 44112 - protein, 184 aa, Zea mays
  Coding DNA Sequence Number=SeqID_2333
  Homolog annotation: Hit_ID=Q10QC4; Match level="QueryCoverage=47%, HitCoverage=22%, E-value=2e-25, Identity=67%"; Hit description =Expressed protein
MAATREQCLPDPQYGGGILHNAGLRGWSTLGYGSIAENMSASGNAPPQDMRTSGGAEGRRKTAKGFEAGSNDGLIISDTGTKRRPAAAGRMAEAVVRCLRDGRLDGEHAPALAVEGSLKCCPLAAGAMLHIAAAFASQVAAGKAQARGLVVVAFDRSPQVYLEFMRRRNLDANALDRWYDLNHL

SEQ ID NO: 44113 - protein, 793 aa, Zea mays
  Coding DNA Sequence Number=SeqID_2334
  Gene Ontology: Mol. function=helicase activity; Cellular component =mitochondrion; Biological process=protein amino acid phosphorylation
  Homolog annotation: Hit_ID=Q10QC8; Match level="QueryCoverage=94%, HitCoverage=94%, E-value=0.0, Identity=75%"; Hit description=Salt -inducible protein, putative, expressed
  Pfam annotation: Domain name=PPR; Domain location=210-244; Score =26.6; E_value=8.9e-05; Accession=PF01535.11; Description=PPR repeat
  Pfam annotation: Domain name=PPR; Domain location=245-279; Score =48.3; E_value=2.7e-11; Accession=PF01535.11; Description=PPR repeat
  Pfam annotation: Domain name=PPR; Domain location=280-314; Score =36.3; E_value=1.1e-07; Accession=PF01535.11; Description=PPR repeat
  Pfam annotation: Domain name=PPR; Domain location=315-349; Score =37.7; E_value=4.1e-08; Accession=PF01535.11; Description=PPR repeat
  Pfam annotation: Domain name=PPR; Domain location=351-385; Score =38.6; E_value=2.1e-08; Accession=PF01535.11; Description=PPR repeat
  Pfam annotation: Domain name=PPR; Domain location=386-420; Score =40.3; E_value=6.7e-09; Accession=PF01535.11; Description=PPR repeat
  Pfam annotation: Domain name=PPR; Domain location=421-455; Score =47.1; E_value=5.8e-11; Accession=PF01535.11; Description=PPR repeat
  Pfam annotation: Domain name=PPR; Domain location=456-490; Score =26.5; E_value=9.7e-05; Accession=PF01535.11; Description=PPR repeat
  Pfam annotation: Domain name=PPR; Domain location=491-525; Score =28.0; E_value=3.4e-05; Accession=PF01535.11; Description=PPR repeat
  Pfam annotation: Domain name=PPR; Domain location=526-560; Score =37.2; E_value=5.5e-08; Accession=PF01535.11; Description=PPR repeat
  Pfam annotation: Domain name=PPR; Domain location=561-595; Score =52.5; E_value=1.4e-12; Accession=PF01535.11; Description=PPR repeat
  Pfam annotation: Domain name=PPR; Domain location=596-630; Score =38.9; E_value=1.7e-08; Accession=PF01535.11; Description=PPR repeat
  Pfam annotation: Domain name=PPR; Domain location=631-665; Score =46.4; E_value=9.6e-11; Accession=PF01535.11; Description=PPR repeat
  Pfam annotation: Domain name=PPR; Domain location=666-700; Score =19.8; E_value=0.01; Accession=PF01535.11; Description=PPR repeat
  Pfam annotation: Domain name=PPR; Domain location=737-771; Score =27.4; E_value=5e-05; Accession=PF01535.11; Description=PPR repeat
  Pfam module annotation: Pfam domain module=PPR::PPR::PPR::PPR::PPR::PP R::PPR::PPR::PPR::PPR::PPR::PPR::PPR::PPR::PPR; Domain location=210
  Pfam module annotation: Domain location=526-560::561-595::596 -630::631-665::666-700::737-771
  Subcellular localization annotation: CTP_CleavageSite=30; ConfidenceScore=5.46e-01
MDTTTPSTSVSPAAASAPAPYSDSALVSAVADALVSASCQSSPPPMDTLLAPYLPRLTSSHHPQVIALAAANPSLASPHTLLAYRRLFSPPSCLPSLLPLLSILPYRNLLPTLLDFVPLDPLRHLHRHLLASFPTSALADAALSTYARLRLPHLAAQLLHSFRRRGCVRPSLQAANAVLSALARSPSTSPQASLDAFHSLIALRLHPNHYTFNLLVHTHCSKGTLADALSTLSKMQGFGLSPDAVTYNTLLNAHCRKGMLGEARTLLARMKKEGIVPTRATYNTLVSAYARLGWIKQATDVVEAMTAFGFEPDLWTYNVLAAGLCQAGKVDEAFKLKDEMEQLGIVSPDVVTYNTLVDACFKCQRSSDALNLLEEMREKGVKSSLVTHNIIVKGLCREGQLEEALGRLEMMTEEGLTPDVITYNTLIDASCKAGNVAKAFVLMDEMVRSGLKMDTFTLNTLLYNLCKEKRYEEAEELLRAPPQRGFVPDEVSYGTVMAAYFKEYKPEPALCLWDEMIKRKLTPSISTYNTLIKGLSTMGKLTEAIDKLNELMEMGLVPDDTTYNIIIHAYCKEGDLEKAFQFHNKMVENSFKPDVVTCNTLMNGLCLYGRLEKAMKLFESWVEKGKKVDVITYNTLIQALCKDNDVDTALRFFADMEVRGLQPDVFTYNVLLSALSEAGRSVEAQKMLHKLNESGKLYGRFFYPSIKSSVEAVETGKDPEVKSDIESVGNTQGDDQESYNKYIKELCIGGQLKEAKAVLDEMMQKGMSVDNSTYITLMEGLIKRQKRQTHAAG

SEQ ID NO: 44114 - protein, 183 aa, Zea mays
  Coding DNA Sequence Number=SeqID_2335
MKHRSVGYWVPYNDQTDVKTRATVQRTYTPNEAIPRPPPHLRIRAGWIQRARPRKVDRSEMVCRQVHLLVHGLTLSLHEASRSKLSVLKILSLLASYTPHRRLPHPPEPHGLHHLSHDGVFEVSPIGEVEVIEVTMLVSSPPWERERSTTWRAEQEVETEARDKINPTEDHTLPCESESVSRI

SEQ ID NO: 44115 - protein, 95 aa, Zea mays
  Coding DNA Sequence Number=SeqID_2336
MKPFCCLLSAAVFGVFACLYGLRADRGLQDLLGPRNRSPPATSLLPFVSGLPLYLHQSEGSEATPLGGEVTLIGSLEMPKDDIWLVTAILSGLIE

SEQ ID NO: 44116 - protein, 572 aa, Zea mays
  Coding DNA Sequence Number=SeqID_2337
  Gene Ontology: Mol. function=hydrolase activity, hydrolyzing O -glycosyl compounds; Cellular component=extracellular region; Biological process=carbohydrate metabolic process
  Homolog annotation: Hit_ID=Q10QC0; Match level="QueryCoverage=97%, HitCoverage=96%, E-value=0.0, Identity=77%"; Hit description=1,4 -beta-xylanase, putative, expressed
  Pfam annotation: Domain name=CBM_4_9; Domain location=46-180; Score =48.5; E_value=2.3e-11; Accession=PF02018.8; Description=Carbohydrate binding domain
  Pfam annotation: Domain name=Glyco_hydro_10; Domain location=217-512; Score=47.3; E_value=2.3e-14; Accession=PF00331.11; Description =Glycosyl hydrolase family 10
  Pfam module annotation: Pfam domain module=CBM_4_9::Glyco_hydro_10; Domain location=46-180::217-512
MGRTLFLPLLWIAMLTSAARVVQCLPYDYSSSSECLPEPLEPQYGGGILRNANFSAGLQGWSAFGYGAVEEGLSATGNGYGVARNRTRPYQSVSQKVYLQNDTHYTLSAWLQVSNGSADVRAVVKTDGEFIHAGAVEARSGCWSILKGGLTAPASGAAELYFESNATVDIWVDSVSLQPFSREEWAAHHHAAIKSARKKTVRLRARDSAGKPVPGAQVRVEHVRSGFPLGSAMSAEILQSPAYQRWFTSRFTVTTFENEMKWYSTERVQGREDYSVPDAMLRFAKSHGIAVRGHNVFWDQPSQQPAWVRSLSQRQLQQATARRIRSVMSRYAGQVIAWDVVNENLHFQFFEDKFGWDASAEFYRRAHQMDGQALMSMNEYNTLEWPGDTLAGPSKYLGKLFQIKKFPGNANDARMAIGLEGHFSVPSIPYIRAALDTMSKANAPIWLTEIDVAPGPNQAHYLEQILREVYAHPAVHGIILWTARHPQGCYVMCLTDDNFRNLPTGDVVDKLIAEWKTHSLAGVADADGYYEAELFHGDYKVTVSHPVANSTVVQSLSIDRETDTDSEYTIHV

SEQ ID NO: 44117 - protein, 133 aa, Zea mays
  Coding DNA Sequence Number=SeqID_2338
MAVLNLQREVPVEYVHCYNEAVLLFAVRRRIRGLRLPLWAQGGQGPTRSPRAKESFPSGDLPPPFRLRPSTVSPSKRRIRGYSVRRRGKELRALCWRSRRLRVYGGSIGVHVNGWRVLEQLGVVVELRETCQP

SEQ ID NO: 44118 - protein, 79 aa, Zea mays
  Coding DNA Sequence Number=SeqID_2339
  Subcellular localization annotation: CTP_CleavageSite=40; ConfidenceScore=5.32e-01
MPPDVVFVTGVLASVVVRHMPPFGTSASLSLSLLTETSMRINEYMSLPPFPMRIFPHAALNGVLVHVYIVDGLKAAGHA

SEQ ID NO: 44119 - protein, 110 aa, Zea mays
  Coding DNA Sequence Number=SeqID_2340
  Subcellular localization annotation: CTP_CleavageSite=20; ConfidenceScore=5.39e-01
MGEEAPPPPSRAVVLPRRAAAAAHSSFRLPRRRKVHVVRLGGGARGRGPGPGLRRWLRRAAWRLAELCVAALSSGSGRPGEAYPPWADVERYFAAPFVPVARDRRRPARS

SEQ ID NO: 44120 - protein, 215 aa, Zea mays
  Coding DNA Sequence Number=SeqID_2341
MQRLISCVRSDNRMLHVDIGAPDTSARGDALREKAPSARSSATSDSLLPHDDASGSWGGARVPRDDGDGEWERTDLRFLNPITARVHRRAHLKLPVTPAPPTTPAPALGVAFGYPASSFGPDASPSISSRDASLDLLSRSPAISNHGSCDGDPHVTANAEIHRPDADRSPDLPPSPSVAFSVAPSVLAHGWHGGLIPSVRLQPDVVPRPCLRCGE

SEQ ID NO: 44121 - protein, 573 aa, Zea mays
  Coding DNA Sequence Number=SeqID_2342
  Homolog annotation: Hit_ID=Q651E8; Match level="QueryCoverage=25%, HitCoverage=89%, E-value=3e-40, Identity=57%"; Hit description =Putative UIP2
  Pfam annotation: Domain name=Skp1; Domain location=89-181; Score =72.4; E_value=1.5e-18; Accession=PF01466.9; Description=Skp1 family, dimerisation domain
  Pfam annotation: Domain name=Skp1_POZ; Domain location=10-70; Score =102.4; E_value=1.4e-27; Accession=PF03931.5; Description=Skp1 family, tetramerisation domain
  Pfam module annotation: Pfam domain module=Skp1::Skp1_POZ; Domain location=89-181::10-70
MAMAEKVKEKMLMLRSSDNQEFEVKESVAMQSMTLKKMVEDGCADKGIPLPNVTSHILVKVIEYCNKHAEPTGPGDAAGTTNRSAEDELNIFDADFVNVEHSTLLDLILAANYLDIKGLLNLARQTITDLINGKMPEEVCKTNIKNDLTIPSTSALATTMPSSERKQMEARFIAYMQETAEERMTGFAVRGEKYRKHGERPPQPPLEIVKYPALLERAWGWDSILPYCPVNSWPLYKTYLQEYYERNSREVLAHQVEANAASGPNLNGADENDLATLFNLCISREVQLLNLLKRRDQKHNVDEISLNEKLTNCARQITFVEYAGFPFPSVALKFINSIVPIANHGFKCIMAESDLLCMLLMCGTGMISQVNICSRIRKVAFRFMTYKGPGCFAAAATMMATTKEAKLMSGLLRNRCRENNGPFSRSVFIRKWTIAAMFRICEECSPVEESTGGYTATKLILDGSDDKNPCDKELVNKDNLLQRNKINQKYQGLFKGKTTKCRHPVQKQEPGDGGCGNHSSNECNMILLCSNARITQSGQSHLNCGAKTLGVFGYTPLKFSSCPIEYLNLRFGY

SEQ ID NO: 44122 - protein, 227 aa, Zea mays
  Coding DNA Sequence Number=SeqID_2343
  Homolog annotation: Hit_ID=Q5NRP5; Match level="QueryCoverage=79%, HitCoverage=57%, E-value=8e-20, Identity=31%"; Hit description =Putative mTERF domain containing protein, identical
  Pfam annotation: Domain name=mTERF; Domain location=1-208; Score =56.7; E_value=7.6e-14; Accession=PF02536.5; Description=mTERF
MDSFNECDRELQSNAVVFQPKKVITSSPQLLLRKPDQFMQNVLFFREMGVDKKTTGKILCRSPEIFASNVDNTLKKKIDFLTNFGVSKHHLPRIIRKYPELLLLDINCTLLPRMNYLLEMGLSKKDLCSMIFRFSPLLGYSIELVMKPKLEFLLRTMKKPLKAVVEYPRYFSYSLEGKIKPRFWVLQSRNIDCTLTEMLAKNDELFAEEYLGLGGLLEKPLQSSIGS

SEQ ID NO: 44123 - protein, 92 aa, Zea mays
  Coding DNA Sequence Number=SeqID_2344
  Homolog annotation: Hit_ID=Q10H93; Match level="QueryCoverage=43%, HitCoverage=5%, E-value=8e-10, Identity=82%"; Hit description =Expressed protein
MKFVDDSTSSKRQKKALQYDTDEDESMKSDSEENRDEDSDEAADKQEGKKVTKGKGESAEAVLPSKDDLRKITKILKKVDFNTALNYRLWQA

SEQ ID NO: 44124 - protein, 260 aa, Zea mays
  Coding DNA Sequence Number=SeqID_2345
MPLKNICSSVSAHTGVPEGFPILNNIRGNPLFWYRHTFATMNHPLLKYARKCTKLNGIGWDGMRCHGLHDPPIPSLYGLGGKGKEQEMKGSKSDFGVMAIQQVKSRGEMENEWEWEGGRWVDRRGTSTNNAALALAVKRSAKEIANAPSPVMPRMAVSSLLFVVAKSESEEWSVAVSEVEGFDGRKLSKGSIRGWRRGRDTKGEVVDGRGRDTRGRRWAVVSGSPVPTDATETEARPGKLMMSLSPDSLSGSWSGSNHTP

SEQ ID NO: 44125 - protein, 408 aa, Zea mays
  Coding DNA Sequence Number=SeqID_2346
  Gene Ontology: Mol. function=nucleoside-triphosphatase activity; Cellular component=membrane; Biological process=protein transport
  Homolog annotation: Hit_ID=Q5VRN1; Match level="QueryCoverage=79%, HitCoverage=77%, E-value=1e-106, Identity=54%"; Hit description =Putative cell survival CED-4-interacting protein MAC-1
  Pfam annotation: Domain name=AAA; Domain location=77-274; Score =252.4; E_value=9.3e-73; Accession=PF00004.19; Description=ATPase family associated with various cellular activities (AAA)
  Pfam annotation: Domain name=AAA_2; Domain location=73-215; Score= -48.4; E_value=0.044; Accession=PF07724.4; Description=ATPase family associated with various
  Pfam annotation: Domain name=AAA_3; Domain location=77-215; Score= -21.4; E_value=0.072; Accession=PF07726.2; Description=ATPase family associated with various
  Pfam annotation: Domain name=AAA_5; Domain location=77-222; Score =0.5; E_value=0.0016; Accession=PF07728.4; Description=ATPase family associated with various cel
  Pfam annotation: Domain name=SKI; Domain location=84-208; Score= -42.4; E_value=0.049; Accession=PF01202.12; Description=Shikimate kinase
  Pfam module annotation: Pfam domain module=AAA::AAA_2::AAA_3::AAA _5::SKI; Domain location=77-274::73-215::77-215::77-222::84-208
MTAEKSRRLITSDCGGGGADAKPEAPVSEGVVNGDKWPRFADLGGMEQVLDQLLVEVLVPLRRLELPNYLGVRPVAGLLLYGPPGCGKTTLAHAIANETGVPFYKISAPDIVSRVSGGSEENIRGLFQKAYRTAPSIVFIDEIDAIASKRENREMERRIVTQLMTCMDEFHQNIGGDGSDVDSSKKKPGYVIVIGATNRPDAVDQALRRPGRFNRDIYLGVPDVNLRKQILMMLAWKLRLEGQFDFLKIARATPGFVGADLKALVNNAGYLAMKRLINKRRAQYCSEVKVDEAAMLALEDRWRYLDSGTSMSPPFLIEPSHFEQALSKVKPSVSKKVEPALERLSGGDARGGNRSDPSQGEPPSPDPTRSDERLVGVLVVVEVEPALERPSGLQSELLRALLARDCAH

SEQ ID NO: 44126 - protein, 134 aa, Zea mays
  Coding DNA Sequence Number=SeqID_2347
  Homolog annotation: Hit_ID=Q6EPF2; Match level="QueryCoverage=33%, HitCoverage=11%, E-value=6e-18, Identity=93%"; Hit description=Ring zinc finger protein-like
MGPFGGIMIECGTNQPIEKVLAAEDAECCICLSAYDDSAELRELPCARMLQHSNNANELLLRRKLEEQQQAAELQHAIELQSRRLMGLQLLDLKARAAATAAAASALPTPVANAFASSHPLSTMAVESPLESGE

SEQ ID NO: 44127 - protein, 121 aa, Zea mays
  Coding DNA Sequence Number=SeqID_2348
  Subcellular localization annotation: CTP_CleavageSite=24; ConfidenceScore=5.09e-01
MKRKENSAHSASPLNRPRGKRKALAELPKSNGLNMNHDSAPRPSKPRTRSAARAEAEAAMKRQKAGDAAHWQMDTRQPDAESGGCAVRQGHPPVPPVSGVVDDVMGSFRMRADIVRFSAEI

SEQ ID NO: 44128 - protein, 328 aa, Zea mays
  Coding DNA Sequence Number=SeqID_2349
  Gene Ontology: Mol. function=starch synthase activity; Cellular component=chloroplast; Biological process=glucan biosynthetic process
  Homolog annotation: Hit_ID=Q8VYU1; Match level="QueryCoverage=98%, HitCoverage=60%, E-value=1e-126, Identity=66%"; Hit description =Granule binding starch synthase II
  Pfam annotation: Domain name=Glyco_transf_5; Domain location=1-103; Score=-55.5; E_value=2.6e-07; Accession=PF08323.2; Description =Starch synthase catalytic domain
MGRKMWMVHVYQKKKMVAFCIHNIAYQGRFARADFDLLNLPDSFLPSFDFIDGHVKPVLGRKINWMKTGIVESDLVLTVSPHYVKELTYGPDKGVELDGVLRTKPLEIGIVNGMDVYEWDPSTDKYTSVKYDATTVTEAKALNKERLQAEVGLPVDSSIPVIVFVGRLEEQKGSDILIAAIPEFVGENVQIIVLGTGKKKMEEELMQLEVKYPNIARGIAKFNVPLAHMMFAGSDFIIVPSRFPSVHHLEDLLTRLRRGVTGFHMGSFNVELATLCEDKDHRPFSSLVQGPAKKWEEVLLGLGVEGSQAGIDDAEEIAPLAKENVATP

SEQ ID NO: 44129 - protein, 217 aa, Zea mays
  Coding DNA Sequence Number=SeqID_2350
MEELSAQSSARIVGDLLLLETRKHGGAQIVPNLLLLETGGAEEGAPILPTVDVARRKGTMTTVRGSWPTFHYWRTGGVEEGVHGRFRYGGLKRNFLPNSSAGGGLERQGLRNQRGWGAESAGVDGGITGAPYQQPRGRKSSFARLSTPAVAARIPIPAPPPSPPSSSDPLNLDPTAIERLPVLAPPRASLSPRRRAPLCLRASLSPALGGIASPHYV

SEQ ID NO: 44130 - protein, 318 aa, Zea mays
  Coding DNA Sequence Number=SeqID_2351
  Gene Ontology: Mol. function=ATP-dependent helicase activity; Cellular component=nucleus; Biological process=mRNA processing
  Homolog annotation: Hit_ID=Q5Z9X4; Match level="QueryCoverage=95%, HitCoverage=28%, E-value=1e-59, Identity=45%"; Hit description =Putative RNA helicase
  Pfam annotation: Domain name=S1; Domain location=114-185; Score=51.1; E_value=3.8e-12; Accession=PF00575.13; Description=S1 RNA binding domain
MAAATGAGAVGEGMRRLTQLSLVSKVCSELESHLGVADRVLAEFVVELGRASASAAAFAAALRDHGAELPDYLVRSLHAVITAIPDSAPAPPASRGAGARGRVDKAAGEDEDQEPGLHQVRRGRVTRVANAGCFVRLDGGREGLVHVSQMPARGRGRAGATVTLGQEVFVKVVSVDGAKLGLSMLDIDQDTERGLHPMRRPHPAEEDAPRANPPADRPRPAGRKKGVSGIFVSDEDDDDKAGPPTRRPTRRMTSPERWEVKQLIAAGVLDAKNYPVLDEDEEGMLYQEEEVEELEIELNQDEPPFLWGKGRSSSDMSP

SEQ ID NO: 44131 - protein, 172 aa, Zea mays
  Coding DNA Sequence Number=SeqID_2352
  Homolog annotation: Hit_ID=Q2QNZ0; Match level="QueryCoverage=36%, HitCoverage=8%, E-value=3e-12, Identity=50%"; Hit description =Expressed protein
MNHGVKQEQNPKPRSHSHRLGLIDEKWPEVMFINDYAVFIGYLSMAVTGTGFLVLTWSTVVLLGGFVTVLAKKDFWCLTVITLVQTRCSIFVGMGDPTNDFDPHGFEYGGKYVPTSGYGFPDIVVFVACTFIDMARMTIIVLVTLSAPLGMGTLDATIKLCFHGRIGYRPHL

SEQ ID NO: 44132 - protein, 324 aa, Zea mays
  Coding DNA Sequence Number=SeqID_2353
MASPQAFVWCRMERRSGEVAVCGIRDVVGGRGQAWARRRIRSRTELDVGQGGEIARRLDPGSDKAERLRPWAGSYFGQGREILLKGPSARLVVLGVPSEGARRRVRTLLHRRNHAAAPDEIDVLLGRYGLSDGDLGRGGVSGIDLGRGRAWLEVLFDPRSYRGSLSERFARVAPKPLHGATGRSRDVSTFGSYAPSLPLYEEEDGECVMLPSLGNEHDVSTELLTGDPSRGPSSFRLGVSLRSEDTPQRYLRVIRLVPDPFDGVRGLDASLRWDTDTNRSWGSRICLKPFRGANLRTPDQYWARSPEVLRRFIGTLLRAEPSNL

SEQ ID NO: 44133 - protein, 253 aa, Zea mays
  Coding DNA Sequence Number=SeqID_2354
  Homolog annotation: Hit_ID=Q6Z0Z4; Match level="QueryCoverage=27%, HitCoverage=15%, E-value=9e-11, Identity=53%"; Hit description =Putative HGA1
MGIMAMACTLSGRWRRAAADAGFEVRVAEPDHHSDMDTFVVLVNSAGWACTAPAHRHGVSAHGSVLIQMVSFDGLGWLTGVTFKDLMAVALGVLRQRLPLHDCHTRRRHGWCRRHGQRRRHGRRRHVIWHAVANYGTWVFVFIFGYEYNMGVQLTGLPASVTAMNMGIMAMACTLSGRWHRAAPDVGFEVRVAEPNHHSDMGTFVVLMVSFDGLGWLTGVTFKDLVADMEEGVQQGEWIRDCLGDLGHPQGSE

SEQ ID NO: 44134 - protein, 118 aa, Zea mays
  Coding DNA Sequence Number=SeqID_2355
  Homolog annotation: Hit_ID=Q9S7B2; Match level="QueryCoverage=26%, HitCoverage=8%, E-value=9e-07, Identity=78%"; Hit description=Rough sheath 2
MAVTEAGRPLLEVVEVAVQEVMPHGEVWRHDELRDAAVHVVDAAHVAGTTHVASAYGSRGGASAGGALRVLPQAGGAAACVGDAPAGGGVREMRRREVEKNRIKAIQQKSAVDDCQNG

SEQ ID NO: 44135 - protein, 60 aa, Zea mays
  Coding DNA Sequence Number=SeqID_2356
MTKVMLVEGVQGSKNGTKGIPSTLMVALLSRVVTPQTGPYGEVLRKEPEPPKVITRTPSG

SEQ ID NO: 44136 - protein, 143 aa, Zea mays
  Coding DNA Sequence Number=SeqID_2357
MGPLFLLSLRTLPPHPDVNPHSLISVGDDRGRRFAEGLVVLFPPLLSAAVAQSLGYGSSRQLLSQQPRSGHLAADGYVGWKRNRVACSWIKQTGWACLSARCGAKLGRAQGERAWADQALSAQAQVKDRYHEIWSMKDAAMST

SEQ ID NO: 44137 - protein, 306 aa, Zea mays
  Coding DNA Sequence Number=SeqID_2358
  Gene Ontology: Mol. function=oxidoreductase activity; Cellular component=membrane
  Homolog annotation: Hit_ID=Q6AV51; Match level="QueryCoverage=54%, HitCoverage=24%, E-value=7e-75, Identity=75%"; Hit description =Putative HIPL1 protein
TKGGNYGWRVYEGPYIFHPQKSPGGNTSPESINAIFPVMGYDHSAVNKEIGSASITGGYVYRGSADPCLYGRYLYTDLYSSLMWTGTEAPEGSGNYTSAVKPVSCSKASPIGCESVAGSTDPLLGYVFSFGEDSRKDVFVLASKGVYRVVRPSLCGYTCPAERPATDNGTAPGPGGPSSGAPAATRLGRSVAAVAVALALIPKGLLEGAEESALVPNAAAAPRFWPRGTSLSSGGCASSCWDGMPSRRPRRVVRRRGRPNGETGAICALFNNSTADGSQRNKNPMMRSSLSTFVGCVPTRGPGRTV

SEQ ID NO: 44138 - protein, 157 aa, Zea mays
  Coding DNA Sequence Number=SeqID_2359
  Gene Ontology: Mol. function=transferase activity
  Homolog annotation: Hit_ID=Q69QD7; Match level="QueryCoverage=44%, HitCoverage=18%, E-value=2e-26, Identity=83%"; Hit description =Putative ethanolamine kinase 1
  Subcellular localization annotation: CTP_CleavageSite=82; ConfidenceScore=5.04e-01
MAAGSGYGGGVEAKATTTAVSAAAPAEVPTSAASVDISLPLLKMSPRIMQVPRPHIYLRSSCFGSRSRSRLRPAWSRLLKVSVKEDNGNESSVTVRLYGPNTDLVIDRKRELQAIPYLSAAGFGARLLGIFENGVVQSFIYARTLSPAVSVAISNAS

SEQ ID NO: 44139 - protein, 140 aa, Zea mays
  Coding DNA Sequence Number=SeqID_2360
MAPRGCGLHGSGTRQYAGYGTTAGGSGQRNGPHVLLALIHVRLALLTIITQSLVVLVVACFELAWHIDASRCEAFVAQTLPYLVALALTSDSSTKSILHCLFTIRNVLSLHDYDDDQSYNDDGGGGSTFVGGKRRECEWW

SEQ ID NO: 44140 - protein, 297 aa, Zea mays
  Coding DNA Sequence Number=SeqID_2361
  Gene Ontology: Mol. function=nucleic acid binding; Cellular component= intracellular; Biological process=chromatin modification
  Homolog annotation: Hit_ID=Q5N712; Match level="QueryCoverage=96%, HitCoverage=23%, E-value=1e-123, Identity=71%"; Hit description =Putative floral activator, relative of early flowering 6
  Pfam annotation: Domain name=JmjC; Domain location=217-296; Score =23.6; E_value=5.4e-06; Accession=PF02373.13; Description=JmjC domain
  Pfam annotation: Domain name=JmjN; Domain location=20-64; Score=35.4; E_value=2e-07; Accession=PF02375.7; Description=jmjN domain
  Pfam module annotation: Pfam domain module=JmjC::JmjN; Domain location=217-296::20-64
MASSQGESVPPWLKSLPLAPEFRPTVAEFADPIAYLLKIEPAAAPFGICKIVPPLPPPPKRTTLGNLSRSFAALHPDDPTPTFPTRHQQLGICPRRPRPALKPVWLSPHRYTLPKFEAKAGASRKALLARLNVPASKQLSPLDVEALFWRSSADRPVVVEYASDMPGSGFAPCAARLTQLPPANVGETAWNMRRVARSPASLLRFVREEVPGVTSPMLYVGMMFSWFAWHVEDHDLHSLNYMHYGAPKTWYGVPRDAALAFVEVVRVHGYGGEVNSLGEAAALHRFPTLLLNLRDAG

SEQ ID NO: 44141 - protein, 444 aa, Zea mays
  Coding DNA Sequence Number=SeqID_2362
  Gene Ontology: Mol. function=protein-tyrosine kinase activity; Cellular component=integral to membrane; Biological process=protein amino acid phosphorylation
  Homolog annotation: Hit_ID=Q69UH7; Match level="QueryCoverage=91%, HitCoverage=92%, E-value=1e-101, Identity=63%"; Hit description =Putative SERK1 protein
  Pfam annotation: Domain name=LRRNT_2; Domain location=23-64; Score =32.9; E_value=1.1e-06; Accession=PF08263.3; Description=Leucine rich repeat N-terminal domain
  Pfam annotation: Domain name=LRR_1; Domain location=116-138; Score =6.4; E_value=18; Accession=PF00560.23; Description=Leucine Rich Repeat
  Pfam annotation: Domain name=LRR_1; Domain location=68-90; Score=2.7; E_value=88; Accession=PF00560.23; Description=Leucine Rich Repeat
  Pfam annotation: Domain name=LRR_1; Domain location=92-114; Score =10.3; E_value=3.4; Accession=PF00560.23; Description=Leucine Rich Repeat
  Pfam annotation: Domain name=Pkinase; Domain location=172-440; Score =28.0; E_value=3.1e-10; Accession=PF00069.15; Description=Protein kinase domain
  Pfam annotation: Domain name=Pkinase_Tyr; Domain location=172-440; Score=43.0; E_value=4.1e-15; Accession=PF07714.7; Description =Protein tyrosine kinase
  Pfam module annotation: Pfam domain module=LRRNT_2::LRR_1::LRR_1::LRR_ 1::Pkinase::Pkinase_Tyr; Domain location=23-64::116-138::68-90::92 -114::172-440::172-440
MATTSFRSLLLLFLSVLGASARNEEDARALAALKRALDPAGRVLGSWDPSGDPCAGSFVGLTCGRDGRVTAVSLQGRGLSGTLPPAVAGLRRLQGLYLHYNGIKGPIPREIGKLSELTDLYLDVNHLTGPVPVEIAAIANLQGGAGVGSPGQVVGDSFRFNLEEVECATQYFSDVNLLGKSGFAAATYKGILRDGSVVAVKSLSKTSCKQEESDFLRGLKMLTLLQHDNLVSLRGFCCSRGRGECFLVYDFMVNGCLSRYLDVKDGSSGATVLDWPTRVSIIRGIAKGIEYLHSKKGSKPPVVHQNISADKILLDHHLAPRLSVPGLHKLLADDVVFSALKASAAMGYLAPEYAATGRFTDKSDVFAFGVVVLQVLTGRRDVSQLKVGAAAVSDLGGLVDANLDGAFSRTEAARLAAVAAYCTSETPGQRPTMEAVVQQLSSTQ

SEQ ID NO: 44142 - protein, 328 aa, Zea mays
  Coding DNA Sequence Number=SeqID_2363
  Gene Ontology: Mol. function=aminoacyl-tRNA ligase activity; Cellular component=cytosol; Biological process=tRNA aminoacylation for protein translation
  Homolog annotation: Hit_ID=O82108; Match level="QueryCoverage=56%, HitCoverage=40%, E-value=1e-100, Identity=95%"; Hit description =Seryl-tRNA synthetase
  Pfam annotation: Domain name=tRNA-synt_2b; Domain location=1-93; Score=-22.4; E_value=0.00057; Accession=PF00587.15; Description=tRNA synthetase class II core domain (G, H, P, S and T)
YAGYSTCFRKEAGSHGRDTAGIFRVHQFEKIEQFCITSPNGNDSWEIHEEMLKNSEDFYKEIGLPYQVVSIVSGALNDAAAKKYDLEAWFPASKTFRELVSCSNCTDFQSRRLGIGYGQKKNDEQSKQFVHMLNSTLTATERTLCCILENFQKEDGVEVPKALQPYMGGIEFLPFKQPLDAKQAADSKSNKSKSKPSRDRPSLAEAKQRRHHHHHPTRPPPSATAAACLRLASLQAPGIHLPHCSRPAATCTVLPPSFVSRPPVSSVPAVTRFSLSFLAKATQQRSWLGSALACFLAFLGLFDSRAAARFLVLWIGPAGGIMLVWFAA

SEQ ID NO: 44143 - protein, 312 aa, Zea mays
  Coding DNA Sequence Number=SeqID_2364
  Gene Ontology: Mol. function=calcium-dependent phospholipid binding; Cellular component=plasma membrane; Biological process=cell differentiation
  Homolog annotation: Hit_ID=Q6L4C5; Match level="QueryCoverage=88%, HitCoverage=77%, E-value=1e-109, Identity=71%"; Hit description =Putative annexin
  Pfam annotation: Domain name=Annexin; Domain location=114-173; Score =32.7; E_value=1.3e-06; Accession=PF00191.10; Description=Annexin
  Pfam annotation: Domain name=Annexin; Domain location=192-257; Score =13.8; E_value=0.0023; Accession=PF00191.10; Description=Annexin
  Pfam annotation: Domain name=Annexin; Domain location=267-312; Score =12.1; E_value=0.0033; Accession=PF00191.10; Description=Annexin
  Pfam annotation: Domain name=Annexin; Domain location=42-107; Score =94.4; E_value=3.5e-25; Accession=PF00191.10; Description=Annexin
  Pfam module annotation: Pfam domain module=Annexin::Annexin::Annexin:: Annexin; Domain location=114-173::192-257::267-312::42-107
  Subcellular localization annotation: CTP_CleavageSite=39; ConfidenceScore=5.27e-01
LPFLRFSGLALPGGGGAAAAASPPVVSMASISVPSRAPSAAEDAENIRKAVQGWGTDEKALIEILGHRTAAQRAEIAVAYEGLYNEPIIDRLHSELSGDFRSAMMLWTVDPAARDAKLAHKAMKKQGERYVWVLIEVACASAPDHLVAVRKAYREAYSASLEEDVAARFLVRLVSSYRYSGELVDDELARAEAAELHDAVVARKQPLHGDVVRVVSSRSKAQLKATFERYRLDHGKAVDEVLEERRSDQLAAVLKTAVWCLTSPEKHFAEVIRSSIVGLGTDEESLTRAIVSRAEIDMKKVKEEYRARYRTT

SEQ ID NO: 44144 - protein, 104 aa, Zea mays
  Coding DNA Sequence Number=SeqID_2365
MEQGYVYGRAGGRPARVPFGRTSSHRAHYCALVKGPHANRPLPRATSPPRLCSHVPTPSPQIAVCRGRIGTKPGLGALAPSACSSVTHALWALFGLWLNVPHFV

SEQ ID NO: 44145 - protein, 58 aa, Zea mays
  Coding DNA Sequence Number=SeqID_2366
MAILRRGTVLRHGQSMSTSYVGSGLYDLIRAIHFMSYGSDEPYLFTEHFLQKGPSGLG

SEQ ID NO: 44146 - protein, 141 aa, Zea mays
  Coding DNA Sequence Number=SeqID_2367
MGKSNKRKREPTPPSEDFGDSEYSEEEFSSKSEGSPAPVSPPASSDDSDDSQGIVAEVWTYIQAIERSRLEGSDESVYSSDEEDSLEEDGDGDDDGDGGDGGDDGDDGGRGGNGDGRGGNGGSSRGSNDGGSSKGSNKASG

SEQ ID NO: 44147 - protein, 123 aa, Zea mays
  Coding DNA Sequence Number=SeqID_2368
MGFRINRYGFGYFRFRASGLGFMPRSNRDGLLDKGINWEGAIPMAAEVLDLETLDTDDEGEHGDGWERFANTSDKIEQVHLATLILDNNHPARRAERYKLTWVHMAQTRWEGADGDLAVGAHD

SEQ ID NO: 44148 - protein, 197 aa, Zea mays
  Coding DNA Sequence Number=SeqID_2369
  Subcellular localization annotation: CTP_CleavageSite=69; ConfidenceScore=5.56e-01
SVTQRTPPAAPRVRPLWPPAARPSARRPGPPLMARLPAVRPSALPAAASAPGNAAPLLPPRRPRPPPPRGAAPSPPPWRGSLASPGAAPWPPHARPLGPLRAASAFGSVDPSAVPERVPAQFLRTSPFTQRVPASAAPRARNLGAVRFAVVPLMGLSVCGSLCQGGDEDDGYDYDYGNGEDEAVEGDFQEFQDYDEF

SEQ ID NO: 44149 - protein, 109 aa, Zea mays
  Coding DNA Sequence Number=SeqID_2370
  Homolog annotation: Hit_ID=Q5N712; Match level="QueryCoverage=80%, HitCoverage=6%, E-value=2e-32, Identity=68%"; Hit description =Putative floral activator, relative of early flowering 6
  Pfam annotation: Domain name=JmjN; Domain location=20-60; Score=29.0; E_value=1.3e-05; Accession=PF02375.7; Description=jmjN domain
MASSQGELVPPWLKSLPLAPEFRPTVAEFADPIAYLLKIEPVAAPFGICKIVPSLPPSSKRTTLGNLSRSFVALHPDDPTPTFPTRHHRLFASSAASVTDWIRRAPDQD

SEQ ID NO: 44150 - protein, 132 aa, Zea mays
  Coding DNA Sequence Number=SeqID_2371
MAVVACTDTVARMEHDMDFGKPRLERPRLRPEQPYIPHWFQNRLAQREGRTYLSFASFVLAAIPPRPLHSPHDVSPNHHDRLGGLHKDLLDLVAAACLLSLDLLLFRVVYGSWRIAVAAFTARHSCTRLDCP

SEQ ID NO: 44151 - protein, 560 aa, Zea mays
  Coding DNA Sequence Number=SeqID_2372
  Gene Ontology: Mol. function=ubiquitin thiolesterase activity; Cellular component=nucleus; Biological process=ubiquitin-dependent protein catabolic process
  Homolog annotation: Hit_ID=Q1SM56; Match level="QueryCoverage=91%, HitCoverage=49%, E-value=1e-162, Identity=54%"; Hit description =Peptidase C19, ubiquitin carboxyl-terminal hydrolase 2; Ubiquitin carboxyl-terminal ...
  Homolog annotation: Hit description=hydrolase, N-terminal region 1
  Pfam annotation: Domain name=UCH; Domain location=104-443; Score =215.7; E_value=1e-61; Accession=PF00443.19; Description=Ubiquitin carboxyl-terminal hydrolase
MSRPNTRNKNKRPRADESNSPSVAVFKKIHSTGDISKSDICQLYMVWKPLCHGCHGNSKDSPNCFCGLIPIGNGVRKSGLWQKTQEIIRGLGPNPSSDLRDSSETPAGLTNLGATCYANSILQCLYMNTSFRSGIFSLDLDVLKKHPVLDQLVRLFAQLQSSKMAFIDSTPFIKALELDNGVQQDSHEFLTLFLSLLEQSLSHSKVPGTREIVQHLFRGSVSHVTRCSSCGKDSAASSKSEDFYELELNIKGFNNLEESLDDYFSEEGLVGENQYFCESCQKRVDATRCIKLRSLPPVVNFQLKRYVFLPKTTTKKKISSSFSFPGQLDMGKRLSNPTSSYTYELAAILIHKGTAANSGHYVAHIKDESNGQWWEFDDETVSKLGLHPFGENLGKTSNKDDRKPQGISIEGSVTNNNNGHQEAASSSSPGEMFSSTDAYMLMYKCTNKDGNATESNKIMEFNNSLLPHHFLDEINEQNASCMKSCEEYQSKKGSHLAYITERRQEVKSILIEAPANPEDNSYFWISTDWLRQWADNITPPLNVEGQQQVASDRLSAFRYG

SEQ ID NO: 44152 - protein, 138 aa, Zea mays
  Coding DNA Sequence Number=SeqID_2373
MEAPDCPVCTGQCPVRQRLQDCNGRLLHFWKEIRHRTVSGGAPDCPVRHPTEGKICLPGLLPTAPRPLVPIKGTPRRLKQGHIETGSSIPLQPTRRVFTPLRSSLRVERHPDLIPEPKGTFRNPRDPKALLKENSKRI

SEQ ID NO: 44153 - protein, 111 aa, Zea mays
  Coding DNA Sequence Number=SeqID_2374
MEARRPLRYQVHGRRSKRLRNPKPRVKKKTCKVKGHSREKPTAYGYNSPDCPVVHRTVREWRSAAKSKSKVLSVSLLCRSAAKKIDILRQDLLFRCNLLEGSSLHCVLVFE

SEQ ID NO: 44154 - protein, 153 aa, Zea mays
  Coding DNA Sequence Number=SeqID_2375
  Homolog annotation: Hit_ID=Q8H6I1; Match level="QueryCoverage=26%, HitCoverage=7%, E-value=2e-08, Identity=65%"; Hit description =Putative MURAZC
MANEVGAPLGRRGVGRQRKNRIKGCLEGGRGKKACANETVKQWKLVCILIGQGSSDITQKWFPRDDRFTQEPRTPHFDKVIQDPDYIYQTYYISFRLMCFLFVPCISGSLNALGKEEESHEKGRGKTGSLNVAPWLTPSVLSSKCERTSAFNH

SEQ ID NO: 44155 - protein, 126 aa, Zea mays
  Coding DNA Sequence Number=SeqID_2376
MAFLSHTVNNARPHHMGRSRGTIWQGKMIHPGCVSRAEPSQGSARPLYAQPGPPIVARDSRVSVSGLLDGVRIPPSKVRATTRSRDRGNPGRSKGPVLMCGQALLCTCAPRSGGDPMRPRGSLPVT

SEQ ID NO: 44156 - protein, 137 aa, Zea mays
  Coding DNA Sequence Number=SeqID_2377
  Subcellular localization annotation: CTP_CleavageSite=67; ConfidenceScore=5.45e-01
MNMPHVLFQYADNRIRKTLSTFYSTSQSSTQPPPPAARVVPDGCRCRGPIPALGGAHRQRRSPVPTVAATTAPSQRVGDAQQASRSSAAAHPVVRWHPHSRDHGPIPLRRRPTAVPSYSTSPANSSRRTLLSTVSPT

SEQ ID NO: 44157 - protein, 125 aa, Zea mays
  Coding DNA Sequence Number=SeqID_2378
MGKGKRGRSSPHHVGDKRKRDPSPPSEDFDDSEYLEEEGIATEVCTYIRFVERARLEESDESEVSSDEEDSFRSSEERSGDDSDDEGGDDGDDSDGDKGEDGGGKGDDGGSGSGGKASGKAPLFK

SEQ ID NO: 44158 - protein, 33 aa, Zea mays
  Coding DNA Sequence Number=SeqID_2379
MVVGASVERLGRVEEREIVRWAELRVGDPSVVE

SEQ ID NO: 44159 - protein, 61 aa, Zea mays
  Coding DNA Sequence Number=SeqID_2380
MEIEVIQHCYSLDNHSLLTKMWAPNNKVMRNKFATEDEEDNEEYCPSEDEELDDEDDQIFH

SEQ ID NO: 44160 - protein, 130 aa, Zea mays
  Coding DNA Sequence Number=SeqID_2381
  Subcellular localization annotation: CTP_CleavageSite=86; ConfidenceScore=5.57e-01
MARGPASPARPPLPVRATPAAPVRARPAALARDARGRGASAPARPTSRPVLGAACPRGLARGAAPRPRAVGLGVAPLPLAARNAVRARLGPRHVRGLSATRQRGLARTCSRGARGALARLAVPSARSSTP

SEQ ID NO: 44161 - protein, 57 aa, Zea mays
  Coding DNA Sequence Number=SeqID_2382
  Subcellular localization annotation: CTP_CleavageSite=30; ConfidenceScore=5.39e-01
MAACPRRGSSALAPPPPVSGSRTPSSPTINARAEATLPTDLKYGSARTRVTPITQPS

SEQ ID NO: 44162 - protein, 95 aa, Zea mays
  Coding DNA Sequence Number=SeqID_2383
MASRAQQGNPRQRHGGEVGMEEWLGKGLGWEIRPGASAKDSLREREEEAESSAGESRAARLDAAAGEQGETQREKKDVWAQEHARHWEKLSWPRR

SEQ ID NO: 44163 - protein, 181 aa, Zea mays
  Coding DNA Sequence Number=SeqID_2384
MGRGKGWPHRADGKRKRPPSPPSEDFGDSEYSEEVSSEYDRSPAPTSPVASSEDSDDSMGLSTMARAYWCSIERVGLDESDVSEEVEDSFDSEEWSGGEGDGGEGDGGEYDGSSGDDDGKGGGDGDDEDVNGKDGDGEGDSRGDDNGSGKGDDKGDSDGKGDDDGKGDDGDNEADNIMLLA

SEQ ID NO: 44164 - protein, 101 aa, Zea mays
  Coding DNA Sequence Number=SeqID_2385
MPMISHFLPLCVRNCSPEQGCAVAEPFRHGPPPSGAPAPGIVPAVVFTSSPRTHLFPSQRPRAPACPRPRLRRSSAKESGGAATGNPGTQAEFVVGSQASI

SEQ ID NO: 44165 - protein, 451 aa, Zea mays
  Coding DNA Sequence Number=SeqID_2386
  Gene Ontology: Mol. function=amino acid binding; Biological process =metabolic process
  Homolog annotation: Hit_ID=Q1S8K5; Match level="QueryCoverage=98%, HitCoverage=99%, E-value=1e-125, Identity=55%"; Hit description=ACT domain, putative
  Pfam annotation: Domain name=ACT; Domain location=126-189; Score =37.2; E_value=5.6e-08; Accession=PF01842.15; Description=ACT domain
  Pfam annotation: Domain name=ACT; Domain location=257-329; Score =19.0; E_value=0.014; Accession=PF01842.15; Description=ACT domain
  Pfam annotation: Domain name=ACT; Domain location=30-93; Score=10.1; E_value=0.2; Accession=PF01842.15; Description=ACT domain
  Pfam annotation: Domain name=ACT; Domain location=336-399; Score =38.2; E_value=2.9e-08; Accession=PF01842.15; Description=ACT domain
  Pfam module annotation: Pfam domain module=ACT::ACT::ACT::ACT; Domain location=126-189::257-329::30-93::336-399
MDDHDEYAKLVRRMNPPRVVIDNEASDDATVIKVDSVNSHGTLLAVVQVIADLNLVIRKAYFSSDGNWFMDAFNVTDRDGNKVLDASTISYIQKLPYCSSQTLEVDDWYYPGAHNTVGIVPSGDYTSIELTGTDRPGLLSEVCAVLAAMGYAVQSAELWTHNTRVAAVVHVTDAETGGAIEDSARIADISARLGNLLREHSDVRAGGGAGSLALHKERRLHQMMFDDRGVEGHAAAAPPDGSLRTEVSVTHAERGYTAVVVRCRDRPKLLFDTVCTITDMEYVVHHGTVSAEPGGGAYQEYYIRHVDGHAIRCEDEQQRLVRCLAAAIERRTADGLELEVRTGDRAGLLSDITRIFRENGLTIRRAEISSSDGEAVDTFYLSDPQGLPVETKTIEAIRAQIGEATLRVRNNPFGTGDDADMAGAGTTAFIFGNLFKFYRPFQSFSLIKLYS

SEQ ID NO: 44166 - protein, 131 aa, Zea mays
  Coding DNA Sequence Number=SeqID_2387
  Gene Ontology: Mol. function=galactosyltransferase activity; Cellular component=membrane; Biological process=protein amino acid glycosylation
  Subcellular localization annotation: CTP_CleavageSite=33; ConfidenceScore=5.05e-01
MAAEPIRTALLFLVLLALASSVAAASTAPAPARAPTATGCRRGDLVVRQRATGRVVEGKPEYAVEVRNACRCAQSRVLLRCYGLSSVGGRGPARHPRRGRPALPPRGGAVRFTYAWMTPQDFPLLSSRPHC

SEQ ID NO: 44167 - protein, 142 aa, Zea mays
  Coding DNA Sequence Number=SeqID_2388
MTPLAHQKVQCSLVTIGEVHASPTDCAVDRWRGHDCYTGQSVNNSEDALGKRLYEAIIQPTKRIVNTFSRHCSPSFPYVIVTKLNIFAIVLNLFRRRQSLGVVPLGGLSTSARMARDLGSDSLRSGSRSEVPYAELDGPLSG

SEQ ID NO: 44168 - protein, 65 aa, Zea mays
  Coding DNA Sequence Number=SeqID_2389
MKGLLLGVCFVAEDDEPPVVLECVAEDLPEQQPGDSGHFPEYLSCSGGDAGNMEDFEEFQDYDEF

SEQ ID NO: 44169 - protein, 66 aa, Zea mays
  Coding DNA Sequence Number=SeqID_2390
  Subcellular localization annotation: CTP_CleavageSite=35; ConfidenceScore=5.14e-01
MDHWIKIQRFTTFLSSIRPRPFATDQRTKPRYPPRRHSGTNERPNECGGGSPEPHPEGTPEHRFPI

SEQ ID NO: 44170 - protein, 216 aa, Zea mays
  Coding DNA Sequence Number=SeqID_2391
  Homolog annotation: Hit_ID=Q76H00; Match level="QueryCoverage=35%, HitCoverage=7%, E-value=3e-12, Identity=56%"; Hit description =Histidine kinase 2
  Subcellular localization annotation: CTP_CleavageSite=28; ConfidenceScore=5.59e-01
MALLPPLDLAAVARVPSVARARPGSRTTASASPSPTATLLTGERLVVFLFTTPVHLAVLLVILVAAALVVELAQDGSRCAPLRSSLPQGAERLSPCASAVADRSSHARQAGAVRALAGIGASRRSSKTKMQSHGPQNIEGTELREQAVEYAPVIFAHDAYKHFISFDLLSGAATIYCYHLFTYDFSSFFLTGSTITHGAPGIKMGQIDRIEKELES

SEQ ID NO: 44171 - protein, 530 aa, Zea mays
  Coding DNA Sequence Number=SeqID_2392
  Gene Ontology: Mol. function=transferase activity, transferring glycosyl groups; Cellular component=membrane
  Homolog annotation: Hit_ID=Q10SF6; Match level="QueryCoverage=89%, HitCoverage=92%, E-value=0.0, Identity=73%"; Hit description=Fringe protein, putative, expressed
  Pfam annotation: Domain name=DUF604; Domain location=245-502; Score =527.2; E_value=1.8e-155; Accession=PF04646.3; Description=Protein of unknown function, DUF604
  Pfam annotation: Domain name=Fringe; Domain location=107-348; Score= -72.0; E_value=0.00092; Accession=PF02434.7; Description=Fringe-like
  Pfam module annotation: Pfam domain module=DUF604::Fringe; Domain location=245-502::107-348
MRGGGAGEKLHHKEANAAHGAGAGAAGKGAKACFVNGLLLYVVLPVLVLYFVIIAASQFYNPRCSPEGKAMATHFVVANKPNASLNGSTPPPATLASSKTRPTAEEAPTGLRHIVFGIGASASLWESRKEYIKLWWRPGRMRGFVWMDKPVGEFYSKSSRTGLPAIMVSSDTSKFPYTHGAGSRSALRISRIVSETFRLGLPGVRWFVMGDDDTVFLPENLVHVLSQYDHRQPYYIGSPSESHIQNLIFSYGMAFGGGGFAISRALAEELAKKQDGCLHRYPALYGSDDRIHACMSELGVPLTRHPGFHQCDLWGDVLGLLGAHPVAPLVTLHHLDFLEPVFPATPSRAGALRRLFDGPVRLDSAAVAQQSVCYDHARQWTVSVSWGFAVMVVRGVLSPREMETPMRSFLNWYKRADYTAYSFNTRPVARQPCQKPHVYYMRGSRMDRRRNLTVTEYERHRAKHPGCRWRIADPAALLDSIVVLKKPDPDLWKRSPRRNCCRVVSSPKQGKNRSMTIDVGVCSEGEFAKV

SEQ ID NO: 44172 - protein, 132 aa, Zea mays
  Coding DNA Sequence Number=SeqID_2393
  Subcellular localization annotation: CTP_CleavageSite=19; ConfidenceScore=5.04e-01
MHLALSLKAGCDNGARRKRSAGDAGLASPLSATPTSGVTDGPFKNTKTLEAPINQRPGVQARPPKQRPGASARAASTVQAGVHAVQRPSRPHRTARPTDRATVARLPEAPSDQDSVYCSRRRHRRTDPCLQL

SEQ ID NO: 44173 - protein, 330 aa, Zea mays
  Coding DNA Sequence Number=SeqID_2394
  Homolog annotation: Hit_ID=UPI000065FD2B; Match level="QueryCoverage =26%, HitCoverage=42%, E-value=4e-11, Identity=39%"; Hit description =Homolog of Homo sapiens "RNA binding motif protein 18
  Pfam annotation: Domain name=RRM_1; Domain location=167-252; Score =51.8; E_value=2.2e-12; Accession=PF00076.12; Description=RNA recognition motif. (a.k.a. RRM, RBD, or
MSRTKLGSRRSTSRSYGDLDCRRPPWARRPSKTWWPSGDRRPEQLNLPARRLNRSAQRPNLRPAGGRWSPGGRIGKWGLGGVGLLVGFRWRLPSWSTGHRGWQAGISDGVKGAARQHASGQQGAPGRWAAAGDSFYELSVYGLGGSTEHPNPNDIKGLEADKLECRLYVGNLDFRMSESDVIKMFSPFGKITAEDFLWHTRGPKRGEPRGYAFVQYTTKEFSPLAPDVSIQEAQLAKEKMNGKLICGRPMVVHLASERSSLGSSSSHRAVKDKKLAGGSGAKSQYTDTAAKIAAIKNKLKSLEDGGCSTKKPRLNPDNLTEIREQSHKKF

SEQ ID NO: 44174 - protein, 60 aa, Zea mays
  Coding DNA Sequence Number=SeqID_2395
MEVNRTAHLSICDCIKIATMCLPISICLRHQQLNLIVVLLLLEHEPYSIMLEHVMLALRV

SEQ ID NO: 44175 - protein, 201 aa, Zea mays
  Coding DNA Sequence Number=SeqID_2396
MGAVYLVPLPDNLALPVFPFPCALSPRTQPPPTGIVDGERVRDRGTDLPHARGIGMDGLGSLVDGELRCLRCRRGAEKDLVATRISHPCRCSAVEPLAPWSENISILTIALPGLGSRAQDRHPAGSPAMPRRGHRQRRRYQAWAMGVEYGPSIPDEGLGFDPGFWFGLNSSQSSDVDPARDNRPKDLKSRRLVEDPTARIV

SEQ ID NO: 44176 - protein, 214 aa, Zea mays
  Coding DNA Sequence Number=SeqID_2397
MWRRCLLRKRRVWPSGQLASPKTWRPQAWRSCVAFQPVDDRDEGGHSYQGDESHDCEDRWVEDEHPEYWGKAKAHKSGWVEPPPMIALLRRGPFGGRRCARSGPLREDVTKLLAELATLKVGVEDTEAPMQVGVEFRNLLSAVNALALEGCRHFKPLRYIDLDFDRASRTWGGGFKTECDWGTPRDAEAITVAATENIDISRAGDDMAKETQQV

SEQ ID NO: 44177 - protein, 76 aa, Zea mays
  Coding DNA Sequence Number=SeqID_2398
MVPHAFWLSLSSKSRKGIKKSVILKSEVVVISPPFTIELGGQDGVAFVSEVQAEAIKIIGKYVGKLEWSEYGHPWG

SEQ ID NO: 44178 - protein, 388 aa, Zea mays
  Coding DNA Sequence Number=SeqID_2399
  Gene Ontology: Mol. function=electron carrier activity; Biological process=electron transport
  Homolog annotation: Hit_ID=Q10C30; Match level="QueryCoverage=99%, HitCoverage=62%, E-value=0.0, Identity=79%"; Hit description =Guanylate-binding family protein, putative, expressed
MEMLMRVPGQDVAFEPAKLLWLIQRDFLRDKYIDEVNQIRDSLAVMGNNSTAFSLPQPHLQRTKLCDMEDKELEPLYVKRREQLKQLVSSIVKPKIVQGRTLNGKDFVSFLQQILEALNKGEIPSTGSLVEIFNKAILDRCLKVYREKMDGLGLPVPVDKLQKLHEMANGDARILFDKQHFGKHHAAQSALKLEDDIKKVYRNLLLANEYQSSKLCEARFSECEDKMDHLQVLKLPSMAKFNAGFTHCNQSFVKECVGPSKESYERRMSKTLVWKEGTRAVVILCIDIFYGIAISTQMLAKSRALFIKEYNNKLFNWLVTFSLVMVVIGRFVIKFFLLEIAAWVMFIFLETYTRMFWSAESLYYNPAWHIIVSSWETIVYSPILDLDR

SEQ ID NO: 44179 - protein, 287 aa, Zea mays
  Coding DNA Sequence Number=SeqID_2400
  Gene Ontology: Mol. function=tryptophan synthase activity; Cellular component=chloroplast; Biological process=tryptophan metabolic process
  Homolog annotation: Hit_ID=Q9FQ75; Match level="QueryCoverage=78%, HitCoverage=99%, E-value=1e-56, Identity=93%"; Hit description =Putative tryptophan synthase alpha
  Pfam annotation: Domain name=Trp_syntA; Domain location=17-228; Score= 183.6; E_value=4.7e-52; Accession=PF00290.11; Description=Tryptophan synthase alpha chain
MANRGAAAGKLTVAETFSNLREQGKSNLGNFQSAFIPFITAGDPDLATTSKALKILNSCGSDVIEVGVPYSDPLADGPVIQASATRALKKGTTLDSVIEMLKGVTPELSCPIVLFTYYNPILKRGAAYNANHANRSDEGNCTSFRRISLSSWLEKFAFKNGYEKIPDKPVAVGFGVSTPEHVKQIVGWGADGVIVGSAIVRQLCEAATPEEGLERLEEYARSMKAAMPLGLGRRSPPRPTPGLGLSLGLGGVTSSPDLGLGLRRSLRLARPRARTDYATGDTSLPYS

SEQ ID NO: 44180 - protein, 128 aa, Zea mays
  Coding DNA Sequence Number=SeqID_2401
MAGALGRAGRARGRGTSGEGASMGAEHDIGSKQQRRHANALDPHGLASTLFPFPYRELRFMPLEGLRYESCPGPLKYQDRHCPDGSRSIELPSDDSRYSNGSIIHNSGALMTNEVNFVNEYNPSLESR

SEQ ID NO: 44181 - protein, 182 aa, Zea mays
  Coding DNA Sequence Number=SeqID_2402
  Gene Ontology: Mol. function=protein dimerization activity; Cellular component=nucleus; Biological process=regulation of transcription, DNA-dependent
  Homolog annotation: Hit_ID=Q03462; Match level="QueryCoverage=82%, HitCoverage=37%, E-value=4e-45, Identity=62%"; Hit description =Opaque2 heterodimerizing protein 1
MERVFSVEEIPNPYWVPPHPQSAAAGAVAAPAGEAAGLMNRCPSEWYFQKFLEEAVLDSPVPVAGASRGSVGAGVEAAESKTPGAAAPAAASSSVVDPVEYNAMLKQKLEKDLAAVALWRASGAAPPDHSPAGSSLPSVDVPHAGPLKPIGALLRFRKKKDQQPLKSIQTQPEFLSKAYYID

SEQ ID NO: 44182 - protein, 353 aa, Zea mays
  Coding DNA Sequence Number=SeqID_2403
  Gene Ontology: Mol. function=electron carrier activity; Biological process=electron transport
  Homolog annotation: Hit_ID=Q10C30; Match level="QueryCoverage=99%, HitCoverage=61%, E-value=0.0, Identity=86%"; Hit description =Guanylate-binding family protein, putative, expressed
GQDVAFEPAKLLWLIQRDFLRDKYIDEVNQIRDSLAVMGNNSTAFSLPQPHLQRTKLCDMEDKELEPLYVKRREQLKQLVSSIVKPKIVQGRTLNGKDFVSFLQQILEALNKGEIPSTGSLVEIFNKAILDRCLKAYREKMDGLGLPVPVDKLQKLHEMANGDARILFDKQHFGKHHAAQSALKLEDDIKKVYRNLLLANEYQSSKLCEARFSECEDKMDHLQVLKLPSMAKFNAGFTHCNQSFVKECVGPAKESYERRMSKMLAKSRALFIKEYNNKLFNWLVTFSLVMVVIGRFVIKFFLLEIAAWVMFIFLETYTRMFWSAESLYYNPAWHIIVSSWETIVYSPILDLDR

SEQ ID NO: 44183 - protein, 77 aa, Zea mays
  Coding DNA Sequence Number=SeqID_2404
MEEEAIIKQLAMATRMGRRAVSGIAGARKRTSGRGLGEDPRFCQGMLEHRSFPMLAELADLQLDVLHGGLHLRSPLL

SEQ ID NO: 44184 - protein, 150 aa, Zea mays
  Coding DNA Sequence Number=SeqID_2405
  Subcellular localization annotation: CTP_CleavageSite=49; ConfidenceScore=5.38e-01
MSSGKHLRTSPQQRPVPADPSRARRYGQCPARLDPSAAVCPGQNRLTAPASALRQGPLFVGIVQPFRAMHSALALPSDVVSLRSPLAVCPRLTIAAVEHRPWLCPGLLCASRRGARLVRLACSAWPTACPAFPKHRRRRIDDTPSVSTRR

SEQ ID NO: 44185 - protein, 64 aa, Zea mays
  Coding DNA Sequence Number=SeqID_2406
TNFEIKNLIPHLIQYKGLIAGPKTHPKQAFKNKSPTPAIEGSKIEAVESTEATLSFGGNTRCGS

SEQ ID NO: 44186 - protein, 348 aa, Zea mays
  Coding DNA Sequence Number=SeqID_2407
MEGVPLGLIYMTMGGVFPHKKLWHSSGLELEVDSAALDLGGDPTSTDLEDDIESCGGIRAGGHVSDEEEVDEGEEDVPPLVRMNRCSKASNDVLIQALSRLEIIPEGLLLELPEAGDAGIRVEVPDDVPSASLLAGQEITRAVSHASSTFEGCLICEDTSVPNVTREGYPAPEGTIEDNPAPEGVTEGGLAPEGLELGSSSAASMVVHVGSPPVQSEEAAVTSLDLPTALAGPATLEVSNPGVEDPLRAVGAEIPLGVALSMSYNPSLALKPALDIACTSVPLFDSISTPPALGFPLFLSNLQNILSSVLTQPRACGTPVPNQVLSLLQWNRLLLQKQIDDMKALNVG

SEQ ID NO: 44187 - protein, 136 aa, Zea mays
  Coding DNA Sequence Number=SeqID_2408
MEAGHSVKVDAPYGALWWTSDCPASKVGLSARGLQIASLFVGCWNIRPQWLYVCGRAYALLPSLLGIKLFDFSGRTVRERACAQRPSMLDVGPSGLRAQTVHILVQTGPKHRGIDHSIASRCVCMYNFYFIAYPLK

SEQ ID NO: 44188 - protein, 76 aa, Zea mays
  Coding DNA Sequence Number=SeqID_2409
MAHRTVNRTCPVHHRTVRWPTCQKLQRSNPNGWVTWLAHRTVRKLGKQGSELIRTNMTFSGVGSDSPIEAKGCHFH

SEQ ID NO: 44189 - protein, 124 aa, Zea mays
  Coding DNA Sequence Number=SeqID_2410
MAWAGSAPADERGKGPQRGRPTKAEAHACIHPSIHDDHTQCSAEIREDGGATPGCAALGAESQRGWGWGGRPVTLRVATTTRVELKLHVPYMGDGHMWMWIHRRRSRWVHAAETDRQTDRQEEE

SEQ ID NO: 44190 - protein, 120 aa, Zea mays
  Coding DNA Sequence Number=SeqID_2411
MAGVRPTGDFGPNLTKLVMLRDPVHAAETTEDLPALAMAPKRLPTAMGDIAAAMNNDEQLGRNRGPTESIAPLNTNPRAQRTPQQSLEALVVAELRHPHGGKLSLPLGGAAARRKELWLK

SEQ ID NO: 44191 - protein, 280 aa, Zea mays
  Coding DNA Sequence Number=SeqID_2412
MEFGVLVVGSWFLHCWEGAGSIVLLPFEAPVADVEDWRRFESASPQGDLSLRTIKETLGSFGVAISIAWASMTRDFTPFGECIFAWSRARAEAQLSALEQLCVGAAHSEVKLCELAELRSRTERLESEAVQLRSSEGEGAKVEADHLREEETQLQGSLCEATIVLSERSAELQELYLVVGKVCGHLFPLPPIKVPLVGWLQSLLGHAEHVVVVGMFHLSDLAPGQMVSHFIEIDASVIAKGFTAGRNEELGTIEDQLVRPRARSLAERVDVKTLLSTPRI

SEQ ID NO: 44192 - protein, 125 aa, Zea mays
  Coding DNA Sequence Number=SeqID_2413
  Gene Ontology: Mol. function=copper ion binding; Cellular component =chloroplast; Biological process=protein localization
  Homolog annotation: Hit_ID=Q109R6; Match level="QueryCoverage=54%, HitCoverage=38%, E-value=8e-31, Identity=91%"; Hit description =Protein CutA, chloroplast, putative, expressed
  Pfam annotation: Domain name=CutA1; Domain location=31-123; Score =109.0; E_value=1.3e-29; Accession=PF03091.6; Description=CutA1 divalent ion tolerance protein
MEVMRELRICWSSVVCTLDWLLEESSPFLVMIFSFGATAEPSSGEIKLRSPIPFSGIESVYWWEGKVQSDAEELLIIKTRESLLDALTAHVKANHEYDVPEVIALPITGGNTKYLEWIKNSTRDK

SEQ ID NO: 44193 - protein, 110 aa, Zea mays
  Coding DNA Sequence Number=SeqID_2414
MAMLEYITKMKSLADEMESTKKMPISQSSADLALKGLDQLHYFLGIEKRGFIQTVELQTLRMPPAVKSLSIRWTRDIDDRRSTRDFAVYLGKDFGVLVCSQAAHSLKVKY

SEQ ID NO: 44194 - protein, 308 aa, Zea mays
  Coding DNA Sequence Number=SeqID_2415
  Homolog annotation: Hit_ID=Q336V3; Match level="QueryCoverage=40%, HitCoverage=27%, E-value=3e-45, Identity=63%"; Hit description =Cytochrome P450 family protein, expressed
MSGRARAPREAWSTGIGPDSIPSIATAGWGNGPMRGGRRVWAKKGVVVDETERRRGGGMDLCGCGGSGTRLGERGTRAAMDWRNLWARVAQGKGEWGAGEADAVWGAGQGCHAVPRFVGNLADLASRKERGAGRAGSHGWKLALLPRLGERGTRAAGAGDWFVGSRRAERQNAMQRQNRAPKKIAVVPSLHKRFLSIIVDKLTLDVIGLSLFNYNFDSLTTDSPVIDAVYTALKEAELRSTDLLPYWKVGFLCKIIPRQIKAENAVMIIRNTVEELIMKCKEIVEAENEQIEGEEYRIEIDGNDFRQE

SEQ ID NO: 44195 - protein, 154 aa, Zea mays
  Coding DNA Sequence Number=SeqID_2416
  Gene Ontology: Mol. function=transferase activity, transferring glycosyl groups; Biological process=metabolic process
  Homolog annotation: Hit_ID=Q2R1N0; Match level="QueryCoverage=72%, HitCoverage=22%, E-value=1e-26, Identity=55%"; Hit description=UDP -glucoronosyl and UDP-glucosyl transferase family protein, expressed
  Subcellular localization annotation: CTP_CleavageSite=89; ConfidenceScore=5.05e-01
MPLPLLHLRRALSARVSTATDGVEGSPGPVRVHRDWNGKTMLGPGMGTQPGRRTASARSRNSPGMKEACSGRWRTSESAWRFMGMKRHRAVTLASCAAVKKVIPNWSVTNATRRVVSWSSTSRPASIESERVHSYVMGVLKAAARGRSCWGLLD

SEQ ID NO: 44196 - protein, 116 aa, Zea mays
  Coding DNA Sequence Number=SeqID_2417
MEKSWLCAAKLQLGLAHRTVRCPRLADGEPAALENRRSCTAIIHRSVCIENKSPTLAPTSGEPFFDHLRQALTFVMPPKKALALGAAALQPLDPNQETLSLREARSQKRKATSPTL

SEQ ID NO: 44197 - protein, 50 aa, Zea mays
  Coding DNA Sequence Number=SeqID_2418
MNGRMLLDSSPELKMHPGSTRDVVSTADVFTAAQDSGKIGEMNLENEFSI

SEQ ID NO: 44198 - protein, 64 aa, Zea mays
  Coding DNA Sequence Number=SeqID_2419
MADVIPIAPSLDDMWGPFARTPVLVLHLAMPRRRSHRDPKGNNKLAAQDSGKIGEMNLENEFSI

SEQ ID NO: 44199 - protein, 91 aa, Zea mays
  Coding DNA Sequence Number=SeqID_2420
MPAWAPAAAVDEERSPGRSDRHSEDPYEVTTAPMGRLGKATKHIGLHPDRLSFAFARDRNDLPRMEAERRIWPSAQQLAKDGVEAAVTAVE

SEQ ID NO: 44200 - protein, 554 aa, Zea mays
  Coding DNA Sequence Number=SeqID_2421
  Gene Ontology: Mol. function=endonuclease activity; Cellular component=nucleus; Biological process=regulation of transcription, DNA-dependent
  Homolog annotation: Hit_ID=Q10R99; Match level="QueryCoverage=97%, HitCoverage=100%, E-value=1e-142, Identity=78%"; Hit description =Endonuclease/Exonuclease/phosphatase family protein, expressed
  Pfam annotation: Domain name=Exo_endo_phos; Domain location=269-546; Score=56.2; E_value=1.1e-13; Accession=PF03372.13; Description =EndonucleaseExonucleasephosphatase family
MTQVKPAPGGRMLTVLRVHLPSEIPIVGCEITPYVLLRRPDGGVFTDDVSETAPVDGYFMRYKWYRIQSDRRAAICSVHPTEQATLQCIGCLKSKIPVAKSYHCSSKCFSDAWQHHKVLHDRAISALNENGTEDDELFGRFGSGSSSSGVISAALSGSTSNLSLSSGVNNGPTPVYPTGTEKSSGETWFEVGWSRTYTATTDDIGHVLRFECIVVDVETRGTVRAPTSVMTSRVIPAPTPTPRRLIPVNAADAMVHFDLDSRTSSFGTFTVLSYNILADTYATSDTYSYCPTWALTWAYRRQNLLREIIGYHADIICLQEVEFNKAAQSLTDAIIPAAQKKLALNRLVKDNIALIAVLEAKFSNHGTENPSKRQLLCVANTHINIHHDLKDVKLWQIHTLLKGLEKIAVSADIPMLVCGDFNSTPGSTSHGLLARGKVDHLHPDLAIDPLGILRPLSKLTHQLPLVSAYSSFVSMAGVGYDLDHQRRRMDPGTNEPLFTNCTRDFTADSLTVESLLELLDEDSLRKDTALPSPEWSSDHIALLAEFRCKLRVRR

SEQ ID NO: 44201 - protein, 165 aa, Zea mays
  Coding DNA Sequence Number=SeqID_2422
  Gene Ontology: Mol. function=serine carboxypeptidase activity; Biological process=proteolysis
  Homolog annotation: Hit_ID=Q75HY2; Match level="QueryCoverage=86%, HitCoverage=37%, E-value=2e-37, Identity=51%"; Hit description =Putative serine carboxypeptidase
MTLEGVNETIVFLGLQTVPLSTGFSTASSLADIPTNQPIIAEHILTVLQSFYALNLALRTEPFFLTGGIYMGKYIPTAGAHILDTNRELPEVATHADSAYFLGLLNAWQKRDLEELRLEAVALTRAQRWVAVTDARGRVLSWLQNMTRLAALYNYAKQWDYGHPR

SEQ ID NO: 44202 - protein, 503 aa, Zea mays
  Coding DNA Sequence Number=SeqID_2423
  Gene Ontology: Mol. function=acyltransferase activity; Cellular component=integral to membrane; Biological process=metabolic process
  Homolog annotation: Hit_ID=Q7XEP2; Match level="QueryCoverage=97%, HitCoverage=92%, E-value=0.0, Identity=69%"; Hit description =Acyltransferase family protein, expressed
  Pfam annotation: Domain name=Acyltransferase; Domain location=291 -411; Score=19.1; E_value=7.4e-05; Accession=PF01553.11; Description =Acyltransferase
MAWWGGEEGEPLFPSVDKCDASRLGRDSTLVADLDGALLRSPDAFPYYALVAFETGGAARLALLLLLAPLAAALRRAVSESAGERVLVFAATAGARVANVESAARAVLPRFYAADVRRDAWRVFSACGGRRLVLTAAPRVMAEPFLRRYLGADAVAGTELAAWRGRATGWVDARRGGVLVGESKAQALRQMLDAGEVPDVGLGHRRSDYAFMSFCKEAYLVPRTPVEAVRADELPKRVVFHDGRLVQRPTPLVALLTVLWFPVGLLLSLVRVAAGVLLPMRWLRVAFHALGVRVVVRGTPAAAAAAATRTGVLFACSHRTLLDAVFLSVALGRPVAAVTYSLSRLSEFLSPIRTVRLTRDRAADAATIGRVLAEGDLAICPEGTTCREPFLLRFSALFAELTDAVVPVAVECRMGMFHGTTARGWKGMDPFYFFMNPSPVYTITFLDRLPPELTCGGGNKSGHWVANYVQRLIASTLSYECTGLTRKDKYRELADNDGLVLNF

SEQ ID NO: 44203 - protein, 203 aa, Zea mays
  Coding DNA Sequence Number=SeqID_2424
  Gene Ontology: Mol. function=protein serine/threonine kinase activity; Cellular component=membrane; Biological process=protein amino acid phosphorylation
  Homolog annotation: Hit_ID=Q1SZ16; Match level="QueryCoverage=81%, HitCoverage=46%, E-value=2e-54, Identity=61%"; Hit description =Protein kinase
  Pfam annotation: Domain name=Pkinase; Domain location=1-174; Score= -48.6; E_value=1.1e-05; Accession=PF00069.15; Description=Protein kinase domain
  Pfam annotation: Domain name=Pkinase_Tyr; Domain location=2-175; Score=-123.4; E_value=6.7e-05; Accession=PF07714.7; Description =Protein tyrosine kinase
  Pfam module annotation: Pfam domain module=Pkinase::Pkinase_Tyr; Domain location=1-174::2-175
AAADLPWSTRSGICLGTAKGLSYLHEEHEPNIVHRDIKASNVLLDRDYLPKIGDFGLAKLFPDNITHISTAVVGTSGYLAPEYFVHGQLTKKADVYSFGVLVLEIVSGRRVSQTIQSDMFPAWMMYQQGRLLEIVDASMGSYPEKEVLRYIKVGLACTQATPSSRPTMRQSEWDTTRKGTTELEAQIPKKRGHILLQDDYNIL

SEQ ID NO: 44204 - protein, 151 aa, Zea mays
  Coding DNA Sequence Number=SeqID_2425
  Homolog annotation: Hit_ID=Q651V3; Match level="QueryCoverage=44%, HitCoverage=15%, E-value=3e-08, Identity=47%"; Hit description=NAM -like protein
MGRQPHSMLPLLRMLMMENGQLSNEWAEEQNEQYLHDDWADSLGVFIENPEYANTFEIDDVVKMYEEKEAFQFLHCWKLLHNEPKWNDKVLELNNTPTRKTQQPEGPCNPVGTQPNTENAAITRPEGRDTAKKRRFKEDTASSSAAVEVLQ

SEQ ID NO: 44205 - protein, 471 aa, Zea mays
  Coding DNA Sequence Number=SeqID_2426
  Gene Ontology: Mol. function=transferase activity, transferring glycosyl groups; Cellular component=integral to membrane; Biological process=metabolic process
  Homolog annotation: Hit_ID=Q6H7J1; Match level="QueryCoverage=98%, HitCoverage=95%, E-value=1e-135, Identity=52%"; Hit description =Putative indole-3-acetate beta-glucosyltransferase
  Pfam annotation: Domain name=UDPGT; Domain location=6-469; Score= -36.3; E_value=8.6e-09; Accession=PF00201.9; Description=UDP -glucoronosyl and UDP-glucosyl transferase
MAAELTQIVVVPFPAQGHVTPMLHLARAIVDRGHGSISATVAVPDFIHRRMGQYSAAGVALVSIPCGVADEDGSDEPPGPAMFLHAMEHRMPAQLEGMLQSARRGVGAGRRVSCLVVDLLASWAIPVAARFGLPVVGFWVGMVATYRTVAVIPELIAKGFVSESADGTKNIGDLNILPAKLKLRFKDLPWLLDSALPQKSRISFWLQALDRAKSLRCILVNSISKEGGAGGDSPDDQQQYDYEYLPQDQQQIMLHVGPLLFNADASKKTATMWQPDKTCMDWLDKQSPGSVIYVSFGSWAAPIQPDRIRGFARGLEASGRPFLWVLKSHPSWRAGLPDGYAEKVSGRGKIVSWAPQEDVLKHEALGCYVTHCGWNSVLEAVRQGVRMICYPVSADHFVNCAYVVNVWKVGVELATSGQGDVKDCIERVMEGDDGRRLQRKVNALRETVTAGEAMRAAKRNLTLFMDRINGS

SEQ ID NO: 44206 - protein, 96 aa, Zea mays
  Coding DNA Sequence Number=SeqID_2427
MSTCIDNTTSYALILEAFMALPSAARPQGRRGHANLGAGDTGSADRRQQAAGRPQAYHEGTADRAQSSLALAPHWRSNVEAEWDLDASSREDQVVA

SEQ ID NO: 44207 - protein, 118 aa, Zea mays
  Coding DNA Sequence Number=SeqID_2428
  Gene Ontology: Mol. function=microtubule binding; Cellular component =membrane; Biological process=protein transport
  Homolog annotation: Hit_ID=Q8LBA9; Match level="QueryCoverage=89%, HitCoverage=89%, E-value=8e-50, Identity=89%"; Hit description =Putative microtubule-associated protein
  Pfam annotation: Domain name=MAP1_LC3; Domain location=13-116; Score =285.4; E_value=1.1e-82; Accession=PF02991.6; Description=Microtubule associated protein 1A1B, light chain 3
MYMYPFILESAERRQAEANRIREKYPDRIPVIVEKAERSDIPDIDKKKYLVPADLTVGQFVYVVRKRIKLSAEKAIFIFVKNTLPPTAALMSAIYEENKDEDGFLYMTYSGENTFGLF

SEQ ID NO: 44208 - protein, 88 aa, Zea mays
  Coding DNA Sequence Number=SeqID_2429
MADSGVELKIVEHKFFDIIFEKKIIIRLSSVLVGDTIMQMSKSVLRGKRRCYDPRERRGGGGGVTSGGGGMCDGCGRKYDPNNIDYRI

SEQ ID NO: 44209 - protein, 504 aa, Zea mays
  Coding DNA Sequence Number=SeqID_2430
  Gene Ontology: Cellular component=cell surface; Biological process =pathogenesis
  Homolog annotation: Hit_ID=P02977; Match level="QueryCoverage=87%, HitCoverage=76%, E-value=8e-09, Identity=21%"; Hit description=M protein, serotype 5 precursor
  Subcellular localization annotation: CTP_CleavageSite=58; ConfidenceScore=5.02e-01
MAAEPREPTSSLDAQLAASSSSAAGVGGPNPCCATQWKNCQKLVRSRTALREAVKLLQAENEKLRKENSELSKVCKEEHLRGDSAEAARATESDARDLLEKEIIELKTQNMSLKQTQNTCKNNDELLRISELEEENRKLIQILGEERKKITSEKKKIEEEKCKTLEMQRIWKSEAQKSEEYRRVADTERKVANDWRASCERLRSEANELRAQLTAQIQKTEEILKRAEAEKQKVAREKKRADSEKSLSEKNRTLVEVEKKKVTEEKCRADNLFAKLEEQKKLNEHLRTSIQVETKNAIEEKKRGDHLFQKLEEMREQTECLQRKANEFSAGRDVISSGKCGRRHIDRISENANVKLLKEKLKLKKEQLKHVKNVSKLDKAKTALIRRELQSLKQDWTQLLGRFNMLDDHLARGVEDIHVLTQPSQAPSPYTPPYRPVHLVCTQPREPLNQHPEIHGFEQKLLPNDSVPAPYFRLQAGTVPFGSSIPSEYTSYQLPRESCSRSIS

SEQ ID NO: 44210 - protein, 207 aa, Zea mays
  Coding DNA Sequence Number=SeqID_2431
  Homolog annotation: Hit_ID=Q4VYC7; Match level="QueryCoverage=23%, HitCoverage=32%, E-value=3e-11, Identity=59%"; Hit description =Coiled-coil-helix-coiled-coil-helix domain containing protein
MPKSDPEKATAQQHKEKKCVSALAWRSVLTVSRGYTATAEALIAAAPATAWTANTLSPSGLLPPTISAACKAGTHPPQKWRNAASDVESQATRPSEEPSPPVVEPSPPSSAPPPSSLEALAAEAMSFDEDDTEESIEMKVQKALDCPCVADLKNGPCGGQFVDAFSCFLRSTEEEKLKKCLDFLDFSIGNPDPSLSLELSQYELCWF

SEQ ID NO: 44211 - protein, 84 aa, Zea mays
  Coding DNA Sequence Number=SeqID_2432
MVTIFTGPRNYMGRSPMPEAAEMVGGSKPLGESVFAVHAVAGAAAISASAVAVYPLDTLGATGQKQKMGLRQVVDRLMAASGPA

SEQ ID NO: 44212 - protein, 481 aa, Zea mays
  Coding DNA Sequence Number=SeqID_2433
  Gene Ontology: Mol. function=oxidoreductase activity; Cellular component=integral to membrane; Biological process=electron transport
  Homolog annotation: Hit_ID=Q7EZ52; Match level="QueryCoverage=99%, HitCoverage=98%, E-value=0.0, Identity=71%"; Hit description =Putative taxane 14b-hydroxylase
  Pfam annotation: Domain name=p450; Domain location=28-477; Score =153.5; E_value=5.4e-43; Accession=PF00067.12; Description=Cytochrome P450
LIAVALPVLLHLLKRGKTPWRPAAAKLPPGSLGLPVIGQSIGLLRAMRANTAERWILDRIHRYGPVSKLSLFGRPTVLVAGSAANRFIFFSSALAMQQPRSVQRILGDKSILELTGADHKRIRGALVEFLKPDMLRLYVGKIDGEVRRHLDECWAGRCTVTVMPHMKRLTFDIISLLLFGLERSPLQDALAGDFARVMDGIWAVPVNLPFTAFSRSLRASARARRLIAGIARETRAKLERGEASRSSDLIACLLSLTDHSGARLLSEEEIVDNSMVALVAGHDTSSILMTFMVRHLANDPDTLAAMVQAATGGDAEHDEIAKNKGDGQTLDWEDLAKMKYTWRVALETLRLVPPIFGNFRRAMQDIEFDGYLIPKGWQVFWAASVTHMDTGIFHEPAKFDPSRFENQSAASAPPCSFVAFGGGPRICVGMEFARIETLVTMHYLVRRFRWKLCCKNDTFARDPMPSPLHGLPIELEQKASP

SEQ ID NO: 44213 - protein, 939 aa, Zea mays
  Coding DNA Sequence Number=SeqID_2434
  Gene Ontology: Mol. function=protein binding; Cellular component =chromatin; Biological process=defense response
  Homolog annotation: Hit_ID=Q2QNI0; Match level="QueryCoverage=99%, HitCoverage=95%, E-value=0.0, Identity=62%"; Hit description=NB-ARC domain containing protein, expressed
  Pfam annotation: Domain name=LRR_1; Domain location=594-615; Score =7.8; E_value=9.9; Accession=PF00560.23; Description=Leucine Rich Repeat
  Pfam annotation: Domain name=LRR_1; Domain location=617-638; Score =11.5; E_value=2; Accession=PF00560.23; Description=Leucine Rich Repeat
  Pfam annotation: Domain name=LRR_1; Domain location=686-714; Score =1.3; E_value=1.6e+02; Accession=PF00560.23; Description=Leucine Rich Repeat
  Pfam annotation: Domain name=NB-ARC; Domain location=149-455; Score =194.6; E_value=2.3e-55; Accession=PF00931.13; Description=NB-ARC domain
  Pfam module annotation: Pfam domain module=LRR_1::LRR_1::LRR_1::NB -ARC; Domain location=594-615::617-638::686-714::149-455
MASLLWKLGTLLSDEHRLLSSVKVDMVSLKAEVEGMHAFLKKMSEVEDPDEQSKCWMQEVRELSYDIEDNIDSFMLTLGSCTESSSKPRGFKGCVARFLNLFAGAKAHHWAAKEIQRLKRQAVEASDRRGRYSHRVGDAVAVPRSSRTSIDPRLPALYAETTRLVGVDGPRNRLIKLLTTEREGTVTELNVFSIVGSGGLGKTTLASEVYRRLEAQFDYRAFVSVSQNPDMKKILRHILCHRGCGGSEEWDEQQLIHAVREFLQDKRYFVVIDDIWSTSAWRIIRCAFPENNCSSRILTTTRIVTVAKYCCSPHLDRVYALQPLDAAHSESLFLSRIFGSEGRCPLHLKEASDKILKRCGGLPLAIVTVASLLATKGITKEEWEKTLKSIGSALEIQDTDVEEMKKILLISYNDLPYHLKTCLLYLGVFPEDYEIKRDRLIRRWVAEGFITAEGGQDMEEIGECYFNDLINRSMIQPVGIQCDGRADACRVHDMVLDLIVSKSAEENFLTLCGDGDHRMARRDKARRLSINYHARDGIVVPENMVVSNVRSLTIFGHAEDMSALSNFLFLRVLDLENRVVLEYNYLRHIGRLRQLRYLRLSSRRIAALPEQIGDLQNLQTLDLRWTRLKRLPRSVVLLRRLTCLLVNSLELPEGIGNMQALQELSEIEINRHTPVSSLLELGKLTNLRILGINWCIIDADHDARKVHADSLVTSLCKLGVLSLRSIQIQSYHTCSLDFLQDSWFPPPRRLQKFDMSIDYHFPRTPKWMVSLEYLSYLDIYLTPVDEESFRTLGDLPSLLFLWISSREARPGEGVAVGSHGFRCLREFYFTCWEVGTGLAFEPGAMPALEKLRIPCNARGACSSHAGVRDLGIGRLSSSLRHLQVEIVCRGARLQEVEAVEEAVRNAASEISDELFLGVSRWDEEEILKDEEHKLEEAEA

SEQ ID NO: 44214 - protein, 109 aa, Zea mays
  Coding DNA Sequence Number=SeqID_2435
  Gene Ontology: Mol. function=chorismate mutase activity; Cellular component=chloroplast; Biological process=aromatic amino acid family biosynthetic process
  Homolog annotation: Hit_ID=Q5JN19; Match level="QueryCoverage=99%, HitCoverage=44%, E-value=1e-44, Identity=68%"; Hit description =Putative chorismate mutase
MYFDELLPRLVKEGSDGNAGSNALCDTTCLQDRDQLMRLLTYETVERAVEHRVEAKAKIFGQEVNIGAKDNGSQPVYKIRPSLVAELYSYRIMPLTKEVEVAYLLRRLD

SEQ ID NO: 44215 - protein, 174 aa, Zea mays
  Coding DNA Sequence Number=SeqID_2436
  Subcellular localization annotation: CTP_CleavageSite=21; ConfidenceScore=5.21e-01
MSESPPTPHGRKQNRPALSPVTRMLRGWFGFATGLLRLPWSDSGVFISLIAATLPIQSSSCARPEAITLPSGAEVFHRGQEETIQTVARVLNSPSCLGAIGGFIVDWGSLRARRSSELSPPMVRSIGLAASCCGRASARHPSGKSFLPMRANHLSARLRTPMAASPVGSSDAAA

SEQ ID NO: 44216 - protein, 75 aa, Zea mays
  Coding DNA Sequence Number=SeqID_2437
MEQMGNDEEIEGLGDLGSMMPLASFSADCEFENPFTWTEESSDEDSDYFAALDVTATESSPRLELGESFNPPAGA

SEQ ID NO: 44217 - protein, 95 aa, Zea mays
  Coding DNA Sequence Number=SeqID_2438
MRDKSAVESKSRNLMDKLSAAETEKDELGRLLAAEKEDADKACTEARAARAEASLALQRVAEAEASHRSLRGYLDKAEASTRTGVERARALLVDT

SEQ ID NO: 44218 - protein, 501 aa, Zea mays
  Coding DNA Sequence Number=SeqID_2439
  Gene Ontology: Mol. function=catalytic activity; Cellular component =cytosol; Biological process=folic acid and derivative biosynthetic process
  Homolog annotation: Hit_ID=Q6K2P4; Match level="QueryCoverage=63%, HitCoverage=75%, E-value=1e-144, Identity=82%"; Hit description =Methylenetetrahydrofolate dehydrogenase-like
  Pfam annotation: Domain name=THF_DHG_CYH; Domain location=187-304; Score=197.2; E_value=4e-56; Accession=PF00763.13; Description =Tetrahydrofolate dehydrogenasecyclohydrolase, catalytic domain
  Pfam annotation: Domain name=THF_DHG_CYH_C; Domain location=307-497; Score=285.3; E_value=1.2e-82; Accession=PF02882.9; Description =Tetrahydrofolate dehydrogenasecyclohydrolase, NAD(P)-binding domain
  Pfam module annotation: Pfam domain module=THF_DHG_CYH::THF_DHG_CYH _C; Domain location=187-304::307-497
MGGTAGGRWRQAGGVARHMLATRFLKIAPDLRVVPYHFINRRRKENQKGAPTNMKQHKHKHVQAKRVSARVYEKAKTAFAKFQKHNSSPAMIKAVERLGDFPLNTQSLRCFQTVQASKIMREFNPFFKVLGTKLIADRHQSSKEASAGCGARIASPTRCSKKNQNCITDVSCVHLMQTETDYDRTASIIDGKSIAEDMRLHIAEEVCQMKCSVGHVPGLAVVLVGDRRDSESYVRYKTKGCEEVGIKSLLAKLPGNCSEDEVMDSVSRFNEDPSVHGILVQLPLPEFMDEEKILSIISLNKDVDGFHPLNVGNLALRSRNPLFVPCAAKACIELLLQSGIELMGKHVSVIGRSKVVGLPTSLLLQRHHATVSVIHAFTTNPEAITRESDIVISAAGVANLVRGSWLKQGAVVIDVGTNPIETTLTCLELKDFVVAVVNHFGTSRDPTSDYGYRLTGDVCFEEAVNVASAITPVPGGVGPVTIAMLLGNTLDSAKRVYGLSD

SEQ ID NO: 44219 - protein, 94 aa, Zea mays
  Coding DNA Sequence Number=SeqID_2440
MKSIDAWYSSALEHSTTLIRWGPLVAPRREEEDDKGDEGKGEKPTEWEILIMDAILDVHTEDGKHTTMRVTIPDNTPAPPPADCTACKSHAAEK

SEQ ID NO: 44220 - protein, 114 aa, Zea mays
  Coding DNA Sequence Number=SeqID_2441
  Subcellular localization annotation: CTP_CleavageSite=40; ConfidenceScore=5.41e-01
MSVPALAQVPVGSWFGLHQLSAQNLDRYRRWRGTGKKMVPSAARGVLESSSGTHSGGFMMKRKQQPDAKNQKVNMAATNDVIRHVMHMLACKEYSSLVLLFDFLMFARYKFYTF

SEQ ID NO: 44221 - protein, 131 aa, Zea mays
  Coding DNA Sequence Number=SeqID_2442
MAPSVAPVPMICPFGMVLRPVVSAILAIMETSRYLFGRDLVAPPRGIARRVPGRPLYLANLVDGDLVDHCTSQTHSTRTWSLRLVDLLGHPASHTCSAGIGGVGWSRGYGLTLGTLSLGTDPFYDGIMRWA

SEQ ID NO: 44222 - protein, 522 aa, Zea mays
  Coding DNA Sequence Number=SeqID_2443
  Gene Ontology: Mol. function=DNA-directed DNA polymerase activity; Cellular component=epsilon DNA polymerase complex; Biological process=nucleobase, nucleoside, nucleotide and nucleic acid metabolic process
  Homolog annotation: Hit_ID=Q6K777; Match level="QueryCoverage=99%, HitCoverage=22%, E-value=0.0, Identity=74%"; Hit description =Putative DNA polymerase epsilon catalytic subunit protein isoform b
  Pfam annotation: Domain name=DUF1744; Domain location=372-522; Score=- 104.1; E_value=8.9e-10; Accession=PF08490.2; Description=Domain of unknown function (DUF1744)
MQKISNPVPRVLHPDWLHKKVREKDDRFRQRKLRDIFSPLAKEEGLHNLNRTGDMEDLLISNKDLRKNPSHGLDIDKENNPNGASVGSGLNISKKQQNCMTGLNVPCTSQIQNAASYETVDKGTDYQGWLDAKKRKWKYVREQKKRRSDGELNQLTAVIMQKNKVMSLFCFCQIIQLASSTVPGHFFAWVVAEGIMFKIPINVPRTFYLNSKAPVTEEFPGRRVKKILPHGRPCFNLIEVNVVNNSCKVVTTEEQFRAEGKKLAAHLAEPDVEGIYETKIPPELNAVLQIGCVCKVDKSAKRRSIQDGWDLAELQMKTTAECSYLEQTFSFFYLYHSLSEGRAVYVFYFPTSFRIHAVIVNPFRNKEISPSFLEKQFGDACQALGSVPENLSFHVDYQTSIDAGSKYAQRMLLEYRQQHSGPVVGIIECPKLQAIKVAIRALDDLPCVTIPSNARDNNYQALGWQATAGRTSMQRCAASTQWFNERISLAKYAHVPLGNFELDWLLFTADVFFSRALRDQQQ

SEQ ID NO: 44223 - protein, 278 aa, Zea mays
  Coding DNA Sequence Number=SeqID_2444
  Gene Ontology: Cellular component=cytoskeleton; Biological process =phagocytosis
  Homolog annotation: Hit_ID=Q10M53; Match level="QueryCoverage=92%, HitCoverage=100%, E-value=1e-102, Identity=62%"; Hit description =Phagocytosis and cell motility protein ELMO1, putative, expressed
  Pfam annotation: Domain name=ELMO_CED12; Domain location=119-258; Score=91.2; E_value=3.1e-24; Accession=PF04727.4; Description =ELMOCED-12 family
MEGVELKGRALHASNNTIFMSTTNLRRRLHHGDVDGRKNEHVDISSADSLNEPLLGKSNDDNFGSEVYDPRKQDLWDDDMKKEQLHWSFLFSNLITQWAQWLASIIVSSGSIFGRLSPFSSENQINPVYLSPLQEQRLDTLRHRLQISFDGSRIEHQNSFQMLLNKVQGQRSDWEYPFAVAGINVSFMLVQMLDLKSSVPSSKYGIRFLELLGRDENAFDHLYCVAFRLLDAQWLVKRASYMEFNEVLKSTRTQLERELVLDDVLEVKDLPSYTMLDE

SEQ ID NO: 44224 - protein, 51 aa, Zea mays
  Coding DNA Sequence Number=SeqID_2445
MASADSMAPVLLLVVVATGQVPSITTLLPHSLGPVMDAHVITIMPQMGPLT

SEQ ID NO: 44225 - protein, 119 aa, Zea mays
  Coding DNA Sequence Number=SeqID_2446
MVWRHPDHGMQEREPRGPSMESLVEVGARSFPFMAMESTVDPCGCRCRVGVGVVERVEWIWGDARRWRRAHTVYNQTCPFSTPLKHKFHASCIMCEARKSVLLLYFSPTSYQIGREKPP

SEQ ID NO: 44226 - protein, 62 aa, Zea mays
  Coding DNA Sequence Number=SeqID_2447
MSLQCGEALCRLDGSTLGANAERERYSARPSCETARRGRTRLWPRWGIQGEQFCRRNCDMGD

SEQ ID NO: 44227 - protein, 243 aa, Zea mays
  Coding DNA Sequence Number=SeqID_2448
MAKEAAVAFQGCRYADCAAVLTRLLDKKEGDLKVHFCFLSCLFECHHPVLLNIHVIMYGSVFSEIVPKNIIYLNSENSKVHHNMAITEFFLDDCPDSNRLLKILGDFKHYKRLHEVSPEPRRQPTHVGVEQTTSLVGKIGKVIRVERCEVIQPDLPEAVAERGEAVMTSTALGAARCTVAGGARESEPRARGTKEQCEHEQHWALAGTRREQRCRLAAEREARSSVGRVGVMARRRSGTPATG

SEQ ID NO: 44228 - protein, 781 aa, Zea mays
  Coding DNA Sequence Number=SeqID_2449
  Gene Ontology: Mol. function=binding
  Homolog annotation: Hit_ID=Q6K272; Match level="QueryCoverage=94%, HitCoverage=90%, E-value=0.0, Identity=71%"; Hit description =Putative Cnot10 protein
  Pfam annotation: Domain name=TPR_1; Domain location=328-361; Score =13.1; E_value=0.15; Accession=PF00515.18; Description=Tetratricopepti de repeat
  Pfam annotation: Domain name=TPR_1; Domain location=696-729; Score =8.9; E_value=0.46; Accession=PF00515.18; Description=Tetratricopeptid e repeat
  Pfam annotation: Domain name=TPR_2; Domain location=328-361; Score =9.5; E_value=2.6; Accession=PF07719.7; Description=Tetratricopeptide repeat
  Pfam annotation: Domain name=TPR_2; Domain location=696-729; Score =15.4; E_value=0.2; Accession=PF07719.7; Description=Tetratricopeptide repeat
  Pfam module annotation: Pfam domain module=TPR_1::TPR_1::TPR_2::TPR _2; Domain location=328-361::696-729::328-361::696-729
MGKAYNKIPRNVCCGLWTNIKSLFGTTPALENLVELVEQRRSEELACASREQADSANGVGNSAHSGSRGSGALLPFSSTHNASTYGDEFDTTIITFNMAVILYHLHDYESALSVLDPLYRNIEPMDEPTALHVCFLLLDITLALQDATKAVDIVQYLERSFGVANTMNPNENASIAQQQLAQAKPPVKISMPPDSDSNAYAGGYENLSSGIFPDEQIEFESLCSSFDGHQNVGRRILNDFSRASADLAATAADLKVRLQIYKVRLLLLTRNLKVAKRELKVLMNMARGRDSSTELLLKSQLEYARGNYRKAVKLLSTPNNRTEPAMLAIFHNNMGCILHQQRSYHASIWCFSKALKYSLSFRSEKPMKLSTLSQDKSCLISYNCGIQHLMCGKPLLAASCFREAMPLFYKRPLFWLRFSECSLLALEKGLLCANGASSFNDEIEINVVGSGQWRQLIVNPVNSRSNLDSAGVTLGEHKNLVSLGFARQCLQNALLLLDATEKENWVIASDTEDWDQGTVHGYKSSGQKNTTSTDSKTPSGPTLANVNGEQKGTSLNATLQSSLAFYDEIRRKEYIKIRQAVLANLAFVELCLDNPLKTLTYAKSVLQVTDCSRMYAFLSHVYAAEALCTLNRTEDAAENLSVYIRDGNHVELPYSVENSEKALVEKDSDGEDLVAPAVTKLATEEPEQLRPEEARGVLYINLGMIAARQGEVEKANYMVSRGLAMLPNNPRAVLASVYVDLLQGKSQEAVVKLRRCRNVRFRPASIAASSQQSSLEKPPLS

SEQ ID NO: 44229 - protein, 156 aa, Zea mays
  Coding DNA Sequence Number=SeqID_2450
MAELDHVPRLGRRGDGRGAAPGTDGAAPSAPGWECRGAWAVPDRAPPRVGKGPGRADAGVSVAPGTRLSRRDRGRDARGAHRAGSRVSSLGGEAPRAGGAMSGAAAPWAASAEGGGRGRAGDGEHGEEGGRGEKRGGGGTYRAGERGRRQFRAAAS

SEQ ID NO: 44230 - protein, 146 aa, Zea mays
  Coding DNA Sequence Number=SeqID_2451
  Gene Ontology: Mol. function=sulfate porter activity; Cellular component=integral to membrane; Biological process=sulfate transport
  Homolog annotation: Hit_ID=Q9FY46; Match level="QueryCoverage=94%, HitCoverage=20%, E-value=3e-51, Identity=72%"; Hit description =Sulfate transporter 4.1, chloroplast precursor
  Subcellular localization annotation: CTP_CleavageSite=46; ConfidenceScore=5.05e-01
MSYAKLAGLHPIYGLYTGFVPLFIYAIFGSSRQLAVGPVALVSLLVSNVLGGIVNSSSKLYTELAILLAFMVGILECLMGLLRLGWLIRFISHSVISGFTTASAIVIGLSQIKYFLGYNVTRSSKIIPLIESIIAGADEENCASLY

SEQ ID NO: 44231 - protein, 167 aa, Zea mays
  Coding DNA Sequence Number=SeqID_2452
MTAHILLIAVVAQALSLSLRHLRRSALDDQAKSLKVQAKALDSTQKLLQQLYDRFDDQDDQLDAIAVDATTGVVVLENVQAVFKAWRPRIVHTVDSVKSSMDVMRSELTKISRLLERGAMEDFDNSPSVLSPHESVARRQSASATHADDPFGHRTPSTTRKHGFGLI

SEQ ID NO: 44232 - protein, 372 aa, Zea mays
  Coding DNA Sequence Number=SeqID_2453
  Gene Ontology: Mol. function=small conjugating protein ligase activity; Biological process=protein modification process
  Homolog annotation: Hit_ID=Q8VY10; Match level="QueryCoverage=62%, HitCoverage=26%, E-value=9e-20, Identity=29%"; Hit description =Putative E2, ubiquitin-conjugating enzyme
MDKATSDTARHTSVLDRVASLKSYQRARGLCDRCAEKWSHGHRCATTVQLHANEEVWELLGSEEITEEVFEPEQQIMMVLSMAAWVGQPDATDGGPTGRELNIGQACFHSEPSNASNQFIPAQLMQVQHFEIIGLDKLLDNSSVESMNEEHTIGDSLDEAEQEELNHEIALESTEDCTGSLCKATAFLFPKTAFDFLTNVAASLFGIHGSPSPSSVLVDPRYEIVKMAEMQPCAEETPKEEQIVKFVAQIDKPILSSEDAVSKRFDVVTDCLDHHFVKENGHESVMQLLKLSLTFFSNNNHWCERGIMCNDDYFLFLGYKRLAEEDGIHVRVYEERMDLLRACIVGAPGTPYHDNLFFFDIFFPPDYPHEPP

SEQ ID NO: 44233 - protein, 65 aa, Zea mays
  Coding DNA Sequence Number=SeqID_2454
MTQRELEEYKKITEKNNKEMEETNVLTKKLLSLHGDDTVSPGGWTDLAPCDAEGAPPSEKAKGDH

SEQ ID NO: 44234 - protein, 802 aa, Zea mays
  Coding DNA Sequence Number=SeqID_2455
  Gene Ontology: Mol. function=small conjugating protein ligase activity; Biological process=protein modification process
  Homolog annotation: Hit_ID=Q8VY10; Match level="QueryCoverage=99%, HitCoverage=98%, E-value=1e-110, Identity=45%"; Hit description =Putative E2, ubiquitin-conjugating enzyme
  Pfam annotation: Domain name=UQ_con; Domain location=563-712; Score =128.2; E_value=2.4e-35; Accession=PF00179.16; Description=Ubiquitin -conjugating enzyme
MDLFTIDSDSESYTGTSDSEDQECEFTYSDHAQNILSSLDESIGKIDNFLTFERGFLHGDIVCPVSDPSGQLGRVVGVAMFVDLETSSGDIIKDVNSKKLSRVRSFVSGDCVVMGPWIGRVIRAFDLVTLLFSDGAKCEILLRDSDVLKPIPPVLFEDAPYFYYPGQRVRIVDPSVSKSATWLCGSWRPSRDDGIVSHVDVGLVHVNWITSVTNVWGDKSSSPPNIQDPKKLTLLSCFPYANWQLGDWCALMTDNNGCLWMDSGKSCILSEDQKCDSYAHMYFESYGSDCSQTFVVAKTKSTVDVLWQNGTVSLGLEPQALLPVSTLGDHDFWPGQFVLEKLTVEDAARCPRTAIVSDVDALERTVNVKWIGPAHSDIVSYGSDPAVETVSVYELVEHPDFSFCTGEVVIRSAMNIDKSEADPTNGSLASKESLVTSSGFLSCTGNVLGYKDNGIEVQWANGVISKVQHFEIIGLDKLLDNSSVESMNEEHTIGDSLDEAEQEELNHEIALESTEDCTGSLCKATAFLFPKTAFDFLTNVAASLFGIHGSPSPSSVTRGWLKKVRLEWNILQNDLPDGIHVRVYEERMDLLRACIVGAPGTPYHDNLFFFDIFFPPDYPHEPPSVHYHSGGLRLNPNLYESGKVCLSLLKTWTGTGNEVWNAESSTVLQLLLSLQALVLNEKPYFNEAGYDKFVGKADGEKNSITYNENAFLLSCKSMMYVLRKPPKHFETLVKEHFTCRAPHILDACEAYLGGDLVGHAHDKAYVAEDGNKNCSTGFKIMLGKLLPKLVTAFCEAGITSDR

SEQ ID NO: 44235 - protein, 89 aa, Zea mays
  Coding DNA Sequence Number=SeqID_2456
MGRLEPREEWESWLVGKVCNLCRVLETGISVVLTMARIRCTAPERPLRRTVPGQSSHLKRQYRRLHEEQERRHQEQEQEQEQDNSPSPQ

SEQ ID NO: 44236 - protein, 90 aa, Zea mays
  Coding DNA Sequence Number=SeqID_2457
MASTPVSYAVVVQRYLRGTIDYGVLFHHSTMTELVVYSDVDWDINRRIRPPKKAPEILGTSAFSGKPVINKTRIRTEGGKGSITILRTKG

SEQ ID NO: 44237 - protein, 125 aa, Zea mays
  Coding DNA Sequence Number=SeqID_2458
MVYRHTAAQPRSSQQQPLLTLRSEDGRAWDLKSIRRQNDETLRLFLRRFQTMRNCIPEVAEAAVIEDFYWGSNDPVFVRAIFQKAPTTSEQLFKEADVYITADERAQDLIGDAKPVPPAPRRDAN

SEQ ID NO: 44238 - protein, 119 aa, Zea mays
  Coding DNA Sequence Number=SeqID_2459
MGLSTAARAYWRSIECVGLGGSDDSEETSTEKVEDSSDSKEWRGGEGNDSEDDDNNDDDNSKGDDDGDGKGDGDGGSKGDSGDSKGDSGDGEGDDGKDDGGDGDGDDDDGKARGIMLLV

SEQ ID NO: 44239 - protein, 157 aa, Zea mays
  Coding DNA Sequence Number=SeqID_2460
MKWMLVMLKFMVSKEHATKATPQKLKGRDGATVVELRLHRRNSSERGPGELEGLGANLRVFQVAGDRAELTGATDVAGSSTAAVERAADVSGRWRGSGRAGRARERARGSAEGASERGEVGEQGTGLKRGTCTGTWPKNALSWARPRGGVWARVKDG

SEQ ID NO: 44240 - protein, 292 aa, Zea mays
  Coding DNA Sequence Number=SeqID_2461
  Gene Ontology: Mol. function=two-component response regulator activity; Cellular component=nucleus; Biological process=two -component signal transduction system (phosphorelay)
  Homolog annotation: Hit_ID=Q7Y0W4; Match level="QueryCoverage=97%, HitCoverage=85%, E-value=8e-76, Identity=54%"; Hit description=B -type response regulator
  Pfam annotation: Domain name=Myb_DNA-binding; Domain location=143 -192; Score=38.3; E_value=2.7e-08; Accession=PF00249.21; Description =Myb-like DNA-binding domain
  Pfam annotation: Domain name=Response_reg; Domain location=1-78; Score=-15.9; E_value=0.06; Accession=PF00072.14; Description =Response regulator receiver domain
  Pfam module annotation: Pfam domain module=Myb_DNA-binding::Response _reg; Domain location=143-192::1-78
MSFIYGNIQIVDLIISDVFFPTEDGLLILQEVTSKFDIPTVIMSSNADTSIVMKYITSGASDFLIKPVRIEELKNIWQHVLRKQIGENRSCSNSAHHQHLDQVSISYPPPAGIAPAGTTAREREMTTTANGTVTDIQDLRKSRLSWTMQLHRQFIAAVNSLGEKAVPKKILETMKVKHLTREQVASHLQKYRLHMRKVNQALHNDDDTPPSSSLPNESNILRTEFDGSLNPTYFDQDGCTEYSLPKDDLSSGSDCMLGERNNYSPQGFQDFRWDSDKQASETTYLWNFEADE

SEQ ID NO: 44241 - protein, 632 aa, Zea mays
  Coding DNA Sequence Number=SeqID_2462
  Gene Ontology: Mol. function=RNA-directed DNA polymerase activity; Cellular component=mitochondrion; Biological process=RNA-dependent DNA replication
  Homolog annotation: Hit_ID=Q8S463; Match level="QueryCoverage=94%, HitCoverage=30%, E-value=0.0, Identity=85%"; Hit description =Putative prpol
  Pfam annotation: Domain name=RnaseH; Domain location=37-164; Score =10.7; E_value=5.8e-06; Accession=PF00075.14; Description=RNase H
  Pfam annotation: Domain name=rve; Domain location=376-535; Score =123.7; E_value=5.4e-34; Accession=PF00665.16; Description=Integrase core domain
  Pfam module annotation: Pfam domain module=RnaseH::rve; Domain location=37-164::376-535
MGETISFAPRKAIKSQVLADFVAEWVDTQLPTVLIQPELWTMFFDGSLMKTGAGAGLLFISPLGKHLRYVLRLHFPASNNVAEYEALVNGLRIAIELGVRRLDARGDSQLVIDQVMKNSHYRDPKMEAYCDEVRRLEDKFYGLELNHIARRYNETADELAKIASGRTTVPPDVFSRDLHQPSVKTDDTPEPEKASAEPEAPSAQPEAPSAQPEAPSVQPEAPLVRPEVSSAPEGEALCIEEERSGVTPNRNWQTPYLQYLHRGELPLDRAEARRLARRAKSFVLLEDGKELYHRSPSGILQRCISIAEGQELLQEIHSRACGHHAAPRALVGNAFRQGFYWPTAVADSTRIVRTCEGCQFNARQTHLPAQALQTIPITWPFAVWGLDLVGPLQKAPGGYTHLLVAIDKFSKWIEVRPLNSIRSEQAVAFFTNIIHRFGVPNSIITDNGTQFTGRKFLDFCEDHHIRVDWAAVAHPMTNGQVERANGMILQGLKPRIYNDLNKFGKRWMKELPSVVWSLRTMPSRATGFTPFFLVYGAEAILPTDLEYGSPRTRAYADQSNRANREDSLDQLEEARDMALLHSARYQQSLRRYHARGVQSRDLQVGDLVLRLRQDARGRHKLTPPWEGPFVIA

SEQ ID NO: 44242 - protein, 872 aa, Zea mays
  Coding DNA Sequence Number=SeqID_2463
  Gene Ontology: Mol. function=protein transporter activity; Cellular component=nuclear pore; Biological process=protein import into nucleus, docking
  Homolog annotation: Hit_ID=Q10NR5; Match level="QueryCoverage=29%, HitCoverage=84%, E-value=1e-113, Identity=78%"; Hit description=HEAT repeat family protein, expressed
  Pfam annotation: Domain name=HEAT; Domain location=194-230; Score =6.5; E_value=6.9; Accession=PF02985.12; Description=HEAT repeat
  Pfam annotation: Domain name=HEAT; Domain location=235-271; Score =31.6; E_value=2.8e-06; Accession=PF02985.12; Description=HEAT repeat
  Pfam annotation: Domain name=HEAT; Domain location=277-312; Score =28.1; E_value=3.1e-05; Accession=PF02985.12; Description=HEAT repeat
  Pfam annotation: Domain name=HEAT; Domain location=362-397; Score =5.6; E_value=8.9; Accession=PF02985.12; Description=HEAT repeat
  Pfam annotation: Domain name=HEAT; Domain location=584-621; Score =11.7; E_value=1.6; Accession=PF02985.12; Description=HEAT repeat
  Pfam annotation: Domain name=HEAT; Domain location=707-743; Score =19.8; E_value=0.0097; Accession=PF02985.12; Description=HEAT repeat
  Pfam annotation: Domain name=HEAT; Domain location=748-786; Score =2.6; E_value=21; Accession=PF02985.12; Description=HEAT repeat
  Pfam annotation: Domain name=HEAT_PBS; Domain location=19-46; Score =5.2; E_value=19; Accession=PF03130.6; Description=PBS lyase HEAT -like repeat
  Pfam annotation: Domain name=HEAT_PBS; Domain location=215-251; Score= 5.8; E_value=16; Accession=PF03130.6; Description=PBS lyase HEAT-like repeat
  Pfam annotation: Domain name=HEAT_PBS; Domain location=256-292; Score= 11.2; E_value=2.8; Accession=PF03130.6; Description=PBS lyase HEAT -like repeat
  Pfam annotation: Domain name=HEAT_PBS; Domain location=389-415; Score= 0.5; E_value=87; Accession=PF03130.6; Description=PBS lyase HEAT-like repeat
  Pfam annotation: Domain name=IBN_N; Domain location=23-89; Score =65.2; E_value=2.2e-16; Accession=PF03810.9; Description=Importin -beta N-terminal domain
  Pfam module annotation: Pfam domain module=HEAT::HEAT::HEAT::HEAT::HEA T::HEAT::HEAT::HEAT_PBS::HEAT_PBS::HEAT_PBS::HEAT_PBS::IBN_N; Domain
  Pfam module annotation: Domain location=215-251::256-292::389-415::23- 89
MAQSLELLLIQFLMPDNDARRQAEEQIRRLARDPQVVPALVHHLRTAKTPNVRQLAAVLLRKKITSHWPKLPADSKASLKQALIDSITLDHRFFAKYLSPTLLHMSASESARFQFTQIVHLAICLRDTLSAIQIISWLVKFKASFLKKHKLVVPILQVMCPLLTETANEDEDSDLAADRSAAEVIDTMAINLPRHVLAPVLEFASLSFHHINPKYREAAVTSLGVISEGCCEHLKDKLEDCLKIVLEALKDQEQMVRGAASFALGQFAEHLQPEILSHYASVLPCILNALEDPSDEVKEKSYYALAAFCEDMGEDILPYLEPLICRLVMSLQSSPRNLQETCMSAIGSVAAAAEQAFTPYAEKVLEMMKGFMVLINDEDLCARARATEVVGIVAMAVGRARIEAILPPFIEASISGFGLDYSELREYTHGFFSNVAEILGDSFTQYLPHVVPLVFSSCNLDDGSAVDIDDADSIENGFGGVSSDDDVNDEPRVRNISVRTGVLDEKAAATQAIGFFALHTKSAYAPYPLGRLQQFIHMVIENTVLHFSPFQISLTDTRYLEESLKILIRHSGYFHEDVRLQAVISLKHTVLNIYIKTMTEDDDKEVVAQACMSVADIVKDCGFAAIEPYMLRLAEVTLVLLRQESSCQQVESDGEDDGDIDHDEVLMDAVSDLLPAFAKKSPHPPQDKTMVVATLAEVAQEMGAPISAYVDKIMPLVLKELASSDATNRRNAAFCAGEICKNGGAAALKYYGDILRSLHNLFSNSESDDAVRDNAAGAIARMIMVQPQSIPLNQVLPVFIKALPLKEDHEESMTVYGCVCGLLLSSHPQILPLVPDVIHVFAQVVADSRTTRAGTISAGSAPSEPPCPPTTP

SEQ ID NO: 44243 - protein, 139 aa, Zea mays
  Coding DNA Sequence Number=SeqID_2464
MGPVSQKEDRGKAHLGMTHPKVTSWHRARGSSEAEPEGGLGEPRGTYSSGFHTWTKIVLPQMIDHIKHAWYRAMIVELVFLPLMTCRTRSPLMPYKAVDPRLILLPTEPRPEPPHDLQDSQHGAKGSTQTNTKIKLRVQ

SEQ ID NO: 44244 - protein, 279 aa, Zea mays
  Coding DNA Sequence Number=SeqID_2465
  Gene Ontology: Mol. function=heat shock protein binding; Cellular component=integral to membrane; Biological process=protein folding
  Homolog annotation: Hit_ID=Q10NS2; Match level="QueryCoverage=76%, HitCoverage=72%, E-value=4e-73, Identity=67%"; Hit description=DnaJ domain containing protein, expressed
  Pfam annotation: Domain name=DnaJ; Domain location=71-131; Score =64.4; E_value=3.6e-16; Accession=PF00226.21; Description=DnaJ domain
MGSSEADEDQLLKSFLAELLLSRAKRGAFIVKCTKIVIYFVDVEIHGTVNWLLSLPYAMVISWILGCFKLNPFEHLKLSFDSSPDEVKKQYRKLSLLVHPDKCKHPQAQEAFAALAKAQQLLLDPQERGYILDQVTAAKEELRAKRKKELKKDSASKIKSLVDEGKYEEQFERSDGFQQQLIIKVREILTDKEWRRRKMQMRISEEEGRLKKDEEETKEMWKRKREHEEKWEETRDKRVSSWRDFMKTGKKGRKGEIKPPKLKTEDPNKSYVQRPVKRN

SEQ ID NO: 44245 - protein, 77 aa, Zea mays
  Coding DNA Sequence Number=SeqID_2466
MGLCVCGRPTVRAAAGPAPAGPRAHREKAMAHAHGLCAPVSLAQKGLNNFRVGGRPKHALLSSTVIGLDVWRQQRGR

SEQ ID NO: 44246 - protein, 308 aa, Zea mays
  Coding DNA Sequence Number=SeqID_2467
  Gene Ontology: Mol. function=amino acid-polyamine transporter activity; Cellular component=integral to membrane; Biological process=amino acid transport
  Homolog annotation: Hit_ID=Q1SJF1; Match level="QueryCoverage=99%, HitCoverage=61%, E-value=1e-150, Identity=78%"; Hit description =Amino acid/polyamine transporter I
MWWQVIGGTVIVVMLPLVAKTTQPASYVFTHFQTAPDVTGIGSSAYAVVLSFLVSQYSLYGYDAAAHLTEETKGADKNGPIAILSSIGIISVFGWAYILALTFSIQDFSYLYNPNNETAGTFVPAQILYDAFHGRYNSSAGAIVLLFVIWGSFFFGGLSITTSAARVVCPANAVWLCAAVCTLLGLPILRINVVFTAITSIATIGWVGGYAVPIFARMVMREDDFRPGPFYLGRASRPVCLVAFLWICYTCSVFLLPTVYPIKMDTFNYAPIALGVCLGLIMLWWLLDARKWFKGPVRNIDDHNNGKV

SEQ ID NO: 44247 - protein, 88 aa, Zea mays
  Coding DNA Sequence Number=SeqID_2468
  Gene Ontology: Mol. function=DNA binding; Cellular component=nucleus; Biological process=regulation of transcription, DNA-dependent
  Homolog annotation: Hit_ID=Q0NZY1; Match level="QueryCoverage=73%, HitCoverage=65%, E-value=2e-13, Identity=53%"; Hit description=AtRL1
MGCPDLQISSSPNSISQWSQKENKMFEEALAYYGEGTSNRWDKVSRAMGGIKSAEEVRCHYEDLDYDVKMIESGHVPYPKYKTHGFWT

SEQ ID NO: 44248 - protein, 476 aa, Zea mays
  Coding DNA Sequence Number=SeqID_2469
  Gene Ontology: Mol. function=transferase activity, transferring glycosyl groups; Cellular component=membrane
  Homolog annotation: Hit_ID=Q5Z9Y2; Match level="QueryCoverage=84%, HitCoverage=73%, E-value=1e-128, Identity=57%"; Hit description =Putative xyloglucan galactosyltransferase
  Pfam annotation: Domain name=Exostosin; Domain location=76-430; Score= 258.6; E_value=1.3e-74; Accession=PF03016.6; Description=Exostosin family
  Subcellular localization annotation: CTP_CleavageSite=48; ConfidenceScore=5.12e-01
MALVRPEHPNPAARRPRLVVLLLLAFFALQLLVFVAFRAVRPPPAPPSASAAAVPVLASVPTHRDENDSRCGGGLVYVYDLPEAFNEDLLGMCDALAPMYSLCPYLANDGLGFPAGGTNLSSLLPRQLLGSWYASDQFALEHIVHRRLLSHRCRTTDPGRAAAFFVPFYAGLAVGRHLWAANATGADRDRDCVALLSWLHAQPWYRRSHGWDHFIALGRITWDFRRTTDAGWGGSFLTMPGVANITRLVIERDPWDGMDVGIPYPTGFHPRTAADVRAWQRYVARRPRPRLFAFAGAPRSAIKGDFRALLLEECQAAGACGALDCAEGRCIKNNALVMELFMGARFCLQPRGDSFTRRSLFDCLVAGAVPVLFWRRSAYLQYGWYLPVDGREGEWSVFIDRDQLRAGNLTVRGVLADIPESRVRLMRKRVVKMIPGLVYSAAGVEGIGGGMKDAVDVMVDGMLRRVAEQRPRWRTT

SEQ ID NO: 44249 - protein, 214 aa, Zea mays
  Coding DNA Sequence Number=SeqID_2470
  Homolog annotation: Hit_ID=Q6QP51; Match level="QueryCoverage=31%, HitCoverage=43%, E-value=3e-13, Identity=48%"; Hit description =Putative growth-regulating factor 1
  Subcellular localization annotation: CTP_CleavageSite=63; ConfidenceScore=5.06e-01
MAENLDAMNGGWLEVFIAPTTKVTVSEGFYRMAHRTLSSASATSPSRWVLTVGAYDRGLRTVVVMGARGVPSLLVYRGEPDGTPPKVGRGNDSSEVEVEAEPWGRARRRPSSEVEVEAEPWGRARRRPSFGVEVEVEPWGRARPRPSSEVEVEAEPWGRARRRPSSEAEAGAEPRGRPHPGGWHNSRSRAGDAVFLSGQSVEGRSDCGHFGPAD

SEQ ID NO: 44250 - protein, 114 aa, Zea mays
  Coding DNA Sequence Number=SeqID_2471
MAPLQLRQGAALLRQWRFIAVDLAIGGPDLIKWTPKLKSKVEMQTLVDDVDIFTETLPAVSTIELPVENDAGLVPSAIGSDTADDRWRCRLLHQTVWTSHRIVRCLLSTSATWN

SEQ ID NO: 44251 - protein, 149 aa, Zea mays
  Coding DNA Sequence Number=SeqID_2472
  Gene Ontology: Mol. function=protein serine/threonine kinase activity; Cellular component=integral to membrane; Biological process=protein amino acid phosphorylation
  Homolog annotation: Hit_ID=Q5JN27; Match level="QueryCoverage=68%, HitCoverage=13%, E-value=2e-28, Identity=56%"; Hit description =Putative receptor-like protein kinase 1
  Pfam annotation: Domain name=LRR_1; Domain location=60-82; Score =12.1; E_value=1.5; Accession=PF00560.23; Description=Leucine Rich Repeat
  Pfam annotation: Domain name=LRR_1; Domain location=84-107; Score =12.7; E_value=1.2; Accession=PF00560.23; Description=Leucine Rich Repeat
  Pfam module annotation: Pfam domain module=LRR_1::LRR_1; Domain location=60-82::84-107
MDSEPVTLSGDFGNQSKGEGNENDIMESPRYGMQAQQVPLWSLRNCSLEGPVPDVSGIPQLGYFDLSHNNLNGSIPGIFSGLPYLQRLSLDDNNLTGSVPSNIWQDIDLRGNKSLVLDFQNNALNNLSTPLSPPPNVTILCWGLRALYP

SEQ ID NO: 44252 - protein, 196 aa, Zea mays
  Coding DNA Sequence Number=SeqID_2473
  Homolog annotation: Hit_ID=Q6Z973; Match level="QueryCoverage=37%, HitCoverage=17%, E-value=6e-21, Identity=70%"; Hit description =GTPase activator protein-like
MARPSRGTPRRWSVQQVCAEANCQRRSQGNGLLGQVGPQVHVVRRREKRVPWGGIFYVALMVFVPLLKEPNFIVYIEVTSVSIFMLSPTTLRVWDILFNEGDNVLFCVALTVFKMREDDLLHTQHIGDVIDILQTTTRHLYGPDEFLTCLPNTIDVGTNNEKLLNDEFYIGLWQKHATGEEYDELIGEFMATVQQL

SEQ ID NO: 44253 - protein, 564 aa, Zea mays
  Coding DNA Sequence Number=SeqID_2474
  Homolog annotation: Hit_ID=Q7XEN2; Match level="QueryCoverage=99%, HitCoverage=99%, E-value=1e-137, Identity=49%"; Hit description =Expressed protein
  Pfam annotation: Domain name=DUF593; Domain location=318-411; Score =146.8; E_value=5.8e-41; Accession=PF04576.6; Description=Protein of unknown function, DUF593
MAAKDGSGSQDQGHRLWPMLSYACGELCVIMLLYVAAFASHAATRLARICGLRPPCILCTRLDRALHGNLPWFSADLVCSVHRSEVSSLAHCKSHGRLARSGDLCKSCLLSCTAVGAREEVVNSRPTTSSSRLCSCCSDPFKNNTGDTQRHSGAANAVVSWDSVPADHPNEKTSVVGIEEVQESDGPTKDSAAPSANGGAAKSNHRSAAPTRIAVDSNGSVKNASVVARANLTSPRPSEIISARDSSSTTQQEVKALLSQMSYARGGLDSSSIEGSPDAPNEESNATSNKSPYLERNYCVLEPSDGSLADDVEGGSSLENVKRQLELNRKAMAALHKELEEERSASAVAASQTMAMINRLQEEKAAMQMEALQHLRMMEQQADHDHLAIQDLHDLLTEREKELLDLDAELAHCRRLLQNDDPFNGDRFDGTDYTTNNNTDFVGSAMSHFEDDKAYILESLSRLEENLGISTIRLASGDARNCQEDILFEDQARADASPSSCDESSGVASLKIQISLLNIRLRALEEDQEFLNQVLSSLQCGSDGLQCIQEISRHLAELRRVVAH

SEQ ID NO: 44254 - protein, 69 aa, Zea mays
  Coding DNA Sequence Number=SeqID_2475
MARSLLCDRDSDVVSTQHRTHGSDQAVSTASSERASTRLQDARPDVGHDAEASGYEARRCDSLAWCSAS

SEQ ID NO: 44255 - protein, 129 aa, Zea mays
  Coding DNA Sequence Number=SeqID_2476
MATVDVAYEPSMKAVTATDAELVDGVQILANRRVRPGHITTTIALNRYWCISSPQPHQHVAGECSNVVATSLDGRRLTDAEFVDGVQILANYREFLPAPGDNGGGYRPLGGLADQGLIYSLYTLWTIPL

SEQ ID NO: 44256 - protein, 95 aa, Zea mays
  Coding DNA Sequence Number=SeqID_2477
  Subcellular localization annotation: CTP_CleavageSite=38; ConfidenceScore=5.06e-01
MEEFPAGNQGQVPIAISSLAPFQAGSAQKLVGSRTNKTAQEVSEEASMRICHSLFIGAYAEERERPELLAESCERRKRVAKDSGKTEQQVTVGAK

SEQ ID NO: 44257 - protein, 432 aa, Zea mays
  Coding DNA Sequence Number=SeqID_2478
  Gene Ontology: Mol. function=ferrochelatase activity; Cellular component=chloroplast; Biological process=heme biosynthetic process
  Homolog annotation: Hit_ID=Q69TB1; Match level="QueryCoverage=79%, HitCoverage=91%, E-value=4e-85, Identity=81%"; Hit description =Putative ferrochelatase
  Pfam annotation: Domain name=Ferrochelatase; Domain location=149-380; Score=306.7; E_value=4.3e-89; Accession=PF00762.10; Description =Ferrochelatase
MERGILGSRGAVQILGSKTGAAIDVLKLRLDDIATGGGHTEWPLSSDWLMSSVGIQAYIMDLIFDCWSTVGRSCGKTTSTSFTCSTKHELNLHVNVKPLQLATDGSSRLAYKTPVLKNQWNLSASSSSANVVTTFDDDKGVPSSFAEEKIGVLLLNLGGPETLDDVQPFLFNLFADPDIIRLPRLFRFLQRPLAKLISTFRAPKSKEGYASIGGGSPLRKITDEQANALKIALEKKKLNANIYVGMRYWYPFTEEAIDQDAGDPYRDQMEDCISLIMGELRSRGILNGHTLAYQSRVGPVQWLKPYTDEVLVELGQNGVKSLLAVPVSFVSEHIETLEEIDMEYKELALESGIENWGRVPALGCTSTFISDLADAVVEALPSASALGTRKPEDTDSSMDLMHYLTKMFFGSILAFILLLSPRLVSAFRNTML

SEQ ID NO: 44258 - protein, 527 aa, Zea mays
  Coding DNA Sequence Number=SeqID_2479
MAIDVVPAAHDRAGGGATAAFPTISTLVPAAAVCIAVSAYVSTLLSYYAVFGVSLICFAHAVWPDRVGSALVSVDAYARQQVSVARGDLEADLRRLRDAARDHPATAPVYAGAEDCARHARAAVAGWADSARRRAEAKWNESKDAACAARFVLRLIALVARLAAAVLFDAACGEARAWAPSVLGYLRGVADGIRSPSCNRGEGAAGGLVLKDVVCLVGTGFYLLFTMHLLFSSNTASGTQLCAVCFAATCGLAMLISDWIDLPDDADDSDTTTTYDSDAAGETSRDEELEVRESWRFLWVLVLITYCVDAFLLHVTLGPHPTTLAILTLCNLAVLKVGSQVQLTPDDGERAAEGAVNKWRRGAMVVYVASSVKILVIYRVLDCYLAALVFLWLFVMAGLLLAEEDNLLDFDTTDEDEEDGESVGFEVNVTGGAEREVDEEAREEHSNTNPSDDEEGSSAHLHSSKEHENVEVEEQRHEVPDCGGGGSTDDGWELIDVDPEMPAEANCSANRRAFSTEARRVISWLFR

SEQ ID NO: 44259 - protein, 45 aa, Zea mays
  Coding DNA Sequence Number=SeqID_2480
MALGEYMVGVSDKDNDDDSTSKVSLSANDLTIELEWKKDQNLPIE

SEQ ID NO: 44260 - protein, 120 aa, Zea mays
  Coding DNA Sequence Number=SeqID_2481
MDPPSGRNSIVPDPFRAWTGPAQAAQMCTYKWRAKLGSPITRRWAYESEPAPQHSNCVTGITTTARELKKPAGSNSHSTCENQSSAGNYLFLSLIFFEEDFQTHGLAAYALVISVATWNF

SEQ ID NO: 44261 - protein, 109 aa, Zea mays
  Coding DNA Sequence Number=SeqID_2482
MQVACNRTAVAHPFGFVASGVEAQAHTSCNRRADYYVQETAPPLALMPRLLDCGTSAATQGTGKGDTSKGILLREGSRPRALLLNRGSKAGPSEGFDSHPRALGLEAHY

SEQ ID NO: 44262 - protein, 259 aa, Zea mays
  Coding DNA Sequence Number=SeqID_2483
MAHGGGFRNLCRRGLGGRVKLEGAPVNDADTGDFGMAVTEAKAECAVPHVGVRSRAMGDRLGGSASHRHKVMARTRSEATVERAPRTSERLRAGATRAAAWWAPRVGANTLAGLRGAAATTLQTAGVIRRVSGHTPRQRFRADELLLKQLREAPEFPQSLISRCKNKCTGRNRKLGHEVTTVELKHHRRITSGHKGGSAGGGAGAGAAGAGTGGHNVGGGGAVTRPHSSKNGAAALPVPVSSVLTLALACGVVLSVMSY

SEQ ID NO: 44263 - protein, 46 aa, Zea mays
  Coding DNA Sequence Number=SeqID_2484
MARGRRPSSRADRNHDPPPLTPHGEAIKAAVERSQLSVPELLEEKQ

SEQ ID NO: 44264 - protein, 51 aa, Zea mays
  Coding DNA Sequence Number=SeqID_2485
MDFIRSGVSRGGSIHHWRFRLGRSCEVPELAAHHIGALVKGWMWIPIALDN

SEQ ID NO: 44265 - protein, 111 aa, Zea mays
  Coding DNA Sequence Number=SeqID_2486
MVDGGATMVGGAGGRVCWRASSTAARRGAWRDDFVAPVDNRSSTSLGDEKLEGVEGPLVHTPSAQGPGRWLDAKTNVWQGWRAIAPHRWWSHGNGKASKTSRQSPLKDLKS

SEQ ID NO: 44266 - protein, 249 aa, Zea mays
  Coding DNA Sequence Number=SeqID_2487
  Homolog annotation: Hit_ID=Q9LSX7; Match level="QueryCoverage=48%, HitCoverage=43%, E-value=1e-38, Identity=65%"; Hit description =Arabidopsis thaliana genomic DNA, chromosome 3, P1 clone: MSD21
MPGLAAAEQDAVSLVRRVARALNRRFTDIVALLFSHKGAGSLGAVAGFAIAVVFAWKFLRPRRRAPKRPPPTPAAAPAATVPDAAEPIGDSGKVVTREIVVKRLKGCRKVTCQLLGVVFEETIPEELQKHATVRPSVVELLLEISRYCDLYLMETVIDDKSEENALMALETSGLFRTGGLMKEKVLFCSSEVGRTSFVRQLESDFHIDTSLDIVSQLSREAAAGAVLAEANTSNQGQEPHEVRLFDVCA

SEQ ID NO: 44267 - protein, 98 aa, Zea mays
  Coding DNA Sequence Number=SeqID_2488
MTREGWTASAFDLPRAVRAVDGGGLIALPNCEAAVAGGGDRRPEKARTGTETPGPGGKGEEGQGGARELELFKTGLKGSFGRTLLHDSLALRADFLIE

SEQ ID NO: 44268 - protein, 155 aa, Zea mays
  Coding DNA Sequence Number=SeqID_2489
MASALRCRNMIVNRMQRLRGHTMSLWCHYLNMDGLDPNGRVPVRIKVLCYAKERTCRLSPVSQAVWSRAGAIFGLLWLCSGQQAASAWAAWFAPKCSASTPTRKFRHVMSPEFLDARWVWLLRYAAPLGEIEWVTVLPGNSGGGALTAPAYKLWR

SEQ ID NO: 44269 - protein, 413 aa, Zea mays
  Coding DNA Sequence Number=SeqID_2490
  Gene Ontology: Mol. function=phosphatidylcholine-sterol O -acyltransferase activity; Cellular component=integral to membrane; Biological process=lipid metabolic process
  Homolog annotation: Hit_ID=Q10A29; Match level="QueryCoverage=92%, HitCoverage=89%, E-value=1e-143, Identity=65%"; Hit description =Lecithin:cholesterol acyltransferase family protein, expressed
  Pfam annotation: Domain name=LACT; Domain location=70-397; Score =14.7; E_value=2.9e-13; Accession=PF02450.6; Description =Lecithin:cholesterol acyltransferase
MATHRHWLLLLFLPWALLSRRGAQPPDALYPVVLLPGNTCSQLEARLTDAYEPPPESPQCGAGSNERGRWFRLWRNATAMDDPAVAPCLADQLRVVYDPAARDFRNEPGVETRVLGFGSTADFLADTEANKDLCMGRLVEALQQAGYRDGETLFGAPYDFRQAPAARGQPCRAFARFTRRLRALVERASRENGGRPVVIVSHSQGGYFALEFLNRSPLPWRRRYVKHYVMASTGAGGFLLPLRNLASVPRDALEAPDALVALPSPAVFGPGTPPLVVTRARNYTARDIPEFLAAIGVPPLGVTLYETRALPLQLGFRAPVVPTTCINGVGQPTMEQLVYWDGNFSETPQVVYGDGDGFLPVASIVALDTVIGGDPRQEYYKSIKLAGTSHAGVVSDAAALKRVVDEILWSPPI

SEQ ID NO: 44270 - protein, 207 aa, Zea mays
  Coding DNA Sequence Number=SeqID_2491
MAVLGKSHSEPGPREGVHTHHAPASVTVALPAPTQVRDRRAPTPNAHATPTHLPFRCQDHAALRRHARAYWGAGAAAFPQTPERSPRFTGDARLGHCVHDVAERYGCAEDAGEVARAARTLEYAPAPRREQARWGGESEAEAPALYESGAESLRPACLLTVAFALCFSLALRGSAQRTNHRLAEKEIVIVLSSASAVPVESSVAVFD

SEQ ID NO: 44271 - protein, 84 aa, Zea mays
  Coding DNA Sequence Number=SeqID_2492
MSLAQAGSGAAGVLAAGRSCASRSIRSDPQHRTQLLQALHGDLEITDMLVKTGMSNQNDPIPVEERGFRVFDARISVGLSPASS

SEQ ID NO: 44272 - protein, 131 aa, Zea mays
  Coding DNA Sequence Number=SeqID_2493
  Gene Ontology: Mol. function=zinc ion binding
  Homolog annotation: Hit_ID=Q94IQ6; Match level="QueryCoverage=96%, HitCoverage=42%, E-value=1e-49, Identity=78%"; Hit description =Putative methyl-binding domain protein MBD111
MEDRIVQELLSCMLFLQENPEYVAQGVTLAQFSFQIPIPLRQDYVKKKPKLINASDEASTITSKSSEPDEVNPIAWAVPTKHEGDASEEASLADETLASEVVLTRKRKIGSSLSVEPNHLSDELEPKLEDA

SEQ ID NO: 44273 - protein, 76 aa, Zea mays
  Coding DNA Sequence Number=SeqID_2494
  Homolog annotation: Hit_ID=Q10PC8; Match level="QueryCoverage=61%, HitCoverage=7%, E-value=7e-09, Identity=61%"; Hit description =Hydroxyproline-rich glycoprotein family protein, putative, expressed
MASTAAVIASPAPGTAVAEPVAWLVDERDGFITWLRCEFAAANTIVDHLSCKNSTLKNCEGLLCQRLKTRCTKRAY

SEQ ID NO: 44274 - protein, 113 aa, Zea mays
  Coding DNA Sequence Number=SeqID_2495
  Homolog annotation: Hit_ID=Q67WN9; Match level="QueryCoverage=42%, HitCoverage=12%, E-value=2e-07, Identity=54%"; Hit description =Putative adiponectin receptor 1
  Subcellular localization annotation: CTP_CleavageSite=40; ConfidenceScore=5.15e-01
MAVRARRLGSLFPARSSSSLSLAITAVHHAFVSIVVVAVCTHTEWPVFKVVLILSSWLNETINVWMFIDLLGFMLFFDLTLVHLGPVLHQGVWLLAIAPFVPSSGDRAPTRDV

SEQ ID NO: 44275 - protein, 525 aa, Zea mays
  Coding DNA Sequence Number=SeqID_2496
  Gene Ontology: Mol. function=phosphoribosylaminoimidazole carboxylase activity; Cellular component=phosphoribosylaminoimidazole carboxylase complex; Biological process=purine nucleotide biosynthetic process
  Homolog annotation: Hit_ID=Q5QN02; Match level="QueryCoverage=98%, HitCoverage=84%, E-value=0.0, Identity=80%"; Hit description =Putative phosphoribosylaminoimidazole carboxylase, chloroplast
  Pfam annotation: Domain name=AIRC; Domain location=365-512; Score =284.0; E_value=2.9e-82; Accession=PF00731.10; Description=AIR carboxylase
  Pfam annotation: Domain name=ATP-grasp; Domain location=78-258; Score= 296.9; E_value=3.7e-86; Accession=PF02222.12; Description=ATP-grasp domain
  Pfam annotation: Domain name=ATP-grasp_2; Domain location=80-242; Score=-133.0; E_value=0.039; Accession=PF08442.1; Description=ATP -grasp domain
  Pfam annotation: Domain name=ATP-grasp_3; Domain location=76-250; Score=-44.2; E_value=0.014; Accession=PF02655.5; Description=ATP -grasp domain
  Pfam annotation: Domain name=CPSase_L_D2; Domain location=78-287; Score=-102.9; E_value=0.0011; Accession=PF02786.7; Description =Carbamoyl-phosphate synthase L chain, ATP binding domain
  Pfam annotation: Domain name=Dala_Dala_lig_C; Domain location=78-256; Score=-61.7; E_value=1e-05; Accession=PF07478.3; Description=D-ala D -ala ligase C-terminus
  Pfam annotation: Domain name=GARS_A; Domain location=78-236; Score= -117.2; E_value=0.045; Accession=PF01071.10; Description =Phosphoribosylglycinamide synthetase,
  Pfam annotation: Domain name=RimK; Domain location=76-270; Score= -69.3; E_value=0.047; Accession=PF08443.2; Description=RimK-like ATP -grasp domain
  Pfam module annotation: Pfam domain module=AIRC::ATP-grasp::ATP-grasp_ 2::ATP-grasp_3::CPSase_L_D2::Dala_Dala_lig_C::GARS_A::RimK; Domain
MGIRIVILDPLPGCPASSVCDEHVIGSFNDGDTVREFAKRCGVLTVEIEHVDAATLEKLEKQGVDCEPKASTITIIQDKYRQKKHFSRYEIPLPDFMEVDTLRSIEEAGEKFGYPLMVKSKRLAYDGRGNAVAKNKEELSSVVASLGGFERGLYVERWTPFVKELSVIVARSRDNSTVCYPVVETVHKENICHVVEAPADVSNKIKKLATSVAEKAIKSLEGAGVFAVELFLTEDDQILLNEVAPRPHNSGHHTIESCYTSQYEQHIRAILGLPLGDPSMKAPAAIMYNILGEDEGEAGFFLAHQLISRALTIPGTSVHWYAKPEMRKQRKMGHITIVGPSKISVKSRLDNLLQRNSSDPKEVSPRVAIIMGSQSDLPVMKDAERVLKEFDIPCELTIVSAHRTPERMYDYAKSAKDRGFEVIIAGMVASLTPLPVIGVPIKTSTLSGFDSLLSIVQMPKGIPVATVAIGIAENAGLLAARILAARDPELQDRVTKYQDDLRDMVLETAERLEDQGPEEFLKGMD

SEQ ID NO: 44276 - protein, 258 aa, Zea mays
  Coding DNA Sequence Number=SeqID_2497
  Homolog annotation: Hit_ID=Q337Z8; Match level="QueryCoverage=35%, HitCoverage=87%, E-value=4e-15, Identity=43%"; Hit description =Expressed protein
  Pfam annotation: Domain name=DUF1677; Domain location=116-240; Score =166.9; E_value=5.1e-47; Accession=PF07911.4; Description=Protein of unknown function (DUF1677)
MSLPKTLSFSNMRIVRQYPRSVYLHPASLALSSFHKCSRVPTYLGTREIEEDTKQVYHRDDPKELASQLPAKIMESQDLRRACSEIASKLEKLVIIGGSNPRPADVVASSGSDQQVETVRCACCGVGEDCTAAYIRGVRASFCGDWLCGLCAEAVKERVRRQGPAGSGVAAALGAHGAECRDFNATTRLNPTLSLAGSMRRIARRSLDRRTASCQERRSSLDASSATRAAAALTRSASCHPQLLGDAVDAAAAGDRWR

SEQ ID NO: 44277 - protein, 40 aa, Zea mays
  Coding DNA Sequence Number=SeqID_2498
MARILYKTPFTCSGTVPSNCEMVGVEFPQTTARGNKIMKH

SEQ ID NO: 44278 - protein, 158 aa, Zea mays
  Coding DNA Sequence Number=SeqID_2499
MSQRELGNSVHRARAFVDWLGLAILSTSNSQAHHLAIFQAVFFVSQNIIDGEPGHHGDIVFVQVMVHFFSRSQRRRGGASHKFQTDLYLVAEYARHEIEAHNEALDAMALFDGNVDMVTNVDVVPPSRTMTTMGSLSPWPLLASLLVTVAYEEETTKI

SEQ ID NO: 44279 - protein, 606 aa, Zea mays
  Coding DNA Sequence Number=SeqID_2500
  Gene Ontology: Mol. function=phosphoinositide phospholipase C activity; Cellular component=intracellular; Biological process =intracellular signaling cascade
  Homolog annotation: Hit_ID=Q9AXF1; Match level="QueryCoverage=99%, HitCoverage=99%, E-value=0.0, Identity=70%"; Hit description =Phosphoinositide-specific phospholipase C
  Pfam annotation: Domain name=C2; Domain location=479-571; Score=79.0; E_value=1.4e-20; Accession=PF00168.20; Description=C2 domain
  Pfam annotation: Domain name=PI-PLC-X; Domain location=107-253; Score= 160.5; E_value=4.4e-45; Accession=PF00388.9; Description =Phosphatidylinositol-specific phospholipase C, X domain
  Pfam annotation: Domain name=PI-PLC-Y; Domain location=358-460; Score= 69.2; E_value=1.3e-17; Accession=PF00387.9; Description =Phosphatidylinositol-specific phospholipase C, Y domain
  Pfam annotation: Domain name=efhand_like; Domain location=25-104; Score=23.3; E_value=7.6e-05; Accession=PF09279.1; Description =Phosphoinositide-specific phospholipa
  Pfam module annotation: Pfam domain module=C2::PI-PLC-X::PI-PLC -Y::efhand_like; Domain location=479-571::107-253::358-460::25-104
MGTTYKCCFIFKRRFHTRDAPPPEDVRALFSVHAGGGPHMGADDLRRYLVATGQEEAEVERLLEQIVQGRARVPRLARPLLSLDDFHRYLFSHDLNPPIRHPQVHHDMTRPLSHYFIYTGHNSYLTGNQLSSDCSDTPIIMALERGVRVIELDMWPNSTIDDINIVHGRTLTTPVSLIKCLRSIKKHAFVASPYPVIITLEDHLPSQLQEKVAKMVVEVFGNILYYPPDDTHELKELPSPEQLKGRVLLSTKPPKEYLETKLSDSTKEGDADLHLGKGTGDDAVWGKEVPDFRTEIQSAEKDDENDDVDDEEEQKLQPHIAPQYKHLITIRAGKPKDSLADALKSDPEKVRRLSLSEQQLAKAAKDHATEIVRKSLLPLLKRSASSVPNPNRFTQRNILRIYPKGTRVTSSNYNPFVGWVHGAQMVAFNMQGYGRALWLMHGFYKANGGCGYVKKPDFLMQTEPQVFDPREPQPVKKTLKVKVYMGDGWRMDFKQTHFDQYSPPDFYTRVGIAGVPADSVMKKTNAIEDNWTPVWEKEFSFPLTVPELALLRVEVHEYDMSEKDDFGGQTVLPVSELRPGIRAVALFDRKGMKYNHVKLLMRFEFA

SEQ ID NO: 44280 - protein, 132 aa, Zea mays
  Coding DNA Sequence Number=SeqID_2501
  Gene Ontology: Cellular component=nucleus; Biological process=DNA replication
  Homolog annotation: Hit_ID=Q9C7A8; Match level="QueryCoverage=87%, HitCoverage=42%, E-value=2e-17, Identity=50%"; Hit description=DNA replication complex GINS protein PSF2
  Pfam annotation: Domain name=Psf2; Domain location=21-128; Score= -13.3; E_value=6.8e-06; Accession=PF04128.4; Description=Partner of SLD five, PSF2
MAPLPSLSRLPSPGAIQVEFVAEDEIVEIVLNIRMDALNMIYVRLPARHHPFPSLSTPHPHLFIHLTLPPPLCRGDFGPFFPQIPTKVPLWLAVALKKRSKCTIRTPDWMTVGIGSGRRVASGIPAIAIPLY

SEQ ID NO: 44281 - protein, 35 aa, Zea mays
  Coding DNA Sequence Number=SeqID_2502
RLSSNLVIVSANPCANLDQPLREHVVETPTTSVYP

SEQ ID NO: 44282 - protein, 83 aa, Zea mays
  Coding DNA Sequence Number=SeqID_2503
MEEDDEFGDLYTDILIPTHTPNPPLPSTIRSIQPPPPRILHLTSSTSPDPTATEEDDEFGDLYMDILIPTHTPNPPPRYPTMF

SEQ ID NO: 44283 - protein, 695 aa, Zea mays
  Coding DNA Sequence Number=SeqID_2504
  Homolog annotation: Hit_ID=Q6ZIA4; Match level="QueryCoverage=25%, HitCoverage=39%, E-value=1e-51, Identity=60%"; Hit description =Putative gastric lipase
  Pfam annotation: Domain name=Raffinose_syn; Domain location=46-623; Score=-464.6; E_value=0.0011; Accession=PF05691.3; Description =Raffinose synthase or seed imbibition protein Sip1
MSSSSSIGTNFIQALEHQTCTLFSELDKHLQARDDKWEFRVAVLEFCVVDSERQFDNVSSDLRTGVVAQISVVEALESIVVDSTQHMDSVSSSVRADPERPHIDSAIDHLHSSMVKVRVAIDTRDLQWSPDVHGGGSGGLLGEPGGEPTEISGAAHAGGLPRPHHHPHRHPPIQSVRRRGALGLPRDGRDRPASTTGDEPDQGILPLPGHELLRPRRLHHQQDHCLNSSAVDFFLKYEPEPTSTKTMVHFAQTVRDSVLTKYDYVLLECNIASYGQAEPPMYRISGIPPSSASPSWRPLSCSWSSVRRRRLADLKVNHKFKGGTCKNLVDLVKKIKEKQGVQCAYMSHTLLGYWGGILATSDMMKQYNPKLVYQVQLPGMVMNLRDVALEKFGVGIIDPNKRCAFYNDQYNYPSSVGMDVVMVDIHNMLGTLGSVLGGHVAVTRKYQQDLEESIAGNFQTNNIICCRSHKLLENACAMFCLPPHVRVRSSRRRNQRLRCRNPLPPRTPREPSPPSYARTLSGPLAAATLSCPRHRPLTLQPQPPRAHHGTHGERAATTHATSLAPATAPRSPAPALCVHDGRRPSMAGGISGHGKRDSFHICCLCDICGSNCPIPYLMIPLILTPPRRCWRPVRIQHPLHPALVLGYPRLTAVPRHPSAQRRSAMLRPAGRRERITSATLRRESIDLVTLDDFHS

SEQ ID NO: 44284 - protein, 82 aa, Zea mays
  Coding DNA Sequence Number=SeqID_2505
MTESQLGLYARPQIFVDRRLSRTRRLRYGHALARFSGTSHEHKEAGHPRGDAASGRRSRRRATDAVQKQCGSPSPLSVAGFG

SEQ ID NO: 44285 - protein, 434 aa, Zea mays
  Coding DNA Sequence Number=SeqID_2506
  Gene Ontology: Mol. function=aldehyde dehydrogenase [NAD(P)+] activity; Cellular component=chloroplast; Biological process =aldehyde metabolic process
  Homolog annotation: Hit_ID=Q53P72; Match level="QueryCoverage=99%, HitCoverage=100%, E-value=0.0, Identity=69%"; Hit description =Aldehyde dehydrogenase, putative
  Pfam annotation: Domain name=Aldedh; Domain location=1-387; Score =107.9; E_value=2.9e-29; Accession=PF00171.12; Description=Aldehyde dehydrogenase family
MAEETVQELRASFASGRTRRAEWRAEQLKGLIRMIDEKEAEISAALHEDLAKPHMESYLHEISITRSSCKFALDGLKSWMKPEKIPAALTTFPSSAQIVPEPLGVVLIISAWNYPFIIGAIAAGNAVVLKPSEIAPATSSLLAKLLPEYVDNSSAKHLTPVALELGGKSPVVVDSNVDLHVAVKRIVVGKWGCNNGQACIAPDYIITTKSFAPELVASLKRVLERFYGEDPLQSADLSRIVNSKHFRRLTELIEEKSVADKIVYGGEVDEKQLKIAPTLLLDVPQDSAIMTGEIFGPLLPIVTVEKIEESFDLINARPKPLAAYLFTKNKKLQEEFVADVPAGGMLVNDTVLHLANPYMPFGGVGDSGMGCYHGKFGFDCFSHKKGVLVRGFGGEANARYPPYTTEKQKILRGLINGSFIALILALLGFPREKR

SEQ ID NO: 44286 - protein, 92 aa, Zea mays
  Coding DNA Sequence Number=SeqID_2507
  Subcellular localization annotation: CTP_CleavageSite=54; ConfidenceScore=5.54e-01
MTAIAAKSSQGPPYTDHSPTALAPFGKFSGKQVSGTIIRGTLKAPNSQLKDNVACAALTAVPLDRVRLTGSQARPQAPKEALLRSTQGSDSG

SEQ ID NO: 44287 - protein, 36 aa, Zea mays
  Coding DNA Sequence Number=SeqID_2508
MGDFQNICNKGRGALRRFGLMYPQVEIKNRSVATSV

SEQ ID NO: 44288 - protein, 125 aa, Zea mays
  Coding DNA Sequence Number=SeqID_2509
  Gene Ontology: Mol. function=signal peptidase activity; Cellular component=signal peptidase complex; Biological process=signal peptide processing
  Homolog annotation: Hit_ID=Q84KA8; Match level="QueryCoverage=99%, HitCoverage=87%, E-value=1e-46, Identity=62%"; Hit description =Signal peptidase protein-like protein
  Pfam annotation: Domain name=SPC22; Domain location=1-125; Score =108.4; E_value=2.1e-29; Accession=PF04573.3; Description=Signal peptidase subunit
MCFAASFSDNFNTLTPTASVKILNINWFQKEANGNDEVSMTLNISADLSSLFTWNTKQVFVFVAAEYETRQNALNQIFTSYNYIGSNLKGKEFNLTMHWHIMPKTGKMFADKIVMTGYQLPEQYR

SEQ ID NO: 44289 - protein, 220 aa, Zea mays
  Coding DNA Sequence Number=SeqID_2510
  Gene Ontology: Mol. function=cysteine-tRNA ligase activity; Cellular component=mitochondrion; Biological process=cysteinyl-tRNA aminoacylation
  Homolog annotation: Hit_ID=Q10RX2; Match level="QueryCoverage=61%, HitCoverage=25%, E-value=2e-44, Identity=63%"; Hit description =Cysteinyl-tRNA synthetase, putative, expressed
  Pfam annotation: Domain name=tRNA-synt_1e; Domain location=88-220; Score=-59.5; E_value=1.5e-11; Accession=PF01406.10; Description=tRNA synthetases class I (C)
  Subcellular localization annotation: CTP_CleavageSite=63; ConfidenceScore=5.51e-01
MAAAAAAARRAAGLLPLLLSSRSGARIPLHRAVSQIPPPCSYRLLSQQAKPFSASASASASASASNGATAERTRELHLYNTKSRKKEQFRPRDPGGEVGMYVCGITPYDDSHIGHARAYVAFDVVYRYLRYLDYEVRYVRNFTDIDDKIIARANQLGEDPFNLSKRFSDDFLLDMANLQCLPPSVEPRVSDHIDEIINMIKQFLDWMYNLRLVGAKGHLA

SEQ ID NO: 44290 - protein, 970 aa, Zea mays
  Coding DNA Sequence Number=SeqID_2511
  Homolog annotation: Hit_ID=Q9MA43; Match level="QueryCoverage=34%, HitCoverage=30%, E-value=4e-36, Identity=30%"; Hit description =Histone-lysine N-methyltransferase ATX2
  Pfam annotation: Domain name=PHD; Domain location=493-541; Score =17.8; E_value=0.00094; Accession=PF00628.19; Description=PHD-finger
  Pfam annotation: Domain name=SET; Domain location=809-952; Score =152.8; E_value=9e-43; Accession=PF00856.18; Description=SET domain
  Pfam module annotation: Pfam domain module=PHD::SET; Domain location =493-541::809-952
MPTRCCTLGENEKLICQCLSNKIAVRNLPQTSHCKDVSEKVMNQPSIAITERLENVSEPSVADDSSSKAVAEKKDAYRDSAVSKGQPNFGFSSGSSSIIVTKFQKSPEFNNVSSTAKHSKHKNLCDEGSRIEKSSASSYVPTSTGCEEPLNSSAKSELGPSRVKRKCNQISEGRRLEETDNEEHCSELLKKTRTLRCSVKGSESDDCTRASSQSSQKGVYQPQNEVNSFSCRVLRTKRKHPIMHLNKHVKQLHRQTKFFEGDEQPDAKGNFLGGLDSYDRKRQVEDMSTLDKTRHHQEGSRAFVRKLPKYVSLNCIVNEPNTNSEGACSGSGGIDSSLIATGITNDNRKSPKIVPLNLVLKKAKRCNAVKLRKTESTHLYEEKSSDCSVNSSDYSIEKYSVDDENCSPQAEYELQDSKRSRYSSNDLRSHVALHKRTSGGTKNRRTSVSLARIKKFGSKSVCYSGSDKDNAVLAHEVNARRLRYSGRLSSNSPCCVCGISDLEPCNRLIECSKCYIKVHQACYGVLKVPRGQWFCRPCKNNTMDTVCVLCGYGGGAMTRALKTKNILKSLLQGLMNLERSEYYVDSLGNASSECTSLQNPVDSAHGDNIMNAKNITSNSWTSGKYYSSLLGPQPMQWVHMVCGLWTPGTKCPNDTTMSAFDVSGASPAKRNTACSICDRTGGSFVKCRAVNCLVFFHAWCAHQRGLLQSEPEGEHNENIGFYGRCVSHAIVFSSHVNPKKEYFRNNNWTCARTEGFKGRKGEGFSDSSHKKYEEYSGEFGVSQEQINAWLRINGSKPCGRGQKEYIHYKQLKGWKHLVVYKSGIHGLGLYTSVFIPRGSMVVEYVGEIVGQRVADRREIEYQSGKRQQYKSACYFFKIDREHIIDATRKGGIARFVNHSCQPNCVAKIISVRNEKKIKLEKFDKSKVMFFAERHINPGEEITYDYHFNREDEGQRILCFCRSRYCRRYLN

SEQ ID NO: 44291 - protein, 170 aa, Zea mays
  Coding DNA Sequence Number=SeqID_2512
  Pfam annotation: Domain name=zf-CCHC; Domain location=102-119; Score =19.2; E_value=0.00066; Accession=PF00098.13; Description=Zinc knuckle
MMNPNEDKVNNVNDKIPTSIVVKRKDESHRHLLNGMKNNKRTRKMFGYKIKPPQPQAEALELMNTQTGESNQAQLFSMQATGHPSSAGNQAKLTRREVKVRGACFYCKEEGHFICQCPKKRLDRLMKKAFKQNSTSDDPEEIVFTRSKYKVIQTTDKGGRLLNIRVEPRE

SEQ ID NO: 44292 - protein, 78 aa, Zea mays
  Coding DNA Sequence Number=SeqID_2513
MGAADLAAAAGDWSGMGSQTLPASGGGEELGEEVEMMMGGWVGGRRSTSTGLGHQRSGVHEGKGTGTECAAPDSSHPA

SEQ ID NO: 44293 - protein, 1112 aa, Zea mays
  Coding DNA Sequence Number=SeqID_2514
  Gene Ontology: Mol. function=zinc ion binding; Biological process =proteolysis
  Homolog annotation: Hit_ID=Q53PX0; Match level="QueryCoverage=86%, HitCoverage=51%, E-value=0.0, Identity=58%"; Hit description =Expressed protein
  Pfam annotation: Domain name=DDT; Domain location=396-455; Score =52.1; E_value=1.9e-12; Accession=PF02791.7; Description=DDT domain
  Pfam annotation: Domain name=PHD; Domain location=611-656; Score =37.2; E_value=5.5e-08; Accession=PF00628.19; Description=PHD-finger
  Pfam module annotation: Pfam domain module=DDT::PHD; Domain location =396-455::611-656
MDTAAGPGPRDGPDRTPQGPGASPEEAAADGVKTDIAGGAEALAAAGAAGEADPGGGAAAAGRGGDAEASASEPTAEEVNEGCGGAAAAAGGDRPAAPEADADGGAGKGRSAVHAVSEVEQGQGIAGAAQDVDPAVFEVKKMDVSEGGDASKQNQHSPSCTASEVDVGIVPVAVRDLDPVGSEVMMEVDDGHVREQERAGVAVAGSEFKMEEADGRVVHQGSAATSAGGLQARAEEVGECLVGRYIGRNAPMQAGILIGKVASYDSTAGIYSVVFEDGHNEDLELPELHEFLMPDKNGTLGMSVNCRKRKLGLLVLSGSVSEVKEPASTRQRVDGCEMPANTDALRYSGSGSDMSEDIESSSNSSDFTKEEPSEPCPPVQAVELPPSSGDIHVPEDSISYLFSVYNFLRSFSVQLFLSPFGLDDFVAAINCTVQNNLLDAVHVSLLRALRRYLESKSAQGSQMASNCLKYLDWTLLDALTWPTFLLEYLYVMGCIKNLGGQSFARSLLAAEYYKLSVATKLRVLQILCDHVLESQEYKTILEDRVGYNEEMEYEIDSSTFLEAGSRAVLTRASKASAYKMLNDLQNFESGPNVTNSDVAVADVSQDGNSDDCRICGMDGTLVCCDGCPWAYHSRCIGQNKAFLPQGDWFCPECVVNKLGPTSSRIERGARGAQMFGIDMHGRLFLGTCNYLLVIEISSDVESYARYYNHYDVVKVLQRLALSDAYVDICRQIMEYWKHLLGRVQSERSTILKEVGTRHTPQSSMLSFTPTMSGDGSGWTTLKDGGDSKTVALPQTNVQQKIFANQYTVCSAEQTEKNVDVCKQALSAQNNIHNAPRNGASGPFVASPVSHQNGSIGTGMSNIAQAQPAHSIYRPDLSTVSAKSESFRSSLQGKLHLQMCTERPGNMSCGKAAKLSSFKPQAYMNLYNHGNIAASAAANLAIIASSEGKVSTSQLSAKPKKKVAADNALQLKAFSSAVAQFVWPSTEKKLMEVPRDRCGWCLACRSSASGNKKACFLNMTTSNAAKSSARVLSTMRVIKISDSHFPSIAAYLANMEESLRGLLVGSLQDMQQRERWREQLEEASNCRTVIPLLLEVSYRMASFGTSQYSTTEL

SEQ ID NO: 44294 - protein, 830 aa, Zea mays
  Coding DNA Sequence Number=SeqID_2515
  Gene Ontology: Mol. function=zinc ion binding; Biological process =proteolysis
  Homolog annotation: Hit_ID=Q53PX0; Match level="QueryCoverage=96%, HitCoverage=43%, E-value=0.0, Identity=60%"; Hit description =Expressed protein
  Pfam annotation: Domain name=C1_1; Domain location=297-342; Score =4.6; E_value=0.0077; Accession=PF00130.12; Description=Phorbol estersdiacylglycerol binding
  Pfam annotation: Domain name=LIM; Domain location=304-356; Score= -10.2; E_value=0.099; Accession=PF00412.12; Description=LIM domain
  Pfam annotation: Domain name=PHD; Domain location=303-354; Score=2.7; E_value=0.031; Accession=PF00628.19; Description=PHD-finger
  Pfam annotation: Domain name=PHD; Domain location=506-556; Score =15.4; E_value=0.0016; Accession=PF00628.19; Description=PHD-finger
  Pfam module annotation: Pfam domain module=C1_1::LIM::PHD::PHD; Domain location=297-342::304-356::303-354::506-556
MARQGVGPPPRRLGDTFKTVDTTLLESNIRGVAFSASWFKPIDDWPAESPCPSTGASRPAQHQKRGAGGRRGRRRLLVSEPGTVTDDDNSWTWWTGGNIIKRTLQRGALLHSTIRKAARQGGKKRLAGLSYHEGSNFPRRSRQLFWRACVGLSQTSSQLALQVRYLDAHIRWKEFISPDQIPSDGKSSDADFSALRNAVLCDKKIIDNKIRYALKFPNQKHLPVRLTKNILEAESDQDEIRKMWFSENHVPLYMLREFEQHAEASSLPTPGIPECFTNLYPRRVKAPDRDVFSYLFHKGEVYPCASCKKGVLYRDIVKCSSCQGNCHKECTSRSVVSKGGSTTSSLICKLCLQKRNLMLTSYNTNASYIQHLQKNNGQQPVTAPRNVSKVSSSHSAEPAPKVEAEPVTKVKAQRVGNVEATTQPVLNVKAQPPAKVVTQNITSVQKTKAKKSKSEKPTKAKKVQAITYFGLIWKKNKNDKDDGSEFRANDVILKSKDGIGSSIKPKCCLCDKAYSPEFLYVRCERCKNWFHGDSLQLEEDRIGELVGYRCCRCRRRAIPPCPHSDNYVKPEPEFSEQTVATSSVSTMLSSGKTSASADQDPLLASYGIVEPIGEETGDVDLSANTASIAPGSSQKLSIRRALAKTSGYLDQAGKSVNEYYVQNQNTPPGNGNINFSHTNEISFSEADSVGASGLLGWDFSRGTAYAAPPGFTSNRQQNRTSRGSFVPDECEREPQTYFSFTELLEADDAQLDDNAFGIATGLQGDANGSGSFVQRGVGFGGTSFMAEDGASNMNVPTNGPTPEEVACHNGTNTQPPPDPRCSVRDLRTHR

SEQ ID NO: 44295 - protein, 125 aa, Zea mays
  Coding DNA Sequence Number=SeqID_2516
MRFHAVPVEELFRHAAGIDYPPSHTETHGLPIVIQGLMTLSALVTYEGSFEALIYEGGDVGPHVEPLDADIARRWSVTALERARAKAEDDVTSSSDPVESNLTQPTIETDVGDKNEVDVDDTRGE

SEQ ID NO: 44296 - protein, 103 aa, Zea mays
  Coding DNA Sequence Number=SeqID_2517
MILFTSSRNEGGKEPLPHVGLLARRRRHHYRARPGVTVGYNRKHMRCVKVQRRDEGAATVTAEKVAISQRRATPAAAQHHPTDHTHQHHRVLRNHAKTHFPTT

SEQ ID NO: 44297 - protein, 194 aa, Zea mays
  Coding DNA Sequence Number=SeqID_2518
  Gene Ontology: Mol. function=protein disulfide oxidoreductase activity; Cellular component=chloroplast; Biological process=cell redox homeostasis
  Homolog annotation: Hit_ID=Q84Y95; Match level="QueryCoverage=48%, HitCoverage=54%, E-value=1e-34, Identity=71%"; Hit description =CAXIP1 protein
  Pfam annotation: Domain name=Glutaredoxin; Domain location=83-147; Score=114.4; E_value=3.3e-31; Accession=PF00462.14; Description =Glutaredoxin
  Subcellular localization annotation: CTP_CleavageSite=61; ConfidenceScore=5.74e-01
MAASATAARPLAGTAVPLPLSTRTRPARVALLSLIPPAPAQRLALRRGAWLSPPERSRSVRCLAAMSPEMRATLDKVVGSSKVVLFMKGTKDFPQCGFSHTVVQILRSLDVPFETLDVLANEALRQGLKEYSSWPTFPQLYIDGEFFGGCDITVGLEVSLKAMKNASQQLLHNPNPTVEPPTAATASRVPYKTL

SEQ ID NO: 44298 - protein, 730 aa, Zea mays
  Coding DNA Sequence Number=SeqID_2519
  Homolog annotation: Hit_ID=Q69UI4; Match level="QueryCoverage=29%, HitCoverage=31%, E-value=4e-58, Identity=58%"; Hit description =Kinesin 1-like
  Pfam annotation: Domain name=Kinesin; Domain location=407-680; Score =7.0; E_value=1.5e-14; Accession=PF00225.13; Description=Kinesin motor domain
MESSDAIVRKVLDAMHLMEVRLTEKITGRCDIVERRMDARCDELHCRFTARGYTIQQEVDAVIYDESSDHDGYGAAPFDINGSGEKSIFDDGPSFDEEHCTFSADNAHFNDVLRAHLFDSFLPTTTTVKETLRASFMREEDKRPKRLADLEALRRHNTEVRVCREADVKVRALDAISSHDFRYRKYHINEIEMATKRFSDDLQFGEGEYDPVYCASMGHTPIAIKGLRPDARSPSASGATPQHREPPNGKSDEPLRVNNLFQHIKGMLSGKRAAVAEKLGLTDSQSASTLIDAQVVFDEMQQSDTSVGIAHDAFNTFFSEIGVNEHVTWIIFIAVSFTASAVWARAARRLDGVVVADNRKLRQASVDGRKMHCYELLTDEALESWRTRSSGQHPRKEYLESPRADLRCMAEPTIASIRNAQAPLFTTMYELEYEREEDVMFSFNTIFYENGQQSDVYNFHVVPIVSDTINGIIGTIITYGQSGASKTYSMDEPSILHHNEQKTGLVQRVVDELFVCLGSSASTWIMKLPMVEIYLQKVRNLLDLSKDNPQIKESKIQGIYISGAIEIFIFNSSDVLENLFPGIDNSAVGKTHMNLASSRNNCLCIFSVQYESTSDERVPSGTIILIDLDGSEKVGTTGAEGRGLDKAKTINIVIDSLSFVSVTIFQLEGIVLGLIASAVRFSDLGAVSSGQGNFSVFVWDPGDRAVMLLASGVVLVLQELPHFRWRAAEA

SEQ ID NO: 44299 - protein, 324 aa, Zea mays
  Coding DNA Sequence Number=SeqID_2520
  Homolog annotation: Hit_ID=Q8W523; Match level="QueryCoverage=14%, HitCoverage=21%, E-value=1e-10, Identity=53%"; Hit description =Glycine cleavage complex P-protein
MKIEHKGFSIEFCNDAWRAIFQVMNYIVDAAPVASMVHLAHDFFTLPSEDRLSINSYIDAIPSPASSILQWVVPEAKDEGLNTLPTRAGPEGGQPERPHRAPKFQGPHPRYTYNIVGLMVKIANVVELRLLSVTSQQYAYATLHPSCTEEFDATHSNKAKILLNIMGVSHTLVMHNPARPLQLVILADGVQISLITWAISLRLWIQSLIVASTILPKRPWLAFDPGNLLCTLTGGDHHRDIIPVSAHGTNPADAAMVGMKIVAVGTHVKGRTAYVMSFEVGAVLEDAAWQAPEYCFTNNGGLGLADETTTTIAGGSSFVPRSVL

SEQ ID NO: 44300 - protein, 282 aa, Zea mays
  Coding DNA Sequence Number=SeqID_2521
  Homolog annotation: Hit_ID=Q7XCX5; Match level="QueryCoverage=28%, HitCoverage=6%, E-value=8e-16, Identity=43%"; Hit description=Plus-3 domain containing protein, expressed
  Pfam annotation: Domain name=GYF; Domain location=9-61; Score=26.0; E_ value=0.00013; Accession=PF02213.6; Description=GYF domain
MSNDTEPEKVWHYKDPSGKVQGPFTLLQLSKWTSYFPCDLRAASHTSSKATLVGTGQTRNNPSVDQTNAFSPAGHSVVSSSGITVQYNKLGSRLQPTRSRATSSFRAISSHRAGSARLRPPPPPEKSMCGGDLHGGGLHLRRASGGGNALGGAACGATSSFPRARRRRSPGTSGPCSTDCCHERSCCSVVSNTVSAMSVDGSKSKQQARAAGLTLGLAQARRRSPDARLTNQPARESLELLLALMVMDEILMPFAAVQFHSMQVQSSGLLGACCLGKQAGQQ

SEQ ID NO: 44301 - protein, 223 aa, Zea mays
  Coding DNA Sequence Number=SeqID_2522
  Gene Ontology: Mol. function=RNA polymerase II transcription factor activity; Cellular component=nucleus; Biological process =transcription from RNA polymerase II promoter
  Homolog annotation: Hit_ID=Q10AI8; Match level="QueryCoverage=58%, HitCoverage=90%, E-value=1e-60, Identity=90%"; Hit description=NAC domain containing protein, expressed
  Pfam annotation: Domain name=NAC; Domain location=99-157; Score =105.0; E_value=2.3e-28; Accession=PF01849.8; Description=NAC domain
MRALEQGRPTRSQAALPQPGHLLLLPQAGAGWGLCSAAAAGRRRPAVAGWWLLRCCLLMDVWTNEMNKERLMKMAGAVRTGGKGTMRRKKKAVHKTVTTDDKRLQGTLKRVGVNTIPAIEEVNIFKDDLVIQFLNPKVQASIAANTWVVSGSPQTKKLQDVLPGIINQLGPDNMEHLKRIAEEMQKQVAAAGAAAQVKEDNDDDVPELVPGETFEEVAQETKA

SEQ ID NO: 44302 - protein, 502 aa, Zea mays
  Coding DNA Sequence Number=SeqID_2523
  Homolog annotation: Hit_ID=Q851Y5; Match level="QueryCoverage=62%, HitCoverage=65%, E-value=5e-38, Identity=36%"; Hit description =Putative flowering-time related protein
  Pfam annotation: Domain name=Frigida; Domain location=168-493; Score =127.5; E_value=3.7e-35; Accession=PF07899.2; Description=Frigida -like protein
MPPPPPPPPPPSTDSHAALLHSISTLASYSDTLADFLDQWNSVILDVASIGATFAALFPGPGSDPKPYHPAPEPDREPEPPLAPQPEPGPNAAPAPEPRWEREPSPSPGPGSDPKPYLPAPAPEPDREPEPTLAPPQSEPGLNAAAAPEPRWEREPSPSPEPAPAPNPDRERKDGGGAGAASAADLEHRCKQMNCGGVRRFVIVHLRDGGGEWLRQVVPGALRRAPDPAALVFHAVGRYYIRAESPDAEAACALLLELYVRAGCPRLRRGRGSEAAELLLRQEAREAALTWRSRLLRVSGAVGDAPGAAGARGLALFMAAFGVPAEFPAQELCDLVDAAQASACVQVLKASKLFAKKMRDVVIEMINKAMYLQAMRIILVFEFQEAFPLAPTLALIIEKLEHDTKDENEGQASVCFSSFLPCTTFVKEADLHWCMVLHQERDEDDLALLSSISKCMEDHKLSPSEFTTFAAKIALLEERVGKARRQACSTGAKRKRPEECVE

SEQ ID NO: 44303 - protein, 75 aa, Zea mays
  Coding DNA Sequence Number=SeqID_2524
MAGTQGDLGPTMAELRLQGEEAGERGSGEPEVLGVNQEVSHVASKEAELTEATCTTETQRRPQNGRRIKVASSSE

SEQ ID NO: 44304 - protein, 145 aa, Zea mays
  Coding DNA Sequence Number=SeqID_2525
  Gene Ontology: Mol. function=protein tyrosine/serine/threonine phosphatase activity; Biological process=protein amino acid dephosphorylation
  Homolog annotation: Hit_ID=Q2R8T5; Match level="QueryCoverage=92%, HitCoverage=19%, E-value=2e-48, Identity=71%"; Hit description=MRNA capping enzyme, C-terminal domain containing protein, expressed
MDLNASPVPDDDEQQPYDDSVEVGYAQTEHVESAVATLRREREERRKRLKREQQDDGSRLHSQQIRNDYAPQPKRHSRIKEAPQGWLDCPAFGEPIDKIIPSKVPLDETFNESVPPGKRYSSKQLVNKQRKAGREKFGSSTSFCP

SEQ ID NO: 44305 - protein, 85 aa, Zea mays
  Coding DNA Sequence Number=SeqID_2526
MRLKASQNKRQLEGWSEVDGIQKISQCAGELTCAGQSHGEHPMNPFSRTAPPHGYMRHIAEDFYRGRKSEQCLSRGGVLIPGEVH

SEQ ID NO: 44306 - protein, 58 aa, Zea mays
  Coding DNA Sequence Number=SeqID_2527
MEDATDAKGMARFYTATRFRVQGIAESVARRVCRNQPEMDDRTGDRGPHHSGPRGKPR

SEQ ID NO: 44307 - protein, 97 aa, Zea mays
  Coding DNA Sequence Number=SeqID_2528
  Subcellular localization annotation: CTP_CleavageSite=12; ConfidenceScore=5.05e-01
MFHTAAPRIFARVEQKRKGSPKSPTLRFAATERRAQQLRPGEFAATNLSWMIGLTIGAHTTVAQEGNHACRGGPRGGFGKYVGQQGEGKKWAVGREI

SEQ ID NO: 44308 - protein, 149 aa, Zea mays
  Coding DNA Sequence Number=SeqID_2529
MRRACLPPLTSHTSSASSVEALRASASVDATPDWRRTKGGRSSPENEIRVHGRWGAHGADIYVHPWGNRNGGGGIRGGCALKEARCRGHGGGSTLPLSLVRCGRKSPVLDGKGRAAAKGLIAVVRPSQPQQAGVVATTRSDPGGHDIDL

SEQ ID NO: 44309 - protein, 140 aa, Zea mays
  Coding DNA Sequence Number=SeqID_2530
MYLQPTRTPSRLENVTWWLILFLRGALVLPQRPLVVREESGARPQTLIVSRVGPQSFSATVEPRGGGGGGGRAGLLGDVDGGQAALLVPLPSSAIGLVEMLSRALFSGGVGDVAPAAAVWKSWRLRSREALPPPDACAGT

SEQ ID NO: 44310 - protein, 456 aa, Zea mays
  Coding DNA Sequence Number=SeqID_2531
  Homolog annotation: Hit_ID=Q9SNJ1; Match level="QueryCoverage=19%, HitCoverage=32%, E-value=3e-21, Identity=53%"; Hit description =Similar to Arabidopsis thaliana DNA chromosome 4
  Pfam annotation: Domain name=GATA; Domain location=373-408; Score =61.1; E_value=3.7e-15; Accession=PF00320.17; Description=GATA zinc finger
MPLPPPNMRTQEPHPWLRDAPDDLPDCDGTGACFPGGGLCYPDDPLELVHSLFPAQTTVDRSALGIGTSAGEPPCREQEQPLAESAYGGGGSGGRNSCGLSSYVLEGLSGLEEIDTNMFFADDALDGGGGGGGGEATQDNLPCDSTGAKPKPPAHMPEAGDVHASPLPAHMLPGALQAYDACRAFHGASPPMAAGGPLPDFVTNDGAPMPAAAGLHACGALPGIVSNGASKPPSCRAFHGASPPTAAGGPLSVFVTNNGAPMPGAAAGLHACVVVLPGIVSIGASGPPRMEPMPARASLHPNAAPAHAPPPPSPPSSSASSGSGRCPSSATSGTEFLQPHAWVVPRRQRSLPTGARRSRSAPRQRNMQAQKVCRHCHSPDTPQWRTGPNGRATLCNACGLRYAGHRLVPEYRPLTAPSFRSGQHSNRHRNVMKLREQMKAAATEEEPSEQPTEGNT

SEQ ID NO: 44311 - protein, 705 aa, Zea mays
  Coding DNA Sequence Number=SeqID_2532
  Gene Ontology: Mol. function=protein serine/threonine kinase activity; Biological process=protein amino acid phosphorylation
  Homolog annotation: Hit_ID=Q1SD79; Match level="QueryCoverage=99%, HitCoverage=99%, E-value=0.0, Identity=59%"; Hit description =Tyrosine protein kinase, active site
  Subcellular localization annotation: CTP_CleavageSite=43; ConfidenceScore=5.35e-01
MEDQSPDHISVGSAQKKSSTSSRGRHRNFSSSTCKDFLRKFVDSELLTSSLEDWFSGHSEDCGFRKPSFDVPFDLTELQSFDYALESVTFQQLVRMPNALYASTSDVFEATAYLALEDFLHASIKGLWQTFWGPDESMPFSVACIHSTSSKFYPAEKAISSGKLDGVCATAILLKNLKHSQGRWDHIVVLALLRPDIGMVSAHGDQEPSPAVLGEALFFALRVLLSRSLGRSSTVLRNSDCVYLLLVDSQFGGVVKVQGDLNKLDFDLNNVYDCAAEWIKKHANISVSSIDRVWNKLGNANWGDIGTLQVLIAMFHSMIQFYGEPKYSLDELATEHSSRLQSRRSERHLVDRQANGNGLFRFQQRSRSPEIVEVQEEAAVDVKPHETLRIEIGSVVLMDDAYMQKGFQINDILTDSDPPIYTSTPVEEPTRTYLLYVGSSPSHLEPAWEDMNSWYQVQRQTKVLTVMKQRCISSRYIPQMVSSGRLVHPGPCNKPNSNGSCGHPWCSTPMLVTSPVGETISNLIRNGLFGVEEALRCCHDCLSALAAAAAAGIRHGDIRPENVIRVNNGSRHPYFVLIGWGHAILEDRDRPVMNLFFSSTFALQEGKLCGASDAESLIYLLYFSCGGVCPELDSVESALQWRETSWSRRVIQQKLGDISAVLKAFADYVDSLCGTPYPMDYEIWLKRLRRTMNEDHGKEVDTSSS

SEQ ID NO: 44312 - protein, 331 aa, Zea mays
  Coding DNA Sequence Number=SeqID_2533
  Homolog annotation: Hit_ID=Q018D5; Match level="QueryCoverage=31%, HitCoverage=41%, E-value=1e-14, Identity=44%"; Hit description=[R] KOG4758 Predicted membrane protein
  Pfam annotation: Domain name=TMPIT; Domain location=55-303; Score= -95.1; E_value=3.2e-05; Accession=PF07851.3; Description=TMPIT-like protein
  Subcellular localization annotation: CTP_CleavageSite=40; ConfidenceScore=5.47e-01
HTHQIATSPTPTLLPLSPSAPPVSLGRVRLPRTPAAPIDRAAALEREERRAEETEMGKGGGEEDGAAAAARAAEQARELQDAAAALLTQTRAEEEALRRRAAALQGELRRLREAAAAHADSDKVEEDLDRAACLIAEGDVASLLPSKTQGAFLKMFLGPVNLRATRKEVQLKVKEEYNSYRRGVELFLCWAIMQGFVMMLQNRYQRQRLYTRIALGKAKRMDVVWGETAGVEGQLLLLCPLLFLLQGFEGYVGFLLLRTAHTGVVPEWQVVVCGILLIAMAIGNFANTVDTLVTKSRFKAKMKKSKGRRDLDTCPSPTGSSSPIDSATTKA

SEQ ID NO: 44313 - protein, 69 aa, Zea mays
  Coding DNA Sequence Number=SeqID_2534
MAGAEAVGGGAEDAGGEAVMGGGPDISDTILLWAADGCEGLRAPARVRGAGEAGRRDFPTAGKREGISF

SEQ ID NO: 44314 - protein, 74 aa, Zea mays
  Coding DNA Sequence Number=SeqID_2535
MKTCCNQSRQYQAYGGVAGSAGGSDGTSVDASDVQYGLGVDAVAGVDVGTEEIRSEDTLDAFVEKIGVICELSN

SEQ ID NO: 44315 - protein, 265 aa, Zea mays
  Coding DNA Sequence Number=SeqID_2536
MKQSEADPAGCSMHVKHEHDRDAGCTKRSRPVPIQKDPDEYPQLLDGTWLVVCLAELLDEIWAAWTGRHELRAYFGTPFLANALKEVIELLTGYPSEIIPPSGRVWSWRVVPLGGNVRYDLGRDYEQMTNVLVWCCVRGWLDGLDNVLLGIGVSPRATCSSGALLEAADGWVPFKGSRRLGDREANPPTPWWWWARLTGTRRLGSLLGLKAKKGFLPPVEALGWRLEDEGEVPQPRDDEVVMLSSFYERGFRLPLDPFVRGLLFY

SEQ ID NO: 44316 - protein, 324 aa, Zea mays
  Coding DNA Sequence Number=SeqID_2537
MYNVYIASKCFLFLMARFWSRDYGRGISLAESSHSLTVLVSIVSFLQAELNISDKPANATGISSRNSGSANSKNSNIWDMKISAFSMLEDILSKVASNMTENLWQSVIEVLRKVMDFVTARNLVIESSIMSRFYTSFLRCLHLVLVDPKGPLSGHVAGFVANLQIFFVYGLRSSSPPTLAPKETRTDSKPRASRGRYRPPHLRNKERRENDSLEGQNSDSEYSWYDMSSSDSDLSDSDGYAKSGDRFRSSKARLAAILCIQDICHADPKLLTSQWPVLLPENDVLQQRKYQATLMTCLLFDPITKAFICHNVIMTYVLYGKRKF

SEQ ID NO: 44317 - protein, 188 aa, Zea mays
  Coding DNA Sequence Number=SeqID_2538
MARWSEGLRPSEDGVDMGIRPEHSYIRWAPSKTSREHDPLARRTRPCLLVVPMALVPVAAAAASCRNRARAASCYQGSKALAAAKTSPTAASTASKVVDSLGILDVVGEARFFEDLRISMLHTSTKDVKGLALAMSSGGVDVEGVEAIEEVQERWESMMTTSISQRALMRVLSCLQHSLMDRSPVGIE

SEQ ID NO: 44318 - protein, 96 aa, Zea mays
  Coding DNA Sequence Number=SeqID_2539
MARGDAISSAALSPSAVKAASGVHESSAQLERLASRVETGLCRWAEEEKEGQGGERTRRRDNNIFSSEVWNVPIPKQLIDERRSWASKQNLRVEAI

SEQ ID NO: 44319 - protein, 479 aa, Zea mays
  Coding DNA Sequence Number=SeqID_2540
  Gene Ontology: Mol. function=microtubule motor activity; Cellular component=microtubule associated complex; Biological process =microtubule-based movement
  Homolog annotation: Hit_ID=Q9SV36; Match level="QueryCoverage=82%, HitCoverage=36%, E-value=1e-153, Identity=69%"; Hit description =Kinesin-like protein
  Pfam annotation: Domain name=Kinesin; Domain location=63-398; Score =424.1; E_value=1.9e-124; Accession=PF00225.13; Description=Kinesin motor domain
  Subcellular localization annotation: CTP_CleavageSite=46; ConfidenceScore=5.46e-01
MATGAGWAPGRPVERHGAPRGGNARSKSVVPGPRRPSPSPARSRPAADHSGSADLCRVRVAVRLRPKNSEDLAHGADFDSCVELQPESKRLKLKKNNWSCESYKFDEVFSESASQKRVYEAVAKPVSVLEGYNGTVMAYGQTGTGKTYTVGRLGKDDPSERGIMVRALEHILSSLSFETDCVAISYLQLYLESVHDLLAPEKTNIPIVEDAKTGEVSLPGAAIVEVKDLEHVFQLLQIGEANRHAANTKMNTESSRSHAILIIHLQRNTRTKEENGSSLYDVRHDTFPDDLPLVLKSKLLIVDLAGSERIDKSGSEGHMIEEAKFINLSLTSLGKCINALAENSSHVPTRDSKLTRILRDSFGGTARTSLVVTIGPSARHYSETSSTIMFGQRAMKVVNTIKLKEEVDYEILYKKMEREVDQLTSEMERQQKVIRSEKMQMDKRLKESERSFHDLRMTFNMQIEPLHRQQSSMGDLPES

SEQ ID NO: 44320 - protein, 64 aa, Zea mays
  Coding DNA Sequence Number=SeqID_2541
PLQLYADGGYRLRIRRLEVNDEDSDDGAVSLKLQTPQPPQPPGSRGGGAPLRVDIGVSASTDAR

SEQ ID NO: 44321 - protein, 124 aa, Zea mays
  Coding DNA Sequence Number=SeqID_2542
MADILGDPAWLQLHPWPYTDTPWPGLQCELAPDDARVLHATRLHLDPNVATPPCRPGTRLDPASLRGLPHLWTLSIFGCFGVARAVHVVVLARADRAQVQPRPHRPHTSDVGSYFGLAITSLKL

SEQ ID NO: 44322 - protein, 125 aa, Zea mays
  Coding DNA Sequence Number=SeqID_2543
MAAAHPNVSDAYTLMGNPFITMPALCTLSLSTLFALHLSIRAALVYPHRIQPRQEIKIVMYETGEQEETRMLPPAGLLGELEHAEGSPTTRGQTEGKKNHGSLKSPKCTPEKFEKSPDDEGGETS

SEQ ID NO: 44323 - protein, 118 aa, Zea mays
  Coding DNA Sequence Number=SeqID_2544
  Subcellular localization annotation: CTP_CleavageSite=39; ConfidenceScore=5.68e-01
MAFAAVLRARLLPVPTPLSSSSPPPFFAPSAYVRVPRLTAAAARTLGQLFDTSVGITGQVDLAELDGPFVKLRLKGKFWHTRATVVARIGNYLKNRIPEILEVEIEDEKQLDDSPAAF

SEQ ID NO: 44324 - protein, 112 aa, Zea mays
  Coding DNA Sequence Number=SeqID_2545
MELIDGELVSEVGQPVRLVESLGTDLVDRSNQQARVEIDDFTNSIIYSSGHKMDSASVSTGNTDTCTTTSRGVTCASEDFDLWRGGGGGMHDGGGFGLASDRCDMEVEPDPR

SEQ ID NO: 44325 - protein, 112 aa, Zea mays
  Coding DNA Sequence Number=SeqID_2546
MTVKPTTPQVPQLRASYSTLMVVLFSGGSSNEKAREAGEDPTSIMAKLGSREWDQGGQTSEKGLGWTGEHSSLDTGKGYTSRAPRGCGGLMRGGSEEKLGLDRAEESLKGET

SEQ ID NO: 44326 - protein, 171 aa, Zea mays
  Coding DNA Sequence Number=SeqID_2547
MTVARHQRRNSSGEVVDDVGEAVEVTTVSGSLAGMTEVGRSSCACGEARGGKDSGLTTVTQFNSMSWGASCGGGWPKSSEGDLAALVRKGLDSRLKKLHGSTGKLSRGSGEARFLWEWLVAMAGVRVARVGGAELVRAKSWVGIVKASAEWSVARLGVAIKGTGECSRGTL

SEQ ID NO: 44327 - protein, 155 aa, Zea mays
  Coding DNA Sequence Number=SeqID_2548
  Gene Ontology: Mol. function=asparagine-tRNA ligase activity; Cellular component=cytoplasm; Biological process=tRNA aminoacylation for protein translation
  Homolog annotation: Hit_ID=Q8GTK9; Match level="QueryCoverage=66%, HitCoverage=17%, E-value=2e-51, Identity=91%"; Hit description =Putative asparaginyl-tRNA synthetase, chloroplast/mitochondrial
  Pfam annotation: Domain name=tRNA-synt_2; Domain location=9-149; Score=-181.2; E_value=0.0012; Accession=PF00152.11; Description=tRNA synthetases class II (D, K and N)
LSNSAEGGSLLKDIPATKDGRVDWSQDFFCKPAFLTVSGQLNGETYASALSDIYTFGPTFRAENSNTSRHLAEFWMIEPELAFADLNDDMACATAYLQYVTKEVPAMFLARVCICVSGPFNGSELHENLKHKKPEPTYTGLLTQPKTASNYCKII

SEQ ID NO: 44328 - protein, 253 aa, Zea mays
  Coding DNA Sequence Number=SeqID_2549
LRRTSDSHDITPAGCPNLSGCHIGMAFSEKVGRAGPRTGQALSWGRSLPSPAWTLVTPLLQAHLTWARDEHEGRGTSTSLTLGSGRLASPPFALAHALDPSGLGHAAHSLVGLGTPLSRNADSLLLFSADEGRRCPSLSVHDTLLGPQPEHDTASLGAKGSHLANKETKYGVQQREQGITEGTSEALRYNSPDCPVYTGQCLVPQGRAALELASLGNLLRYNSPDMSEVRHARAGTPDTLQYMSGVHQTSRRA

SEQ ID NO: 44329 - protein, 155 aa, Zea mays
  Coding DNA Sequence Number=SeqID_2550
MDLGLAEATAPTACRAEDATTAIGLVEERRWAGQHTTAGGGGMDRSDSEVCAARVGGEIAGGEGTGEQMRDLLSKDYTYDQKLTISTASASGLVRSDRARVIPFPCCLVPVRLSVLVTPDLVVVAVFSVGMSPCAINVIVGIGFGRVALLVACVL

SEQ ID NO: 44330 - protein, 74 aa, Zea mays
  Coding DNA Sequence Number=SeqID_2551
MAKGSVTPQQGASSEPHSIQSNGVADDRLLLRHCRSFGLGEGALEVAAWRWCARYGGGGRKGMMNTLLGVDRCR

SEQ ID NO: 44331 - protein, 107 aa, Zea mays
  Coding DNA Sequence Number=SeqID_2552
  Subcellular localization annotation: CTP_CleavageSite=17; ConfidenceScore=5.59e-01
MAAAASSALHVIGVVASAMPRSVAPAVARRRSVRMDPQHVARYPSPAHTPTRLPRRTHADGGETTTIGGRQSSQPSRARKSATLSVAASPTSFRSPICSVQWEWVRG

SEQ ID NO: 44332 - protein, 574 aa, Zea mays
  Coding DNA Sequence Number=SeqID_2553
  Gene Ontology: Mol. function=RNA-directed DNA polymerase activity; Cellular component=intracellular; Biological process=RNA-dependent DNA replication
  Homolog annotation: Hit_ID=UPI00004C1732; Match level="QueryCoverage =89%, HitCoverage=37%, E-value=0.0, Identity=72%"; Hit description =UPI00004C1732 related cluster
  Pfam annotation: Domain name=RnaseH; Domain location=327-449; Score= -31.2; E_value=0.047; Accession=PF00075.14; Description=RNase H
MPDIPRDVAEHSLDIRARARPVKQPLRRFDEKRHKAIGEEIHKLMAAGFIKEDAGATYQRCMNHVFGEHIGRMVKAYIDDIIVKTRKASDLLFDLETTFRCLKAKGVKLNPEKCVFGVPRGMLLGFIISERGIEANPEKIAAVTNMGPIKDLKGVQRVMGCLASLSRFISRLGERGLPLYVLRKAECFTWTPEAEEALGNLKALLTNVPILVPPAAGEALLIYVAATTQVVSAAIVVERREEGHALPVQGPVYFISEVLSETKIRYPQIQKLLYVCREASGRIAKWAVESMGETISFAPRKAIKSQVLADFVAEWVDTQLPTALIQPELWTMFFDGSLMKTGAGAGLLFISPLGKHLRYVLRLHFPASNNVAEYEALVNRLRIAIELGVRCLDARGDSQLVIDQVMKNSHCRDPKMEAYYDETLYLQYLHRGELPLDRAKARRLARRAKSFVLLGDGKKLYHRSPSGILQRCISIAEGQELLQEIHSGACGHHAAPRALVGNAFRQGFYWPTAVGDLVLRLRQDARGRHKLTPPWEGPFVIAKVLKPGTYKLANSQSEVYSNAWNTRQLRRFYP

SEQ ID NO: 44333 - protein, 60 aa, Zea mays
  Coding DNA Sequence Number=SeqID_2554
MATRTGGNKLTDVKRKPSRAKAVTRLDGFDLNRYLLMVTAAQGLRSLYHGILISEADREN

SEQ ID NO: 44334 - protein, 119 aa, Zea mays
  Coding DNA Sequence Number=SeqID_2555
  Subcellular localization annotation: CTP_CleavageSite=23; ConfidenceScore=5.26e-01
MAGLRLGLGVARRAWTGSTRRAVAGAVKKRRGRAVSWLGAAVSGPPGAGLQRLLAARSGKETRGGGERVGGGGWESGGQGRARPASSWAPSGLLGVLQGVSGPSDLDPSTASEYWFTRA

SEQ ID NO: 44335 - protein, 84 aa, Zea mays
  Coding DNA Sequence Number=SeqID_2556
MAAGLLPALGEEEEGGAGWEMAARGEVELAPAEQERAQAGRCCAGRNEGAAGFRKKKGLGAIHGSSCSLLAAVCVLNRGEESCA

SEQ ID NO: 44336 - protein, 165 aa, Zea mays
  Coding DNA Sequence Number=SeqID_2557
  Homolog annotation: Hit_ID=Q6RIB0; Match level="QueryCoverage=63%, HitCoverage=96%, E-value=3e-19, Identity=49%"; Hit description =Flowering promoting factor-like 1
MSGVWVFEDGIVRRADSDPPSGAGAGGSRPNKVLVHVPSGEVVTSYDVLERRLRELGWERYLYDPCLLQFHQRSTVHLITVPRDFSRLKLVHMYDVVVKTRNVFERVRVAASCMLSYFVCRRINNECVPKYRDNTQRKKSSGTKDITTTALSSNNRTISHPLGTI

SEQ ID NO: 44337 - protein, 187 aa, Zea mays
  Coding DNA Sequence Number=SeqID_2558
  Subcellular localization annotation: CTP_CleavageSite=69; ConfidenceScore=5.34e-01
MGRGSHTNTAATQPPVHALERLLRVVVTPASNSRRAKDCRAPIPPPTGPTHLGRRSPSTQGPTPEVVFRASQWETPRRHPLSLPLFSISLSVATTVRVEGLRPGFYSAASVCVPNSAPIWGEKSVRAARATRGGYGDSAMRARPRFYRIEDVFRAYIGLGKKEWGVSVYYQAGNMIKIDMDEINYMM

SEQ ID NO: 44338 - protein, 78 aa, Zea mays
  Coding DNA Sequence Number=SeqID_2559
  Subcellular localization annotation: CTP_CleavageSite=66; ConfidenceScore=5.68e-01
MAKPGQVTPPGPLRLRKHPTQPSNPVVTSFPPITQCSTMDQIVSLAAGSRRFESIFNLTSDRTCIRASLAWETPSQDQ

SEQ ID NO: 44339 - protein, 204 aa, Zea mays
  Coding DNA Sequence Number=SeqID_2560
MTTGSKIKGKPSGGQNLSQVARYTEEKDGGRGNPRHGFIDEQRPLRSASHRWRIRRELRLAVTPTAPKFRVGACRGIRDGLVNCPRRIHVSGGGCWAVYRGRENGGVAQRPGARGFCCAESARPQQSTPARGRRRKAHPQTLGRAARTSHEGAVGIWPATVASVDSAEVTDVRRRMRGFSSGRGDEAGKAAPSVSQWVVARDSR

SEQ ID NO: 44340 - protein, 220 aa, Zea mays
  Coding DNA Sequence Number=SeqID_2561
MQEFPCRTAITAKSSRGPPYTDHSPTALAPFGYQDDSSDSRDLTLIVGLFNKCTRRRGIGDPGPHDPDLVVRIRSPLNEERPLRSASHRWRIRRELRLAVTPTAPKFRVGACRGIRDGLVNCPRRIHSPRDPSSPRQREEDGGRPTRRLSVAQRVQVARGEETKLARRPHQSVNGLLRAIAGERMSRGSHRAVRACGGGVRLAMRVRKDGPKQIGPKMSK

SEQ ID NO: 44341 - protein, 922 aa, Zea mays
  Coding DNA Sequence Number=SeqID_2562
  Gene Ontology: Mol. function=nucleic acid binding
  Homolog annotation: Hit_ID=Q6Z7C5; Match level="QueryCoverage=94%, HitCoverage=41%, E-value=0.0, Identity=58%"; Hit description=SNF2 domain/helicase domain-containing protein-like
  Pfam annotation: Domain name=QLQ; Domain location=393-429; Score =52.2; E_value=1.8e-12; Accession=PF08880.1; Description=QLQ
  Subcellular localization annotation: CTP_CleavageSite=29; ConfidenceScore=5.15e-01
MQPSGGASGSSRGSPASSPHPDHQQPPTPASAQQQAQQLGFRGQGMMHHHEQQQAFHSGAPHGMMGPGGVNFPQSSGPVSSFQGQRNLPLSSGGPQGMVGGQMHNQVAMQQQFLKLAMQQQQQQQKAAQGMLLQQQAKMNMAGSSSRDQDMLNNPAKMQELMALHQAQMYKRQCEQKEQGQSSGSEQRSGDMRPPMPPQGVPGQQLPSMGMIRPMQPIQGQVGMGSAGGNPITPTQFQAIQAWAKEHNFDLSNPANISAISQLLPIWQSNRMAAMQKQNEANMAAQQQQALPSQLQQQFPVHNRDGSNERAVRSLMTGGNGAQTTHIPQSSGHVNKIPEQPNPKNVLANSEAMQMQHVRQMQQLNQAAAPTSTPIEAGGSQVPTSAQPQTGQTGFTKNQLHVLKAQILAFRRLKRGDRLPPEVLELIVSGRPPDSQGQQQVSGPQVTHNRERPTVSNADEHGKQMESGGKAPEKPALLKGPCLPKVEVSTSEDKASPASGPGPAQVMKASPKEPLKIGPVSVPEHCNTTVIKSEQDLERNIQRTPGRSDYNAERGKSVPAESGSVDVEQAKRTGSTSSAPVPRDVPRKYHGPLFDFPSFTRRHDSMGSANYNSNLSLGYDVKDLLAQEGMIVLGRKREDNLKKISGLLAINLERKRIRPDLVLRLQIEEKKLKLLEHQARLRDEVEHEQQEIMAMPDRIYRKFVRQCERQRVELVRQVQQMQRASREKQLKSIFQWRKKLLEAHWAIRDARITRNRGVAKYHERMLREFSKKKDDDRNKRMEALKNNDVERYRQILLEQQTSVPGDAAQRYNVLSSFLTQTEEYLYKLGGKITATKSQQQVEEAANAAAAAARAQGLSEEEVKAAAQCAGQEVMIRNTFSEMNAPRDNTSVNKYYTLAHAVSERVTKQPSLLRAGTLKGLPL

SEQ ID NO: 44342 - protein, 110 aa, Zea mays
  Coding DNA Sequence Number=SeqID_2563
MNDDDAVEERARPREERGRDGTSAVRRLWEVSGRVGAAGVGAKIYGVDPPDTCTAADTGVGAKIYGADTLTRHCQPRLHVRQTGANIIGAGTQKLGANDDGAELRVHFLK

SEQ ID NO: 44343 - protein, 261 aa, Zea mays
  Coding DNA Sequence Number=SeqID_2564
  Gene Ontology: Biological process=regulation of cell volume
  Homolog annotation: Hit_ID=Q10P28; Match level="QueryCoverage=99%, HitCoverage=100%, E-value=1e-80, Identity=62%"; Hit description =Nucleotide-sensitive chloride conductance regulator family protein, expressed
  Pfam annotation: Domain name=ICln_channel; Domain location=44-120; Score=117.9; E_value=2.8e-32; Accession=PF03517.4; Description =Nucleotide-sensitive chloride conductance regulator (ICln)
MAPGLQRFTDIADDGTPQLDAASGEELVRVDRTVAVALGPRSPESPGTLFVTTRRVIWLSEAEKGKGYAVDFLAISLHAVSRDLEAYPSPCIYTQIEAAVGTEEEAGESNPEANELELSRVSEMRLILADPGQRILLNYVVSLKDFFVQACVYALSLMMEFKASVDALFDVFCHCAELNPDPNAECNGENGWIRGEDMSNGDWIRDDVDMVDENVPQFFNANPIGQNGGYDLSRSVFELQINDQRFEDAEEEQESHENNGH

SEQ ID NO: 44344 - protein, 101 aa, Zea mays
  Coding DNA Sequence Number=SeqID_2565
MWIAWGFIQYSSSLGADPSCDGHHALSGLILDMHASLLGRLFKVSLRGGPPSTDLVSAGMEAVEPFGWSGRPKRVPVATPLVGLPQENVRYDLGCGHEQMT

SEQ ID NO: 44345 - protein, 81 aa, Zea mays
  Coding DNA Sequence Number=SeqID_2566
  Gene Ontology: Mol. function=translation release factor activity; Biological process=translational termination
  Homolog annotation: Hit_ID=Q10P29; Match level="QueryCoverage=97%, HitCoverage=34%, E-value=1e-15, Identity=75%"; Hit description =Immature colon carcinoma transcript 1 protein, putative, expressed
MESLLYLLQKLEHRRLDHLHYSTICPEQAIIDAASYVPPPPTEDQKKKIEKIAAVAERKRLQNKKVLSQKKEFRRNRTSWD

SEQ ID NO: 44346 - protein, 50 aa, Zea mays
  Coding DNA Sequence Number=SeqID_2567
MAAAAVYGGLKGKLGVEDAPELQLNRIRITLSSKNVKNLEKEERIKGIDN

SEQ ID NO: 44347 - protein, 67 aa, Zea mays
  Coding DNA Sequence Number=SeqID_2568
MDDQRKEKPRCEHSSRVGQPGPRRRCRNLATCCCCRKLGLAGGSVMLLPPATADPQWLAGGFYGAAC

SEQ ID NO: 44348 - protein, 275 aa, Zea mays
  Coding DNA Sequence Number=SeqID_2569
  Gene Ontology: Mol. function=calcium ion binding
  Homolog annotation: Hit_ID=Q10P21; Match level="QueryCoverage=98%, HitCoverage=73%, E-value=9e-84, Identity=62%"; Hit description=39 kDa EF-Hand containing protein, putative, expressed
MAAGLKRDPLVILRMDGEDLRDFAAGSRYEPTAAAVFSQVVDLGSEVASPRQCVLAALQKLSVDHGVPPASDAWVAKHIVEPALQQLLPADQPGQQPASRDDLFQQLKKLLGAVADRLQEQPVIVAHTENHYDGSGVKRLLANKFELDKKVQLLLLGNAECQYGNTELLDSVWKNLAAEDKNKASKGCLITALDKMADAASLPYYSAVKEVDAVVEESIKTAGVEEGKAVDEAEFKKSLTEILRAIMLRLNDSPVFVSTDVVVHEPLSGTSSSVN

SEQ ID NO: 44349 - protein, 616 aa, Zea mays
  Coding DNA Sequence Number=SeqID_2570
  Gene Ontology: Mol. function=transporter activity; Cellular component= membrane; Biological process=oligopeptide transport
  Homolog annotation: Hit_ID=Q9FWL0; Match level="QueryCoverage=99%, HitCoverage=99%, E-value=0.0, Identity=79%"; Hit description =Putative peptide transport protein
  Pfam annotation: Domain name=MFS_1; Domain location=40-534; Score= -12.0; E_value=0.0011; Accession=PF07690.6; Description=Major Facilitator Superfamily
  Pfam annotation: Domain name=PTR2; Domain location=102-518; Score =385.5; E_value=8.3e-113; Accession=PF00854.12; Description=POT family
  Pfam module annotation: Pfam domain module=MFS_1::PTR2; Domain location=40-534::102-518
MAERLEAAASDEYTQDGTVDLHGNPVLRSRRGGWRACGFVVVYEVFERMAYYGISSNLVLYLTKKMHQGVVPSANNVTNWVGTIWMTPIIGAYVADAHLGRYRTFMVASVIYLSAVNIVSSVTQGMILLTLAVSLPALRPPKCGAGTADPDCVHKATSEQLGVFFLALYILAVGTGGTKPNISTIGADQFDDAHPRERAHKLSFFNWWMFSIFFGTLFANTVLVYIQDTVGWAVGYALPTLGLAVSIAVFTAGTPFYRHKPTSAESPFAKMARVIVAAARKLDVPVPVDPRDLHELDAEHYAKRNVAPLPHTPNLSVLSKAAVKTGAATSRWSLSTVTQVEETKQMLKMLPVLAITFVPSAMMAQINTLFVKQGTTLDRHVGRHFEIPPASLQGFVTISMLLAVVLYDRAFMPFARRVTANPRGISLLQRMSVGLVIHILIMAIASLTERHRLAVARDHGLYDSKGTTVPLTIFVLLPQFVLMGVADAFLEVAKIEFFYDQAPEGMKSLGTSYAMTSLGIGNFLSSALLSAVSHITRRHGRTGWILNNLNASRLDKYYAFFAILNCANLVAFFFVCRFYVYNAEVSHVVDAGSSKQKREVPMAMQPPAVGAVDATL

SEQ ID NO: 44350 - protein, 118 aa, Zea mays
  Coding DNA Sequence Number=SeqID_2571
MARSSGSCSFSADARPRQVADATLMEEGSRGGGGRRGPPAPDEGRRKGRLRLRMSLASAKCGRGTPAHSRWRSGDRGEGSRGSGAVRAVGRDVAEGGGYRRMKGDSWRPSLEYGLLQT

SEQ ID NO: 44351 - protein, 1429 aa, Zea mays
  Coding DNA Sequence Number=SeqID_2572
  Gene Ontology: Mol. function=protein serine/threonine kinase activity; Cellular component=integral to membrane; Biological process=protein amino acid phosphorylation
  Homolog annotation: Hit_ID=Q337M0; Match level="QueryCoverage=81%, HitCoverage=96%, E-value=0.0, Identity=67%"; Hit description=Leucine Rich Repeat family protein, expressed
  Pfam annotation: Domain name=LRRNT_2; Domain location=133-174; Score =40.8; E_value=4.8e-09; Accession=PF08263.3; Description=Leucine rich repeat N-terminal domain
  Pfam annotation: Domain name=LRR_1; Domain location=178-201; Score =0.6; E_value=2.2e+02; Accession=PF00560.23; Description=Leucine Rich Repeat
  Pfam annotation: Domain name=LRR_1; Domain location=203-225; Score =16.6; E_value=0.09; Accession=PF00560.23; Description=Leucine Rich Repeat
  Pfam annotation: Domain name=LRR_1; Domain location=227-249; Score =13.2; E_value=0.97; Accession=PF00560.23; Description=Leucine Rich Repeat
  Pfam annotation: Domain name=LRR_1; Domain location=251-273; Score =13.3; E_value=0.88; Accession=PF00560.23; Description=Leucine Rich Repeat
  Pfam annotation: Domain name=LRR_1; Domain location=275-297; Score =7.4; E_value=12; Accession=PF00560.23; Description=Leucine Rich Repeat
  Pfam annotation: Domain name=LRR_1; Domain location=320-339; Score =13.1; E_value=1; Accession=PF00560.23; Description=Leucine Rich Repeat
  Pfam annotation: Domain name=LRR_1; Domain location=345-367; Score =15.9; E_value=0.15; Accession=PF00560.23; Description=Leucine Rich Repeat
  Pfam annotation: Domain name=LRR_1; Domain location=369-391; Score =9.3; E_value=5.2; Accession=PF00560.23; Description=Leucine Rich Repeat
  Pfam annotation: Domain name=LRR_1; Domain location=393-415; Score =12.3; E_value=1.4; Accession=PF00560.23; Description=Leucine Rich Repeat
  Pfam annotation: Domain name=LRR_1; Domain location=417-439; Score =5.5; E_value=27; Accession=PF00560.23; Description=Leucine Rich Repeat
  Pfam annotation: Domain name=LRR_1; Domain location=441-463; Score =16.5; E_value=0.097; Accession=PF00560.23; Description=Leucine Rich Repeat
  Pfam annotation: Domain name=LRR_1; Domain location=465-488; Score =7.3; E_value=12; Accession=PF00560.23; Description=Leucine Rich Repeat
  Pfam annotation: Domain name=LRR_1; Domain location=490-512; Score =7.3; E_value=12; Accession=PF00560.23; Description=Leucine Rich Repeat
  Pfam annotation: Domain name=LRR_1; Domain location=514-536; Score =13.7; E_value=0.66; Accession=PF00560.23; Description=Leucine Rich Repeat
  Pfam annotation: Domain name=LRR_1; Domain location=538-560; Score =14.5; E_value=0.39; Accession=PF00560.23; Description=Leucine Rich Repeat
  Pfam annotation: Domain name=LRR_1; Domain location=562-584; Score =13.0; E_value=1.1; Accession=PF00560.23; Description=Leucine Rich Repeat
  Pfam annotation: Domain name=LRR_1; Domain location=586-608; Score =9.7; E_value=4.3; Accession=PF00560.23; Description=Leucine Rich Repeat
  Pfam annotation: Domain name=LRR_1; Domain location=610-633; Score =10.2; E_value=3.6; Accession=PF00560.23; Description=Leucine Rich Repeat
  Pfam annotation: Domain name=LRR_1; Domain location=634-657; Score =6.8; E_value=16; Accession=PF00560.23; Description=Leucine Rich Repeat
  Pfam annotation: Domain name=LRR_1; Domain location=658-680; Score =5.4; E_value=28; Accession=PF00560.23; Description=Leucine Rich Repeat
  Pfam annotation: Domain name=LRR_1; Domain location=682-704; Score =6.4; E_value=18; Accession=PF00560.23; Description=Leucine Rich Repeat
  Pfam annotation: Domain name=LRR_1; Domain location=706-728; Score =11.3; E_value=2.2; Accession=PF00560.23; Description=Leucine Rich Repeat
  Pfam annotation: Domain name=LRR_1; Domain location=730-752; Score =10.0; E_value=3.8; Accession=PF00560.23; Description=Leucine Rich Repeat
  Pfam annotation: Domain name=LRR_1; Domain location=754-776; Score =12.3; E_value=1.4; Accession=PF00560.23; Description=Leucine Rich Repeat
  Pfam annotation: Domain name=LRR_1; Domain location=778-800; Score =12.4; E_value=1.3; Accession=PF00560.23; Description=Leucine Rich Repeat
  Pfam annotation: Domain name=LRR_1; Domain location=802-824; Score =17.4; E_value=0.05; Accession=PF00560.23; Description=Leucine Rich Repeat
  Pfam annotation: Domain name=LRR_1; Domain location=826-848; Score =19.5; E_value=0.012; Accession=PF00560.23; Description=Leucine Rich Repeat
  Pfam annotation: Domain name=LRR_1; Domain location=851-873; Score =1.6; E_value=1.4e+02; Accession=PF00560.23; Description=Leucine Rich Repeat
  Pfam annotation: Domain name=LRR_1; Domain location=875-897; Score =20.1; E_value=0.008; Accession=PF00560.23; Description=Leucine Rich Repeat
  Pfam annotation: Domain name=LRR_1; Domain location=899-922; Score =12.3; E_value=1.4; Accession=PF00560.23; Description=Leucine Rich Repeat
  Pfam annotation: Domain name=Pkinase; Domain location=1024-1296; Score=120.8; E_value=3.9e-33; Accession=PF00069.15; Description =Protein kinase domain
  Pfam annotation: Domain name=Pkinase_Tyr; Domain location=1012-1296; Score=83.1; E_value=8.5e-22; Accession=PF07714.7; Description =Protein tyrosine kinase
  Pfam module annotation: Pfam domain module=LRRNT_2::LRR_1::LRR_1::LRR_ 1::LRR_1::LRR_1::LRR_1::LRR_1::LRR_1::LRR_1::LRR_1::LRR_1::LRR_1: LRR_
  Pfam module annotation: Pfam domain module=LRR_1::LRR_1::LRR_1::LRR _1::LRR_1::LRR_1::Pkinase::Pkinase_Tyr; Domain location=133-174::178
  Pfam module annotation: Domain location=417-439::441-463::465 -488::490-512::514-536::538-560::562-584::586-608::610-633::634 -657::658-680::682-704::706-728::730-752::754-776::778-800::802 -824::826-848::851-873::875-897::...
  Pfam module annotation: Domain location=899-922::1024-1296::1012-1296
  Subcellular localization annotation: CTP_CleavageSite=56; ConfidenceScore=5.18e-01
MAPNENWRRTLYLTKLNASEPLPLSPFTPLPRRGTGAPHVVASQPNALTANPRAPRAQRVHNPHHHVLAASPPLRPFPPHRKNGHGRGHAALCSATRPMRKPPLVPASLILDLEVPLLVILALATLAANAATPASPADALLAWKSSLGNPAALSTWTNATQVSICTTWRGVACDAAGRVVSLRLRGLGLTGGLDAFDPGAFPSLTSLDLKDNNLVGAIPASLSQLRALATLDLGSNGLNGTIPPQLGDLSGLVELRLYNNNLAGVIPHQLSELPKIVQLDLGSNYLTSVPFSPMPTVEFLSLSLNYLDGSFPEFVLRSGNVTYLDLSQNAFSGTIPDALPERLPNLRWLNLSANAFSGRIPASLARLTRLRDMHLGGNNLTGGVPEFLGSLSQLRVLELGSNPLGGPLPPVLGRLKMLQRLDVKNASLVSTLPPELGSLSNLDFLDLSINQLSGNLPSSFAGMQKMREFGISSNNLTGEIPGRLFTSWPELISFQVQNNSLQGRIPPELGKATKLLILYLFSNNLTGEIPPELGELANLTQLDLSANLLRGSIPNSLGNLKQLTRLELFFNELTGQLPPEIGNMTALQILDVNTNNLEGELPPTVSLLRNLRYLSVFDNNMSGTVPPDLGAGLALTDVSFANNSFSGELPQGLCDGFALHNFTANHNNFSGRLPPCLKNCSELYRVRLEGNRFTGDISEAFGVHPSMDYLDISGNKLTGRLSDDWGRCTRTTRLKMDGNSISGAIPAAFGNMTSLQDLSLAANNLVGAVPPELGNLSFLFSLNLSHNSFSGPIPTSLGRNSKLQKVDLSGNMLSGAIPVGIDNLGSLTYLDLSKNRLSGQIPSELGDLFQLQTLLDLSSNSLSGPIPSNLVKLANLQKLNLSHNELNGSIPVSFSRMSSLETVDFSYNQLTGEIPSGDAFQSSSPEAYIGNLGLCGDVQGVPSCDGSSTTTSGHHKRTAIAIALSVAGAVVLLAGIAACVVILACRRRPREQRVLEASDPYESVIWEKEAKFTFLDIVSATDSFSEFFCIGKGGFGSVYRAELPGGQVVAVKRFHVAETGEISEAGRKSFENEIRALTEVRHRNIVRLHGFCCTSGGYMYLVYEYLERGSLGKTLYGEEGRGKLGWGTRVKVVQGVAHALAYLHHDCSQPIVHRDITVNNVLLESEFEPRLSDFGTAKLLGSASTNWTSLAGSYGYMAPELAYTMNVTEKCDVYSFGVVALEVMMGKHPGDLLTSLPAISSSGEEDLLLQDILDQRLEPPTGDLAEEIVFVVRIALACARANPESRPSMRSVAQEISARTQAYLSEPFRQITKDPLLMAPDWMPEASSRPLEPHIRCEREKGTRQRPTLGKPHWGNILTSRAWGLLLEIRSAILGAHQSTSPLGKGLWQLGPAGQSEEIGNVYPRRIRPKTNPTASNPGLAVAEPNKGN

SEQ ID NO: 44352 - protein, 198 aa, Zea mays
  Coding DNA Sequence Number=SeqID_2573
  Gene Ontology: Mol. function=protein kinase activity; Cellular component=integral to membrane; Biological process=protein amino acid phosphorylation
  Homolog annotation: Hit_ID=Q7XDK0; Match level="QueryCoverage=71%, HitCoverage=70%, E-value=1e-29, Identity=32%"; Hit description =Leucine Rich Repeat family protein
  Pfam annotation: Domain name=LRR_1; Domain location=137-159; Score =11.3; E_value=2.2; Accession=PF00560.23; Description=Leucine Rich Repeat
  Pfam annotation: Domain name=LRR_1; Domain location=67-89; Score =16.1; E_value=0.13; Accession=PF00560.23; Description=Leucine Rich Repeat
  Pfam annotation: Domain name=LRR_1; Domain location=91-113; Score =9.6; E_value=4.6; Accession=PF00560.23; Description=Leucine Rich Repeat
  Pfam module annotation: Pfam domain module=LRR_1::LRR_1::LRR_1; Domain location=137-159::67-89::91-113
MSGDRWREVAVAPQLHRTVRCTPDMSGDEFALESSGAPDTVQWHTGQSGAPDQRCKPNSLSIGNLTSLHMLRLYDNKLTGRLPDEFGNMAALQRLSINTNMLEGELPAELTRLPNLLGIVAFDNLFSGTVPPDFSRNLSIVSMSNNKFSGGLPPGLCNTPRLRYLSNDNNDISGTVPACYRKFTKLVRFRLAQNRLSG

SEQ ID NO: 44353 - protein, 345 aa, Zea mays
  Coding DNA Sequence Number=SeqID_2574
  Gene Ontology: Mol. function=protein binding; Cellular component =integral to membrane; Biological process=protein amino acid phosphorylation
  Homolog annotation: Hit_ID=Q8S700; Match level="QueryCoverage=88%, HitCoverage=95%, E-value=8e-49, Identity=33%"; Hit description =Putative disease resistance protein
  Pfam annotation: Domain name=LRRNT_2; Domain location=41-89; Score =49.0; E_value=1.6e-11; Accession=PF08263.3; Description=Leucine rich repeat N-terminal domain
  Pfam annotation: Domain name=LRR_1; Domain location=108-130; Score =1.6; E_value=1.4e+02; Accession=PF00560.23; Description=Leucine Rich Repeat
  Pfam annotation: Domain name=LRR_1; Domain location=145-167; Score =14.1; E_value=0.52; Accession=PF00560.23; Description=Leucine Rich Repeat
  Pfam annotation: Domain name=LRR_1; Domain location=170-192; Score =17.0; E_value=0.071; Accession=PF00560.23; Description=Leucine Rich Repeat
  Pfam annotation: Domain name=LRR_1; Domain location=194-216; Score =13.3; E_value=0.91; Accession=PF00560.23; Description=Leucine Rich Repeat
  Pfam annotation: Domain name=LRR_1; Domain location=218-240; Score =11.9; E_value=1.7; Accession=PF00560.23; Description=Leucine Rich Repeat
  Pfam annotation: Domain name=LRR_1; Domain location=242-264; Score =4.8; E_value=36; Accession=PF00560.23; Description=Leucine Rich Repeat
  Pfam annotation: Domain name=LRR_1; Domain location=266-288; Score =14.4; E_value=0.41; Accession=PF00560.23; Description=Leucine Rich Repeat
  Pfam annotation: Domain name=LRR_1; Domain location=290-313; Score =10.5; E_value=3.1; Accession=PF00560.23; Description=Leucine Rich Repeat
  Pfam annotation: Domain name=LRR_1; Domain location=315-337; Score =2.7; E_value=88; Accession=PF00560.23; Description=Leucine Rich Repeat
  Pfam module annotation: Pfam domain module=LRRNT_2::LRR_1::LRR_1::LRR_ 1::LRR_1::LRR_1::LRR_1::LRR_1::LRR_1::LRR_1; Domain location=41 -89::108-130::145-167::170-192::194-216::218-240::242-264::266
MEMEMIDEAAQQAAPGTSRRALLLLAHLVLFSFSPRPANSAQGEAEALLRWKDSLPPPRPADALASWSLNGSAVAAAPVPCAWRGVSCDFLGRVVGVDVAGAGLASGTLAALDIQSLASLGSLNLSFNALTGRFFTPNVSAPLLSVRSIDLSNNNLSGPVPDTLPAWMPNLEHLNLSSNQFMGEIPVTLGKLTKLRNLVLHSNHLSGGIPPVLGNVSGLRDLELSSNPLGGTIPATLGKLLSLERINVSLTRVESTIPTELSLCTNLTVIGLAGNKLTGGLPPSLAKLARVREFNVSKNMLTGEIPPGYFTSWTHLRVFQADGNRFTSMIPVEVVAARRLEFLHF

SEQ ID NO: 44354 - protein, 503 aa, Zea mays
  Coding DNA Sequence Number=SeqID_2575
  Gene Ontology: Mol. function=protein kinase activity; Cellular component=integral to membrane; Biological process=protein amino acid phosphorylation
  Homolog annotation: Hit_ID=Q337M0; Match level="QueryCoverage=88%, HitCoverage=45%, E-value=3e-91, Identity=51%"; Hit description =Leucine Rich Repeat family protein, expressed
  Pfam annotation: Domain name=LRR_1; Domain location=15-37; Score=8.7; E_value=6.7; Accession=PF00560.23; Description=Leucine Rich Repeat
  Pfam annotation: Domain name=LRR_1; Domain location=39-61; Score =12.2; E_value=1.5; Accession=PF00560.23; Description=Leucine Rich Repeat
  Pfam annotation: Domain name=LRR_1; Domain location=63-85; Score =13.1; E_value=1; Accession=PF00560.23; Description=Leucine Rich Repeat
  Pfam annotation: Domain name=Pkinase; Domain location=177-427; Score =78.6; E_value=2e-20; Accession=PF00069.15; Description=Protein kinase domain
  Pfam annotation: Domain name=Pkinase_Tyr; Domain location=177-457; Score=34.8; E_value=1.3e-14; Accession=PF07714.7; Description =Protein tyrosine kinase
  Pfam module annotation: Pfam domain module=LRR_1::LRR_1::LRR _1::Pkinase::Pkinase_Tyr; Domain location=15-37::39-61::63-85::177 -427::177-457
MLSGHIPLTLGNATSMLRLDLSGNHLDGGVPVELTKLAHMWHLNLSHNNLTGEVPALLGKMASLQDLDLSGNPGLCGDIAGLSSCHSDSIRGGSRSRRYRARLVLVVVTLVSAAALLPSVAAVSFVLLARRRRQAGQDSGPDTTASGAGGAMALTVSIWGKDAAFSFGDILAATEHFNEAYCIGKGSFGSVYRADLPGPGGRSLAVKRLDASETGDACWGVSEKNFENEVRALTRVRHHNIVRLHGFSAMGGHMYLAYELVERGSLGKVLYRPGRSCELFDWAARVRAIGGLAQALAYLHHDCSPPMIHRDVTVNNVLLDPDYEPRVSNFGTARFLAPGRFDCTSVAGSYGYMAPELAYLRVTTKCDVYSFGVVTLEILMGRHPGSLISSMHSRLLDTSGSLLLKDALDQRLDSPEGQVGAQVVSAFLVALSCVREDPEGRPTMRSVAPGALGVKAFGAEQAAHRDQGHRSDWLSRIILIPTVVLSSPKMFASSSWISVAFLN

SEQ ID NO: 44355 - protein, 201 aa, Zea mays
  Coding DNA Sequence Number=SeqID_2576
  Gene Ontology: Mol. function=nucleic acid binding
  Homolog annotation: Hit_ID=Q68Q07; Match level="QueryCoverage=62%, HitCoverage=19%, E-value=1e-30, Identity=53%"; Hit description =Putative nucleolin
  Pfam annotation: Domain name=RRM_1; Domain location=43-117; Score =63.6; E_value=6.5e-16; Accession=PF00076.12; Description=RNA recognition motif. (a.k.a. RRM, RBD, or
MATERGAYTPSSGLSSILFIGAVVIQKDNGSFKKFAPRSGNTVFIKGFDTSGGEDQIRTALEEHFGSCGDITRISIPKDYDTGVSKGMAYMDFKDPDSLNKAYELNGTDLGGYSLYVDEAKPRPDNSGGFSGDRGGGRGRSGGFSGGRGGRSDRGRGGSRGRGFGGRGGRGDRGRGGRGTPFRQTAGTASTGKKTTFGDDD

SEQ ID NO: 44356 - protein, 96 aa, Zea mays
  Coding DNA Sequence Number=SeqID_2577
MRCSPRTTNLQDNCKVQDLEIMVSMVDIRIQVASIRILSTWLHSGIQLCHPAYQEYSKKFNKDTMLLNKRIVRTQAYHSKKEDNKKKNMLRTNEVL

SEQ ID NO: 44357 - protein, 72 aa, Zea mays
  Coding DNA Sequence Number=SeqID_2578
  Subcellular localization annotation: CTP_CleavageSite=38; ConfidenceScore=5.16e-01
MEIINKMKSSGFPADIGLGGQSCGGGVGVARASQSRIAARRRREFLVNETHPYRTRRRDPTEGHRGGRESQI

SEQ ID NO: 44358 - protein, 171 aa, Zea mays
  Coding DNA Sequence Number=SeqID_2579
MVEGETSEEAKRRRTGPLEAQELEERLESLRDKIVAARIVTGSRFGEEQRQSLLQEWLRLASAKLDLDLSGMSELDRSAEALPWLIPPEEADKRTTHTRQEAQELEERMTCLLLLFEDVADDRILAKEELGAAADEFQLRLTMRQRALTREYSRLANLKRPPDLSGMTDTD

SEQ ID NO: 44359 - protein, 355 aa, Zea mays
  Coding DNA Sequence Number=SeqID_2580
  Gene Ontology: Mol. function=peroxidase activity; Cellular component =vacuole; Biological process=response to oxidative stress
  Homolog annotation: Hit_ID=Q10ET8; Match level="QueryCoverage=86%, HitCoverage=91%, E-value=1e-128, Identity=73%"; Hit description =Peroxidase 51, putative, expressed
  Pfam annotation: Domain name=peroxidase; Domain location=71-319; Score=415.7; E_value=6.7e-122; Accession=PF00141.13; Description =Peroxidase
  Subcellular localization annotation: CTP_CleavageSite=44; ConfidenceScore=5.15e-01
MNFGPASATDQAKWKWFLANITSSYRQKYGKALPLVVVLAVAVVASLAQPGAADLRPNYYASSCPNVEAIVRGVVQQRLQATIRTVGSTVRLFFHDCFVEGCDGSVLIESTPRNQAEKDAPDNRSLAPEGFDTVRSAKAAVEAACPDTVSCADVLALATRDAIFMSGGPFFQVELGRLDGLSSTASSVPGQLPEPNQSMDQLLAVFNAHGLGMSDLVALSAAHSVGLAHCSKFASRLYSFRPGQPTDPTLNPRYASFLASKCPNGGGADSLVLMDQATPSRFDNQYYRNLQDGGGLLASDQLLYADGRTRPAVDSLANSTAAFHRAFADAIVRLGRVGAKSSARGNIRKRCDVFN

SEQ ID NO: 44360 - protein, 142 aa, Zea mays
  Coding DNA Sequence Number=SeqID_2581
MPSTGSLARGGMAPSCCRRKKQQKRTKPRSAEFREGQDTDEEQATWHTQARGDPSFFSIASALFPRLVRGRMEKHSRSRRIWLVGGLGSCSRALSNLPTHPMDLVHGYYDKYIKDFGAIDAPLTSLLKKAAFQWGYEAEAAF

SEQ ID NO: 44361 - protein, 253 aa, Zea mays
  Coding DNA Sequence Number=SeqID_2582
  Gene Ontology: Mol. function=nucleic acid binding
  Homolog annotation: Hit_ID=Q6YW21; Match level="QueryCoverage=64%, HitCoverage=70%, E-value=2e-70, Identity=65%"; Hit description =Putative mec-8
  Pfam annotation: Domain name=RRM_1; Domain location=51-118; Score =8.5; E_value=0.024; Accession=PF00076.12; Description=RNA recognition motif. (a.k.a. RRM, RBD, or
  Subcellular localization annotation: CTP_CleavageSite=25; ConfidenceScore=5.16e-01
MAGAGIHPFQQWPPTAAAPPPPGAAASVAVPPPPPVPGAPGTVGPDEVRTIFITGLPADVKERELHNLLRWLPGFEASQINFKGDQPMGFALFSTAHQAIAAKTALQDMVFDAETKVALHTEMAKKNLFVKRFPPVAMTSPAPVTGPTAYAPVQNTKDNPPCNTLFIGNLGDTVVEEELRSLFSVQPGFKQMKVLRQDRNTVCFIEFEAERLTGIWNALVLLLQWNTFILLLQVNAKAWLCTFWLENLSDAKI

SEQ ID NO: 44362 - protein, 78 aa, Zea mays
  Coding DNA Sequence Number=SeqID_2583
MRTSLGASWHPHVSSLGRSKEESRPVKLGLLVGAIHRLGFVCYRGRRTLGKDSPEIAAAPSYQRRKEHHAPLISTEMA

SEQ ID NO: 44363 - protein, 99 aa, Zea mays
  Coding DNA Sequence Number=SeqID_2584
MTREELGVGTSAGEDLPGMGRSSAQARGCRGRVKFGAATSEEVFVKVSRPAKGVPARFASVGPAAAAKAWSEGWRLCLRPNICPPRDQFDRVTWCRRRR

SEQ ID NO: 44364 - protein, 120 aa, Zea mays
  Coding DNA Sequence Number=SeqID_2585
  Homolog annotation: Hit_ID=Q653B6; Match level="QueryCoverage=51%, HitCoverage=7%, E-value=2e-26, Identity=90%"; Hit description =Putative potassium transporter
MVTSCLHIQQQQQQQQSLLSQARWGRHYWGGTCLASQGACLNLLGVRGPNRDSPGANARDAGVVHILGNTVIRARRDSGFIKKIAINYLYAFLRKICRENNTIFNVPHESLLNVGQVFYV

SEQ ID NO: 44365 - protein, 60 aa, Zea mays
  Coding DNA Sequence Number=SeqID_2586
MPTRPDALHALAHTGDGQCLVQWHGGGRELAVFKLGSDGWWTEAGDGRIKWSSTLSSSVL

SEQ ID NO: 44366 - protein, 676 aa, Zea mays
  Coding DNA Sequence Number=SeqID_2587
  Gene Ontology: Mol. function=DNA binding; Cellular component=nucleus; Biological process=regulation of transcription, DNA-dependent
  Homolog annotation: Hit_ID=Q6ZHD2; Match level="QueryCoverage=63%, HitCoverage=97%, E-value=6e-73, Identity=39%"; Hit description =Putative late elongated hypocoty
  Pfam annotation: Domain name=Myb_DNA-binding; Domain location=295 -337; Score=43.7; E_value=6.2e-10; Accession=PF00249.21; Description =Myb-like DNA-binding domain
  Subcellular localization annotation: CTP_CleavageSite=16; ConfidenceScore=5.29e-01
MWTGPRRGHTPLAASRAPQRTESARYRTTPSDRWSLTKVTSRIPKSPPKPLFLFVLEKPKPQTLTSGEKKKRHEGVPAKHVDEDLPVTCSAATVTPELVDRDQRPVALALYSEERALLSGLSLVQGGTCPAVRRQDGCVVLGPRHRRGGFDVSKSEATTGAAAPSIIEVSSWRRGEAREPDPRRSDGHKNRAAPSRPPLRAPAVAGAGGFVSVAHALASSCCCCCLIRARGEEPLSDSVAVVLLARSNQRPAADHVGHRDFMDHLKNTLSSGDMDLPGGARAPKARKPYTISKQREKWTEDEHKLFLEALQQHGRAWRRIQGSKTAVQIRSHAQKFFSKVIRESSGDNSNNSVGAPPQLQIPPPRPKRRPTHPYPRKLGNSVGKDASAAIKQLRKPQLQAQSLSEQENCSPKSVLTTAQMCSEALPAEGSGSPASSVHMEDKCLTPNTSVGESSVQVALSTDSNDAACEIPEAEGPVLRLFGKRVVVSNLDQQPSSNTGSLQHAADMELDDASAETPTSGTGKLSSHAAEEAETWCPWLVGSTQQFLYYLPRGEVFSMHPGCQFLNYGNGSISYTALDAQTVTSNKQRSRPWTESIETSSSVPGTAQNSDPAESTKVNRGEDKVAVPVPGSRKCAGAIPACRRGFVPYKKCTARSKVLQPVAPGEEADRELTRLCL

SEQ ID NO: 44367 - protein, 68 aa, Zea mays
  Coding DNA Sequence Number=SeqID_2588
MGGEDGVVSGQGFVRDVRATVMAEITCFVPGPWPGDVLKDFLGESLVDGFCHVKSKLLCQGCGATTMT

SEQ ID NO: 44368 - protein, 102 aa, Zea mays
  Coding DNA Sequence Number=SeqID_2589
MASVVSGRKRSREKEPRRSCSSAQATAEPPPAGHNFGGPGAAENSCLLPGYSVDSTGRPEPGRPALLQMAQSPSTGVAAGPAPQPAGEQCLQASWIERWLSD

SEQ ID NO: 44369 - protein, 1137 aa, Zea mays
  Coding DNA Sequence Number=SeqID_2590
  Gene Ontology: Mol. function=zinc ion binding; Cellular component =membrane; Biological process=defense response
  Homolog annotation: Hit_ID=Q6ZHD3; Match level="QueryCoverage=98%, HitCoverage=99%, E-value=0.0, Identity=49%"; Hit description =Putative ZR1 protein
  Pfam annotation: Domain name=DZC; Domain location=1075-1119; Score =65.4; E_value=1.8e-16; Accession=PF08381.1; Description=Disease resistancezinc fingerchromosome co
  Pfam annotation: Domain name=FYVE; Domain location=599-658; Score =32.9; E_value=1.5e-07; Accession=PF01363.12; Description=FYVE zinc finger
  Pfam annotation: Domain name=RCC1; Domain location=267-316; Score =17.9; E_value=0.0082; Accession=PF00415.9; Description=Regulator of chromosome condensation (RCC1)
  Pfam annotation: Domain name=RCC1; Domain location=372-421; Score =26.4; E_value=0.0001; Accession=PF00415.9; Description=Regulator of chromosome condensation (RCC1)
  Pfam annotation: Domain name=RCC1; Domain location=436-483; Score =27.5; E_value=4.8e-05; Accession=PF00415.9; Description=Regulator of chromosome condensation (RCC1)
  Pfam annotation: Domain name=RCC1; Domain location=538-587; Score =32.8; E_value=1.2e-06; Accession=PF00415.9; Description=Regulator of chromosome condensation (RCC1)
  Pfam module annotation: Pfam domain module=DZC::FYVE::RCC1::RCC1::RCC1 ::RCC1; Domain location=1075-1119::599-658::267-316::372-421::436 -483::538-587
MAGSFDLRTPTRGVEQAIVALKKGAHLLKCGKRGKPKFCAFRISSDETTLIWYSKGREKHLSLSSVSAVVLGQKTIKFLRQRCPEKEPHSFSLIYKNGERSLDLFNLVHILLFGSNNSSNALHVKVCSSQRKPKKAHGTFFGGSADCSESLFYTRQRTFSDIGTYLENLTRKMSNPEIHDLKDVMVGNQEKEQKITQTPKLKTFEGPRAACRLDSLKDVFFWGDAFGSILECGDTSKPLPMLVDSTNMLDVQSIACGETHAAIITKQGEVYSWGNESSGRIGNQVNIKVSRPKVVQSLASLHVKDVAYGSKHTCAVTVSGELIEWGEGPYMGQLDSYARNQWFPHKLFSPLDGISVVKIACGPWHTAIITSSGQLYTYGDGTFGVLGHGDTQGTTRPKEVESLKGSRVKCVACGPWHTAAIVEVISDFKSNSPRSKLFTWGDADRGKLGHADKKMKLIPTCVDSLTDYDFIQVSCGTALTVALSVTGVVFTSGSSMHGQLGNPHADGKTVSAVEGLLKSEFVRHISSGSSHVAVVTTNGKVFTWGKGKEGQLGLGDFLNRSTPTLVDALEGRHVESLSCGYNYTAAVCLHKVISRKDLSVCSGCKMAFGFTRKKHNCYHCGSMFCNSCSSNKVAKAALAPDKSRRYRVCDGCFSQLLKVVDSGKVKSELNTSKGAEIIRSYTPKLSRIFRDVNLPVEKEKVALVQRSNQRNEVLYTPVQAKSQRWGQVECPAQFLSAEDSSHYQSISKNHMYSASVSERMHDPTVLKSGRSLQQPNDDQRKDLNSIEETLLTEEVKQLRSQKGAFNCSSLTGHHTVETHIVLNLQIRATDDEPFTDPTCSIQLQAYFDATWVSDADCRSLSAYYGFLGGSLIARKIKKQTVISHSSADAELQTMALATAKMTLLMEQYHQKALQVELYKQKLDETWLIVRNEAAKCKAAKDIIKVLTDQCKALSEKLLVGQQYENLETKSNISQGQTFSADLQHHPSEKFATGKFGQLDNTKNHQTSSQGDEEYTPSSSSDVQVEGLCGHLNGSRTFDSNGRITEGNSIVARVTSNGVIEQIERGVYVTFAVSPCGKKDIKRVRFSNLTRHSWCSRKHFGEKEAQHWWEENKGSVYAKYSTEKAQHQLEVTIKSVQE

SEQ ID NO: 44370 - protein, 79 aa, Zea mays
  Coding DNA Sequence Number=SeqID_2591
MKSGSEEGVDAPRGRQQMSRRIASTDCDFWALRLLARAGFTAHELDVLVVVLLAANLHRLRIGLVPADPSPCRPMSPEF

SEQ ID NO: 44371 - protein, 89 aa, Zea mays
  Coding DNA Sequence Number=SeqID_2592
MCGHDDSGSQPLTEARRRQQGPNSPDSCASTGLKRSSDGHGAMDPPGLKRRQNQKGRTPKGKGGCCISGTGHQGSGRQAGQAMCGRRQA

SEQ ID NO: 44372 - protein, 323 aa, Zea mays
  Coding DNA Sequence Number=SeqID_2593
  Gene Ontology: Mol. function=oxidoreductase activity; Cellular component=cytoplasm; Biological process=retinoid metabolic process
  Homolog annotation: Hit_ID=Q8LMT9; Match level="QueryCoverage=85%, HitCoverage=70%, E-value=2e-85, Identity=60%"; Hit description =Putative alcohol dehydrogenase
  Pfam annotation: Domain name=ADH_N; Domain location=64-227; Score =89.7; E_value=8.7e-24; Accession=PF08240.2; Description=Alcohol dehydrogenase GroES-like domain
  Subcellular localization annotation: CTP_CleavageSite=26; ConfidenceScore=5.26e-01
MAAAHYGNGSSTSGGGGGRGRGKPITCKGAVACLRLLFCFCTAVAWGPGVPLSLEEVEVAPPSPMEVRVKVLFTSICHTDLSAWKGECEAQRKYPRILGHEAAGLVPLSMGGLSGLVGRIVCMSIGPSVRIVVESVGEGVEGLAPGDHVVPIFTGECEKCVYCKSDKTNLCGTYRVDPLKSSMVYDDGTRFSVVDQASGQRRPVYHFLNTSTFTEYTVLDAACAVKINPEAPLQRMCLLSCGISTGVGAAWNTANVSARSTVAVFGLGAVGLAVAEGARLRGATRIIGVDVNPSKFTKERLPEGVHPKGPKATLGGLGSRWSN

SEQ ID NO: 44373 - protein, 46 aa, Zea mays
  Coding DNA Sequence Number=SeqID_2594
MKDFSNTTMFPPYKVSRTSYVKIYNGLYHCVPLAKTIEKHRRNVQF

SEQ ID NO: 44374 - protein, 148 aa, Zea mays
  Coding DNA Sequence Number=SeqID_2595
MDALGFEYPDYERLGEEAEGLKRKRVKKNVERTAEPEVIKDPSVPSGGNAQKKRRMMNVMRAILDTPSPVVREKIVSTVADEGAQQAKNSGGPLGTTLSEIDRLSDNVAPGRNTEGAIAAETSASKEKGTEKASSEDKSFDLRHLGVQ

SEQ ID NO: 44375 - protein, 49 aa, Zea mays
  Coding DNA Sequence Number=SeqID_2596
MKRRILAAVFFFLLLSAMAMALPVAAAAVDVEHTFVRENSEEKKGLDEE

SEQ ID NO: 44376 - protein, 509 aa, Zea mays
  Coding DNA Sequence Number=SeqID_2597
  Gene Ontology: Mol. function=transferase activity, transferring hexosyl groups; Biological process=carbohydrate biosynthetic process
  Homolog annotation: Hit_ID=Q5NA53; Match level="QueryCoverage=92%, HitCoverage=74%, E-value=0.0, Identity=85%"; Hit description =Glycogenin-like protein
  Pfam annotation: Domain name=Glyco_transf_8; Domain location=312-508; Score=159.3; E_value=9.9e-45; Accession=PF01501.10; Description =Glycosyl transferase family 8
  Subcellular localization annotation: CTP_CleavageSite=20; ConfidenceScore=5.04e-01
MPSLPFWSLFRSPCSAPSICEDTAKRRTQKSKSFKEVEKFDVFVLEKSSGCKFRSLQLLLFAIMSAAFLTLLYTPSVYEHQLQSSSRLVNGWIWDKRSSDPRYISSASIQWEDVYKSMQNLNVGEQKLSVGLLNFNRTEFSAWTHMLPESDFSVIRLEHANESITWQTLYPEWIDEEEETEIPSCPSLPDPSFSRATHFDVVAVKLPCTRVAGWSRDVARLHLQLSAAKLAAATARGNRGIHVLFVTDCFPIPNLFSCKDLVKREGNAWMYKPDVKALKEKLRLPVGSCELAVPLNAKARLYTVDRRREAYATILHSASEYVCGAITAAQSIRQAGSTRDLVILVDDTISDHHRKGLESAGWKVRIIQRIRNPKAERDAYNEWNYSKFRLWQLTDYDKVIFIDADLLILRNIDFLFAMPEITATGNNATLFNSGVMVIEPSNCTFQLLMEHINEITSYNGGDQGYLNEIFTWWHRIPKHMNFLKHFWEGNEDDEAPRCSPLTPTRRANS

SEQ ID NO: 44377 - protein, 133 aa, Zea mays
  Coding DNA Sequence Number=SeqID_2598
  Subcellular localization annotation: CTP_CleavageSite=18; ConfidenceScore=5.03e-01
MKLWKETSRSSKTTTSSRCGLAATPSRLPVKAAVIYVSFPHFDLLLRKPKGEAEQRTVARPSSEYIKAKTRPVQRFVRTRRGIQKTQSETTVPRTARARATAAPANRTPRRINSAAGKAAPLAGGASDASPSP

SEQ ID NO: 44378 - protein, 119 aa, Zea mays
  Coding DNA Sequence Number=SeqID_2599
  Subcellular localization annotation: CTP_CleavageSite=63; ConfidenceScore=5.59e-01
MSSDGSKDGGLYTPPPKRNSDNDSPSSKAKASGSFGNPATMTTRRLPLPMLTRTNYAIRELGDAMEEKYVVKKLLRSVSQQVYKHASSMVLFNDVNKMTMEEAIGSLKAHEEILKGRED

SEQ ID NO: 44379 - protein, 600 aa, Zea mays
  Coding DNA Sequence Number=SeqID_2600
  Gene Ontology: Mol. function=RNA-directed DNA polymerase activity; Cellular component=mitochondrion; Biological process=RNA-dependent DNA replication
  Homolog annotation: Hit_ID=UPI00004C1731; Match level="QueryCoverage =96%, HitCoverage=39%, E-value=0.0, Identity=69%"; Hit description =UPI00004C1731 related cluster
  Pfam annotation: Domain name=RnaseH; Domain location=165-280; Score= -1.3; E_value=7.6e-05; Accession=PF00075.14; Description=RNase H
  Pfam annotation: Domain name=rve; Domain location=364-524; Score =59.5; E_value=1.1e-14; Accession=PF00665.16; Description=Integrase core domain
  Pfam module annotation: Pfam domain module=RnaseH::rve; Domain location=165-280::364-524
MMLMHMMTCQSFSSHNTRGVTPAAGEALLIYVVATTQVVSATIVVERREEGHALPVKRPVYFISEVLSETKIRYPQIQKLLYAVILTRRKLRHYFESHLVTVVSSFPLGEIIQCREASGRIAKWAVEIMGETISFAPRKAIKSQVLADFVAEWVDTQLPAAPIQPELWTMFFDGSLIKTGAGAGLLFISPLGKHLRYVLRLHFPASNNMAEYEALVNGLHIAIELGVRRLDARGDSQLVIDQVMKNSHCRDLKMEAYCDEVNHVARRYNKTADELAKIASGRTTVPPDVFSRDLHQPSVKTDDTPEPEKASTQPEAPSAPEGEALRVEEEWNGAPPNRDWQTPYLQYLYRGELPLDRAEARRLARRAKSFVLLGDGKELYHRSPLGILQRCIPIAEEGTRGLHAPAGHHRQILQAVAFFTNIIHRFGVPNSIITDNGTQFTGRKFLDFCEDHHIWVDWAAVAHPMTNGQVERANGMILQGLKPRIYNDLNKFGRRWMKELPSVVWSLRTMPSRATGFTPFFLVYGVEAILPTDLEYGSPRTRAYDDQSNRTNREDSLDQLEEAQDMALLHSARYQQSLRRYHARGVRSRDLQVGDLVLRL

SEQ ID NO: 44380 - protein, 75 aa, Zea mays
  Coding DNA Sequence Number=SeqID_2601
MRTDELTRENRKETEQFHFKKWTPTSAPSSLAPSRCGKSQGVGAIDFCSDPADNLKNEENSGISWGDWILCYRIS

SEQ ID NO: 44381 - protein, 104 aa, Zea mays
  Coding DNA Sequence Number=SeqID_2602
MGLGEAAGRLLAAVDWEREAYPAYDDFLALPAFVLFFPTVRFLLDRFVFKEGVAWLVGLQTLTGFLKKLLVDTSIWELIITSQHPAVVFWILDTRNEELYHSFW

SEQ ID NO: 44382 - protein, 380 aa, Zea mays
  Coding DNA Sequence Number=SeqID_2603
  Gene Ontology: Mol. function=methyltransferase activity; Cellular component=nucleus; Biological process=regulation of transcription, DNA-dependent
  Homolog annotation: Hit_ID=Q9FMY9; Match level="QueryCoverage=80%, HitCoverage=82%, E-value=5e-89, Identity=53%"; Hit description =Arabidopsis thaliana genomic DNA, chromosome 5, P1 clone:MJB21
  Pfam annotation: Domain name=LCM; Domain location=107-364; Score= -152.6; E_value=0.0026; Accession=PF04072.5; Description=Leucine carboxyl methyltransferase
  Pfam annotation: Domain name=Omt_N; Domain location=68-169; Score =66.3; E_value=9.6e-17; Accession=PF02409.9; Description=O -methyltransferase N-terminus
  Pfam module annotation: Pfam domain module=LCM::Omt_N; Domain location=107-364::68-169
MSSSSNSKQEKKEEEEEGDVPPCMNGDVGRDDDNNGGGGGEEEEEEREGEFAAAMAQLAPEGVRALHARVEAEWGPVLQSACQTAAARALWGRAVRDPAAGLLAGERYLRGLRDKMRRDEQAGASEVHGVMIAVRTLWFDARVEAAVAALGGDPQVVILGAGMDARAYRLSCLKGCTVFELDFPELLELKSDLLREAAASSASRQKLTVAAKSLARVPANIRDGDWIAKLQSCGYVPGRNTVWVLEGIIYYLHHADAMQVLESIAASRSSASAVLLVDFMNKNATLLSPTMYHFYHDSPDLLLPSMGFSRVTLTQIGDPEAHFGLLSHPENLFDKLRKLPRSVEKNPDDGTPCCRLYFVEASASPDDQIMCPLNRYLEME

SEQ ID NO: 44383 - protein, 313 aa, Zea mays
  Coding DNA Sequence Number=SeqID_2604
  Homolog annotation: Hit_ID=Q10E11; Match level="QueryCoverage=49%, HitCoverage=65%, E-value=7e-46, Identity=61%"; Hit description =Expressed protein
MRLSASGKKAKLFRFAKGLKAGRPVKFGGPRTEEAQSHPTRHPLTAVRLAMSAIHSPAAPPARPPFRRSTTGVASPLREPSQPQPTPPAPPSLTSRRAGLVALLVAAVAPERPAAAAAFSLGIRTTASSASPTSFLGSAVTGHLTCILPCSLFVLPRAAGPKELLREQKKKSASFLLAPIAASRDTLVKAHALLGNSMKPLATVAVRCNVASPSASTEDAEEVKGRILAAGRDCVPRQRNSIVALQSRTGVEVCTFSLILKNAASLLANKDSLKVEADTRLEELIKEKIKDGLLSSVSALDKFEQSVKDCLGV

SEQ ID NO: 44384 - protein, 43 aa, Zea mays
  Coding DNA Sequence Number=SeqID_2605
MGEARDSRCLKHDIVELEERRAMAGFARVCGSAGTIDVVFVQQ

SEQ ID NO: 44385 - protein, 199 aa, Zea mays
  Coding DNA Sequence Number=SeqID_2606
MGPGGAGAGARERREAGHRRAAASSHLAELACAGHWPTSGRRRGPRGGQAAAGAGGRTDGARAGLVVEELLVLAWDGMDAYSFELAAVVTLPPLATGRKGAGTQGAEAAPVALAQGRSRLRSPVALGRSRGPHCRRGALPHCRTRRSRSGQRSAVALEPGWPPWRWESGWRWESPSWDRDTATRDGKDGGRRLVTDSRE

SEQ ID NO: 44386 - protein, 184 aa, Zea mays
  Coding DNA Sequence Number=SeqID_2607
  Gene Ontology: Mol. function=hydrolase activity
  Homolog annotation: Hit_ID=Q7XZV8; Match level="QueryCoverage=50%, HitCoverage=16%, E-value=3e-36, Identity=79%"; Hit description =Putative N5'-nucleotidase
MDSGAVETASTGAVWSSPSAEPRSISVGKEVFCNRSLNMRNITAVGFDMDYTLAQYKPETFESLAYYGTIEKLVKDLRYPEEASTHSCSLWDYTDVVMNYLCGPYTSGLFEVEPDSGKLLNADIQATLVNEFVCFTTVLTNMFLLSGKWSGKEGHDTGLVELAARPARCAAVTTFHRGQFHATK

SEQ ID NO: 44387 - protein, 126 aa, Zea mays
  Coding DNA Sequence Number=SeqID_2608
MAERYQLPRSCVPPTMRRKDGGYPPSGGLEGTGKGDTPKRILPREGTRLRAPLLIRGSKAGPPEGFDSRLRSRGPYTHYWSEVRRLAPRKGSTAALGYSGSAPITDQGFEGWPPKGSQPPQTPSEG

SEQ ID NO: 44388 - protein, 121 aa, Zea mays
  Coding DNA Sequence Number=SeqID_2609
MGSKRRQRRMSTDVNEFVTVIQLSSRCKGSGPGVLDNDLTWPQGRISTRDCLGCSPGRQSRPSKDPAPATRPSACHAQPQLQPTSRLAPCLPLPAFCFLQLQPTSRLAPCLPLPAICFLQL

SEQ ID NO: 44389 - protein, 222 aa, Zea mays
  Coding DNA Sequence Number=SeqID_2610
MPTQGRGPQGNHVVEEVAGVSEDDAEGAAQARGSGGSARDWLLHPRLAARMCDSWPTSVGVGSCARWRGCLARCVGLGSDSQGERKRGLPRRWRKGQRPLGKGAPTRGGGSKGGPDGRKRAHATSRGGGVAGTTPREEARRRYAGGHGGGTHSKVAGGTWPSGKRRRVRQRSTRIRGRAMVAARVRGAGSGKRDQGAAASVRQQRVTKREMALTFPIIDFGV

SEQ ID NO: 44390 - protein, 118 aa, Zea mays
  Coding DNA Sequence Number=SeqID_2611
MGQQPNSGVGPHTENTLSNIPRLSQQGIAHDETGVETEVEEPRQGERRQRMRLRRSGWLRSRQNRRGIGGSDREGHDSDRSSHEDVDLVQRTTDLARKVAAAMDTAVEAAKGWATGQV

SEQ ID NO: 44391 - protein, 126 aa, Zea mays
  Coding DNA Sequence Number=SeqID_2612
  Gene Ontology: Mol. function=hydrolase activity
  Homolog annotation: Hit_ID=Q7XZV8; Match level="QueryCoverage=99%, HitCoverage=25%, E-value=1e-42, Identity=61%"; Hit description =Putative N5'-nucleotidase
MLVIPELEQELKLLSESKSTRKELRHLRMERDSIEDKIHHLEWSLKLDDISENQKEKLFSEHDNLLKQRGHVRGLHQEAQRQHHQKVERFACLYSSQVTNFGLYSPDKYYRPSEDYMPHEFDVLGL

SEQ ID NO: 44392 - protein, 80 aa, Zea mays
  Coding DNA Sequence Number=SeqID_2613
MAEPRPFYSSALMCDGDMWCIKQIELQRGHNENLDGLSEKWEAVAARMTGNRSSFLSRTTFWWLSILKYERYHFSINSYF

SEQ ID NO: 44393 - protein, 70 aa, Zea mays
  Coding DNA Sequence Number=SeqID_2614
MDQAPSSSAAQIETKRNGFWVTYHNARRGDDDPRRQAESRRRRNPGEKFTELCHRIRNSGGSRRFAMTQR

SEQ ID NO: 44394 - protein, 146 aa, Zea mays
  Coding DNA Sequence Number=SeqID_2615
  Subcellular localization annotation: CTP_CleavageSite=75; ConfidenceScore=5.52e-01
MTPTTARRDPAMNLGTKRKIRQGFDVLQRFSESPSSSMPRRYTPISPNFFFSLPAWCTANLNEVDEASMEVPRFYSMEVTPRANEYRADLSVSKQPTSVPILGEKNRSRREVRLVVSLMVLDDDRQKANRDRYILHRIYREAVTPS

SEQ ID NO: 44395 - protein, 119 aa, Zea mays
  Coding DNA Sequence Number=SeqID_2616
MEERPAHHRTSPHGWTANVLTTTARPAPLAWSTHLARIAPRSAVARCGKEQEHAHQGTERLKMKLREGAAMGEELGKLSAVEDERRLRRARNNRTSPEVEDEQSHGQKGAGARFGDIAE

SEQ ID NO: 44396 - protein, 69 aa, Zea mays
  Coding DNA Sequence Number=SeqID_2617
  Subcellular localization annotation: CTP_CleavageSite=63; ConfidenceScore=5.09e-01
MEDRAEGLTTLVTQCSSMDQAVSLAARSRRFESSFNLASDRTCTHHNRNGRPRLRSREEGNLRAGSIRY

SEQ ID NO: 44397 - protein, 109 aa, Zea mays
  Coding DNA Sequence Number=SeqID_2618
MGLGVAARSAKVDLSLGEECGGNETDGSGYEYGAVNNNLTNQKQLLDLSPHKASPLQPNRILAEYVDVYSPLLYTPTPPSPGYQHCNHCSGEDEAVEGDFQKFQDYDEF

SEQ ID NO: 44398 - protein, 127 aa, Zea mays
  Coding DNA Sequence Number=SeqID_2619
MAGDGRSWAIRPRGAPILSWLMDIWRTGYDEHTSMLLTANGCLVGAGRGDGWIRGSSRSSVSNCGRPNGRCRPIPPRTSDRSNDESLPPNFDSSTELGPGIDGGAAQPDSALTGGDGFVRGEKGDGG

SEQ ID NO: 44399 - protein, 155 aa, Zea mays
  Coding DNA Sequence Number=SeqID_2620
MSICAITRLEQGVEDNMDILAMGKGQNSVSLTGAMNQTRCNDCGMDQKWTNQIFDCWNGPSSVFLAIPMSLCWTGAWKPCWSAHILLAPQEYFLTACGADQGHLPLVKVNSLPSPRFVVTQSLARQHLDVVTKAARVLTSPWPDLELFAAQSIEL

SEQ ID NO: 44400 - protein, 175 aa, Zea mays
  Coding DNA Sequence Number=SeqID_2621
MSAGKHDQYLGRCKTKKEYTSNKHKSKGRFDKEALKQKYLHKAKIKEHVFLASLSGLDHDSDDSTSSSSSDEELKRRVENKLNRLYFFANTTDNLLRLATHERKDYKSNYESTLWELESARASIVVSDKTECDECALHISNFNKLQTKYATLLGQRPGEYVAHKFQLFAPHDLKL

SEQ ID NO: 44401 - protein, 48 aa, Zea mays
  Coding DNA Sequence Number=SeqID_2622
MAGDGRSWVIRPPGAPILSWLGVIRRTGYDKHTGRRRFGQSRRRSPKT

SEQ ID NO: 44402 - protein, 206 aa, Zea mays
  Coding DNA Sequence Number=SeqID_2623
  Gene Ontology: Mol. function=alpha,alpha-trehalose-phosphate synthase (UDP-forming) activity; Biological process=trehalose biosynthetic process
  Homolog annotation: Hit_ID=Q8H7S6; Match level="QueryCoverage=38%, HitCoverage=9%, E-value=6e-37, Identity=90%"; Hit description =Putative trehalose-6-phosphate synthase
  Pfam annotation: Domain name=Glyco_transf_20; Domain location=3-203; Score=-259.6; E_value=0.043; Accession=PF00982.11; Description =Glycosyltransferase family 20
MATISMAAVVASDLGGISVRLGNHSRSMVVMAWEQVSDLEERFNHIKLGYFLHSPFPSSEIYKTLPMREELLRALLNSDLIGFHTFDYARHFLSCCGRMLGLSYEFKRGHICLKYYDRPAQSEADAVRVAFSDDWIFVGSVSKQLIVVFDFWFVRVGSSWGFLGRLFLRCENEHHIMEEVPFRVAEGPQSGEPKSEVVIDSSDVPM

SEQ ID NO: 44403 - protein, 124 aa, Zea mays
  Coding DNA Sequence Number=SeqID_2624
  Subcellular localization annotation: CTP_CleavageSite=74; ConfidenceScore=5.18e-01
MTIHDMYLSCRYSGRFRFWQRAPHATIVPRGGRRAEEASTATTGSSSSSRQQRVRIRRSDQLQGAREAGALEGMAMEREPAPRKARSTPSSPRRDAAPGISAVASGGAGSSLARTGSCFAALVE

SEQ ID NO: 44404 - protein, 154 aa, Zea mays
  Coding DNA Sequence Number=SeqID_2625
  Gene Ontology: Mol. function=potassium ion transporter activity; Cellular component=membrane; Biological process=potassium ion transport
  Homolog annotation: Hit_ID=Q1T760; Match level="QueryCoverage=76%, HitCoverage=14%, E-value=8e-19, Identity=54%"; Hit description =Potassium transporter
  Subcellular localization annotation: CTP_CleavageSite=16; ConfidenceScore=5.06e-01
MVGSQAIIGRTFSIINQSQSRSFFPRVKVVHTPLQRDNKYYKRKNLLMVIKNNPLWCHLSMGLGYDDSNSNDSGVSPGSDRADSIEVATVPPAPSVVKEARFLVASPRSPDVDENMLEELHELCEAREAGTAFIMEHSACGDQARVVTAQEADM

SEQ ID NO: 44405 - protein, 965 aa, Zea mays
  Coding DNA Sequence Number=SeqID_2626
  Gene Ontology: Mol. function=receptor activity; Cellular component =nucleus; Biological process=transport
  Homolog annotation: Hit_ID=Q8H3A7; Match level="QueryCoverage=96%, HitCoverage=98%, E-value=0.0, Identity=68%"; Hit description =Putative exportin, tRNA
  Pfam annotation: Domain name=Xpo1; Domain location=102-255; Score =128.7; E_value=1.6e-35; Accession=PF08389.2; Description=Exportin 1 -like protein
MDDLEHVILLASDSPAAAAASPSIRAEALAFCARARDESPPSSLLRLCLSGIASSPHAQVHFWCLQSLHDALLRRRLVLPDDLALLRSSLLSLAVSSHAGSPPFLRNKLAQLVALLIRLEYPHVYPSYFIDLLPPAPPQPGPTDMFARVLISLDDDLLSQEYPRNSGEAADAMRVKDSMRAQCVSQIASHWHAAAVTLRTADPAAAAVALDAARRCISWIDVGLVANDVFVPLFFDIAMSPGSASPLAAAAVGCLSGVASKRMDSRAKVGLLRSLLAAQQGLGSPDNGLKMAPLVIAYAAEALECHSRLGPSDADGAAALEMLEEVLPAVFAAAESGNDEDVDSGSVLEFLSGYVSTMKAPSEKQLGHLGRILEVVRVQMSFDPVYRGHLDVLDKIGKEEEDLMAEQRKDLIVLFRSICRVAPAAAQLFISGLIVTALSSAEASVEDVEVALTLFFRLGEAVGEEEIRTGAGLIGQLVPMLLTARFSCHTHRLVALVYLETVTRYMKFMQEHVQYVPHLLGVFLDNRGIHHQNAHVSRRAGYLFMRAVKSLKAKLVPYLDTILQAVGLLIGIEEVSPEKQAQFLTALLNPLCHQVESLVMDAKARGLEESSPMAISLQQIIVALNMVSKGFNERLVMVNRPAIGIMFKKTLDVVLQVLVSFPSVRPLRSKVISFLHRMIEILGLSVLPCIPIALRLLLLDNEAKDMVEFLVLVNQIICKFKSSASAILEEIFPTIASRLSAILSQDAFSAGPASNTEEMRELQELQRTLYTFLHAMATHDLSAVLLTPSSREYLETIMQLLLFTSYKHRDILLRKACVQIFVNLVKDWCSNSEDKVPGFRVFMIEKFATNCCLYSVLDKSFDLRDANSLVLFGEIVLAQKIMYERFGGDFIVNFIAKGLSGVHCPPDLAEQYYQKLKGNDIKAFRLVVPSMYIELPFLRSEDVLLRHYLYQVWQPWLCPYSLYSI

SEQ ID NO: 44406 - protein, 175 aa, Zea mays
  Coding DNA Sequence Number=SeqID_2627
  Gene Ontology: Mol. function=protein-tyrosine kinase activity; Biological process=protein amino acid phosphorylation
  Homolog annotation: Hit_ID=Q2QXA8; Match level="QueryCoverage=93%, HitCoverage=38%, E-value=2e-21, Identity=37%"; Hit description =Protein kinase family protein, putative, expressed
  Pfam annotation: Domain name=ACT; Domain location=113-172; Score =19.9; E_value=0.0092; Accession=PF01842.15; Description=ACT domain
MEDDDTEGVGESTCPPAADRGGSSSAGGGGGDSHGYTDIEKEVFDRLMEKRIPEVVADPVAFREELHRHFERLPLRKFEPCEGIEDLSLTGQKVVGDYVAGSSRGDVEILHVHEIIFSTIDKPKLLAQLSALLSEVGLNIREAHVFSTTDGFCLDVFVVDGWDTKPLNRATYYRK

SEQ ID NO: 44407 - protein, 186 aa, Zea mays
  Coding DNA Sequence Number=SeqID_2628
  Gene Ontology: Mol. function=phosphoethanolamine N-methyltransferase activity; Biological process=metabolic process
  Homolog annotation: Hit_ID=Q6QA26; Match level="QueryCoverage=64%, HitCoverage=21%, E-value=3e-22, Identity=61%"; Hit description =Phosphoethanolamine N-methyltransferase
  Pfam annotation: Domain name=YTH; Domain location=118-186; Score =42.5; E_value=1.5e-09; Accession=PF04146.6; Description=YT521-B-like family
MVLAVWFVRVDNFSVGRCREDGGRGEAGAEELLGGASQEPHRRCHDAGLPRCQSRQGATCRSGQGGCPKILFLLPSDEGTSILELGAGIGCFTGELAKTVRNVFALDFIESAIKKNESIKMVGPVDYQNDLDFWCMDKWTASFLITWHIIRNIHNSNFRNILVQNNEYKPVTSSRDTQEKLSLAFH

SEQ ID NO: 44408 - protein, 350 aa, Zea mays
  Coding DNA Sequence Number=SeqID_2629
  Gene Ontology: Mol. function=metal ion binding; Cellular component =peroxisome; Biological process=peroxisome organization and biogenesis
  Homolog annotation: Hit_ID=Q6YTX9; Match level="QueryCoverage=99%, HitCoverage=91%, E-value=1e-149, Identity=74%"; Hit description =Putative Peroxisome assembly protein 10
  Pfam annotation: Domain name=Pex2_Pex12; Domain location=42-293; Score=149.4; E_value=9.2e-42; Accession=PF04757.5; Description=Pex2 Pex12 amino terminal region
  Subcellular localization annotation: CTP_CleavageSite=37; ConfidenceScore=5.06e-01
MLAGAPTGDAGPSSGAGSNPPTRPRRFPGAAQPEIMRAAEKDDSYAAHVTEACRDAFRHLFGFLFCNGDDIGTRVAVAYQNEIKLLGQSLYYLLTTGSGQQTLGEEYCDISQVATLHGLPPTPARRILFILYQTTVPYLAERISSRIVARSIVLNESQFDDHPESDNSSSDIAQSTTNSDIPSRSLSVSALSGFRGRVHALWQWVLQKWPSMLPYAQDFIQLAIRTNLMFFYFEGLYYHLPKRAAGIRYVFIGKPMNQRPRFNSFIIFLYQILGIFLLIQLCILGAERLRRSRGIPVLNEDGNIISDIRSGKAADIASHSETSNGKSKCTLCLSIRQNPTATTCGHVFCW

SEQ ID NO: 44409 - protein, 125 aa, Zea mays
  Coding DNA Sequence Number=SeqID_2630
MGETHKIVHRGVSSVDRTKMGESSKQCNVVDEARTLGAAASDRASSRRCRFDNIDRLDGVELMAYNFKKILCNDKAISEWCVRKIKKALRNSVSRGTVHLQRNLHKKVKLRRSTQRRRSLQMKLT

SEQ ID NO: 44410 - protein, 383 aa, Zea mays
  Coding DNA Sequence Number=SeqID_2631
  Gene Ontology: Biological process=DNA repair
  Homolog annotation: Hit_ID=Q6JDV7; Match level="QueryCoverage=61%, HitCoverage=38%, E-value=4e-21, Identity=33%"; Hit description=DNA -directed polymerase kappa
  Subcellular localization annotation: CTP_CleavageSite=37; ConfidenceScore=5.14e-01
MMTQPPSPRPCSPTHTGVVAPSSPLPYLFGCLMSTFFASPVAAWNYIDSKEDILVYATKLIKAEMPISLRLMGLRMSQLHDEKDDPSTSTQKTLDIFFHSSNSNSNGNGTNVQRTTNSPGQDNDSISLTSKEYLAPDAGTSVSTGQQDFFLHDENCFIPEQQRSLDNDTKEAVLSDPLGGTKSDDVSYRQSPKAVSSSSKPDQQSWIDGYICSICGFELPLGFEEERLEHSDFHLAETLQQEEAVDSTRHISNERSAGSSSPMAPPTSRSILLPIHDSLGSRCDRSLRVLVNMLDIIIHRLNKCLPVDGTCLIKQPGDTYDDFASSKPDSECHYVVFDLDLNNFYACGSSGVSLSAFAFLFSELVQYNQTQVDNITELERRLE

SEQ ID NO: 44411 - protein, 106 aa, Zea mays
  Coding DNA Sequence Number=SeqID_2632
MDGGNIWRCRGWRQAQRGSCGGGRGRAWSCISAAQGEAATVADPGHHGVRRRRVGGEWEVAHDSRMRLAMLDMCGMWRMRMGREVGLRDIRPPAADADGARRTDDG

SEQ ID NO: 44412 - protein, 68 aa, Zea mays
  Coding DNA Sequence Number=SeqID_2633
MEVVYREWSLSLTTGLWTLSPCRRVLLLLVDSSGRLLDRVYYTSIPTDTFPNYRNNDFKSIYADTTIL

SEQ ID NO: 44413 - protein, 949 aa, Zea mays
  Coding DNA Sequence Number=SeqID_2634
  Gene Ontology: Cellular component=integral to membrane
  Homolog annotation: Hit_ID=Q8L4G8; Match level="QueryCoverage=42%, HitCoverage=63%, E-value=1e-104, Identity=48%"; Hit description=C4 -dicarboxylate transporter-like protein
  Pfam annotation: Domain name=Ank; Domain location=178-210; Score =31.2; E_value=3.7e-06; Accession=PF00023.20; Description=Ankyrin repeat
  Pfam annotation: Domain name=C4dic_mal_tran; Domain location=574-840; Score=318.7; E_value=1.1e-92; Accession=PF03595.8; Description=C4 -dicarboxylate transportermalic acid transport protein
  Pfam module annotation: Pfam domain module=Ank::C4dic_mal_tran; Domain location=178-210::574-840
MAGKTIIKEEDLDKADSDSLFDDLEISSVSGSEDEQENGPASEREVQELIVSWKSYFETCVCAFIYAPSRNRQMLFDGEKTQSVIQSCDVRPVPLTVHRPTMKEAKRVYCNLTQLYYEMECSTTDETLPDAGSVKNVEQGQGKKNEVTADPGESISDLSARLELLNKNEAATIPSSKNETTPLHEAAKCGNAQLTLELLEQGLDPCVKDARGKTSYSLASDKEVRNTFRRFMALNLDKWDWHAADVPSALTKEMEESQAAKQADKDAKRKARAKELKKLKKEREKEEKEKEKEKAKAQASQSQSDVKGTSSGQMANRTATAPGLVPKHQTPQQILIAKEEERQRKQAEEREKRAAAAERRLAALAVQSAGTSASEMAADPSSSSTGQQTADIRAAPPEDSRQMAMSGPLNVRGDRRPPPMQRAFSRQVSLGSGVTVLGMDRAGRSGGARGQRTLPRSGRSLGVLNHSGGLVQAAGDGAARRVGDFSMFRTKSTLSKQNSMLPTRIRESDLELPTHVEDPQSASSRPAEDPLNKSVPAGRYFAALRGPELDEVRDTEDILLPKDEVWPFLLRFPIGCFGVCLGLGSQAILWGALAASPAMRFLHVTPMINVALWLLAVAVLVATSVTYALKCIFYFEAIRREYFHPVRVNFFFAPWIAAMFVTIGLPRSYAPERPHPAVWCAFVLPLFALELKIYGQWLSGGKRRLCKVANPSSHLSVVGNFVGAILAARVGWTEAGKLLWAIGVAHYIVVFVTLYQRLPTNEALPKELHPVYSMFIATPSAASLAWAAIYGSFDAVARTFFFMAIFLYLSLVVRINFFRGFRFSLAWWSYTFPMTTASLATVKYAEAVPCFASRALALSLSLMSSTMVSMLLVSTLLHALVWRSLFPNDLAIAITKDRQNGAVKPNDRGKRASKRVHDIKRWAKQAPLSLVSSITKSHSADKEEEERTE

SEQ ID NO: 44414 - protein, 399 aa, Zea mays
  Coding DNA Sequence Number=SeqID_2635
  Gene Ontology: Mol. function=dihydrodipicolinate synthase activity; Cellular component=chloroplast; Biological process=metabolic process
  Homolog annotation: Hit_ID=Q9LWB9; Match level="QueryCoverage=76%, HitCoverage=88%, E-value=1e-152, Identity=85%"; Hit description =Dihydrodipicolinate synthase precursor
  Pfam annotation: Domain name=DHDPS; Domain location=86-363; Score =513.9; E_value=1.8e-151; Accession=PF00701.12; Description =Dihydrodipicolinate synthetase family
MSPSSESAGRGERPSPRRASLRGGANDQAPPSKSTRRGERPSPRERICEAGLKTNCPPSGSTRRELRPTLSADSGRDKTTLTGDITSLRLITAVKTPYLPDGRFDLEAYDSLINMQIEGGSEGVIVGGTTGEGHLMSWDEHIMLIGHTVNCFGTRIKVIGNTGSNSTREAVHATEQGFAVGMHAALHINPYYGKVSTEGLISHFEAVLPMGPTIIYNVPSRSGQDIPPQVIETLSGYPNMAGVKECVGHERVKCYTDKGITVWSGNDDECHDSRWKYGATGVISVASNLVPGLMRSLMYEGENALLNEKLLPLTKWLFCLPNPIALNTALAQLGVARPVFRLPYVPLPLEKRIEFVRIVEAIGRGNFVGQQEARVLDDDDFVLISRNKTANPDFAYSFL

SEQ ID NO: 44415 - protein, 205 aa, Zea mays
  Coding DNA Sequence Number=SeqID_2636
MPIRAIANPAKVPELEKVAEQPKMLVATCNIPKFNPKPTRPIPRTPARCASSPANRSAPLVSRALSLSRRSPADNLGPPVSPFVPARDFTGAIPTDHPPPRLLAITPAPVKLGTAPPLSSLCSQPAREVSSLALCAPLPSWHPSPALAGLWPLPTSGAYKKNRLSSILPHTGLSHSLSPPLSRIELRAAAPFLRSGKLPFFALVA

SEQ ID NO: 44416 - protein, 58 aa, Zea mays
  Coding DNA Sequence Number=SeqID_2637
  Subcellular localization annotation: CTP_CleavageSite=35; ConfidenceScore=5.09e-01
MVTNDYGGSHGSKWVLVVAPQFIGSSSARIPRLTVIAAKSTQGPPYTDHSPTALAPFG

SEQ ID NO: 44417 - protein, 162 aa, Zea mays
  Coding DNA Sequence Number=SeqID_2638
  Homolog annotation: Hit_ID=Q6QP51; Match level="QueryCoverage=25%, HitCoverage=18%, E-value=4e-10, Identity=75%"; Hit description =Putative growth-regulating factor 1
  Subcellular localization annotation: CTP_CleavageSite=39; ConfidenceScore=5.10e-01
MAVAGGQEQRPRRPPSSRPIRGQQENPLSRREDNAPVLRSSNGSRTRNGRPANHSPRRINSAAGQAAPLAGEGPGKGDTPKRILPREGTRLRASLLIRGSKAGPLEGFDSHLRSRGPYTHYWSEVRRPAPRKGSTAASGYSGSAPITDQGFEGWPPKGSQPP

SEQ ID NO: 44418 - protein, 95 aa, Zea mays
  Coding DNA Sequence Number=SeqID_2639
MPHHRRSRGRNRAKRHRYTLSPLPALGVGQLGEGSALQRKSADGHLPQHHPGSGLIRWPIMADTPSLCQFAEETLENIRINPVGTCSQLQGGQQG

SEQ ID NO: 44419 - protein, 200 aa, Zea mays
  Coding DNA Sequence Number=SeqID_2640
MAADAMAASSEGGRDRATGKAPTSAGEREGGGEEREEGELTARGRAPAAAVRRARQGAGRVGRGEGREGFGEGESLTSGPHQEGGGDWQPPNAPRAGDVGGRWGGWAAAGPQGQLGHPRGPQLGRPRGGRLGQKGGEGGREKEKALEPHHVLASTRHPPPSPIAPGSLIGDLPRRGRRHLVVDRPSQAPSGQIGPTTVIP

SEQ ID NO: 44420 - protein, 56 aa, Zea mays
  Coding DNA Sequence Number=SeqID_2641
MGTRFFRTEPRFRLVTPSKRHSSGVSPPFVPILLAAIADDALVNEVLNAFTDIFAE

SEQ ID NO: 44421 - protein, 181 aa, Zea mays
  Coding DNA Sequence Number=SeqID_2642
MDTKTARIAGCLTEELLLGEDERRLAKVGVRSLLSEVEERGRCRDMGATGGGAGHGEAVGGLGESRGVGRWSCYSAIGKKGEGRHGWVLGCSSFAGAMGAGSARQEEDREGARLLAMDSREREEGMGAMGAASARQGRRASCCRGAERREQRASHGREASALGGAQRHGSLELGPLPAAVP

SEQ ID NO: 44422 - protein, 293 aa, Zea mays
  Coding DNA Sequence Number=SeqID_2643
  Gene Ontology: Mol. function=hydrolase activity; Biological process =metabolic process
  Homolog annotation: Hit_ID=Q336Q4; Match level="QueryCoverage=67%, HitCoverage=69%, E-value=1e-78, Identity=72%"; Hit description =Haloacid dehalogenase-like hydrolase family protein, putative, expressed
  Pfam annotation: Domain name=Hydrolase; Domain location=36-252; Score= 44.4; E_value=3.9e-10; Accession=PF00702.16; Description=haloacid dehalogenase-like hydrolase
MTIGLASKKLHNFCSRLAHSTGNRDESFRILTGHFQNGQALDLHIDPFTQYQHQRQQQQQLWFQHKKGQEEAQLRFLDGERGYSGGHGDQQAGFNGGVPITEEFYSANISGGHNDDLARSLFPGMDHQKAMRFMDDKEAMFRKLAPGQLKPVDGLQELCGWMEGRDLKRAAVTNAPRANAELMLSLLGLTDFFPVLVIGSECDRAKPFPDPYLKALQLIGASPQHTFIFEDSASGVRAGVAAGVPVVGLTTRNPGKVLKDAGASLLVKDFQDPELMSVLQQVEVEPAAANAQG

SEQ ID NO: 44423 - protein, 312 aa, Zea mays
  Coding DNA Sequence Number=SeqID_2644
  Gene Ontology: Mol. function=RNA-directed DNA polymerase activity; Cellular component=nucleus; Biological process=RNA-dependent DNA replication
  Homolog annotation: Hit_ID=Q8S461; Match level="QueryCoverage=97%, HitCoverage=16%, E-value=1e-138, Identity=80%"; Hit description =Putative prpol
MVIATKFASGQEAVEAIFRKDKQPQGRQPEDVPEASTQRGTKKKGKKKSQAKHDAADADLVVAAEYKNPRKPPRGANLFDKMLKESCPYHQGPVKHTLEECVMLRRHFHKAGPPTEGGRARNDDDKKEDHKAEEFPEVRDCFMIYGGQVANASARHRKQERREVCSIKVAVTVYLDWSDKPITFDQGDHPDRVPSPGKYPLVVDPVIGNVRLTKVLMDGGSSLNIIYAETLGLLQIDLSSVRAGAAPFHGIIPGKRVQPLGQLDLPVCFGTPSNFRRETLTFEVVGFRGTYHAVLGRPCYAKLRAPGGGVNM

SEQ ID NO: 44424 - protein, 542 aa, Zea mays
  Coding DNA Sequence Number=SeqID_2645
  Homolog annotation: Hit_ID=Q2R276; Match level="QueryCoverage=24%, HitCoverage=31%, E-value=7e-13, Identity=40%"; Hit description =Expressed protein
  Pfam annotation: Domain name=DUF593; Domain location=63-156; Score =96.6; E_value=7.4e-26; Accession=PF04576.6; Description=Protein of unknown function, DUF593
MDDDHDHDASSPAAGERCPCCSSPSSSPAVPWRRSVKRKLGAEKGEEGGEAGPTARVEAEDECAALREAVAAAQSTASALRAEVEEERLAAASAASEAMAMMLRLQRDKAEVQMELRQFRRFADEKMALDAADIDQLRALLAQRARRLVRLRARLREYRRQFLHLGIPLPEGEDLLFAQTAAEEEEDLLLLEGEDGYADGDGDGDGGYYPQLRCNDGEYYYEDEEEEDAVALDLERRICRLEHDQETPLLEPPLQEDEEEGTHLYTEEALPDLSGHEQGGLYADDMLSVDGVEELSDLHNDDEELPESPTAGRGDRVEASEADGVDSGSDRVYTIDKVHQGESAPIARVMDKYQGEAVEPDIKKLYMRLEALEADRESMRQALVAMRTEKAQLVLLCEIAQHLAKDGVPAGVGPGVHRSPRKRAVGIVERRFTEDKRVALLKTYSVVALFKFISLGAKWVLTLFGKKKKLSQSRYTFGLSSNNVGLLLLLDKCPRIQKTLMRTKFAGLANLLTRNLCKIPDLNRPSKIYAGGANTDPDVQYR

SEQ ID NO: 44425 - protein, 1044 aa, Zea mays
  Coding DNA Sequence Number=SeqID_2646
  Gene Ontology: Mol. function=translation elongation factor activity; Cellular component=cytosol; Biological process=translation
  Homolog annotation: Hit_ID=Q53KX3; Match level="QueryCoverage=98%, HitCoverage=99%, E-value=0.0, Identity=81%"; Hit description =Putative Translation Elongation factor protein
  Pfam annotation: Domain name=EFG_C; Domain location=902-990; Score =86.5; E_value=8.1e-23; Accession=PF00679.14; Description=Elongation factor G C-terminus
  Pfam annotation: Domain name=GTP_EFTU; Domain location=19-368; Score =174.0; E_value=3.8e-49; Accession=PF00009.17; Description=Elongation factor Tu GTP binding domain
  Pfam annotation: Domain name=GTP_EFTU_D2; Domain location=453-534; Score=20.1; E_value=0.0028; Accession=PF03144.15; Description =Elongation factor Tu domain 2
  Pfam annotation: Domain name=MMR_HSR1; Domain location=22-150; Score=- 21.6; E_value=0.095; Accession=PF01926.13; Description=GTPase of unknown function
  Pfam module annotation: Pfam domain module=EFG_C::GTP_EFTU::GTP_EFTU _D2::MMR_HSR1; Domain location=902-990::19-368::453-534::22-150
MAAVERADESAATAAGDPRHVRNTCILAHVDHGKTTLADHLVASCGDGLLHPKLAGRLRFMDYLDEEQRRAITMKSAAIALRSRAGHRISLIDSPGHIDFCSEVSSAARLSDSALILVDAVEGVHIQTHAALRQAFIERLRPCLVLNKIDRLITELSLTPAEAYVRLHRIVSDVNSIYSALRSHSYFSLLSALEDNPSTSSSSSAEDLPEDFEDDDDNEDAFQPLKGNVVFACALDGWGFRPQQFANLYARKIGVNPSAFLKGLWGPRYLDKKTGKVVGKKAIKSSDPQPMFVEFVLSALWKMYELVLKDGGESKGVKKLIVNFDLKIPERELKNRDTKAVLQSVMSRWLPLADAVMDMVVECTPDPVAAQGVRVARLMPKREVTPEDAAGCPEVVSEAERVRRCVEACDVSADAPVVVYVSKMFAVPSKMLPLKGVYGELLNHQSTSESEECFMAFARVFSGVLHAGQKVFVLSPLYDPVKGDTVQKHVQEVELQYLYEMLGQGLKPVASVGAGNVVAIQGLGQHILKSATLSSTKNCWPFSSMMFQASPMLKVAIEPSNPADLGALVKGLRLLNRADPFVEYTVSQRGEHVLAAAGEIHLERCIKDLEERFSKVKLVVSDPLVSFKETIEGMGVSLVESLKNPQEFVERTTPNGRCTVRVQVLRLPIALTKVLEESEQLLGQIIDGKTAKRDGVLDPRLSQEDGDSAATLRQRMIDAIDSELEAISKQVDKEKLDRYRKTWLGHLERIWSLGPWQVGPNILLLAESKSSGGAVTVQDGRQGVLVSGPAHVSEKLGFVRDCDTKNNNNLDNGEYATDAPESLHIESTTLRNSIVSGFQIATNAGPLCDEPMWGLAFIVEPYIFADGSDAANQSDQYNVFSGQVITAVKEACRAAVLQNKPRLVEAMYFCELTTPTEQLGATYAVLGKRRARILKEEMQEGTSLFTVHAYLPVAESVGFSNQLRSLTAGAVSALLVLSHWEAIPEDPFFVPKTQDELEEFGDGSSIGPNLAKKLMNSVRRRKGLHVEEKVVEHGTKQRTLAKKV

SEQ ID NO: 44426 - protein, 289 aa, Zea mays
  Coding DNA Sequence Number=SeqID_2647
  Gene Ontology: Cellular component=integral to membrane
  Homolog annotation: Hit_ID=Q10FY5; Match level="QueryCoverage=86%, HitCoverage=72%, E-value=1e-107, Identity=73%"; Hit description =Expressed protein
  Pfam annotation: Domain name=Rhomboid; Domain location=33-193; Score =54.4; E_value=3.8e-13; Accession=PF01694.12; Description=Rhomboid family
MAGLARHGTNWIAWIMIPGCQGRWGIEWPALGYVDHSGVYRFYTSVLFHGSLLHVLFNMLALVPLGTELERIMGSVRLLFLMLLLATTNAILHLTIAFLVAYNPLYHVPNLVNECSIGFSGVIFSMIVIETSLSGVQSRSVFGLFNVPAKWYSFFFACVDDTYGLFNYLLPGPSFYSKIEGLSALSVCVRRPGFIMCTGGTTYGQLPTYSNTSAAPSALINGNFLRNISSWMPSRHTSTAQEGEDPRFPGRARTLGSVGTEPTAREASAHLHARLLDNTTPSDPLTNTQ

SEQ ID NO: 44427 - protein, 525 aa, Zea mays
  Coding DNA Sequence Number=SeqID_2648
  Gene Ontology: Mol. function=RNA-directed DNA polymerase activity; Cellular component=intracellular; Biological process=RNA-dependent DNA replication
  Homolog annotation: Hit_ID=UPI00004C1733; Match level="QueryCoverage =99%, HitCoverage=38%, E-value=0.0, Identity=92%"; Hit description =UPI00004C1733 related cluster
  Pfam annotation: Domain name=RVT_1; Domain location=56-225; Score =126.4; E_value=7.8e-35; Accession=PF00078.17; Description=Reverse transcriptase (RNA-dependent
MPDIPRDVAEHSLDIRAGARPVKQPLRRFDEEKRRAIGEEIHKLMAAGFIKAVFHPEWLANPMLVRKKGRKWRMCVDYTGLNKACPKVPYLLPRIDQIVDSTAGCETLSFLDAYPGYHQIRMKESDQLATSFITPFGMYCYVTMPFGLRNAGVTYQRCMNHVFGEHIGRTVEAYVDDIVVKTRKTSDLLSDLETTFWCFKAKGVKLNPEKCVFGVPRGMLLGFIISERGIEANPEKIAAITNMGPIKDLKGVQRVMGCLAALSRFISRLGERGLPLYRLLRKTECFTWTLEAEEALRNLKALLTNAPILVPPATGEALLIYVAATTQVVSAAIVVERREEGHALPVQRPVYFISEVLSETKIRYPQIQKLLYAVILTRRKLRHYFESHPVTVVSSFPLGEIIQCREASGRIAKWAVEIMGETISFAPQKAIKSQVLADFVAEWVDTQLPTAPIEPKLWTMFFDGSLMKTGAGAGLLFISPLRKHLRYVLRLHFPVSNNVAEYKALVNGLHIAIELGVQRLDARGD

SEQ ID NO: 44428 - protein, 393 aa, Zea mays
  Coding DNA Sequence Number=SeqID_2649
  Homolog annotation: Hit_ID=Q9LIL9; Match level="QueryCoverage=66%, HitCoverage=99%, E-value=6e-74, Identity=45%"; Hit description =Arabidopsis thaliana genomic DNA, chromosome 3, BAC clone:F4B12
MASPDLAAGDGSYDFHLRSLSAASRDSAAASDPASDPNLLQSVRRVCEMCRTAKEAKDEMVARAFPVMGKLFQRCAAAPTQAVASTGVLLLGLSLVVSQVLVVALEKVERSSGTLIGSSIATIQKSAAPEMLLALMDEAYTGSAVEEPSGNSGSDDSGPLDLTDPMFLDLLKDENDGIAAKHWISPTISSTLQAAFNSPQSDRLKQSLEMAPRFLTLYFATALRDVNDSLLCALIPVVMSRYAAMFPDKVFSFKVRERLSDFILAAFQRSPNIIAVLKKPITDRLGEAHDNLAKASISFKKSSQARLLCFVVTAIAKLATCHSELLPRARVSLGKVARSRTSDRRVWQRACDYLGLMNEPAICLSVLGPSTAQGNGPGPPSHNFSFADLLPTE

SEQ ID NO: 44429 - protein, 82 aa, Zea mays
  Coding DNA Sequence Number=SeqID_2650
MEKCSCSCRLCIVDICDVHRWYGSLVGQKGVIGVPIGWRTAAFCSADAGVCLVDQGCLLAVTGMARHRVWSAVLLVLACRRV

SEQ ID NO: 44430 - protein, 689 aa, Zea mays
  Coding DNA Sequence Number=SeqID_2651
  Gene Ontology: Mol. function=sequence-specific DNA binding; Cellular component=nucleus; Biological process=regulation of transcription, DNA-dependent
  Homolog annotation: Hit_ID=Q8S918; Match level="QueryCoverage=99%, HitCoverage=84%, E-value=0.0, Identity=75%"; Hit description=Roc1
  Pfam annotation: Domain name=Homeobox; Domain location=1-43; Score =32.3; E_value=1.6e-06; Accession=PF00046.19; Description=Homeobox domain
  Pfam annotation: Domain name=START; Domain location=182-405; Score =257.9; E_value=2.1e-74; Accession=PF01852.10; Description=START domain
  Pfam module annotation: Pfam domain module=Homeobox::START; Domain location=1-43::182-405
MASFFKECPHPDDKQRKELSRELGLVPLQVKFWFQNKRTQMKNQHERQENSQLRAENEKLRAENMRYKEALSSASCPNCGGPAALGEMSFDEHHLRVENARLREEIDRISAIAAKYVGKPMVSFPVLSSPLAGARPSPLDIDSGGVLGGAATYGGAADIFGGGGGVAACGAARDCDKPMIVELAVTAMEELVRMAQLDEPLWNAPAGGHDGSAETLNEEEYARMFVPAGGLGLKKQYGFKSEASRDSSVVIMTHASLVEILMDVNQYATVFSSIVSRAATLEVLSTGVAGNYNGALQVMSVEFQVPSPLVPTRDSYFVRYCKQNADGTWAVVDVSLDTSSVLKCRRRPSGCLIQEMPNGYSKVTWVEHVEVDDRSVNGIYKLLVDSGLAFGARRWVGTLDRQCERLASVMASNIPTSDIGVITSTEGRKSMLKLAERMVTSFCGGVTASAAHQWTTLSGSGADDVRVMTRKSVDDPGRPPGIVLNAATSFWLPITPKRVFDFLRDESSRSEARTRAPTHTQFFFNREHWDILSNGGVVQEMAHIANGRDHGNCVSLLRVNQSTNSTQSNMLILQESCTDASGSYVIYAPVDVVAMNVVLNGGDPDYVALLPSGFAILPDGPSGSSNMQGGGGGGVGSGGSLLTVAFQILVDSVPTAKLSLGSVATVNSLIARTVERIKAAVSGESVTQQ

SEQ ID NO: 44431 - protein, 214 aa, Zea mays
  Coding DNA Sequence Number=SeqID_2652
  Homolog annotation: Hit_ID=Q69R60; Match level="QueryCoverage=32%, HitCoverage=11%, E-value=1e-11, Identity=55%"; Hit description =Phospholipid/glycerol acyltransferase-like protein
MTASSSIGSRGGRWSGRGRCGEIRGSGQSFYRWPRREEEEVASTGEACCGGDDGTQWWHQDGSGQAVAMGRLGHSARGCKTPIRARERVNGEETGRAVADDERVDGRSRAREKEADEWGPPARERAVAREKGRRPCGGEASGSAFASVYVEARRVATATTGGHLHEDPDLVSRRWVHEEEDRVEPLVASHRGAIEHGAASPHGGRRDLASDLRE

SEQ ID NO: 44432 - protein, 470 aa, Zea mays
  Coding DNA Sequence Number=SeqID_2653
  Homolog annotation: Hit_ID=Q2R211; Match level="QueryCoverage=84%, HitCoverage=83%, E-value=1e-119, Identity=53%"; Hit description=F -box domain containing protein, expressed
  Pfam annotation: Domain name=DUF295; Domain location=375-435; Score =31.3; E_value=3.3e-06; Accession=PF03478.8; Description=Protein of unknown function (DUF295)
  Pfam annotation: Domain name=F-box; Domain location=70-116; Score =25.0; E_value=0.00026; Accession=PF00646.23; Description=F-box domain
  Pfam module annotation: Pfam domain module=DUF295::F-box; Domain location=375-435::70-116
MATAAPGVCAAARGRAGTETNLFERSRLPGIRNVDLLWSLLSRILSKLLGLPGILLKKFRKEGVTELDATALLELPQDVLMDIFGTLEVPDLIRAGSVCSSWYATYKCLLDLRQYKQPQTPCLFYTCESAGSNVGFLYSLKENRSYKLTLPEPPIRSRLLIGSSNGWLITADERSELHLVNPITGEQVALPSVITIEHVKPIFDASGTIHMYELSYETPPDLFDLGDLRDELYFKAFVFPDPSTTGSYIVVLIHEPYSRLSFARPGDDKWTWVGQGSQYKDCTYVDGLLYTVNYSGEIDAFDFTASPVKMTVILKELKYPVCENMYIIQAPWGDLLHVWRTLGVPPNAPSWVPGKCLFETLKIQVHKVDLEAKQRVEINRLQCDSVLFLGHNDSLCLSAQVHPELKSNHAYFTDDFKEVTVLLKNCIRDMGVMDLENSVNKKIVSQIWSNWPCPTWITPNLMKLNQAFNR

SEQ ID NO: 44433 - protein, 233 aa, Zea mays
  Coding DNA Sequence Number=SeqID_2654
  Gene Ontology: Mol. function=zinc ion binding; Biological process =metal ion transport
  Homolog annotation: Hit_ID=Q10A88; Match level="QueryCoverage=67%, HitCoverage=43%, E-value=3e-67, Identity=74%"; Hit description =Rhodanese-like domain containing protein, expressed
  Pfam annotation: Domain name=Rhodanese; Domain location=100-203; Score=28.6; E_value=2.3e-05; Accession=PF00581.10; Description =Rhodanese-like domain
MAKAAQGGNVVEVESHALGGEDDLRDIGVVQGVSYTRLGKKACATSWGMSRDGGEAATVRGLGKTAGLEGGSLHLPLLDPNMRATPLTPSEWKERLEARTCLDVSSGETSGRGLLLLDVRNDYEWDVGHFEGAQRPNVDCFRSTSFGLSGETDPLNGVDKERTDILMYCTGGIRCDVYSTILRKKGFPNPDTREGGVSNYPKAEGPTGWVGNLFVFDGRLSLPPATFKEEEDE

SEQ ID NO: 44434 - protein, 619 aa, Zea mays
  Coding DNA Sequence Number=SeqID_2655
  Homolog annotation: Hit_ID=Q1SD81; Match level="QueryCoverage=19%, HitCoverage=10%, E-value=2e-07, Identity=32%"; Hit description=H+ -transporting two-sector ATPase, alpha/beta subunit, central region; TonB box, N-terminal
MAATHVLHSFWRRHRWTVLRSLLLVALLHRLHLLAFLAASSPVWLLTAFLLGAVLVNSEPNVPLAVAAALEDHEGRHLTTAGTGPSSSSSSSDDGANESEEDVDEDHLVVDKKEAVAWTADDEHSIQSIGSLELERNARLEKLMSRITVHRGLTDLDVHTPAVLAPRTKNPFDLDLDHDAAMDAPGSAPSSLLGQHTNPFDIHIQQPDEVEEEDDDKKAAMLVGRHDSFTAQPSRFMPYFVADVPEEEGGGGSGRDAGSDNSNSNSSSPSASTASDHQTQQEAAVKVEEAPAAMASTWDGKGNGTVVAVDVELISDSSDDDMSLQADDATGGSLNNAHDPSDEDEEDSFEVESITQQVAAAKQQLQPVSPPSEQGHRDEEDKEVASIVSGRNEWVPLTTLVSVEEKEKGERGLTENREHHILGAVPAIDASAGARVGAAGAVVAAAPTPPATDVASGPPPVTAAAPTPRPTTVAPPTPPATDAAAGPPPVAAAPPPPATDVASGPPPVAAAPPPRPTTVAAPPPPATDVASGPPQPAAAAPPRPTAAVASAPPSGKLSSKSKVASKKIDPKKAVFGFFRKYKRHYNLEWREYLPVKGWMMLYASILVSVTDFTRKPSYS

SEQ ID NO: 44435 - protein, 308 aa, Zea mays
  Coding DNA Sequence Number=SeqID_2656
  Gene Ontology: Mol. function=transferase activity; Cellular component= nucleus; Biological process=glutathione metabolic process
  Homolog annotation: Hit_ID=Q945X2; Match level="QueryCoverage=67%, HitCoverage=91%, E-value=2e-77, Identity=65%"; Hit description =Putative glutathione S-transferase OsGSTT1
  Pfam annotation: Domain name=GST_N; Domain location=83-149; Score =17.9; E_value=0.016; Accession=PF02798.10; Description=Glutathione S- transferase, N-terminal domain
MVVACGAGYGEVRVRVWRLAGGVRVVRAAAFAACVRCGWQAACGWFARAVRAAAFAAGVRSSSGGLFAAAAVYSIVVTPFRSVILRPAGRRFLMPATVCRVNQIDFEEVTVDLFKSQHLTPEFKKINPMGQVPAIVDGRFKLFERYPSDLFTRAKIESILDWHHSNLRRGAATLVMHTALAPFLGLTTSHEAVKQAEKLVMQSLGVIESVWLKGDAKFLLGIPQPSIADLSLVCEIMQLEILGDEVRDRFLGAHERILVWMDKVKKATSPHFEEAHELLFQVKKARMVQGSSSKAFESSTKLKTASKL

SEQ ID NO: 44436 - protein, 469 aa, Zea mays
  Coding DNA Sequence Number=SeqID_2657
  Homolog annotation: Hit_ID=Q10A88; Match level="QueryCoverage=19%, HitCoverage=22%, E-value=1e-36, Identity=78%"; Hit description =Rhodanese-like domain containing protein, expressed
MELAATRVGGDNCRPEHDVGFGSGVEHGACGDHGAASGVHVDERGLEDQAEVGAPAAPAEELRVELAAVAVQAHGGAGREQLGEGVLGGCAKWEHARVERERPVAVPGAEEGGYHGGVGHGVWARHFAEHPGGAVPLLAVGIEDEEGASEDGVGGGQATTARLGMYLVREAAVAAPEQGGIGELVGGSDGGVGSENAAEDEPEFVPLQEEEEEEEDARFVVVTFYKFVPLFDPHAEVARHLNFLQGRDIHGRIYLNEKGINAQYSGPHKDAVAYADWVKKHHQFSDMLVQTSPAVTGHAFPRLKLRYKPSLVQEKFLALCFKIQSRSLYVLVTSLQIQKLIHGDDLPQFCPQSPVLELKVQCNINNMANTTWWTLRRLHSDIGGTTEPRHDNLVWAAADPYVHNWLLTTVADDVLGLRLAHEPDQTAHQLWTVIVDLFQANKAPYAIFLNHEFHSMTHMTSSSTSTVRR

SEQ ID NO: 44437 - protein, 492 aa, Zea mays
  Coding DNA Sequence Number=SeqID_2658
  Gene Ontology: Mol. function=binding; Cellular component =intracellular; Biological process=protein amino acid phosphorylation
  Homolog annotation: Hit_ID=Q1S1V5; Match level="QueryCoverage=80%, HitCoverage=75%, E-value=2e-91, Identity=31%"; Hit description =Tetratricopeptide-like helical
  Pfam annotation: Domain name=PPR; Domain location=11-45; Score=4.3; E_ value=2.3; Accession=PF01535.11; Description=PPR repeat
  Pfam annotation: Domain name=PPR; Domain location=181-215; Score =14.9; E_value=0.13; Accession=PF01535.11; Description=PPR repeat
  Pfam annotation: Domain name=PPR; Domain location=282-316; Score =33.6; E_value=6.7e-07; Accession=PF01535.11; Description=PPR repeat
  Pfam annotation: Domain name=PPR; Domain location=317-351; Score =12.5; E_value=0.25; Accession=PF01535.11; Description=PPR repeat
  Pfam annotation: Domain name=PPR; Domain location=78-112; Score=37.7; E_value=4.1e-08; Accession=PF01535.11; Description=PPR repeat
  Pfam module annotation: Pfam domain module=PPR::PPR::PPR::PPR::PPR; Domain location=11-45::181-215::282-316::317-351::78-112
MERSAVLPNAFTYAALIAACSADHSLHIGQQLHGRLFKSGLEHDTSACNALLDLYSKSSARSLDLLLAFHAADMPNVVTWTSFIAGLMRHGREQEALAAFARMRATGVKPNSFTLSTLLKGCTSAHACLHAAKIHAYVLKTSSESLDAAAGNSFVDVYARSARMDDAWKVATTMSFVRDRFTYTSLAKGLNQMGLHHRALGMILHMFHEEVSIDGFSLACFLSAAATLASIESGKQLHCCAVKLGLSGQVSLSNSLINMYSRCKSLEDAKSVFQSIREPSVVSWNAIIFGMAFNGSYTEALSVFEDMILAGAQPDGVTFTVVLSACSHGGLVDIGIKHFNSMANMFDVPPQKSHYTLFLDMLGRSGRFTEVAHTIEAMPVQPDLSIYRTLLASAVLLGYKIMTNRYICGMKRDAGIQVLCCRSIAENRAWVLVKYSHGNFWHGILSSFNLGYLIPSPVEASFAEWWGGVINQIHKDKKKGFNIAIILGALCL

SEQ ID NO: 44438 - protein, 261 aa, Zea mays
  Coding DNA Sequence Number=SeqID_2659
MPLTPSPPSDCRIHPYMPHLPSIFAPPHALLPLPPCAQPLRPTTMRDPHPTAMRADYASTGSGLPIAIPSSNRDPPPHASLPRPACLAPDPPSGSDSGSAPEDGELRLRPDPGLGLGLSPRRRRTPLRPTQGSDSGSAPEDGELRSARPRARTRAQPRKTTNSVSPDPRARTQPWPQPTVSASPDPGGSDSTSASEDRLDLDLGGASTSPNLGRGPTTQAMMAPHTLYDDGGSQPPYGSKRTSARTRQLRQLSFRQAPALL

SEQ ID NO: 44439 - protein, 1017 aa, Zea mays
  Coding DNA Sequence Number=SeqID_2660
  Homolog annotation: Hit_ID=Q10A91; Match level="QueryCoverage=94%, HitCoverage=78%, E-value=0.0, Identity=56%"; Hit description =Expressed protein
  Pfam annotation: Domain name=DUF733; Domain location=487-579; Score= -20.6; E_value=0.068; Accession=PF05306.2; Description=Protein of unknown function (DUF733)
MSARSEFPPFNPSGIMFMGDNMKQTMESMSVSNGDANGEDASKADQRTSQHSGAPHEFFHGPYQSAYPPWAMHPPYSMQGMPYYPGMNPYYPSPYPPMDETRYHPSERRVSKKHSDSKDSETSDDKSDQSGSERETSYGHRSHKKDKRAGKKKPSVVVIRNINVTSKRHGSSDSDSQTGSDVVSEDSDDSHAKSRKKKNNSSSSKKKDARKMVFESADEYSKNGMSYGQDGDQGSWNVFQSFLLRADEKRDNDADLFASEKKAPPARMKESTSVDVDSILLVEQNSAGANEHNTTGFSMENERIRPQQMLSGDELMMYGEGEGMSFGCDDIKEIEAGGVRYRRGTSDDFMIYGQEKSMDRGSSLDPLAEAQYKSPTLVDKNVHSLADESFMIPLRSTSEDNHEPECRTAIDIDVELPSTVQKISDAKAGSQLFYEPAELMPERGCEDVSFGYDPAMDYNSQIQSQSATMVEDAHMEDALLSTVDEIKKPEKDKKLRSSQESLDKRRKDASARRLSSSKGPLTDAQKRAQNLRIYKADLQKAKKEQEEEQIKRLERLKLERQKRIAARSSTSNAPTPQQPRVKPSPKVSPSTYKSSKLSDTELASSSPLRKFPIKTTPGTDPEKTAKSSKLNDNTNAVSKPTLTDMKERSGRTESSNERLRKLAEPKTNSSTGHTLNSKSASVDRPRRKSMPQDSQTKKISAIMQLDQSKSATLPELKVKYSQAPAVVKNAVASRERKEVSAGAKSLRTTETASVKETNGNISRMNSSDDNVVVEKTVVMLEDEAVILHSGRNAAKETCSDDRTEKPSPESEYIAIRAPLSPVILPEAERSDDLGSSYEVVTECLKDEPEEPTLGAVEKPYQAPFARVTSLENASDNSPLPESLAHANSIKARVPEPVYTVSVEGHVVSEKPRSKEPKGLRKLLKFGRKSHAEGAMDSSVDEASAGDGSMLKNLISQDDSGASSSKGCVHNLSLESISNNHDLVVVVECSLCLFTVSSASRSFSLLSPFRSKHKVIVL

SEQ ID NO: 44440 - protein, 67 aa, Zea mays
  Coding DNA Sequence Number=SeqID_2661
MAVAAAAPASVAPSPAPKASDDRKAVVPVDASELEKHVLVVDDSSVDRIVITRILRGSRSRFTLKST

SEQ ID NO: 44441 - protein, 53 aa, Zea mays
  Coding DNA Sequence Number=SeqID_2662
MENTKYLRSRSTGEERKMEIWPAEMAWPPEDWGVGHRAFAVPGKSLGWASEST

SEQ ID NO: 44442 - protein, 106 aa, Zea mays
  Coding DNA Sequence Number=SeqID_2663
MAKNFGSETVQIAMNAVITSHLLVCLYSAAETNVLGVTLELTNKLERKPISKTAEKQEVGFLALGHRTVRCAPDCPLHPLPGGARLAQGRGFPTQKPESAGFRVEF

SEQ ID NO: 44443 - protein, 407 aa, Zea mays
  Coding DNA Sequence Number=SeqID_2664
MEAQARHACKKSQETALATGAAGTMMATVIGKGGCWRHHGQRSCGRRGRYVPASSSQSPRPLTTSLPPVPSLSLPPPPPRPPIHANLSSVLIHITRAGHTMRCIAWLRHTHPLHTASVRDKRIYIIRHARDRAEMNQCVPSWDLVDDPTAAVAGGGGGLNHQVSTTGGAHRGLLLQASAGGAGGGGAFAPVVVPMSNQYYEVAELTWEKGNISSHGLLNRPAHNKYPPAAAPSSAQLHAIAGGGGRGGGSPSGDRETLEAVVGEAAARSHFLSQPAPPWLIGADAVARAAADALVPCAARAGESAADGGEAGASRRKRPRVVGDDSLVVCASQGSTAPRRRGESALLTQLDACGTEADDVCGFRTTTTNNSTSMDRDDKGSPDTENTSIGGGASDSRCFSRRSQASS

SEQ ID NO: 44444 - protein, 463 aa, Zea mays
  Coding DNA Sequence Number=SeqID_2665
  Gene Ontology: Mol. function=RNA-directed DNA polymerase activity; Cellular component=mitochondrion; Biological process=RNA-dependent DNA replication
  Homolog annotation: Hit_ID=UPI00004C1731; Match level="QueryCoverage =90%, HitCoverage=29%, E-value=0.0, Identity=90%"; Hit description =UPI00004C1731 related cluster
  Pfam annotation: Domain name=rve; Domain location=175-334; Score =117.8; E_value=3.1e-32; Accession=PF00665.16; Description=Integrase core domain
MKTGAGAGLLFISPLGKHLRYVLRLHFPASNNVAEYEALVNGLRIAIELGVRRLDARGDSQLVIDQVMKNSHCRDPKMEAYCDEPEVPSAQPEASSDQLERCISIAEGQELLQEIHSGACGHHAAPQALVGNAFRQGFYWPTAVADATRIVRTCEGCQFYAKQTHLPAQALQTIPITWPFAVWGLDLVGPLQKALGGYTHLLVAIDKFSKWIEVRPLNSIRSEQAVAFFTNIIHRFGVPNSIITDNGTQFTGRKFLDFCEDHHIRVDWAAVAHPMSNGQVECANGMILQGLKPRIYNDLNKFGKRWMKELPSVIWSLRTTPSRATGFTPFFLVYGAEAILPTDLEYGSPRTRAYNDQSNQASREESLDQLEEARDKALLHSARCQQSLRRYHARGVRPRDLQVGDLVLRLWQDARGRHKLTPPWEGPFVIAKVLKPGTYKLANSQGEVYGNAWNIQQLRRFYP

SEQ ID NO: 44445 - protein, 158 aa, Zea mays
  Coding DNA Sequence Number=SeqID_2666
  Gene Ontology: Biological process=cell adhesion
  Homolog annotation: Hit_ID=Q9C5X2; Match level="QueryCoverage=67%, HitCoverage=43%, E-value=2e-19, Identity=44%"; Hit description =Cyclin J18
MEVEDDDNTAAPSAWPSSSRRRHLLQFLLHASMRLDLRPIVKYAALTFFAGRFLPALPRKMGFCGARSGRIVRSWLLEPLRDSNLELFALVAVWIASKIHDQKPMSVKSLKALGDRIIADQHFMCRDFASAVFDVTSNAAGIGVLGGSLDFLQPFSDP

SEQ ID NO: 44446 - protein, 433 aa, Zea mays
  Coding DNA Sequence Number=SeqID_2667
  Gene Ontology: Mol. function=inositol or phosphatidylinositol phosphatase activity; Cellular component=intracellular; Biological process=signal transduction
  Homolog annotation: Hit_ID=Q10PD3; Match level="QueryCoverage=93%, HitCoverage=99%, E-value=1e-130, Identity=56%"; Hit description=Type I inositol-1,4,5-trisphosphate 5-phosphatase CVP2, putative, expressed
  Pfam annotation: Domain name=Exo_endo_phos; Domain location=105-390; Score=94.2; E_value=3.9e-25; Accession=PF03372.13; Description =EndonucleaseExonucleasephosphatase family
  Subcellular localization annotation: CTP_CleavageSite=31; ConfidenceScore=5.14e-01
MSCPFPPLSLPSTSYPTNFFPLATKTENQKQAEVLWPRLVANKLFRKTSGSHAFVADFPAADDDDDIVFGTEADGGGGCSPDADASRCVKRARPHERNKTLKYKLFASTWNVGGVAPPDGLDLSDWLDGGDDDGPYDMYVLGFQEVVPLRARNVLGADKKRVGMRWIELTRAALNRSHSQRSRGGGGGKQKVHPVRDGGGGELGREYRCVVSKQMVGILLTVWVRSDLRRFVRRPSVSCVGCGVMGCLGNKLKKVTSKVINIGDRGRGSRVILLGDLNYRISLPEAKTRLLVERQDWKTLLENDQLRAEVCRGGAFQGWSEGPIGFSPTYKYHPNSDAYYGCATAARGRNKRRAPAWCDRVLWRGAGLAQTRYDRCESRLSDHRPVRAVFAVEVDAPGDLNSLRSFFMSERFDRDQMLLRKDDVNSARFGDTL

SEQ ID NO: 44447 - protein, 693 aa, Zea mays
  Coding DNA Sequence Number=SeqID_2668
  Homolog annotation: Hit_ID=Q10PC8; Match level="QueryCoverage=89%, HitCoverage=95%, E-value=0.0, Identity=58%"; Hit description =Hydroxyproline-rich glycoprotein family protein, putative, expressed
MASAAAVIASPAPGAAAAEPAAWLVDERDGFITWLRGEFAAANAIVDHLIFHLRSISEPGEYDHVFSLVQQRRHHWPHVIHMQQFFPVSDIAFALQQASWRRHAPPAQALGAGASPAALPPPPPRRASFSQSHHSHQHHRHGAHYRPDPARGAATAATGSEKDGREVHNNKEGRGLKEAGNVVDTKSLRLDSPITDEGEEKSKLQAVSEESSKMVATPVEYSTNEIIDGSMVNTVEGLKVYEGLLNVTEANKILSLVNETRASYRRGGLEARQKVIIAKRPMKGHGREIVQLGVPIIDGPPDDENLRETRVEAIPGLLNDLFDRLSQQEIIPFKPDYCVIDIFNEGDYSHPHQSPSWYGRPLCTLCLTDCDMVFGRYISGEKGDHRGPLKLSLATGSLLLMQGRSIDCAKRAIPATRKQRVILNFGKSVARKHIPAESAWSTPLTPPMPWGQSSRPVNGSRHPQSPKHYGYAPISGVLPAPPVGAHHVPPSDGMQPLFVAPAPISAAAIPFTPTVPLQNTSAAWIQEVTPRPAPPRFPGPGTGVFLPPGSGHPLPHQMMPASHGHGEPNSPQGSSAYLHSKVNGKETSNGNLSPKNSPRKTSCTAEEKPECNGSLNGGGGSADEKSTVGMEQQNGVQKNVGSSKVFAVDVNYNLDCELITLLGPERFASVLIQDVGKAYGFMACNVHTAASTG

SEQ ID NO: 44448 - protein, 80 aa, Zea mays
  Coding DNA Sequence Number=SeqID_2669
MPSTPRWQGAHRWSPTSTPQAPTTDSIIDSRGEEQCEHLRGYLFGRNGRNTVGHGRERITVLPRRASVRPDNKPGPHNGL

SEQ ID NO: 44449 - protein, 153 aa, Zea mays
  Coding DNA Sequence Number=SeqID_2670
MANASCLLEALPPCIWIPRVWFERHEEAYNRVIANYQWFAEIAVVDYPLEHWHQSRMCVVLSVVGNACCIDLGCLGNGDYTSVRGVIKINSVEDVLEKLLILNHSGPATIARVFLIRLWAEPSNVDMLHFQFTNPSPIAPQGDYSEYLTISYL

SEQ ID NO: 44450 - protein, 96 aa, Zea mays
  Coding DNA Sequence Number=SeqID_2671
MTVLRHGHYVRIDAPEAPTNPGNINTTERFVDKIKEEGMVMENKVFETETTIGFGTTDVILGEKEPKPMATIGPNQQKSSLMLVNSSKNYLRDNQS

SEQ ID NO: 44451 - protein, 70 aa, Zea mays
  Coding DNA Sequence Number=SeqID_2672
MSGGIIDKDREEDKCVIGILKNMTRLPIYDGMTQIVLNTPKGNELTENIDHDDEKKRRGLEFSSMADLEA

SEQ ID NO: 44452 - protein, 33 aa, Zea mays
  Coding DNA Sequence Number=SeqID_2673
MSHGGALNTGEFMATVRMVEWINVFWITESMAD

SEQ ID NO: 44453 - protein, 247 aa, Zea mays
  Coding DNA Sequence Number=SeqID_2674
  Gene Ontology: Mol. function=ER retention sequence binding; Cellular component=endoplasmic reticulum; Biological process=protein retention in ER
  Homolog annotation: Hit_ID=Q2R4I7; Match level="QueryCoverage=51%, HitCoverage=59%, E-value=3e-57, Identity=85%"; Hit description=ER lumen protein retaining receptor, putative, expressed
  Pfam annotation: Domain name=ER_lumen_recept; Domain location=96-247; Score=176.2; E_value=8.2e-50; Accession=PF00810.9; Description=ER lumen protein retaining receptor
MAFGNPALSAPSRLRTTTVKASPYDRNVLHVAGPNDRHPYAVWNRGLKADLSRLPEQSPLRTNASCPTVTRTSIHHARPSRMDIEQIFDRPKTNRDGSDLPSGIKTGHCRRAREPCTRGGISLKTQELYALVFAARYLDLFVHFVSLYNTVMKLVFLASSFSIVWYMKRHKIVRRTYDKDHDTFRHYVLVLPCLLLALLINEKFTFREVMWAFSIYLEAVAIFPQLVLLQRTRNIDNLTGQYVFFLG

SEQ ID NO: 44454 - protein, 249 aa, Zea mays
  Coding DNA Sequence Number=SeqID_2675
MTQPGFLPVGMSTSNRIIKPGYESYQPVTVAQQFGLGLVPPHFHLHQLTECRADLPDSITVQWCYSLFDDLKILILADLCFTFSTDGFSSWWGMGKSHAFQRALGPPLQQIDTEYEVLDGEAAVVEASSGEEQVPRGCSPLGTIDVLTETVGTLVVLQDLHEPVNPMLDVDPCLGTAQALGKGNWRTLRNASESPEAEALTTRLRLKFADLSTLSRQIVAGEDRDDDTVIAEVDRVRVEAIRAVDDFLR

SEQ ID NO: 44455 - protein, 201 aa, Zea mays
  Coding DNA Sequence Number=SeqID_2676
  Homolog annotation: Hit_ID=Q6K6D8; Match level="QueryCoverage=47%, HitCoverage=14%, E-value=5e-12, Identity=38%"; Hit description =Aminotransferase-like protein
MAPTSSSSSSFPYFEHDTDREPTPVWDRIAAYEEAPPHWDAEEWDFAVESEDDLSLTDGEDLELLLGEDWEDIEDDLFPGMEPMSRRRVRRAACLLRRTGGSPVGLGKLFLGEVYRFLHLTISNLLSGKKLRTDGPWWFIQLWAHLYFQRCIPNFPVLASNSFPDESGRQIRCTSYGQALYSLPGSKLNPRDASGWFKLFF

SEQ ID NO: 44456 - protein, 53 aa, Zea mays
  Coding DNA Sequence Number=SeqID_2677
  Homolog annotation: Hit_ID=Q2R4I7; Match level="QueryCoverage=55%, HitCoverage=13%, E-value=2e-08, Identity=96%"; Hit description=ER lumen protein retaining receptor, putative, expressed
MNVFRLAGDMTHLLSVVVLLLKIHTIKSCAVPSKTPPNLTGRHNEQQNIEENR

SEQ ID NO: 44457 - protein, 283 aa, Zea mays
  Coding DNA Sequence Number=SeqID_2678
MQVACNCTTGTHPFDFDVSSMEAQAHTSCNQRAGYYVRETAPLLAPIPRLLDCGTGAATRGNPRMAQQCQPSTSVTGTGKGDTPKGILLHEGSGPRALLRIRGSKAGPSEGLDSRLRNSGSAPTTNQGFEGWPLEGFDSRPRARRARDDSGYIRFMAEARATLPRVRLTTAKSGLRRNRKLRLARPWASVSEGGLLLARPQGLALASASEDSLCLAQPQGSASTSTSEDGLRLARPQGSASTPTLEGIASSPNPGLGLRRSLRLARPWARTDHATWGTSLPYP

SEQ ID NO: 44458 - protein, 88 aa, Zea mays
  Coding DNA Sequence Number=SeqID_2679
MAGKQVAHELALVLASDAPETKVESLAVVAEATVLQYGGTVADPSKGSSDDNDDIDIEEDNTIICPTKPSHIDFGKSEIKGGNIESKW

SEQ ID NO: 44459 - protein, 57 aa, Zea mays
  Coding DNA Sequence Number=SeqID_2680
  Subcellular localization annotation: CTP_CleavageSite=21; ConfidenceScore=5.11e-01
MANLVSPSHGHNPTSEFAESSASVLANFGDPGTAIACTRPNSGNLTVARRSSTARIR

SEQ ID NO: 44460 - protein, 161 aa, Zea mays
  Coding DNA Sequence Number=SeqID_2681
MGKNKKGGSSSHHSGDKRKCEPSPPSEDFGDSEYSEEEFSSKSEGSPVFASPSVSSDDMDDSQGIDVEVWTYIRAIERSGLEGSDESEISSDEENSSDSSEEESGGDGDNEGDGDDGGDGGDDGDDNDDDDKGDGGNSGKGDGSGKGNGVSSKASGKAPLV

SEQ ID NO: 44461 - protein, 100 aa, Zea mays
  Coding DNA Sequence Number=SeqID_2682
MAAAFYTPGEGATASTEAGRTDRIGHAGQRHKIRADFTAAPTTSASRGDDRDDPPGPRARDMGPPNPDRRGRIQRPARILAELALICWERRVLHPGLHGG

SEQ ID NO: 44462 - protein, 71 aa, Zea mays
  Coding DNA Sequence Number=SeqID_2683
MPRNMVNRLYPSRNLRHGLPFRLWWVQVRSLHDGSRGSLEDMVAGVTWSSILPPGWTVEWDPTLAGEEHEG

SEQ ID NO: 44463 - protein, 456 aa, Zea mays
  Coding DNA Sequence Number=SeqID_2684
  Homolog annotation: Hit_ID=Q6ZI82; Match level="QueryCoverage=92%, HitCoverage=60%, E-value=2e-83, Identity=48%"; Hit description =Putative T-complex protein 11
MSMESPVVLRSTKALLDRLEKRLVISHSVASSSVENVDHLLKRLGSPPRRRAPPSREGKTRAVVKRPAKSSEASIKLPRYSLRVVLCAYMILAHPSAVLSGQGEREKQLIESAANFIKEFELLIKVILDGPGQSSGVTGQRKFRAQLANFDKAWCSYLYSFVVWKVKDARLLEEDLVRAACKLELSMMQTCKLTADRHSQNNLTHDMKAIQKQVIDDQKLLRDKVQHLSGDAGLERMNSALSDTRSKFFEAKENGSPLTAPVANVSTPLSINSSGKAPLSEVPESSRTNVIGTSSVMPAAGQVPALVPVLRSGHGAPVGQPSPSAGDTYGQPECKGEKLDKLIRIGLLQLISSVEGLQLQSTPESFQINLLRLRAVQSQFQQVIVIATSMLVLHQVLMRENSRATPLELENAISELVKALAEQPGKSSADERRERPLGSTREEQRRRARQAPGGRG

SEQ ID NO: 44464 - protein, 145 aa, Zea mays
  Coding DNA Sequence Number=SeqID_2685
MEVYLPAAARHRALPTRTIGLRHGDVFRARFPGRRTATAVVETESPGGFRRVVSAGHEEKIGRRSGWLRPVGPDDKGRPRLGTTNGLRASRANPGRFCYGEVSSPRPCPNSRSRFGRKVRDEPDDEGPQKLKFYDPILGFTVRLQ

SEQ ID NO: 44465 - protein, 413 aa, Zea mays
  Coding DNA Sequence Number=SeqID_2686
  Gene Ontology: Mol. function=calcium ion binding; Cellular component =intracellular; Biological process=defense response
  Homolog annotation: Hit_ID=Q1SH11; Match level="QueryCoverage=94%, HitCoverage=74%, E-value=1e-128, Identity=60%"; Hit description =Calcium-binding EF-hand
  Pfam annotation: Domain name=efhand; Domain location=244-272; Score =1.6; E_value=10; Accession=PF00036.22; Description=EF hand
  Pfam annotation: Domain name=efhand; Domain location=352-380; Score =28.3; E_value=2.6e-05; Accession=PF00036.22; Description=EF hand
  Pfam annotation: Domain name=efhand; Domain location=86-114; Score =21.0; E_value=0.0042; Accession=PF00036.22; Description=EF hand
  Pfam module annotation: Pfam domain module=efhand::efhand::efhand; Domain location=244-272::352-380::86-114
MEKWLGSEYSFRRRVFFNYEKRIRLLSPPEKIFEYFASVRNREGEVYMLPADLMRAVVPVFPPSESTVVREGRLRGERSPGELHCAPSEFFMQFDTNNDGLISFAEYIFFVTLLSIHESNFTVAFKMFDIDHSGNADKVNLSRQEKRPARYEHVQSSDLFVDGKRRDMPLFRVIDREEFKKIMALMRSFNRQGSTHKDGLRIGLKVGKPVENGGVVEYFFGSDGNEPLHFDKFSKILKELHDEIIQLEFSHYDVKSSKTIPAKDFALSMVASADMNHINKLLDRVDSLVKEPDLKDIRITFEEFKAFADLRRRLEPLSMAIFAYGKLNGLLTKEDLKRAAQHVCGVDLTDRVVDIIFHVFDTNQDGNLSPEEFLRALQRRETDIREPTIPGPLGFLSCWFSGRKCSSLKHVVI

SEQ ID NO: 44466 - protein, 118 aa, Zea mays
  Coding DNA Sequence Number=SeqID_2687
  Homolog annotation: Hit_ID=Q8H613; Match level="QueryCoverage=60%, HitCoverage=12%, E-value=2e-16, Identity=57%"; Hit description =Nodulin-like protein
MTYYTNLRDSSDTAMPSSRTQVKDAPSSFLDDVHTNNHGALLAGYIYDKEAARQHPGVLEPSDCYGPDCFRLTFYVCAVVCCCGTLLGVFFISRIKPVYQMLYASGSFRHPRSQQQLH

SEQ ID NO: 44467 - protein, 81 aa, Zea mays
  Coding DNA Sequence Number=SeqID_2688
MAVMGSTSEKMYLCQDRLDVGLLTEDPLTGHMPCFSSLLIAGEIATNSARFSLTAASLFQPELIGDRSRAVHRRGPHPAKN

SEQ ID NO: 44468 - protein, 129 aa, Zea mays
  Coding DNA Sequence Number=SeqID_2689
MGKDKKGRGSPCHIGNKRNRELSSPSEDFGDSKYSEEEFSSESEGSPSVEHAGLEGSDESEVSSDEENSSGSSEEGSDGDGDGDDKGDDSGEGGSDDGGNDDGKGGGRSDDDGKGGSGSSKASGKAPLA

SEQ ID NO: 44469 - protein, 242 aa, Zea mays
  Coding DNA Sequence Number=SeqID_2690
MTTWRSAFVLIFAQSIRLQVDPPILSCGVAHPLHHLGVDLAHLPHHVLVMNNIRRTAIPYRGKRRRDRDCIDQDEAFEHVDSATRRSVVAAAAPWPRARASTRENDIGKLEDGQPSSVSDRGELSSGACCQVKTTAMTQGRNSGERRRKTSRESRETTICTTIGKTQQSPAAWEDQLVALLLLVGVGVRGPSTTSRAAARWCLGAEQIQGRSWETWPASTNGARSKQAGTGWPCAMAEIWAS

SEQ ID NO: 44470 - protein, 147 aa, Zea mays
  Coding DNA Sequence Number=SeqID_2691
MQKTPWGNPKSNPWSFPYWNSTRVGEKGGGAYRRRDSSGEVVDDVGEVAAVTLMCGSSSGMAGVGRTSCVGREARQRRGSRPNHGGITQSIELGSFTGGQGSRRREQLENGVPGSSVYARWQAAEVRRGFEFWKTENTADLYEEVEI

SEQ ID NO: 44471 - protein, 180 aa, Zea mays
  Coding DNA Sequence Number=SeqID_2692
MDRDLAEVGPWRGHSAAPARGRSRGRRAMAGRAREGAEGRKMAWRRREREGVIFFLGASREQQEAAAGCVPGRVDARAWRRGGFHGEALEHESKELPAEISGRQGGTHGGALALGAAPCAPWTGTWPRSAHGGDARLLLREEEGAGGATPWLAKRARRGLRVGKWRGGEGRGRWAAIYGG

SEQ ID NO: 44472 - protein, 170 aa, Zea mays
  Coding DNA Sequence Number=SeqID_2693
MELAAVFHRTHRGRDTKECRAAAAPWPRARASTRENDIGKVEDGQPSSASDRGELSSGACCQVKTTAMTQVRNSGERRRKTSRETTICTTTGKTQQSPTAWGGPAGGAVATRWVDVRGPSTTSRAAARWCLGAEQIHERSWETWPASTNGAGSREAGTGWPCAMAEIWAS

SEQ ID NO: 44473 - protein, 112 aa, Zea mays
  Coding DNA Sequence Number=SeqID_2694
MEEGQPWWDKPGRLVEEEIPVEEQRQGRSRCWAPWIWRRGAAGALLCRGKERSRSYKVKQEQAQKIMANAAVAGCLTGCLTATAAEGRGGVVDERRDGAEVTAAALVVWCVK

SEQ ID NO: 44474 - protein, 284 aa, Zea mays
  Coding DNA Sequence Number=SeqID_2695
  Pfam annotation: Domain name=PRA1; Domain location=91-247; Score= -2.5; E_value=1.1e-05; Accession=PF03208.9; Description=PRA1 family protein
MATAVQRGPRATAGGFGFGPLGDGPQNPTEADADEVEKSRFLPTHAEWTGPFIPSRRCPALDRERAEQISPAGAMGAAGAIRRAAASVVDRACAGTRGFRRALARFAPRPSAFGPAADAEAAAVRAVRNLRTFRFHYAVLQWVLLLASLAPRHRASVVFLMAASKGLLVYGGLLKAFPNSALLRRLLDRRLVAAVFVALVLADIVAAGAVANLLAALAAGVPVIVLHASFRVRDDLEAPSPDAAAAAENGKEDEASAVVEKKEDGDVEAGPTRRSMAAAPRSPK

SEQ ID NO: 44475 - protein, 50 aa, Zea mays
  Coding DNA Sequence Number=SeqID_2696
MAGGNTLAGAKERWLADEGECGAKRGFELGIKVNIPDLWLKEVMALGVAF

SEQ ID NO: 44476 - protein, 110 aa, Zea mays
  Coding DNA Sequence Number=SeqID_2697
MREKKMFTSYVKIKDSHDTIIFGDGNQGKCVNSASQKLEQKSEAHRTVSSVALNCPVPHEDKASNGQLLPNPNSWVTWRRTGQSTGLVRWRTGLFDAAIDSNLPQLLVGG

SEQ ID NO: 44477 - protein, 146 aa, Zea mays
  Coding DNA Sequence Number=SeqID_2698
  Gene Ontology: Mol. function=binding; Cellular component=cellular _component; Biological process=response to unfolded protein
  Homolog annotation: Hit_ID=Q6H660; Match level="QueryCoverage=90%, HitCoverage=89%, E-value=2e-65, Identity=59%"; Hit description =Putative stress-induced protein sti1
  Pfam annotation: Domain name=TPR_1; Domain location=19-52; Score =33.4; E_value=7.6e-07; Accession=PF00515.18; Description =Tetratricopeptide repeat
  Pfam annotation: Domain name=TPR_2; Domain location=19-52; Score =22.6; E_value=0.0014; Accession=PF07719.7; Description =Tetratricopeptide repeat
  Pfam module annotation: Pfam domain module=TPR_1::TPR_2; Domain location=19-52::19-52
MPEGLKDAEKCLELDPTFTKGYTRKGAIQFFMKEYDKAMETYQAGLKHDPKNQELLDGVRRCIEQINKANRGEISQDELQERQNKAMQDPEIQNILTDPIMRQVLNDFQENPRAAQEHLKNPGVMQKIQKLLTCPLTSSDGKRMRG

SEQ ID NO: 44478 - protein, 65 aa, Zea mays
  Coding DNA Sequence Number=SeqID_2699
  Gene Ontology: Mol. function=binding; Cellular component=thylakoid; Biological process=photosynthesis
  Homolog annotation: Hit_ID=Q6Z2M2; Match level="QueryCoverage=87%, HitCoverage=25%, E-value=1e-21, Identity=86%"; Hit description =Putative TPR repeat containing protein
MDCQRLDVAKDCIGVLSKQFPGSTRVARLEALLFEAKSEWAEAERAYTQILEINPFDQESCASLN

SEQ ID NO: 44479 - protein, 288 aa, Zea mays
  Coding DNA Sequence Number=SeqID_2700
  Gene Ontology: Mol. function=sugar porter activity; Cellular component=integral to membrane; Biological process=carbohydrate transport
  Homolog annotation: Hit_ID=Q10L05; Match level="QueryCoverage=91%, HitCoverage=48%, E-value=2e-92, Identity=73%"; Hit description=Sugar transporter family protein, expressed
  Pfam annotation: Domain name=MFS_1; Domain location=80-288; Score= -52.8; E_value=0.083; Accession=PF07690.6; Description=Major Facilitator Superfamily
MGIMRVADDVEARLVVGAGGGGGTATTTTEPLLRHCHGGRKEEDDQGSKIRDSPEAEGASDCGRTDGGSLRMVLVSTAVAVCGSFEFGTCVGYSAPTQSGIVEEVGLSISEFAIFGSVLTVGAMVGAVTSGRLADFLGRKMTMRISATICIFGWLSIHLAKSAIMLYFGRTLLGFSTGVLSYVVPVFIAEIAPKNLRGGLATSNQLLICSGSSATYIIGALVAWRNLVLVDRRELSEKIWSRFSALCPLASWAFLHSRVAKMAGKALPVLAKCSVKCGFLDVCGGKRT

SEQ ID NO: 44480 - protein, 546 aa, Zea mays
  Coding DNA Sequence Number=SeqID_2701
  Gene Ontology: Mol. function=helicase activity; Cellular component =mitochondrion; Biological process=metabolic process
  Homolog annotation: Hit_ID=Q10L04; Match level="QueryCoverage=97%, HitCoverage=97%, E-value=1e-162, Identity=57%"; Hit description =Pentatricopeptide, putative
  Pfam annotation: Domain name=PPR; Domain location=175-209; Score =10.2; E_value=0.47; Accession=PF01535.11; Description=PPR repeat
  Pfam annotation: Domain name=PPR; Domain location=210-244; Score =11.5; E_value=0.33; Accession=PF01535.11; Description=PPR repeat
  Pfam annotation: Domain name=PPR; Domain location=245-279; Score =23.1; E_value=0.00097; Accession=PF01535.11; Description=PPR repeat
  Pfam annotation: Domain name=PPR; Domain location=280-314; Score =39.2; E_value=1.4e-08; Accession=PF01535.11; Description=PPR repeat
  Pfam annotation: Domain name=PPR; Domain location=315-349; Score =38.3; E_value=2.7e-08; Accession=PF01535.11; Description=PPR repeat
  Pfam annotation: Domain name=PPR; Domain location=350-384; Score =42.8; E_value=1.2e-09; Accession=PF01535.11; Description=PPR repeat
  Pfam annotation: Domain name=PPR; Domain location=385-419; Score =31.2; E_value=3.5e-06; Accession=PF01535.11; Description=PPR repeat
  Pfam annotation: Domain name=PPR; Domain location=420-454; Score =32.3; E_value=1.7e-06; Accession=PF01535.11; Description=PPR repeat
  Pfam annotation: Domain name=PPR; Domain location=455-489; Score=9.6; E_value=0.55; Accession=PF01535.11; Description=PPR repeat
  Pfam annotation: Domain name=PPR; Domain location=490-524; Score=7.3; E_value=1; Accession=PF01535.11; Description=PPR repeat
  Pfam module annotation: Pfam domain module=PPR::PPR::PPR::PPR::PPR::PP R::PPR::PPR::PPR::PPR; Domain location=175-209::210-244::245-279::280- 314::315-349::350-384::385-419::420-454::455-489::490-524
  Subcellular localization annotation: CTP_CleavageSite=37; ConfidenceScore=5.36e-01
MPPPRLRFARHLCSATASDPAGAPTSSTISNAAALAAAAALRTPRLEPRLLSLVPRAVLLHPDFARLTLSCLLPAVAPSLRFLRALSPHLPGPAPDTAPVNVSPPLPGVDKFLLRLPPHLAADVAELLSSYLRIHLSLRAFNVASCSALRAARPDLVFRFFSAFSSSPEFPGNATTVGCLARAYAAEGRPLDGLGLLRDAARRGSPPPADAVADLIGAFAAEGNFGKVSDTLHLMIATGCTPDKVIYQRVIHGLFRRRMGGEALRVFREIKQRGYDIDGVTYTTVIHGLCEMRLIGVAQQMWDEMVGRGIAPNEYAYCSLVTYYCRVGDLDKARKVYDEMLEKGFKQTTVSCNILIKGFCVHGRVYDALEVFEEMSIKGIKHDVITYDTLINGLFKAGKLDLAMRMYEWLLSSGLEPTSSTFGRLICAMCENGQVHAAVDLIKSMRTKGLEPPVWTNDHIISGFCKINLSDEGMAWLAGMLKDNIRPQRQTFDYLVESLSTSGRLDDVLLVLNIMFKVGFEIGTFACTVLAEKPCTSNVSLLPPTG

SEQ ID NO: 44481 - protein, 114 aa, Zea mays
  Coding DNA Sequence Number=SeqID_2702
MALTPPPTLSDWVADSGASCHTTPDVDTLSHSHPLHPSFSSLIILGNSSTLLVISLSDSVLPGPFHLKHVLVAPNIIEILFLFNGSPSTTRSMEFVPFGFICEGSGYQDPSRSM

SEQ ID NO: 44482 - protein, 173 aa, Zea mays
  Coding DNA Sequence Number=SeqID_2703
  Homolog annotation: Hit_ID=Q53P98; Match level="QueryCoverage=67%, HitCoverage=18%, E-value=1e-07, Identity=35%"; Hit description =Signal peptide peptidase, putative
MASDNRASVFPFAAAVLVVLLAGGAAADDASSDDDAGTSRTPGCSNKFQLKGLFAGIRLIATPVNRPGLVQYGFDSKSEAAAVSYGGRNVPGTARDESRRLGHFLGWFTALFQVKVKNWVNGTEVAIATRGECAFTEKANIAQASGSTGLLVINDNEESNLSHVSRALQDGLR

SEQ ID NO: 44483 - protein, 38 aa, Zea mays
  Coding DNA Sequence Number=SeqID_2704
MREVDCEVDEPNTFEDDPQDTFEQKGDEEDLDGDFDEY

SEQ ID NO: 44484 - protein, 109 aa, Zea mays
  Coding DNA Sequence Number=SeqID_2705
MSSSSLKRRVFPSSKPSDGGYPPPFRLLVGGTQLHGSWYLSAIVRLQGSGIDPEVSAAAVRPPGAEVVVAAAAGAGDGAPSVGLPLLRRPSPSEWGRSYLRRGEPEFRS

SEQ ID NO: 44485 - protein, 390 aa, Zea mays
  Coding DNA Sequence Number=SeqID_2706
  Gene Ontology: Cellular component=integral to membrane; Biological process=peroxisome organization and biogenesis
  Homolog annotation: Hit_ID=Q53LH2; Match level="QueryCoverage=99%, HitCoverage=87%, E-value=0.0, Identity=76%"; Hit description =Transmembrane amino acid transporter protein
  Pfam annotation: Domain name=Aa_trans; Domain location=1-380; Score =314.7; E_value=1.7e-91; Accession=PF01490.8; Description =Transmembrane amino acid transporter protein
MAQLGWAAGTAMMLLFAGISYYTSTLLAECYRCGEPGTGKRNYTYTEAVRAILGGAKFKLCGVIQYANLVGIAVGYTIAASISMLAIKRADCFHDRGHRNPCRSSSNPYMILFGAVEIVFSQIPDFDQIWWLSIVAAAMSFTYATIGLALGIAQTVANGGFKGSLTGVNVGDGITPMQKDTIKAPPPSEVTVMKKATMVSVATTTVFYMLCGCMGYAAFGDDAPDNLLTGFGFYEPFWLLDVANAAIVVHLVGAYQVFCQPLFAFVEKRAAARWPDSRFMTRELRLGPFVLGVFRLTWRTAFVCLTTVVAMMLPFFGDVVGLLGAVSFWPLSVYFPVEMYKAQRRVRRWSTRWLCLQTLSAVCLLVSIAGAVGSTAGVINAVNLHRPFSG

SEQ ID NO: 44486 - protein, 162 aa, Zea mays
  Coding DNA Sequence Number=SeqID_2707
  Subcellular localization annotation: CTP_CleavageSite=59; ConfidenceScore=5.19e-01
MRCAALSQSHGRSRCPCQVQVQAQRIAHGSPIVTWRASVCVPDSGPAGGRCVVRRGRARANGVRRAAVPRCVRSSSSVVGSASNPLPSSTMRAHPLILFVPAPPPHPLPRRVDTHRTLSLPVQAPLPCCRARTSFPIRARRGSSGSSATRPTATCLHGHRCL

SEQ ID NO: 44487 - protein, 68 aa, Zea mays
  Coding DNA Sequence Number=SeqID_2708
KPIPLPTSESARRELDGDTRVAAEAEGNVHDTSPRRGTLHIRKLKHQATVDSNQKEAHNTTQALEHSS

SEQ ID NO: 44488 - protein, 116 aa, Zea mays
  Coding DNA Sequence Number=SeqID_2709
MGVSSILPWIKRTSGNAFGQDGIVDHDSMVRVEACWNTRELYRFEPPECVIPYVLLVLNNEFAGGAQVLLLIRSSVISRVSNSSGDIQVLNTAEGCYQLRFPLYRHQEDLVCLWCP

SEQ ID NO: 44489 - protein, 110 aa, Zea mays
  Coding DNA Sequence Number=SeqID_2710
  Subcellular localization annotation: CTP_CleavageSite=56; ConfidenceScore=5.15e-01
MVARRGRTTAGAGATPSSTNMRRRGEQGRRERGRAHGGARTTGRAVPRGRDDSGAAAGAREKGRGIGRREREKGGGTLQDMVDGVTWPTTLPPGWTVEWDAAPIGEEHEE

SEQ ID NO: 44490 - protein, 98 aa, Zea mays
  Coding DNA Sequence Number=SeqID_2711
MAGGGELAGVGVSARGVRQGVVRLPGGGKSASPLRAGPRQDDFGGGEPVNPCELLAGGRTSSWNHPSPWTDVLSGLDPGMTPRIASPFSIPRFVVEIV

SEQ ID NO: 44491 - protein, 296 aa, Zea mays
  Coding DNA Sequence Number=SeqID_2712
MGRVSLFDDVCRCAGTTQRLSQGMLRRVTQAAAPGHEHANRRPRRATGTPRCRAEGAGPPRAAPGQGRHEQGQATLGPSAGGRALAELKVAPRRADAHTRASTPGAASRGGRATPRRSGLLRGEGPSTPGQGRARRGGGGRAGRARRGLGHAGPPRRVGRAPCRGQAASRRTCRGRAAVGNGSARGEPRHAGRGATAARTARQAALATRRGHAGRARRARGGATQGPGLRKKGGRGRHGRAPRPHRGRRRGNAELHEHEEEGETGKKGAGEGSPRGEDDGAGSSEGQGWLRGGCGR

SEQ ID NO: 44492 - protein, 241 aa, Zea mays
  Coding DNA Sequence Number=SeqID_2713
MPGIQQSRDSVRSALDAALVDANPADMVLAPLSNRVRVRCEIRAVEEPLDDGTHHQRLGATAPAKQSEITRRQIANFLGCADLSWRRDIRRTGPTVSYPAHRARVAVTTTLGTTQTQCAPDSAAHAVSQRSQGWAGIVSCFRASRNRQSSFDDQEIELSEFYEAEDPEHLFGEGNDALPGDLGSAQWGVALSGQKGNHDLWVKDVCITGGDKDDVYDYGNGKEEGIEVDLQEFQDFDEFED

SEQ ID NO: 44493 - protein, 85 aa, Zea mays
  Coding DNA Sequence Number=SeqID_2714
  Gene Ontology: Mol. function=heat shock protein binding; Cellular component=integral to membrane; Biological process=protein folding
MAKRVVRALGLIFGCVFAASLGYTAAINLIELSMQYTPRLVYYYQCLTWLENVVIESFSIILAACFWCDKILVILAVFREEMTNG

SEQ ID NO: 44494 - protein, 125 aa, Zea mays
  Coding DNA Sequence Number=SeqID_2715
  Homolog annotation: Hit_ID=Q9ZQ79; Match level="QueryCoverage=66%, HitCoverage=25%, E-value=7e-12, Identity=47%"; Hit description =Putative ankyrin
MDVDEAGGEERRPSEKELFRAAESGDAAAFASLAPADLSLRNEDGRSLLHVAAAAGHPQARKGAFYALESNMMGGNWKVVLALAQCGGDAAASVLNAQDEEGWAPIHSAASSGNSQIVDILLERE

SEQ ID NO: 44495 - protein, 87 aa, Zea mays
  Coding DNA Sequence Number=SeqID_2716
CRAGVLVGRCGLREYFNSGPPAPCFATRVKCGRLGWVLARQEASESGGGVAVESGRTEAGPGGQETGAPALARGPGLAARIGQGACH

SEQ ID NO: 44496 - protein, 440 aa, Zea mays
  Coding DNA Sequence Number=SeqID_2717
  Homolog annotation: Hit_ID=Q2QT46; Match level="QueryCoverage=24%, HitCoverage=16%, E-value=1e-35, Identity=71%"; Hit description=PTEN, putative, expressed
MRYCAEVLASLPFTCSDEPLYLIYDINRIIHLKAGGVESNLKRWTSMSQSQNTVDMPTLPGERHVVMQEPGGYYDNVGYAHERVNANPCSTSDVDMAKVQVDVDMAKVQGDCLDAIALQLLLKLKRHLKVVYSLDDARCQSFSLKEPPKSGETFSRQNIPFNVSSTNISLPSCLQDVASVYQDFKTVLHEDSMDFAVFIPSVQIRKRPTPRNTTNPTPRSTTRVRRTAASSVTKARGGARGDDSDDSDDDDWTGGPRVLDFSGGGRVTRQRVQLTTEFYRRIRFEVPLLITIFFFIEGQAAKWREAFPLSKGPRFDAASRQNAGWLNTTMMENRMTLNPTDLDDFDKRKLPSPRFQVEVVLVDYDGSQPPKPAAGAVDNKSDADSSASTAVKENSVAPAESNKGTGSNDKDEVFSDSDDREDGSSKERKERTAGAVVKAV

SEQ ID NO: 44497 - protein, 332 aa, Zea mays
  Coding DNA Sequence Number=SeqID_2718
  Homolog annotation: Hit_ID=Q8H5U1; Match level="QueryCoverage=31%, HitCoverage=35%, E-value=2e-43, Identity=81%"; Hit description =Putative DNA-binding protein WRKY2
  Pfam annotation: Domain name=FLYWCH; Domain location=120-188; Score= -0.2; E_value=0.074; Accession=PF04500.7; Description=FLYWCH zinc finger domain
  Pfam annotation: Domain name=WRKY; Domain location=131-190; Score =142.9; E_value=8.4e-40; Accession=PF03106.6; Description=WRKY DNA -binding domain
  Pfam module annotation: Pfam domain module=FLYWCH::WRKY; Domain location=120-188::131-190
MAGAGGDWPFTADDDAYGADSSAMFAELAAGCWAAAGGTAAEELMMSMLLPPPEDHHHQAAVLATAPAAVSSRSSSTDDDDGAPAAAATTEAASKPPAAGKTTMTKSSSAGQKRARQPRFAFMTKSDVDHLEDGYRWRKYGQKAVKNSPFPRSYYRCTNSKCTVKKRVERSSDDPSVVITTYEGQHCHHTAVACFPRANHAADGRHHLPFVEFSAASSAHHHYHSNPYSGTASCVNDHHLPPLLPTTTTLAPRHNALDNGQQELQAAMSMPVASVPTTSLLPPPTTALAAPPVASVSMTSSSSLPPASSSAAPAAVDKGLLDDMVPPAMRHG

SEQ ID NO: 44498 - protein, 46 aa, Zea mays
  Coding DNA Sequence Number=SeqID_2719
MAPLRVHVWQVCPKGSGGALMDVTSLKEEVVQISQAKEADKLGLRI

SEQ ID NO: 44499 - protein, 50 aa, Zea mays
  Coding DNA Sequence Number=SeqID_2720
MTRRLDWRLQKAAYPSQASDLPERANLESRESYDVQEGEPDPEIKITCLK

SEQ ID NO: 44500 - protein, 275 aa, Zea mays
  Coding DNA Sequence Number=SeqID_2721
  Gene Ontology: Mol. function=oxidoreductase activity, acting on single donors with incorporation of molecular oxygen, incorporation of two atoms of oxygen
  Homolog annotation: Hit_ID=Q45VT7; Match level="QueryCoverage=46%, HitCoverage=23%, E-value=2e-60, Identity=90%"; Hit description=9, 10 -9',10' carotenoid cleavage dioxygenase 1
MGNTTQGQCMVFTWNGRRTNTKQRYVYCTILDSIVKVTGIIKFDLHVEPESGRKELEVGGNVQGIYDLGPDIFGSEAIFVPKHPGVSGEEDDDYLIFFVHDENTGKSEVNVIDAKTMSADPVAVVELPNRVPYGFHAFFVTEYGYIDINLISCDWLPVLSNRNPQEGVAVEVEARERGQAQEVGGEQAGEIVGAQAEQLQCGWLTERAQRHGAREAQPQEKQRGQPGGMGLASGRRWLAARRSARGGGGACGLAAGGGCDLVGSRKGDRKRDARG

SEQ ID NO: 44501 - protein, 232 aa, Zea mays
  Coding DNA Sequence Number=SeqID_2722
MEGGAVQQLVSGGADSGASLLLASRSAWDVVDQCQWMEASSKEERGEGYKYNGAGLVAIAKRHVDLRETNVLWWRDQAATVIRCPRCFAAGLEPEDDWSLTLEMRPICSYLVSLAQGLPHALQLVLPRRYHTVQKIVWYQSDSARDLFREDESKSVWTEMVTESLLDEGVERYLGTRPVNDSDSPKNALVFVSMCVGLRKQRDDSIQEFRCQDVLYLKGKWAYTFPLINFGV

SEQ ID NO: 44502 - protein, 58 aa, Zea mays
  Coding DNA Sequence Number=SeqID_2723
MATSGLMVGESELGCGLCPSLSLKDFHHQGWGGECAELSGADAKVDQPRPRIGLVKVA

SEQ ID NO: 44503 - protein, 88 aa, Zea mays
  Coding DNA Sequence Number=SeqID_2724
MSGEHAKREMVTGDKPEGSRRKNDEQTPSREAGDKHNEEFGSSIKSHRKSDKKKKKMKKLKGGTYKDTEPRHVGPGAKHKEITNACNA

SEQ ID NO: 44504 - protein, 1001 aa, Zea mays
  Coding DNA Sequence Number=SeqID_2725
  Gene Ontology: Mol. function=ion channel activity; Cellular component= integral to membrane; Biological process=ion transport
  Homolog annotation: Hit_ID=Q9AUV9; Match level="QueryCoverage=75%, HitCoverage=92%, E-value=0.0, Identity=75%"; Hit description =Putative cyclic nucleotide and calmodulin-regulated ion channel protein
  Pfam annotation: Domain name=cNMP_binding; Domain location=640-738; Score=37.0; E_value=6.5e-08; Accession=PF00027.19; Description =Cyclic nucleotide-binding domain
MPRLAFLRRSLPARLLARACGGGGGGDQGSPDQVARDEEAGGSGGMSGRSSAGGPSGGECYACTQPGVPAFHSTTCDQVHSPDWDADAGSSLVPVQGQAQAAAAAAAPRQRHAARWLLGPVLDPRSRRVQRWNRWILLGRAAALAVDPLFFYALSIGRAGQPCLYMDAGLASAVTALRTCADVAHLAHVLLQLRLAYVSRESLVVGCGKLVWDARAVAAHYARSVKGLCFDLFVILPIPQYAGIGTHVCGTVAAGRLQFLERSRGDPKTMTRSDCWDGGEFRWRIWRYISPNHADLRRGKRKRNSIMVIFWLVIPKLIREEQVKLIMTILLLMFIFQFLPKVYHSIHIMRKMQKVTGYIFGSIWWGFGLNLFAYFIASHIAGGCWYVLAIQRIASCLQEECKRNNSCDLISLACSKEICFHPPWSSNVNGFACDTNMTSFSQQNVSTCLSGKGSFAYGIYLGALPVISSNSLAVKILYPIFWGLMTLSCIFHELIQFLELLGSTFGNDLAPTSNGIEVIFSIINVLSGLMLFTLLIGNIQVFLHAVLARKRKMQLRFRDMEWWMRRRQLPSRLRQRVRKYERERWAAVTGDEEMEMIKDLPEGLRRDIKRYLCLELVKQVPLFHGMDDLILDNICDRLRPLVLSSGEKVIREGDPVQRMVFILQGKLRSTQPLTKGVVATCMLGAGSFLGDELLSWCLRRPFVDRLPASSATFECVEAAQAFCLGAPDLRFITEHFRYNFANEKLKRTARYYSSNWRTWAAVNIQLAWRRYRARTSADLAAPPLVGGPDDGDRRLRHYAAMFMSLRPHDHLEILLLLTAPLRPQLQAAAADEQKRWQDRRPDSGGAENTSRRSGSPPPDSETVCSSSPKRLESINALVNRNNPKPKRERDARAPSAAKLVHRDNSTIRTDSKCGPIEIITSFAPTIVFQVALLLIRHGADADAEDKRKATLSLAEHRTAQGLHLSTQPWRCLKVDLVLCFKPKLSCPIKRNGKFDRRNCSE

SEQ ID NO: 44505 - protein, 108 aa, Zea mays
  Coding DNA Sequence Number=SeqID_2726
MYLFLILLLPPVAAFGGRDNRGQTVVDLLPRLVALLARHALGAALKRKGLRFDLLKEVDALRRAKNLRAEAKGAADRPRRWQARDLAVFALFAAACGVLVLTRFLLCN

SEQ ID NO: 44506 - protein, 192 aa, Zea mays
  Coding DNA Sequence Number=SeqID_2727
  Subcellular localization annotation: CTP_CleavageSite=77; ConfidenceScore=5.23e-01
MKRSEVQHGAGHSSLDRWSPDSSQAMQLPSLQATSANGNGHLPLRCQTLPLSPRLFNPPTPASSLMPQSKAKLQSISARILASGNDERPKKAIISHHIWSSRSTPLLCDLRQDRRHRRAMGFVLVVSLPFIFFSILLGFGCYFLGKHRGREEMRTGIGVQIYGTPLPPPGVVGASSPPPEPFHSKKQWSEAV

SEQ ID NO: 44507 - protein, 139 aa, Zea mays
  Coding DNA Sequence Number=SeqID_2728
MGMMIGSGKVVVGELWRAMCTAGDDDTEKRCAVANPNVGRARCRDKSSWHYDRRARDHWRSSDRQQVAQQAAPGAQCRQRRGYVVRRAGHDKRVTRFRLWMAWIAKELDFGGGSTQLRAGSNNKAKEREGIIGGEKRAR

SEQ ID NO: 44508 - protein, 114 aa, Zea mays
  Coding DNA Sequence Number=SeqID_2729
MAFEEYMERSKWMYELNRMKLGFGFVKDYIVWTFHDERRHATVGESSCAGGNSLTTNAGGPPTGTFVAGDNNDADRRDYITMDDLFRDDPGNKGDNEDVGATLLELEMWSFSRT

SEQ ID NO: 44509 - protein, 205 aa, Zea mays
  Coding DNA Sequence Number=SeqID_2730
  Homolog annotation: Hit_ID=Q8W4F6; Match level="QueryCoverage=29%, HitCoverage=25%, E-value=9e-12, Identity=60%"; Hit description =Putative preprotein translocase SECY protein
  Subcellular localization annotation: CTP_CleavageSite=21; ConfidenceScore=5.53e-01
MAAHHAHRSPHRSSHPCPGSPASLRVRAPHLLLVAHALAFPSPRRPGSARPPAPAHDATLLPSPRAVRLNPHGDNVPPPQSCEAVIHLHLRGLHCNTLCPSPSGRGDDRRARRAGGDLEPQGHGYRNHFLDLARRGAVAEAFFHSEIHRRLAVTIALIELSRMGYFTRLPGFGRRLIPDSYLSFSALPAGSNVEAAKRCYNGTIQ

SEQ ID NO: 44510 - protein, 72 aa, Zea mays
  Coding DNA Sequence Number=SeqID_2731
MGPRGQPLIARFYLHVVAAIWGRCPAHGSRVPRPTSLAGGPDYLAQFSTNFRNYHIPAGLMKIKKKEFLSLK

SEQ ID NO: 44511 - protein, 207 aa, Zea mays
  Coding DNA Sequence Number=SeqID_2732
MALFIKLRRFQYISFASGSSGLGIDKRHHGCRSHVLPGVEEVLRTVVALSDLIKNLPRSRPFIFKASLLNVVVNPVEPLNKCIKVLLLLLEGSLVSENARLALALVFFFLDGVPQVPPSLLPRGGVSTKQALSGTTSESKPSSIEELLKSSSRRSRMDIGGTPGPRDYGIGLILANGAEFAGLLGEEVEGAKSDLAAWNESLTPGGR

SEQ ID NO: 44512 - protein, 71 aa, Zea mays
  Coding DNA Sequence Number=SeqID_2733
MSGTQFVKTRKIEGTQSKVSVAGTIIDHVMRKTSQVDPKCGLLRMVMLKDEPAGSSAKARMIIKWSSPNKH

SEQ ID NO: 44513 - protein, 118 aa, Zea mays
  Coding DNA Sequence Number=SeqID_2734
MQRCASARCGESADQGNRPRPPQGSRSPHGDGRARANVERAPVYLLPEIKAYALVSDLSLEKVQYFMYEFRNPNDIHSEYVQMQLPGVDPNDPSVKDLLASLHNQGEAIALFSFTLIK

SEQ ID NO: 44514 - protein, 112 aa, Zea mays
  Coding DNA Sequence Number=SeqID_2735
MNRGEVFTVFRCARSKPKFAVSSLPRPKFVVHGQLVLPYDRIDPAWLPVSTGIRRDAHFPSSNPAKRTRLRVPWLCEPGCFQRKRFDGGSIMAVMGSTSEKDVPLPGTKLWV

SEQ ID NO: 44515 - protein, 162 aa, Zea mays
  Coding DNA Sequence Number=SeqID_2736
MERESGWEGGRRTTFWVEMEKEAAPKRGYTPTMRARRPVCVDGEAMQAERRRKEDWVSAAAASLSSIFCRTLGKDSFGRVSPDSQQRKVTVTVPGDNDTDFAECLLYRHSAKKLSVAPLSVPLPSVLGGTRQRLRLFPVPTELALGNGSTSEPLCQFLCRVH

SEQ ID NO: 44516 - protein, 96 aa, Zea mays
  Coding DNA Sequence Number=SeqID_2737
MLPQRAPPLVHPIVIGTQIGANTLFGDSTGKMCLYLLNRPLMASSKDNSNVSPNNIIEPTLETLLAEDQREFEEHTEQLIKEVKAKYLANFKVDRH

SEQ ID NO: 44517 - protein, 140 aa, Zea mays
  Coding DNA Sequence Number=SeqID_2738
MGKSNKRKREPTPPSEDFGDSEYSEEEFSSESEGSPAPVSPPASSDDSDDSQGIAAEVWSYIRAVERSGLEGSDESEYSSDEEEDSDSSEEGNDGDGGDDDDGGDGDDDDDGGRGGNGGGSKGGSGSGGGSSKDSNRASC

SEQ ID NO: 44518 - protein, 154 aa, Zea mays
  Coding DNA Sequence Number=SeqID_2739
MAQPSSCQSSDSTRQYTKVQLYVDRKYNVIENEFTDLQVAARHLEFMVLTFLLQHIDFFELGCFYFCDAFEGAKGSTQTNKKIKVRVQKKGAKETEENPGLAHRTVRCPGPYVFKLATFGFLESHSAIIHWTVQCASGATASKRNGRLQRSPAT

SEQ ID NO: 44519 - protein, 174 aa, Zea mays
  Coding DNA Sequence Number=SeqID_2740
MSLPTTQDLVLDAERVNDSTFRCYVYCLHFFALEVCPVLLIDEEPDNRCIRLLSCKLEGSLLMEAHNEKFLGKGFLQQQVTRFDASTAYIRCYNRVRVIGEDPDNGFKPTSGRVESDGNSHVIYAKTVSKMIITPTKYSYDFKTLMYIVFCTCTIDYRRYIFTSRQHLPLAQMH

SEQ ID NO: 44520 - protein, 103 aa, Zea mays
  Coding DNA Sequence Number=SeqID_2741
MNSERQATKRALGVNDDDDETMDGDEEEEEARTMARERWKAEGSGGGEQSGDMAVAKGSQGKGMAVAEAGWRRDGDTKMRGREEIVRAETPRCEEERREYGRP

SEQ ID NO: 44521 - protein, 154 aa, Zea mays
  Coding DNA Sequence Number=SeqID_2742
MAVLLEVRRTDKIAFPLACFRIFSRRPDFRNLWVMGDGTEDPPLLILEKGLSMPVVWINPTPGPSDRNTSPAETVATVPLRDTTTRTERYWDGSQRLRVMPRTDEPSTNWLYRMDVRDSECERMNVTSRVVNPRGLWSSCRFCCRCPLCLSGAL

SEQ ID NO: 44522 - protein, 93 aa, Zea mays
  Coding DNA Sequence Number=SeqID_2743
MFARAGEVSTELAVDLRVVGTRRQRRCLYRRIPLLRRYILGSIDALRAARNSTDRARHGRCILFIHLHTTAGCDYVNDSTKVAYHVLDRMSMS

SEQ ID NO: 44523 - protein, 52 aa, Zea mays
  Coding DNA Sequence Number=SeqID_2744
PTSQSGDHAHPTAHLTVARTTQQVYAAWNRISPPQIGAVGSLTVNPLNRIFS

SEQ ID NO: 44524 - protein, 137 aa, Zea mays
  Coding DNA Sequence Number=SeqID_2745
MAHRTPEIQLDLVGVGAWPGYKLVPGILPPRSPVPISLRTITAVELWARRKNLRQTPLPPTRIRSAAVAIAEVLAPGVSLVSKEGVRVRIALDWPPASTNFIADTADPPCAVGGLPRCFDWRYGTFSNASRCTNFIL

SEQ ID NO: 44525 - protein, 53 aa, Zea mays
  Coding DNA Sequence Number=SeqID_2746
MKIKVHPSLEVSPRQVNKGWRMVDKRDFPFFPFGTGTTAGASNSSVTGMSVLW

SEQ ID NO: 44526 - protein, 153 aa, Zea mays
  Coding DNA Sequence Number=SeqID_2747
RLALENELNSDRFKGILHFHERDLAKCLISFPIGIGDVKFTGKEDKEEATTYMIEQAVGFHHHLALPFLLVFFEIGNLIHFFTLIHTDEGKLVFALSYQESRKYTPLLVKADSYAYSDAEGSATSFCSKDSRPDLKPSFTRHLVDQDLVNLEI

SEQ ID NO: 44527 - protein, 374 aa, Zea mays
  Coding DNA Sequence Number=SeqID_2748
  Gene Ontology: Mol. function=sequence-specific DNA binding; Cellular component=nucleus; Biological process=regulation of transcription
  Homolog annotation: Hit_ID=Q2QMN5; Match level="QueryCoverage=92%, HitCoverage=91%, E-value=3e-89, Identity=56%"; Hit description=WRKY DNA binding domain containing protein, expressed
  Pfam annotation: Domain name=WRKY; Domain location=305-365; Score =136.2; E_value=8.9e-38; Accession=PF03106.6; Description=WRKY DNA -binding domain
MEEVEVANRAAVESCHRVLALLSQQRDPALLKSVASETAEACAKFRKVAALLGSGVGHARGRFSRRVRPLGLVGHKSPVGSGGNNPVEMLPSAAAVTSPSPSTSYPPQMRARLNGVPDPRGLDMACSSSSKSGGVGGGGAHPFGGAPKLVQPLSVQFQIGNVAHRYPFHQQPPSRQKLQAAEMFRRSSSGTISLKFDSPIPSGGGGAAGTVSFVSSLSMDGSVGVASLDGKRPFHLVGTPVAASDTAADAHRAPKRRCTCRGGEEDGRGNKCGTSGRCHCSKRRKLRIKRSIKVPAISNKVADIPPDEYSWRKYGQKPIKGSPHPRGYYKCSSVRGCPARKHVERCVDDPAMLIVTYEGEHGHTQLPAQPSTQT

SEQ ID NO: 44528 - protein, 101 aa, Zea mays
  Coding DNA Sequence Number=SeqID_2749
MKLIVPFDCTRSPWFSRNIRRRQDPPPAQVNQTIPATSAVEPYIVEVAPDRAPEPAPEDLPATALEGSLEDMVAGVTWPSILPPGWTVEWDPASAEEEHEE

SEQ ID NO: 44529 - protein, 449 aa, Zea mays
  Coding DNA Sequence Number=SeqID_2750
MQVEEESSSDDDLDANIALMVRKTTKMLKKLNREAAPAATPSPGSLRARPAPHPRPIPQSLRSLANRAGPAPQTLAAYTRSHLASAPPLAQPSQPRAHVPGTRRRALRVTARSRALAQAPACVCPRAAATAGYRGPTCPTRSTVYYSSSPTAHDHDLPHRAPLKTAQQGRGRELRTLCSTPRPRLCAVAVRRALVVAVGQSPRIGPRRCGVLALAVSRHCRRAPPSCSLGSSEGARDLDAADPSTSRRTPKSRQGRAMPLAARALYRAVAMASSQEQPNRPAPQTVALAVFPDHVAAGRGHGSPLHVVSILDFDKPPTRPPPAKPRRRRSRARATKRSFIAVPRPAIVRVMWPAQSYARSARFVQHPTQPLRLCMTRFCALAARRRGFDDRNWGVVRFATVSLMGLGVCGSLCQGGDEDDSFGYDYGNGKEEGVEVDLQEFQDFDEFED

SEQ ID NO: 44530 - protein, 55 aa, Zea mays
  Coding DNA Sequence Number=SeqID_2751
MGDHIMHNKFDAKSWLATVENLEKKLLPEGVKIQAEEVTEEEFAPVPIHQVDGAI

SEQ ID NO: 44531 - protein, 55 aa, Zea mays
  Coding DNA Sequence Number=SeqID_2752
MGDHIMHNKFDAKSWLATIENLEKKLLPEGVKIQAEEVTEEEFAPVPIHQVDGAI

SEQ ID NO: 44532 - protein, 106 aa, Zea mays
  Coding DNA Sequence Number=SeqID_2753
MAEQLSVAKKRHELGAPERIVGGGEAYGDCLMHRDGSHGGGGRHHSGRGGGRGGGGDSDGGSGHAKPSALGLKISPYQPNTPLIIVSRKNNLRQPTGGKSACSVAE

SEQ ID NO: 44533 - protein, 600 aa, Zea mays
  Coding DNA Sequence Number=SeqID_2754
  Gene Ontology: Mol. function=hydrolase activity, acting on carbon -nitrogen (but not peptide) bonds, in linear amidines; Cellular component=nucleus; Biological process=metabolic process
  Homolog annotation: Hit_ID=Q2QMN7; Match level="QueryCoverage=66%, HitCoverage=91%, E-value=1e-180, Identity=76%"; Hit description =Amidase, hydantoinase/carbamoylase family protein, expressed
  Pfam annotation: Domain name=Peptidase_M20; Domain location=297-596; Score=110.6; E_value=4.5e-30; Accession=PF01546.18; Description =Peptidase family M20M25M40
  Pfam annotation: Domain name=Peptidase_M28; Domain location=294-449; Score=-50.3; E_value=0.022; Accession=PF04389.7; Description =Peptidase family M28
  Pfam module annotation: Pfam domain module=Peptidase_M20::Peptidase _M28; Domain location=297-596::294-449
MSLVALYAGTIRPLEDEKEHRQYTLISSRAVSSHHASIEPDTDTWVPWTRILEGPKDPLLRQRFPTKPQAHLRRSPQLHSAGDHHQRIRDGPRRSSTPTASVSSSSSARSSQVTTNSNSSSAVALSPTPKSQLPPPPPAVQISLASRSRQVALPVPSNPAEQPAEQRSMPSKPNAASRLVFLAFLLVISAAAANDDAAARRTMEQFAGFPASDDGEGPSSDFHVDSEGLQRQIDELASFSDSPAPSVTRVLYTDKDVQARRYIKGIMNQLGLVVREDAVGNIFGRWEGSEPGLGAVATGSHVDAIPFSGKFDGVVGVLGALEAISLLKRSAFLPKRSLEVIMFTSEEPTRFGISCLGSRLMAGIEELAQSLRKVVDNQNVSFLDAAESAGYKLNLEDLHSVFLKTDKYSAFIELHIEQGPILEKEGIPIGIVTAIAAPASLKVDFEGNGGHAGAVLMPARNDAGLAAAELALAVEKHVLESGSIDTVGTVDVRDIDEKRRNDVIEKIRQSAAHISKNRGVELSEFKIINQDPPALSDKSVVDAMEFAAKQLNLAYKKMISRAYHDSLFMASHKPEEYASPEDMANGVKVLALTMATLSLE

SEQ ID NO: 44534 - protein, 320 aa, Zea mays
  Coding DNA Sequence Number=SeqID_2755
  Gene Ontology: Mol. function=RNA binding; Biological process =gynoecium development
  Homolog annotation: Hit_ID=Q2QMN6; Match level="QueryCoverage=77%, HitCoverage=57%, E-value=3e-42, Identity=87%"; Hit description=FLK, putative, expressed
  Pfam annotation: Domain name=KH_1; Domain location=195-255; Score =56.3; E_value=1e-13; Accession=PF00013.19; Description=KH domain
  Pfam annotation: Domain name=KH_1; Domain location=60-109; Score =30.0; E_value=8.2e-06; Accession=PF00013.19; Description=KH domain
  Pfam module annotation: Pfam domain module=KH_1::KH_1; Domain location=195-255::60-109
MSVALIRGHCLMLVMISAKDEPDTELPPAVDGLLRVHRRITDGLETETDQPQRATVNTGPTRLLVPASQAGSLIGKQGATIKSIQDASKCVLRIVGKIKAHNMHREQPMPPPQAWGPPPPSPWGHPPPNLPPGGPGYVGNPHYMPPRPQENYYPPPDVPPVEKQPHYGISSYGRDAPPSAPPGNQNQAHGSSQVTHSMQVPLSYADAVIGAAGASISYIRRHSGATISIQEGAPGEMTVEITGSASQVQTAQQLIKNFMAEASPQGPPAPGPHGQPVDTGYGSYPPYGGASYGSPPGAPAPAPHNGGSYGAAPYSSSYGY

SEQ ID NO: 44535 - protein, 167 aa, Zea mays
  Coding DNA Sequence Number=SeqID_2756
MARAGVVHGAWLDATPTPSAGMAPTARACVDLDESVVRKISVPSTRSTVFCASDAKIGKRSEPPHRRPQPLLHGGPPWASTMLHTRSGGAPTSLPRGSTTDTVEGAQSACQLPCHEVETGGPCACTPVNAIKWNRTSTSECPLLVLSVRHPRGRPGAPTARIKVLYA

SEQ ID NO: 44536 - protein, 863 aa, Zea mays
  Coding DNA Sequence Number=SeqID_2757
  Gene Ontology: Mol. function=catalytic activity; Cellular component =alpha,alpha-trehalose-phosphate synthase complex (UDP-forming); Biological process=trehalose biosynthetic process
  Homolog annotation: Hit_ID=Q8H7S6; Match level="QueryCoverage=98%, HitCoverage=99%, E-value=0.0, Identity=81%"; Hit description =Putative trehalose-6-phosphate synthase
  Pfam annotation: Domain name=Glyco_transf_20; Domain location=56-546; Score=862.1; E_value=2.7e-256; Accession=PF00982.11; Description =Glycosyltransferase family 20
  Pfam annotation: Domain name=Hydrolase_3; Domain location=594-834; Score=-72.6; E_value=0.0063; Accession=PF08282.2; Description =haloacid dehalogenase-like hydrolase
  Pfam annotation: Domain name=Trehalose_PPase; Domain location=595 -828; Score=287.4; E_value=2.8e-83; Accession=PF02358.7; Description =Trehalose-phosphatase
  Pfam module annotation: Pfam domain module=Glyco_transf_20::Hydrolase_ 3::Trehalose_PPase; Domain location=56-546::594-834::595-828
  Subcellular localization annotation: CTP_CleavageSite=68; ConfidenceScore=5.32e-01
MASRSYSNLLDLATGAADQAPAVAALGALRRRLPRVVTTPGLIDDSPASPSTPPRPRTIIVANQLPIRSHRPESPEEPWTFEWDEDSLLRHLHHSSSPLMEFIYIGCLRDDIPQAEQDAVAQALLETHNCVPAFLPTDIAERYYHGFCKQHLWPLFHYMLPLSPDLGGRFDRALWQAYVSANKIFADKVLEVINPDDDFVWVHDYHLMVLPTFLRKRFNRIKLGFFLHSPFPSSEIYKTLPVREELLRALLNSDLIGFHTFDYARHFLSCCGRMLGLSYESKRGHICLEYYGRTVSIKILPVGVHMEQLKTVLGLPETEAKVSELMEMYSGKGRVVMLGVDDMDIFKGISLKLLAMEELLRQHPEWRGKLVLVQVANPARGRGKDVAEVQTETYAMVRRINEVYGEPGYEPVVLIDEPLQFYERVAYYVIAEVCLVTAVRDGMNLIPYEYIVSRQGNEKLDRMLRQGKPEEKKSMLVVSEFIGCSPSLSGAIRVNPWNIEAVADAMETALVLPENEKRLRHDKHFRYVSTHDVGYWANSFLLDLERTCKYHSQKRCWGIGFGLRFRVVSLDLTFRKLSLENILMAYRRAKTRAILLDYDGTLMPQAINKSPSTESVRILNSLCRDKDNVVYLCSGYDRRTLHEWFPCENLGIAAEHGYFLRCKRDAEWKTCVAATDCSWKQIAEPVMCLYRETTDGSTIEDRETVLVWNYEDADPDFGSCQAKELVDHLESVLANEPVSVKTTPHSVEVKPQGVSKGLVARRMLVSMKERGQCPDFVLCIGDDKSDEDMFQLIATAACGDSLASKAEVFACTVGRKPSKAKYYLDDAAEVVRLMQGLSYVSEELALANQRDEDEDSSLDDVWE

SEQ ID NO: 44537 - protein, 347 aa, Zea mays
  Coding DNA Sequence Number=SeqID_2758
  Gene Ontology: Mol. function=transporter activity; Cellular component= integral to membrane; Biological process=transport
  Homolog annotation: Hit_ID=Q6ZAJ7; Match level="QueryCoverage=87%, HitCoverage=63%, E-value=4e-95, Identity=58%"; Hit description =Transporter-like protein
  Pfam annotation: Domain name=MFS_1; Domain location=20-347; Score =87.0; E_value=5.7e-23; Accession=PF07690.6; Description=Major Facilitator Superfamily
MGSSAVQVQRRRRQLTLVLVTTAALLERADEALLPAVYKEVGESLGVSPTALGSLTLCRALVQTLCYPLATCAAARYDRARVVAVGAFLWAVATLLVGASGTYLQMALARGFNGVGLAVVVPAVYSLVADYSDDGTRGAAFGWVTMAQSMGHVAGNSLGVLLAATSFLGVPGWRLAFYALALVSASIAALTWLLGADPRPVSVKATAAATLAQLVREAKDVVKVPTFQIIVAQGVAGSVPWSALSFAAMWLELVGFTHWQTTVITSLNSLANALGSLFAGFVGDPVALRFPNTGRIALAQVCTASSIPLAAVMLLALPDNPSAGAAYAAMFFVFGFVSPWCPASTNK

SEQ ID NO: 44538 - protein, 283 aa, Zea mays
  Coding DNA Sequence Number=SeqID_2759
  Gene Ontology: Cellular component=integral to membrane
  Homolog annotation: Hit_ID=Q9AVE6; Match level="QueryCoverage=92%, HitCoverage=73%, E-value=3e-75, Identity=53%"; Hit description =OsTATC protein
  Pfam annotation: Domain name=TatC; Domain location=65-266; Score =124.6; E_value=2.8e-34; Accession=PF00902.8; Description=Sec -independent protein translocase protein (TatC)
MRLWCRCVWVAQGFMGFLDLLENGSFGGPSQEEQSALYTFLYPSKDLLPDDKEMSIFDHLEELRDRIFISVLAVGAAILGCFAFSKDLVIFLEAPVTAQGVRFLQLSPGEFFFTTLKALSYFMVLAMCNPMIVVVHGAQVPLFFLEYARELRTNNIKEIKEVSGYCGLLLGSPIILYEIIAFVIPDGAVESLWSIDQYFEFILVLMFSTGLSFQVPVIQLLLGQLGLVSSDQMLSIWRYVVVGAVVAAAVLTPSTDPLTQMLLAGPLLGLYLGGAWMVKITGR

SEQ ID NO: 44539 - protein, 136 aa, Zea mays
  Coding DNA Sequence Number=SeqID_2760
MGQQLVPSADAGGRRLQLLRLRARMARRLLRHQPALDAQLWLFRITREDKQLKYRDRFKLNREREPFPLSEFFLVQLRVPWCQPQGKQYGILASHGGWAPAASSQQVESTPSGVSMCIGLLFATVGSDKRTVLIVQ

SEQ ID NO: 44540 - protein, 218 aa, Zea mays
  Coding DNA Sequence Number=SeqID_2761
  Homolog annotation: Hit_ID=Q69VQ4; Match level="QueryCoverage=20%, HitCoverage=4%, E-value=2e-12, Identity=86%"; Hit description=RNA recognition motif (RRM)-containing protein-like
  Subcellular localization annotation: CTP_CleavageSite=63; ConfidenceScore=5.49e-01
MGPSPRSRFALTVTNFLPSRITPDMLTFPGTLSTCSEKSKGGTRNKVLPSPSLQTIAHCLSPRSATYKLVLQLLVAQYDSIIYKPTAVTMTTGRVGCVIWCGPRNMPSTSQALGPTWRSGPHSLYPCPAFSSLYRFAHPTLRRNRPATPAHTLHHRPSSALRPTPRPTIAMHIHHYVACLLSTTVAPSSPSRLPVASWLHTDDDDEYYAFCKLSRPAP

SEQ ID NO: 44541 - protein, 415 aa, Zea mays
  Coding DNA Sequence Number=SeqID_2762
  Homolog annotation: Hit_ID=Q6QP54; Match level="QueryCoverage=17%, HitCoverage=28%, E-value=3e-12, Identity=87%"; Hit description =Putative kinase
MTASKKVHHVIRFRILFLFLSLTTGTGKGDTPKGILLREGSGPRAPLLIRGSKAGPSEGFNSRLRALGLRTHYWLALEGFDSRLRRRARDDPGYVRYITKARATLLSAACAAPTAVPLDRVRLTAAKSGLGRHRKLRLARPQGSDSASASAPEDDELRLARPQGSNSASAPEDDELCLARPRARTRPRPRKTTNSASPDPRARTRPRPRKTTNSASPDPRARTQPWPRPTVSASPDPRARTRPRPQRSLRLALPRARTDHVTGGAIITLPLASSSYGEQDRRPIWLAPVKQIMMAPRMLHDDDGSQPPYGSKETSARTRQPRQLSFRKAPALLRRPRHHTNRVPKPLRLPRRHPETKHAGDNRNVVAAVDSGIVLGSKQKGDKLTAGESASGQDRSSESGDGRGICDMGGKRCSL

SEQ ID NO: 44542 - protein, 70 aa, Zea mays
  Coding DNA Sequence Number=SeqID_2763
MWTLLSKGIVALKAGLAYNVVHGLLLLVLARDRLLGSYKVLMQSLLAPAPKQSTLCGMSHQRQTEKNLSS

SEQ ID NO: 44543 - protein, 244 aa, Zea mays
  Coding DNA Sequence Number=SeqID_2764
  Pfam annotation: Domain name=Collagen; Domain location=102-160; Score= -48.1; E_value=0.1; Accession=PF01391.8; Description=Collagen triple helix repeat (20 copies)
MAWQWQALTIRMEMDWQVLMVCLVLMLHRKIQLKHDRKNETKVDSEQKFTQHSRNAEIHATQILGGAECGDCSFPSAEIASHHGAEVEGRRFATHQDLLGAGVAGAAGTAGTAALRGRGEFGDSGDEHGGGDCGHSSFARARRIRGQRGRARRRGLRAQQLCGGAANSGTAGTSTAAGTAGTAALRGRGEFGDSGDEHGGGDCGRCSFGGDCGREDGGEDCGGEESRARVIAGTAEQRRCTRLH

SEQ ID NO: 44544 - protein, 174 aa, Zea mays
  Coding DNA Sequence Number=SeqID_2765
  Pfam annotation: Domain name=F-box; Domain location=70-117; Score =24.8; E_value=0.0003; Accession=PF00646.23; Description=F-box domain
  Subcellular localization annotation: CTP_CleavageSite=36; ConfidenceScore=5.42e-01
MAKPAGGRRRESDRPPPTSLHGHRSSTRIIGRKRVAVSPTPGSRTPHSPSRTLRKQRSVRFHFHMDDAVNLLESLPLDVLIKILCKVNYSDLRHLLLVSKQVKEATIYARELHFKFSTPSAKPVFRDEEAGGGDDTCPCAPKQHRAAKSRLRGQNLERIAVNLSASYESMLPEV

SEQ ID NO: 44545 - protein, 40 aa, Zea mays
  Coding DNA Sequence Number=SeqID_2766
MTIRPLSEVKAKPKLSDTGVDILVNAHYFLSEAGIEEIGH

SEQ ID NO: 44546 - protein, 63 aa, Zea mays
  Coding DNA Sequence Number=SeqID_2767
  Gene Ontology: Mol. function=amino acid transporter activity; Cellular component=membrane; Biological process=amino acid transport
  Homolog annotation: Hit_ID=Q84ST3; Match level="QueryCoverage=75%, HitCoverage=7%, E-value=4e-17, Identity=89%"; Hit description =Putative cationic amino acid transporter
  Subcellular localization annotation: CTP_CleavageSite=31; ConfidenceScore=5.19e-01
MARDGLLPSFFSDVNKQTQVPVKSTIVTGICAAALAFTMDVSQLAGMVRNQLSVPVCVGGEDT

SEQ ID NO: 44547 - protein, 76 aa, Zea mays
  Coding DNA Sequence Number=SeqID_2768
MTPSFIRDELAADGKPLTCFVSQELKLNIASGDSNFLDLEWLSTSGNSSDERVERRGQRKDGDDSTFRLTDSVFLP

SEQ ID NO: 44548 - protein, 98 aa, Zea mays
  Coding DNA Sequence Number=SeqID_2769
QVLRECHGDVATVPDDDSIDQSDGRIHDYEGKVTLATDVNEYVTSAANNNEENLDITSVQQSEVTRADFLDVTSNTEYNLTATPDYATSSALLQDSAS

SEQ ID NO: 44549 - protein, 209 aa, Zea mays
  Coding DNA Sequence Number=SeqID_2770
  Pfam annotation: Domain name=LRR_2; Domain location=120-144; Score =19.5; E_value=0.012; Accession=PF07723.3; Description=Leucine Rich Repeat
  Subcellular localization annotation: CTP_CleavageSite=50; ConfidenceScore=5.85e-01
MVASSALPSSNSSPSAAFTQPIWTGKTSSGGSRLACGGALGRSKWIWRCRCRRRRAGRRRRRRERRRRARRREEDPHAGHEAPLLELPADLFQARNSLERLALSRFSLRAVPLPAVGLAGLRSLSLSHVDVTDEALRGLVANCPALERLSLKRCSRLAMVSVASETLRVLVLVGCQALKQLCVDAPALESFALHCNVFVTNRDASCEWD

SEQ ID NO: 44550 - protein, 349 aa, Zea mays
  Coding DNA Sequence Number=SeqID_2771
  Gene Ontology: Mol. function=transcription factor activity; Cellular component=nucleus; Biological process=intracellular signaling cascade
  Homolog annotation: Hit_ID=Q336Q9; Match level="QueryCoverage=32%, HitCoverage=19%, E-value=4e-50, Identity=80%"; Hit description =Expressed protein
MAAPESECGGSDGYRDLRGVRVDLDTGAARAGGGGGFAVSFWLYLSVSARPSSVILHQITAGDDTKLPFLALGEGNKLLLFPLMRLHREAPAPASSYPWTDTTNLSSTSVCPLEKWFHIGCENPPFKLSIDYSCSDGIEEGDDGIWSIVGGKASCRRNFILEVVLTNAFGEPVKDKEVVSSLVYADDGTVVAKSRDDSEPPLLITCEGLEYAAISRPLPIIRGRALFKLKISQMTNSSRLRVTDVGLLDWRVETPARRRWATDAAREDDWSLEQPPVTGPLDADDWSWTAPESNRASKRWSNALDRLTAFKTMLNAQTSVGDQIPNDRMINRSGRRLVGRLGNLVVSSF

SEQ ID NO: 44551 - protein, 92 aa, Zea mays
  Coding DNA Sequence Number=SeqID_2772
  Gene Ontology: Mol. function=methyltransferase activity
MRERFDGYSGILAHVNYVDQDLQCDNEGWLLDNPMGIRTEREIHAELEGATIYRRVYQKIVLMVFSIGCCLRSVQNSGLELLTIYRYDMCND

SEQ ID NO: 44552 - protein, 298 aa, Zea mays
  Coding DNA Sequence Number=SeqID_2773
MPNLEELQLLMDYEGYCLEAVSGFFKLIPLPVLQRLFVRLLLLTGAELHAQLHIDHKREGEGSCGCSASSWISPLSSNSWCIGEGVERGKHYRVPAQGRRYPEPSTHEVHPGKPFDGDDAEHMQWIYSEIGNDASQFVGPLVLNLLIKCIDPRTYCAIMRILAHLYYVLCTNILCFFLFRCDGEIDVELKHVRDAVAKKGQALHEEQDMVKKVALATLDILSVGASRSGLSSRATAAASHGLALTTVASSSPRSAAPAPSPSNCRQRQRGRPSALRSPNRPPRQPFGPLLHFVPLNLG

SEQ ID NO: 44553 - protein, 157 aa, Zea mays
  Coding DNA Sequence Number=SeqID_2774
MRALFSKLPAYGSDRILLHGLSNSKVQARLALDRAVELLSRKEPGPSAASASPSGSGGRSRRLLACYRPPLHSTPGSRIHNSKSYESHQRQRRRCILRHTTNGRGHRVWPAARGRSWTETPGTRTRRHGDTQTCRPALGKWELEARTNVGVFLHDRD

SEQ ID NO: 44554 - protein, 102 aa, Zea mays
  Coding DNA Sequence Number=SeqID_2775
  Homolog annotation: Hit_ID=Q10RE9; Match level="QueryCoverage=47%, HitCoverage=21%, E-value=2e-16, Identity=75%"; Hit description =Expressed protein
MLIIFHAMSLLFKILPLPSHNHSMRASVLRRRRHVQEERLRHELPLRVQGGVQQPPQHDRDALLPELIHFTADSTATAADGGGLIGRRLRDVGRGWSVPRQH

SEQ ID NO: 44555 - protein, 653 aa, Zea mays
  Coding DNA Sequence Number=SeqID_2776
  Gene Ontology: Mol. function=sulfate porter activity; Cellular component=integral to membrane; Biological process=sulfate transport
  Homolog annotation: Hit_ID=Q10RF5; Match level="QueryCoverage=99%, HitCoverage=100%, E-value=0.0, Identity=75%"; Hit description =Sulfate transporter 3.1, putative, expressed
  Pfam annotation: Domain name=STAS; Domain location=508-626; Score =124.4; E_value=3.2e-34; Accession=PF01740.11; Description=STAS domain
  Pfam annotation: Domain name=Sulfate_transp; Domain location=175-485; Score=510.2; E_value=2.3e-150; Accession=PF00916.10; Description =Sulfate transporter family
  Pfam module annotation: Pfam domain module=STAS::Sulfate_transp; Domain location=508-626::175-485
  Subcellular localization annotation: CTP_CleavageSite=45; ConfidenceScore=5.09e-01
MGGSADANGAGSVRVPVPPARPFLDTFRGNLKETFFPDDPFRGVVRERGAGRRTVAALRYFFPFLEWAPAYALSTFKSDLIAGITIASLAIPQGISYAKLANLPPVLGLYSSFVPPLVYALMGSSKDLAVGTVAVASLLISSMLGSEVSPTENPVLYLHLAFTATFFAGVFQASLGLLRLGFIVDLLSHATIVGFMAGAATVVCLQQLKGMLGLVHFTTSTDVVSVMESVFSQTHQWRWESVLLGCGFLFFLLVTRFISKRRPKLFWISAAAPLTSVVLGSVLVYLTHAENHGIEVIGYLKKGLNPPSVTSLQFSPPYMMLALKTGIITGVIALAEGIAVGRSFAMFKNYHIDGNKEMIAIGTMNVLGSLTSCYLTTGPFSRSAVNYNAGCRTAMSNVVMSLAVMVTLLFLTPLFHYTPLVVLSAIIVSAMLGLVDFGAALHLWRVDKVDFCVCAGAYLGVVFGSVEVGLVVAVAVSLLRVLLFVARPRTTVLGNIPGTMVYRRMDQYAAAQTVPGVLVLRVDAPVYFANASYLRERISRWIDDEEERTKSQGEMGVRYVVLDMGAIGSIDTSGTSMLDELNKSLDRRGMQIVLANPGSEIMKKLDSSKVLEQIGHEWVFPTVGEAVASCDYVLHSHKPGMAKDSAAAHESMV

SEQ ID NO: 44556 - protein, 967 aa, Zea mays
  Coding DNA Sequence Number=SeqID_2777
  Gene Ontology: Mol. function=helicase activity; Cellular component =cellular_component; Biological process=multicellular organismal development
  Homolog annotation: Hit_ID=Q10RG1; Match level="QueryCoverage=99%, HitCoverage=100%, E-value=0.0, Identity=73%"; Hit description=RNA helicase SDE3, putative, expressed
  Pfam annotation: Domain name=UvrD-helicase; Domain location=395-837; Score=-203.5; E_value=0.0043; Accession=PF00580.11; Description =UvrDREP helicase
MGVHRRNYSDDEFSVAGERPEVEFMDFQNDDTFQDYSCEDTPVLVSAPFPFEDGKPKSALVGETSADTIQIENTSPESVNLWSVRIFSSNPEDSYVLSMMRPPSDDANEEEKHAFLALTSVEDRTLLPGQTLTVWLSCTPKDIGLHTSIVHVDIGDEKIERVAFLLADDNVSQALFSDKPYSRRRDQVKKFGPSPTVPGRRPTKQHVQGFKHRLPQYAIPAHIRELIESKQKPDVLYDELSMVNYAEYFSTLLVMEELNLEEEMRTYDMEGVLMRRRGMHFLSLEVPGLAEKRPSLVQGDFVVARYAGNHAQAYQGFIHRVEADEIFLQFDHQFHMNHHDRNRYHVSFTYNRVNMRRLYKSIDDAKYLGPGILFPRQSPCRVLKRWPFNPLNPHINTEQADAVAMVLACRGGSPYVIYGPPGTGKTMTIVEAVLQLYTGKKRANILICAASNTAADHVLEKLLQASYLIRPSDIFRLNAQSRQYEDVSTDFIKFCFFQDRVFMCPPLQALVRYRIVISTYSSSYQLQAEGIRQGHFTHIFLDEAGQASEPEAMVPLSGLCGRDTVVVLAGDPKQLGPVVYCKQAEKDGLGTSYLERLLTDFEPYGTRNPNYVTKLVRNYRCHPAILELPSELFYEGELIPCKEGESSAYDCIGLPDKSFPVLFIGIQGCDEREGANPSWFNRIEVSKVVSIIRNLTRGGDVDASDIGVITPYRQQVAKIKKALEAFEMPGLKVGSVEQFQGQEREVIIISTVRSTVKHNEFDRFFNLGFLSNHKRFNVSITRAKSLLVIVGNPYIITKDRHWDRLLRYCADNGSYQGCPLPPPESHAYSDGTRFFSEHDDGHQAGPSGQDDYYNQEATYCSYNNQEPSDFGFRLGSGAEPASENQELPSEELPEDEKQPLFSNPQADLEETPKQDVVEEGAAQGGVLADPTSSTTADDQLQGAYAEKYSFPPGWCDVSSIPAQGWGD

SEQ ID NO: 44557 - protein, 247 aa, Zea mays
  Coding DNA Sequence Number=SeqID_2778
  Homolog annotation: Hit_ID=Q10RE9; Match level="QueryCoverage=39%, HitCoverage=29%, E-value=6e-19, Identity=69%"; Hit description =Expressed protein
MEEERVLLTVWDDAGQEPEAVADVELRPARAAVAAVAQRARRHRAVALPAGHRAAYGICRTHAYRVKVKGREAGVGRVLCRRRRRRRLLMTGEKMGARGEKKSAAATALRARSATATTTAGAGAGAAAQGTLARRSILEDQGHFTARWISRAFPGLGGLDSAPRLGAGRLCSFRSSSLSFGCVLSGREGKGRGRLAGAARPCVGELLFLALAPPGLTRPPRPDDAAAADQEMAKSKASSQMAVPPCP

SEQ ID NO: 44558 - protein, 185 aa, Zea mays
  Coding DNA Sequence Number=SeqID_2779
  Gene Ontology: Mol. function=protein binding; Cellular component =nucleus; Biological process=ribosome biogenesis and assembly
  Homolog annotation: Hit_ID=Q8LNU5; Match level="QueryCoverage=88%, HitCoverage=24%, E-value=9e-76, Identity=77%"; Hit description =Nucleolar complex protein 2 homolog
MTVVGKHLSIVQVNEKTTITRIYLANALHMITEMTDEQMIAFIVHRVRASAVFLTAFPSLPRKYVKALLHTWARGRGAMPLVSFMFLRDLCIQVGSNCLDTCLKGIYKAYLVNCKLSKSISGSKQQHIQFLGNCVRELYSLDPQSAYQHAFIFIHQLGVILRGALTERGPKKSYQKNYDWQHILP

SEQ ID NO: 44559 - protein, 318 aa, Zea mays
  Coding DNA Sequence Number=SeqID_2780
  Gene Ontology: Mol. function=protein serine/threonine kinase activity; Cellular component=nucleus; Biological process=protein amino acid phosphorylation
  Homolog annotation: Hit_ID=Q2QSL4; Match level="QueryCoverage=68%, HitCoverage=75%, E-value=1e-36, Identity=40%"; Hit description =Protein kinase domain containing protein, expressed
  Pfam annotation: Domain name=Kdo; Domain location=43-217; Score= -87.4; E_value=0.092; Accession=PF06293.4; Description=Lipopolysacchar ide kinase (Kdo)
  Pfam annotation: Domain name=Pkinase; Domain location=39-308; Score =188.4; E_value=1.7e-53; Accession=PF00069.15; Description=Protein kinase domain
  Pfam annotation: Domain name=Pkinase_Tyr; Domain location=39-306; Score=-59.2; E_value=7.7e-09; Accession=PF07714.7; Description =Protein tyrosine kinase
  Pfam module annotation: Pfam domain module=Kdo::Pkinase::Pkinase_Tyr; Domain location=43-217::39-308::39-306
MVPTPPKKRPAPDQEPGAADVNKRPRHNAPASPRSIAEFELFEVLGEGAEGVVRRGRDRRTGKNVALKWIFGDGPGGHGHPDRRALAMEAGCLHACRGHPSIIGIHDVAADPKTGDVHLVLELVRGGLTLRESMWRPLSEDVVREMMRQLISAARKIHDAGFIHRDMKPENVLVCPLGALKVCDFGSATRQEPAGKPHEAHPVGTLQYNSPELLDGNWCYGPAVDMWGLGCVMAEVLTAETLFDLETREEMLDEMSKLRDQMASAAGKLDPECLAHLSEAGRDVLTGLLAFRPDERLTAAEALEKPWFKNFKSHWIGL

SEQ ID NO: 44560 - protein, 497 aa, Zea mays
  Coding DNA Sequence Number=SeqID_2781
  Gene Ontology: Mol. function=nucleic acid binding; Cellular component= nucleus
  Homolog annotation: Hit_ID=Q9FKY7; Match level="QueryCoverage=83%, HitCoverage=35%, E-value=1e-111, Identity=51%"; Hit description =Arabidopsis thaliana genomic DNA, chromosome 5, TAC clone:K2A18
VAIYAEFRRDWPEALKFYEEGVRVLREMIGTSTRLPPTQRLVEIKAVAEQFHFKISTLLLHAGKVVEVITWFRKHIKSYERVLGTPEVAFLHWEWFSRQFLVFGELIETTSTTIPDTLSPRFGTADNTLTEWEFQPAYYYQLAATYLREKRYAIECSSSMANLTTEVNGVPESVMPSVYVGQYVRLFEQGDTVSLLPYALSEAERFQDSYEIIALFRKAYESFQSLGATRMASACSSGMAIEYYATGDFSNAKQLFDSVAGLYRQEGWTSLLWENLGYLRECSMKLNSPKDFISYSLEMAALPLFSGSGEENRENKIKSGPAGSPTISRRENIQQEVINVLERKQSSEGTYDGFNNEIEEVIHLDIDQISLLRMVLTASVAFHDQYVKPGSPLLVSVSLLSHLPSPVVVDQLEVQFNQSDCNFVMHSAQEDSLPSYSNLHGQVIQDTSSLTLQDHYGIELICFTLSINLRSCWPDNVISVTLGALSSDKLLHTIFTA

SEQ ID NO: 44561 - protein, 319 aa, Zea mays
  Coding DNA Sequence Number=SeqID_2782
  Gene Ontology: Mol. function=protein serine/threonine kinase activity; Cellular component=nucleus; Biological process=protein amino acid phosphorylation
  Homolog annotation: Hit_ID=Q2QSL4; Match level="QueryCoverage=69%, HitCoverage=75%, E-value=6e-37, Identity=40%"; Hit description =Protein kinase domain containing protein, expressed
  Pfam annotation: Domain name=Kdo; Domain location=42-216; Score= -87.4; E_value=0.092; Accession=PF06293.4; Description=Lipopolysacchar ide kinase (Kdo)
  Pfam annotation: Domain name=Pkinase; Domain location=38-309; Score =188.0; E_value=2.3e-53; Accession=PF00069.15; Description=Protein kinase domain
  Pfam annotation: Domain name=Pkinase_Tyr; Domain location=38-307; Score=-61.9; E_value=1.1e-08; Accession=PF07714.7; Description =Protein tyrosine kinase
  Pfam module annotation: Pfam domain module=Kdo::Pkinase::Pkinase_Tyr; Domain location=42-216::38-309::38-307
MVPTPPKRPAPDQEPGAADANKRPRHNAPASPRSIAEFELFEVLGEGAEGVVRRGRDRRTGKNVALKWIFGDGPGGHGHPDRRALAMEAGCLHACRGHPSIIGIHDVAADPKTGDVHLVLELVRGGLTLRESMWRPLSEDVVREMMRQLISAARKIHDAGFIHRDMKPENVLVCPLGALKVCDFGSATRQEPAGKPHEAHPVGTLQYNSPELLDGNWCYGPAVDMWGLGCVMAEVLTAETLFDLETREEMLDEMSKLRDQMASTSAAGKLDPECLAHLSEAGRDVLTGLLAFRPDERLTAAEALEKPWFKNFKSHWIGL

SEQ ID NO: 44562 - protein, 90 aa, Zea mays
  Coding DNA Sequence Number=SeqID_2783
  Gene Ontology: Cellular component=nucleus
  Homolog annotation: Hit_ID=Q8LNU5; Match level="QueryCoverage=79%, HitCoverage=10%, E-value=5e-25, Identity=85%"; Hit description =Nucleolar complex protein 2 homolog
MTVVGKHLSIVQVNKKTTIARIYLANALHMITELTDEQMIAFIVHRVRASAVFLAAFPSLLRKLCSIPGLEDEVQCLLFLLCFFETCAFK

SEQ ID NO: 44563 - protein, 399 aa, Zea mays
  Coding DNA Sequence Number=SeqID_2784
MAMADGPPLHLHHLHLHDGDSDVSLWREMGGTERPPGPPPTAAASLQLAKGLAPAASKCKWLAAVQHLFGKGKEMKGKKRLWCGVAEVSRPGALSTLGNSREDPCLPDRVSRVRSMKRGGRERFIGLLQLRSQIAKQRPSLSEEELVLRVRRKSTPTFRGPLTPPRGRHWHWHWRASCETVTTDPSYAEPWHARIQERSRYYNCNGQTAAAASTSVAEAATSESSSSIHPARPLEIEDSRHRQDHNCQACVRRPSTRDAKAFDMLYLAFLAVRYRPQQEPANGSLKYSGSSTTGKCGVLLFIRYPSAQSCCLVLIVFANSVPQHNSATPPALLLRQPVEHHAMAVRAEVPRRGAVRGLVRDIRVQSVPIRSSTWKEHHGHGVHGGLRRRGAVVGSPIRR

SEQ ID NO: 44564 - protein, 207 aa, Zea mays
  Coding DNA Sequence Number=SeqID_2785
  Homolog annotation: Hit_ID=Q2QN86; Match level="QueryCoverage=99%, HitCoverage=94%, E-value=2e-35, Identity=52%"; Hit description =Expressed protein
  Pfam annotation: Domain name=DUF1118; Domain location=9-206; Score =138.2; E_value=2.3e-38; Accession=PF06549.3; Description=Protein of unknown function (DUF1118)
  Subcellular localization annotation: CTP_CleavageSite=59; ConfidenceScore=5.85e-01
MASLSVAAVAATIAMPSSSGGRGRRLRVASMATQKGQKPTPKTVSGTRRSSQDRRVTTVGARVQGTTTVFPVGEPGPRPATTSGKAPVKLLTNVEKLRLLTKAERAGLLSAAERAGLSLSAMERLGLLSKLEELGALSAATDPGTPGALLALALPLLAAGPAVVYLVPEEQAWQVALQAVAALVCVVGGAAAVAASTFVSRLQGSSS

SEQ ID NO: 44565 - protein, 823 aa, Zea mays
  Coding DNA Sequence Number=SeqID_2786
  Gene Ontology: Mol. function=nucleic acid binding; Cellular component= intracellular; Biological process=chromatin modification
  Homolog annotation: Hit_ID=Q2QTX9; Match level="QueryCoverage=99%, HitCoverage=56%, E-value=0.0, Identity=49%"; Hit description=JmjC domain containing protein, expressed
  Pfam annotation: Domain name=zf-C2H2; Domain location=704-726; Score =7.9; E_value=1.5; Accession=PF00096.16; Description=Zinc finger, C2H2 type
  Pfam annotation: Domain name=zf-C2H2; Domain location=727-751; Score =9.8; E_value=0.9; Accession=PF00096.16; Description=Zinc finger, C2H2 type
  Pfam annotation: Domain name=zf-C2H2; Domain location=757-781; Score =19.7; E_value=0.01; Accession=PF00096.16; Description=Zinc finger, C2H2 type
  Pfam annotation: Domain name=zf-C2H2; Domain location=787-813; Score =19.9; E_value=0.0092; Accession=PF00096.16; Description=Zinc finger, C2H2 type
  Pfam module annotation: Pfam domain module=zf-C2H2::zf-C2H2::zf -C2H2::zf-C2H2; Domain location=704-726::727-751::757-781::787-813
MESDDTSNRMVIAHQQGYAHQTDDNTIQNVSAAQVSDRCRQLYSSSTHGCTSALGLLASAYESSESDEEADAPNNISNNCENNNAANGATNIQSSRTSVQDENTNLQLYEEENNSRAIASLMQPVEDKSTAMTPVSMETNIIHLADQGESLTFHEQWHAYLDFDDLTASGVKASPNTSLGTAKAAMKTDALTLFKYSKDSCRMHVFCLEHALETWTRLEQIGGANIMLLCHPEYPRAESAAKVIAEELGMKHAWKDITFKKATREDTGRIQLALQDEDAEPTSSDWAVKMGINIYYSAKQSKSPLYSKQVPYNSIIYKAFAQENPDSFADGQRSSTTKKKVARWWCGKKWMSNQVHPLLAYEQVEQNHETVYSKTMLSASCDRMQEQSTRSTTLINQNSSKKITREKEGDSVEKSRGKKKRCSASASDEAALHCSVYDQPVNSDNHAKYEDGDESVEARNTRHHQQYESLNKKSSLKRRKDNNRSNSFHELHKDNVDIDCRFDTDGTENTSIGDWDNSPPQGGDVKAVKSGARLLGTKRFSKEKGSNSLSNVNKKLVKMGKKISTKKQKNDKTNRQFQENHKKADIVDLLHEDDGDEGTYIDCNEIRKQKTDDVRVKSRGKMQSGKKKVSRCQASDGSHNGGKEMKLSSDIEVCNRRGDGTTAANFEEIPKEKADAVKVKPKMQGDKKKTSKHQAGDGDKGAKFSCDIEGCDMSFSTQHDLSLHKRDICPVKGCKKKFFCHKYLLQHRKVHLDERPLMCSFPGCAKTFKWPWARTEHMRVHTGVRPYACTEPGCTQTFRFVSDFSRHKRKTGHSCDKKKKRGL

SEQ ID NO: 44566 - protein, 113 aa, Zea mays
  Coding DNA Sequence Number=SeqID_2787
  Homolog annotation: Hit_ID=Q9FGK0; Match level="QueryCoverage=63%, HitCoverage=57%, E-value=2e-17, Identity=56%"; Hit description =Arabidopsis thaliana genomic DNA, chromosome 5, P1 clone:MNJ7
MAGRLTAAGFRVLGGGGARAAAAAAALRHRAGMGLPVGRHIVPDKPLPVNDELVWDNGTPFPEPCIDRLAPHIGKYEALAWLCGGLGFFAALGVAAVVNDKASKIPYIFLHLL

SEQ ID NO: 44567 - protein, 215 aa, Zea mays
  Coding DNA Sequence Number=SeqID_2788
MATPAPTLPEPAAQELTAAVAGAGQRQQPHHQHPLLAAAAAASLLAVLYLPRPVLLLVLSPASLSSLLLLLSLLHLGSTPPPPPPALAAPPPSSPPPTEEKKQQEQEQAPEAACPPPPPPPPPPEPERGAVFPELLEFASWAAKGRALEVIHEEFEAEWGLPEEMGLPWDSDSDSDPDSGSDDGYVRGGGDADDGMIEIELEEDSLIEIDISRCR

SEQ ID NO: 44568 - protein, 83 aa, Zea mays
  Coding DNA Sequence Number=SeqID_2789
  Gene Ontology: Mol. function=galactosyltransferase activity; Cellular component=membrane; Biological process=protein amino acid glycosylation
  Homolog annotation: Hit_ID=A0EVG3; Match level="QueryCoverage=90%, HitCoverage=25%, E-value=4e-39, Identity=98%"; Hit description =Hypothetical protein hypro1
MYIYAYSGVEDLTSGKWLNMGHKAKNRVNIFPRMYDYKSAKGEDFLENTIGVHQLKQDLRWAHTLEHFNVTRLEPSSMLLHNF

SEQ ID NO: 44569 - protein, 139 aa, Zea mays
  Coding DNA Sequence Number=SeqID_2790
  Gene Ontology: Mol. function=structural constituent of ribosome; Cellular component=intracellular; Biological process=translation
  Homolog annotation: Hit_ID=Q5GAS3; Match level="QueryCoverage=99%, HitCoverage=100%, E-value=4e-78, Identity=100%"; Hit description =Rpl35A
  Pfam annotation: Domain name=Ribosomal_L35Ae; Domain location=12-120; Score=110.4; E_value=5.1e-30; Accession=PF01247.8; Description =Ribosomal protein L35Ae
MVKGRTGQRVRLYVRGTILGYKRRAHCLRFFPRPCYLDLAIPRSKSNQYETTSLVQIEGVNTKEDVAWYAGKRMAYIYKAKTKSSETRYRCIWGKVTRPHGNSGVVRAKFKSNLPPESMVSDALSTPCDVCCFPIDALS

SEQ ID NO: 44570 - protein, 241 aa, Zea mays
  Coding DNA Sequence Number=SeqID_2791
  Gene Ontology: Mol. function=nucleic acid binding
  Homolog annotation: Hit_ID=Q6ZK85; Match level="QueryCoverage=86%, HitCoverage=25%, E-value=2e-36, Identity=47%"; Hit description=RNA recognition motif (RRM)-containing protein-like
  Pfam annotation: Domain name=RRM_1; Domain location=35-105; Score =60.8; E_value=4.3e-15; Accession=PF00076.12; Description=RNA recognition motif. (a.k.a. RRM, RBD, or
  Subcellular localization annotation: CTP_CleavageSite=38; ConfidenceScore=5.48e-01
DLIQPSSMLQAQKASGAAGSNTTGQPEGGPDSRTVFVSNVHFGSSKDALSRHFNKFGAVLKTHIVTDGVTGQSTGSAYIEFLHKESAEQALTLNGTSFMSRILKEHLPLFISLHEDKVNRIYISVSHSWRITDQPKQRKVVRKSSTEVTQLPVLPRASWGSPFASRLIRTAYPRPNYPGAIRGRLSLRGAARSLQWKRGVADSGDVGKPSPTAPGNQLVTPATRNFTYTRTEPKTNAGAMA

SEQ ID NO: 44571 - protein, 242 aa, Zea mays
  Coding DNA Sequence Number=SeqID_2792
  Subcellular localization annotation: CTP_CleavageSite=47; ConfidenceScore=5.32e-01
MSMRHKAGDECRGVSATVTATVFRRPRRPTRPRRSRGPFAHKIGRYSAEERREKIERYRTKRNFDKKSRRSITVTISFPRRTIDLQMQSQGSGIKTTATFDDGKWWWETPVAAPAAERHTSRCLTMDGRGPGASATDHGARRGRRMATAVATCAGRALKLLLLVGPPPPENREQNGWGDTSPAAERARSCLWSWPRGGRAGGPGNTRRSRRAAPYRKMTRAVQYIFSSIKSWRCYWSRSVVV

SEQ ID NO: 44572 - protein, 261 aa, Zea mays
  Coding DNA Sequence Number=SeqID_2793
  Gene Ontology: Mol. function=sequence-specific DNA binding; Cellular component=nucleus; Biological process=regulation of transcription, DNA-dependent
  Homolog annotation: Hit_ID=Q9XH35; Match level="QueryCoverage=33%, HitCoverage=40%, E-value=2e-25, Identity=70%"; Hit description =Homeodomain leucine zipper protein
  Pfam annotation: Domain name=HALZ; Domain location=112-156; Score =35.1; E_value=2.4e-07; Accession=PF02183.8; Description=Homeobox associated leucine zipper
  Pfam annotation: Domain name=Homeobox; Domain location=56-111; Score =75.6; E_value=1.6e-19; Accession=PF00046.19; Description=Homeobox domain
  Pfam module annotation: Pfam domain module=HALZ::Homeobox; Domain location=112-156::56-111
  Subcellular localization annotation: CTP_CleavageSite=42; ConfidenceScore=5.09e-01
MDRPDHQQQQFFMPTTVQVPQPQQQQQQLCVPMLDEPPSSFLAGRGGGGASGRGERKRRFTEEQIRSLESMFHAHHAKLEPREKAELARELGLQPRQVAIWFQNKRARWRSKQLEHDYALLRAKFDDLHAHVESLKQDKLALTTQLSELSERLRERDDRAAAAGGGGRETMASSSSCIGGGGEEEAEDDKRNVLLFGCVDMEPPAESCVLVGSTCAALADVSVESECDDQHLHYDDEFPESYCAMPELWEPWPLVEWNAVA

SEQ ID NO: 44573 - protein, 103 aa, Zea mays
  Coding DNA Sequence Number=SeqID_2794
RKPPGVGRGRGRGDVGAKPGGRGIGRGQDDGGRGSGGRGRGGVGAKGGNKVGWLYWGTNQNGSCDLDTEDAAATRLVAIPQNCLVDILSMIQFVHLLRVIPVR

SEQ ID NO: 44574 - protein, 608 aa, Zea mays
  Coding DNA Sequence Number=SeqID_2795
  Gene Ontology: Mol. function=phosphatidylinositol phosphate kinase activity; Cellular component=mitochondrion; Biological process =phosphatidylinositol metabolic process
  Homolog annotation: Hit_ID=Q8H3L8; Match level="QueryCoverage=99%, HitCoverage=37%, E-value=0.0, Identity=62%"; Hit description=FYVE finger-containing phosphoinositide kinase-like
  Pfam annotation: Domain name=Cpn60_TCP1; Domain location=208-595; Score=-224.6; E_value=0.051; Accession=PF00118.14; Description=TCP -1cpn60 chaperonin family
  Subcellular localization annotation: CTP_CleavageSite=51; ConfidenceScore=5.30e-01
MGVVDFSVLGALQKVRSFVAGATPAEAADGRLPATPRSRSGGPSPENSPPPAATRSGGRRAIALRRQISSPELLRCRAVRRADDEDDDEPGVQFFTHGNDFLHDFSDTESVSVSTPNDINRSLTPSPLESPTWMVKQNDSSPISRKNGRFSPDSPGYGTKASLGSDGSPQQINGSVTDSGDGSKTQYPVEFGANIWCPPPPEDEGDDIESRLFGFQDEDDEAGDSSGLLVSGSFSANKIAAIDEVTNTAQEECLKTAVLGHFRALVAQLLKAEGIDMGKDDGSKGWLDIVSSLTWQAASYVRPDTKKGGSMDPTDYVKVKCIASGDPRDSNFVRGVVCSKNVKHKRMVSEHRNAKLLILGGALEYHRVPNKLASIGRILEQEKEHMKMIVGKIESRRPNVVLVEKTVSSSAQELFSKDISLVLNVKRTLLDRVSRCTGAQIASSADSIASVRLGQCEAFKVQKVTEFPSAKQTNRRSSKTLMFFEGCPWRLGCTVLLRGSCREELKRIKRAVQLAVFAAYHLSLETSFFADEGATLPKLPSRHVVVDPDTRNCTNSNSAALTNVGMPHGCKSEHDKLSQTAMVNIMFENTPVSPSSLPSNGEGQGRIR

SEQ ID NO: 44575 - protein, 890 aa, Zea mays
  Coding DNA Sequence Number=SeqID_2796
  Gene Ontology: Mol. function=calcium ion binding; Cellular component =membrane; Biological process=homophilic cell adhesion
  Homolog annotation: Hit_ID=Q5HKR2; Match level="QueryCoverage=82%, HitCoverage=52%, E-value=1e-09, Identity=19%"; Hit description =Serine threonine rich antigen
MEIPTAVIHRLQSALREATFAPSVEDAPAPPFPSVADAVAAFDSCAASVSAELRCVRCGASGGLLRGVRSALCTYCGCPRRGEEAEGGGSGGVAFRDGVAYQWLLGSLGLDGSICGEFTCIDIVVLVLFKFKEIVEFDTDTTASNKSKDVPPPNSGMIISDLLDLKITCLPENKETSPSSITKEQSSSVDTLNLSAANLDSFFIERKEEMTSASLPQTHFLEQENKRTDSKSHESRLEVHAAPKSLISSQRTNQIEATPAFASWDADFQSASSENAAKNSKQPDLFKSTSVAESFSFPASEIAIKPVVSTESKTNTRSAILEHHSEVLASASSTLFGDDLSDQKVVHHIFESSNAPGFTESSLPMDFAKSDQLHGRDDDGFNDDEAFDEWQEFTTSGNQGSLSNAEHIEEPLKRDLSENDVIDPLRVGSKESPNNVIEKSSNEWQGFASVSGQGRDFVTSVERSTSDHRLNLVGPVGDEETMSSISHQHSSEINPVDVWHVGNVKAQNTAEMVKEKNDSFDDWQDSTTTGQVQDTSLNQTGDMMEVSKASHKETDMDSWFIGHSREPANTGTMNANNMLDDWQGFTGSDQAQQNSSSTGAEMISVPFEQHGGTVSAPSWANGSSNDAAKTSSTSIESDPFDVWQNFTKSGHLQENMSSLGREPSSLSPEPAKGNDSLDLWITSNFKESKSNDVGRTNASSDGWQDFASFDQAQRITKVHVEGHVVKDPSGAETLDLWASSHVNEKNLEQISEHNDLFDDWQDFQNSNPQQTTLQVSSDASLFDITLASRPDAFGEQEIGSVLQVASSENSKDKKEGSNESKAFPSDDHLKSTSGMQQMGDVDSLSSLWPANKPEPANTNVEQLLAQMHDLSFMLKDELSVPDKPIDHSKP

SEQ ID NO: 44576 - protein, 59 aa, Zea mays
  Coding DNA Sequence Number=SeqID_2797
MEFRGQEEEEEPVLEDMGASSASSSAPTPAPAPRNQNHAAEASLEPWTTESLQLSPVRL

SEQ ID NO: 44577 - protein, 612 aa, Zea mays
  Coding DNA Sequence Number=SeqID_2798
  Gene Ontology: Mol. function=catalytic activity; Cellular component =peroxisome; Biological process=metabolic process
  Homolog annotation: Hit_ID=Q6ZAC1; Match level="QueryCoverage=87%, HitCoverage=98%, E-value=0.0, Identity=78%"; Hit description =Putative 4-coumarate-CoA ligase
  Pfam annotation: Domain name=AMP-binding; Domain location=113-533; Score=428.8; E_value=7.4e-126; Accession=PF00501.18; Description=AMP- binding enzyme
  Subcellular localization annotation: CTP_CleavageSite=43; ConfidenceScore=5.42e-01
MDLPPLPSSWKPAIYIHPSHSSDPGPAPPTRKQQASCLLHVTPASSATRTPPPDRKKMVSPTEPQAETTVFRSTLPDIAIPDHLPLHDYVLERLAERRDRACLIDGATGETLTFGDVDRLSRRVAAGMRACLGVRSGGTVMLLLPNSVEFALAFLACSRLGAAATTANPLHTPPEIAKQAAASGATVVITEPAFVGKVRGLAGVAVVATGDGAEGCVSFSDLASSADDGSAALPEAAAAATAIDVANDVVALPYSSGTTGLPKGVMLSHRGLVTSVAQLVDGDNPNLYFREDDVVLCVLPMFHVYSLHSILLCGMRAGAALVIMKRFDTLRMFELVKRHGITIVPLVLPIAVEMVKSDAIDRHDLSSVRMVISGAAPMGKELQDLLRAKLPRAVLGQGYGMTEAGPVLSMCMAFAKEPLPVKSGACGTVVRNAELKIIDPETGLSLHRNQPGEICIRGKQLMKGYLNNPEATAKTIDSEGWLHTGDIGYVDDGDEIFIVDRLKELIKYKGFQVAPAELEAMLIAHPSIADAAVVQMKDDSCGEIPVAFVVASGGSGITEDEIKQYVAKQVVFYKRLHKIFFVEAIPKAPSGKILRKDLRAKLASGFSNGSSC

SEQ ID NO: 44578 - protein, 120 aa, Zea mays
  Coding DNA Sequence Number=SeqID_2799
MGNADKNEARLEREWRSNVATVALWRGRGGREWRKLIRAERDVLLDICTYTSPRDMRWKRRLEADQKSITLDQSHSKKLLIFYTRRVPVFDGYFYLKRVETSHPCYPVMQHDKSLYQNST

SEQ ID NO: 44579 - protein, 104 aa, Zea mays
  Coding DNA Sequence Number=SeqID_2800
MGYNARQEPEELSSIVSSPRALGSPRYRKGAKSHDLGPTLSLFLLVASRGAQRNTSLHPASLPRDPRWEGDPGQRNPRPPQPNPQVRFEHGDPTFIPVKAGPNG

SEQ ID NO: 44580 - protein, 68 aa, Zea mays
  Coding DNA Sequence Number=SeqID_2801
MAVMGSTSEKMYLYQVPNFEIENDKDETGRRPTRNGSGEMARIACTLRGKRIAGGVSLVSVGVNPVWS

SEQ ID NO: 44581 - protein, 670 aa, Zea mays
  Coding DNA Sequence Number=SeqID_2802
  Gene Ontology: Mol. function=transporter activity; Cellular component= integral to membrane; Biological process=transport
  Homolog annotation: Hit_ID=Q49B42; Match level="QueryCoverage=74%, HitCoverage=99%, E-value=0.0, Identity=73%"; Hit description =Inorganic phosphate transporter 5
  Pfam annotation: Domain name=MFS_1; Domain location=188-593; Score =63.2; E_value=8.3e-16; Accession=PF07690.6; Description=Major Facilitator Superfamily
  Pfam annotation: Domain name=Sugar_tr; Domain location=184-636; Score= 54.1; E_value=4.8e-13; Accession=PF00083.14; Description=Sugar (and other) transporter
  Pfam module annotation: Pfam domain module=MFS_1::Sugar_tr; Domain location=188-593::184-636
  Subcellular localization annotation: CTP_CleavageSite=48; ConfidenceScore=5.20e-01
MAVRLRINVFEFKTLQANLGKQSARSAKTTAMRNNPSWAPCPQLSVPSGAIEGGAVQPVKLTPRAHESEFGQTWLRLAGGDRLSVGVRRERGALGSPLRCCFFGGMTKETKGQEMVRKYGEDYDWRGAPTIDAEVVHSIGGKAHERSGLQQQLARGRRPMALRRQLRVLYALDVARTQLYHFKATVIAGMGFFTDAYDFFAVSLVMDLISYLYFEEQIRRGVKAIIYGIALCGAVPGQLVFGWLGDKMGRKRVYGVTLVLMVVTSLASGLSLSFGTNDNEAANVVAVLCFFRFWLGFSIGGDYPLSATIMSEYANKRRRGAFIAAVFAMQLKTNPRRNANFVWRIVLMLGAVPAIFTYYWRMKMPETARYTALVAKDARKAASEMSSVLNMEIGQEDEAVRELVRQDEYGLFSVQFLRCHGTHLLATSVCWLAVDITFYSLNLYMKDIFVDVGLIDPPEKSDLFKRMTVSTLLHMAIAFGGTLPGYFFTVAFVDRIGRVRIQLLGFTMMAALTASLAATYDPYWKQQKTKRRKIGFAVLYGLTNFFTNFGPNTTTFIVPAEIFPTRMRATCHGIAGAFGKIGAIIGVFGFMFTMEEHHVAPRALWALFASNLVGLVFTFLLPDSKGKSLEEMTGETEEQQLQQDAAVVAAADHIHLRVYAVEDPLISCVT

SEQ ID NO: 44582 - protein, 590 aa, Zea mays
  Coding DNA Sequence Number=SeqID_2803
  Gene Ontology: Mol. function=transporter activity; Cellular component= integral to membrane; Biological process=transport
  Homolog annotation: Hit_ID=Q49B42; Match level="QueryCoverage=80%, HitCoverage=93%, E-value=0.0, Identity=91%"; Hit description =Inorganic phosphate transporter 5
  Pfam annotation: Domain name=MFS_1; Domain location=29-398; Score =30.9; E_value=4.4e-06; Accession=PF07690.6; Description=Major Facilitator Superfamily
  Pfam annotation: Domain name=Sugar_tr; Domain location=25-439; Score=- 72.8; E_value=0.00014; Accession=PF00083.14; Description=Sugar (and other) transporter
  Pfam module annotation: Pfam domain module=MFS_1::Sugar_tr; Domain location=29-398::25-439
MALGQQLRVLHALDVARTQLYHFMATAIAGMGFFTDAYDFFAISLVMDLISYLYYEEQIDRGVKATINGIALCGAVPGQLVFGWLGDKMGRKRIYGVTLLLMVVTSLASGLYFGTNEASNVVAVLCFFRFWLGFGIGGDYPLSATIMSEYANKRRRGAFIAAVFAMQGFGNLAAGIVAVVVSASFLRTNPRRNANFVWRIVLMLGAVPAILTYYWRMKMPETARYTALVAKDARKAASDMSSVLHVEISPEDEAVRQDQYGLFSPQFLRYHGTHLLATSACWLAVDITFYSLNLYMKDIFVDVGLIDPPGKNHLFMRMTVTTLLHTGIALCGTLPGYFFTVAFVDRIGRVRIQLLGFTMMSVFDSHPRSHLCVLETAGNNTAQDGLRSLVWLDQLLRQFWSQHHNIHSSGGDFPSTDARDVPWHSRRIREDRRHHRRVWLHVQHGRTRRRPKKAVGTIFLQPSRPCVHLPSTGFQRWSLTSVGPRILSQLPSQHTTMVHANSTVKTHHAHCYNEEGDKEEAALTCTQQGLFLDATSEGKITYWPGPLMMGSSTLRLTTMKDEVKQGPGMINTDQGLRHNAVIVGHVPYVC

SEQ ID NO: 44583 - protein, 131 aa, Zea mays
  Coding DNA Sequence Number=SeqID_2804
  Gene Ontology: Cellular component=membrane
  Homolog annotation: Hit_ID=Q2QN15; Match level="QueryCoverage=99%, HitCoverage=18%, E-value=1e-32, Identity=56%"; Hit description=Early- responsive to dehydration protein, putative, expressed
MILSALTTSVGINLALTVLLAAAYSLLRRRPPYVEVYSPRRPYAPLEPWLAAAWRRAEEDIHAAAGLDGVVFIRIFVFSIRVFAAAAVLGVGVLLPVNFLGDQLREIDFTDLPNKSIDLFSISNVQDGSSK

SEQ ID NO: 44584 - protein, 90 aa, Zea mays
  Coding DNA Sequence Number=SeqID_2805
MVAHRTFRCEAVRLSGVHRIACAKRSAYGLLGARAPDCPVCTKQPGQRSATAFPMVGNDSFQWLATTFPTVDNDSFQQSADIVSHPVFRR

SEQ ID NO: 44585 - protein, 589 aa, Zea mays
  Coding DNA Sequence Number=SeqID_2806
  Gene Ontology: Mol. function=amylo-alpha-1,6-glucosidase activity; Cellular component=membrane; Biological process=carbohydrate metabolic process
  Homolog annotation: Hit_ID=Q2QN15; Match level="QueryCoverage=96%, HitCoverage=82%, E-value=0.0, Identity=76%"; Hit description=Early -responsive to dehydration protein, putative, expressed
  Pfam annotation: Domain name=DUF221; Domain location=162-587; Score =454.8; E_value=1.1e-133; Accession=PF02714.6; Description=Domain of unknown function DUF221
MARVQKKSGSSCSFYRNLTKQLWLHFSAVYIITGITCYLLYHEYKYISGKRLEYFMISKPLPQHFTVLVRAIPVSDGVSVGDAVDKFFKEYHASTYLSHTIVRQTGKLRRLLNDAESICTKLTNLNHVRRSTGDPPRKLGLFSRNDLVGEYQKRLEDLEENVRMEQSDATRRQEIPAAFVSFRSRYSAANAVYIRQSDNPTEWQTEEAPDPHDVYWPFFSTSFMERWIAKFVVFVASVLLILVFLLVVAFVQGLTYLEQLEKWLPFLRNILEIAVVSQLVTGYLPSVILHVLSSCVPSIMKLFSTMQGFVSVSGIEQSACNKMLRFTIWTAFFANVLTGSALVQFEIFLNPKELPSKLAVLVPAQASFFIAYVVTSWTSITSELTQITALFCHLWGKCAKCCKRDYSKAPSMPYYSEIPRILLFGLIGLAYFIVAPLILPFVLVYFCLGYFIFRNQLFNVYAPKYDTGGKFWPVVHNTTIFSLVVLHIIAIGVFGIKKLPLASSLLLPLPPLTLLFNEFCRNRFLPIFEAYSTESLLKKDREEQSKPDMAEFFSNLVTAYCDPALKPFQRASNSDERTAPLLASLSSSR

SEQ ID NO: 44586 - protein, 60 aa, Zea mays
  Coding DNA Sequence Number=SeqID_2807
MVVRERLFLGVVVWRAAGVAAPAYYGNPTTIGGRGFRLRKSTPVAVLEPEYELLIYIWCT

SEQ ID NO: 44587 - protein, 72 aa, Zea mays
  Coding DNA Sequence Number=SeqID_2808
MAAAPLRMHSAQVLLAILEHSRETWESLLSVHGKERTKSGQRVSWLFPWPGWLVGPLSKFVQEFTSSLFFSF

SEQ ID NO: 44588 - protein, 103 aa, Zea mays
  Coding DNA Sequence Number=SeqID_2809
  Homolog annotation: Hit_ID=Q5VPG9; Match level="QueryCoverage=47%, HitCoverage=13%, E-value=2e-09, Identity=61%"; Hit description=DNA -binding bromodomain-containing protein-like
MAADKKRNLGAGLYHLSPDDLNKVLEIVAQDNRSFQPKAKEVDLNMDAQLRVAADVWARSRPAPCVSQPVAAMYLYRISSALHYPLFERAMEEGHIGEDVANG

SEQ ID NO: 44589 - protein, 469 aa, Zea mays
  Coding DNA Sequence Number=SeqID_2810
  Gene Ontology: Mol. function=transferase activity; Cellular component= nucleus; Biological process=regulation of transcription, DNA-dependent
  Homolog annotation: Hit_ID=Q6ZC51; Match level="QueryCoverage=97%, HitCoverage=95%, E-value=1e-180, Identity=68%"; Hit description =Putative AER
  Pfam annotation: Domain name=Transferase; Domain location=7-465; Score=172.2; E_value=1.3e-48; Accession=PF02458.6; Description =Transferase family
MEGATGCGVHVVSRRMVRPFTPPPPPAVNGNGCNRPKEETEVIHLAPWDLRLLSIDYIQKGILLPKPPSEGDDNDLHLVNALRSSFARALRIFYPFAGRLTSEERADDGTVSVFLRCTGEGAEFVHAVAPEVAAADIVSSLYTPPVVWKFYPLALVLGADAAIERLPVLAAQVTVLADSVFIGMTLNHSVGDGTAFWHFFNTWSEINRATGGGADLSTPPPVFGRWFPEACPVPIPLPFRRLEDIVRRFERTEVKECFFTFSAASVRKLKARANDEMAGSATATISSLQSVLAHLWRAVCRARRLPPEHGTFYSVVVGCRGRVDGVPPGYVGNAMVFGRAEATAGEIEEKGLGWTAWLLNRAVASFDEAAVRESLERWVGEPDFTYMDNLSSAGTALVTGSSPRFDVFGNDFGWGKPLAVRSGSGNKADGKATVFEGPERGGSISLEVCIAPDALQRLVADHEFMDAFA

SEQ ID NO: 44590 - protein, 435 aa, Zea mays
  Coding DNA Sequence Number=SeqID_2811
  Gene Ontology: Mol. function=DNA binding
  Homolog annotation: Hit_ID=Q1S9R4; Match level="QueryCoverage=81%, HitCoverage=47%, E-value=1e-14, Identity=27%"; Hit description =Forkhead-associated
  Subcellular localization annotation: CTP_CleavageSite=39; ConfidenceScore=5.31e-01
MDEIKRLIPASPFSLTFSIFTSAPVFLVGHQHGTSSSPVSEAATGDLPQAGASLESLARGAVCFSRKFTLHEIQDRWNSLLYDPDISTQAASRMAEYENELSTSDPAKAHKLFNSKAKDFSFQKRKIDSVKNLYYAMRKRVRNDPRNSGDLGFLVPCSCTAIGSECICGGLPNNIEPELNSVSRYGQVGSRYTIGHSYSEMNEHAFHTKHTESMTRDGDGTSNVVYGYSDVGQLYEHHAYTANNHGNREGNNLSLKSITNFQDSMQFQQLDNNQCGNGVVDSKALVIPNHFSGSVQEPMPLQMIGQPEGSEAPGGAILSLQRSDRLALADDKDVKSEDRDPLTFEAHLDGGISGLDHATEFMDFPYFTNSEDLDILNSENLLNSPSEGIQEDLDDTALVVHGVRSTMQNLVHADEANMSCDQIDLGDVKNNVDAS

SEQ ID NO: 44591 - protein, 206 aa, Zea mays
  Coding DNA Sequence Number=SeqID_2812
  Gene Ontology: Mol. function=structural molecule activity; Cellular component=protein storage vacuole; Biological process=lipid transport
  Homolog annotation: Hit_ID=Q6H7R1; Match level="QueryCoverage=71%, HitCoverage=57%, E-value=1e-57, Identity=73%"; Hit description =Putative vesicle-associated membrane protein-associated protein
  Pfam annotation: Domain name=Motile_Sperm; Domain location=8-115; Score=137.9; E_value=2.7e-38; Accession=PF00635.16; Description=MSP (Major sperm protein) domain
MSTESGELLGIDPVDLRFPFELNKQISCTLQLTNKTDKQVAFKVKTTSPKKYCVRPNNGMVAPRSKADVVVTMQAQRDAPPDMHCKDKFLVQSAIVAKETMPKEVTGDMFTKDSGNIVDEVKLKVVYTAPSSSQSEGFEDGNLGSLSYQEETKEPKESEKIISEVNLFYINIVKLYLLKILGVVLLHLKYSYLKSDQICSVSNPFA

SEQ ID NO: 44592 - protein, 68 aa, Zea mays
  Coding DNA Sequence Number=SeqID_2813
MAGTASPSARPSSRSPTEAHGPCSQDQLNKWSLVMKEMKSYADNDIDEEKLIEKFLCLVPLRNTRRSP

SEQ ID NO: 44593 - protein, 83 aa, Zea mays
  Coding DNA Sequence Number=SeqID_2814
MEIKLGCSISLRVVLGSITTSLEGPNPVDLPCLERSPAHEKTCIRLTPVWTVSRYFLFVPDWEPRPVPAGWKISHAKELRHHK

SEQ ID NO: 44594 - protein, 207 aa, Zea mays
  Coding DNA Sequence Number=SeqID_2815
ARGPAAAKAGLCRLLETIATAAATRDLALAAAASPRVWQALLPLLRHDDERVSVAAVRAVAAICCAAEPARGSAVHHGAVPALLGCLAWASAGKGRGAAAWSALAALEALAASEAGRRAVARDPGAVRSLGVQGGTDRGCRRGAGDAGAAAAAEPVRNQGQDQGEVAAQNVQVHVKQALSLGVNAGCSWLQAFLGSCSQPGVMTDEP

SEQ ID NO: 44595 - protein, 106 aa, Zea mays
  Coding DNA Sequence Number=SeqID_2816
  Gene Ontology: Cellular component=nucleus
  Homolog annotation: Hit_ID=Q8VWL4; Match level="QueryCoverage=63%, HitCoverage=19%, E-value=5e-09, Identity=56%"; Hit description =Putative proline and glutamic acid rich nuclear protein
MGKMIVLDEEEEKTGLPQLEGKHNKFIYNSNGEIEREEVADVAETRAELGALMLRGCWGRRGGTYASTMTRMTRNKTAHIQIRYRQWLSFFDTSQNSFLGASISKI

SEQ ID NO: 44596 - protein, 228 aa, Zea mays
  Coding DNA Sequence Number=SeqID_2817
  Gene Ontology: Mol. function=protein binding; Biological process =defense response
  Homolog annotation: Hit_ID=Q2QW36; Match level="QueryCoverage=94%, HitCoverage=13%, E-value=6e-42, Identity=43%"; Hit description=NB -ARC domain containing protein, expressed
MAAAATIMFAGKLAGSSVANATISFWINKAFTCLTDYWKADGLEDVKGRVLQSVKKVQVVFDIVDPEYIKEQSSALDLWLWQFRDAVEEAEDVIDELHYDELREKAKDHKVSDWGSSSAKLKHKFVKSVKHAGVMGKTVKEFTHRGTLKRLRKVLEGLEKAATEIVAILTVTQHLKDIGSGSKRQVNFVIKDHDTGSTLTEPYFVGREEEKQKIVQWLIEAPVEASEI

SEQ ID NO: 44597 - protein, 114 aa, Zea mays
  Coding DNA Sequence Number=SeqID_2818
MASRSLHRRIGIQPACRLSGDHYGLQLLRFNDVKIELSGRMQKQFTDDRQMRQLSMVYMLLRPVQFMDEDEADLQIMLQPHELPIARESSGQMCHPVEPDQVRLSIKTAQTPRD

SEQ ID NO: 44598 - protein, 179 aa, Zea mays
  Coding DNA Sequence Number=SeqID_2819
  Gene Ontology: Mol. function=protein binding; Cellular component =signalosome complex; Biological process=red or far red light signaling pathway
  Homolog annotation: Hit_ID=Q676Z8; Match level="QueryCoverage=78%, HitCoverage=80%, E-value=8e-50, Identity=63%"; Hit description =Multisubunit regulator protein COP9
MDLSAVQAALSDKSYSTLASLCDELLLQCGWDLGVSRNSARFFWKSLPQEVKDTRPELAAVWRIGQCLWKRDYAGVNTAAQGFEWGPDLADFITAFLESYRQRIFKLLTSAYSTIRVADVAHFMGMSEEDATNYAVQNGWSLDAAAKMLTVKKPKSQTNQKLDASKLQRLTECVFHLEN

SEQ ID NO: 44599 - protein, 236 aa, Zea mays
  Coding DNA Sequence Number=SeqID_2820
MKVNELVKYVYYRLNLVINGLNSIGINKLGDEDIVWNHISLLPQHKYRSIITILHNMEDLSQMTPGLLIGKIVAFVMSQKMGKKEPTSLRPYSFICEEHKKMNGKKKVERSSSSSEEEESKYDDEEEDDDQPSISSSEDEKTVRRVRKVEDIFFKINRKEQRKRGCFACRRRTACGIFSQTKSRPRRGAKAKRSLQSKRRMIHQVKMTPHLRVISIDLHLAHLTNVLWHEMNLQMP

SEQ ID NO: 44600 - protein, 92 aa, Zea mays
  Coding DNA Sequence Number=SeqID_2821
MSGEHAKREMVTGDKPKVSGRKNEERTPSKEADDNHKEESTSSIKSHRKGDKKKKKMKKTSQVDDEDYDSDEAAQIRYFNSHAASILLASLC

SEQ ID NO: 44601 - protein, 198 aa, Zea mays
  Coding DNA Sequence Number=SeqID_2822
  Homolog annotation: Hit_ID=O65160; Match level="QueryCoverage=26%, HitCoverage=12%, E-value=1e-14, Identity=78%"; Hit description=DnaJ -related protein ZMDJ1
MPLPNATPRSALAETTPHPPQEAQRWRRHRGQGDQKIAYAKICLQRHRPLIQPRPNRCSNAPSTRFSCRRYEPTILSTYPCEISVLEMSLALRSTYIVAYAACTRANLVAIVGQKVVKGRGCGSSSEGFPRGLVQWHIEEAFSVLRCPLLQVQWYGFKIWRFIEVPDETFLFLDTILCAIESNAVLKCKSNEETISTG

SEQ ID NO: 44602 - protein, 52 aa, Zea mays
  Coding DNA Sequence Number=SeqID_2823
MAGGIELAGAKGKWLAGEENADDLWEEVCNSEIQKSEFLQGFIDQGLIWGFI

SEQ ID NO: 44603 - protein, 101 aa, Zea mays
  Coding DNA Sequence Number=SeqID_2824
MARRLQTTLSHHEHIKMFSVAAVIVDRESPTRIYGIDGGEMAAKENEEEIEVEEARTSPPPPPEEPQAGNCFYIDICGAEPDSPVIGVVCKTNSCISFLGI

SEQ ID NO: 44604 - protein, 348 aa, Zea mays
  Coding DNA Sequence Number=SeqID_2825
  Gene Ontology: Mol. function=protein serine/threonine kinase activity; Cellular component=cytoplasm; Biological process=protein amino acid phosphorylation
  Homolog annotation: Hit_ID=Q6Z9F4; Match level="QueryCoverage=91%, HitCoverage=75%, E-value=1e-114, Identity=75%"; Hit description =Putative CBL-interacting protein kinase
  Pfam annotation: Domain name=NAF; Domain location=282-345; Score =14.1; E_value=0.0002; Accession=PF03822.5; Description=NAF domain
  Pfam annotation: Domain name=Pkinase; Domain location=22-247; Score =75.7; E_value=1.4e-19; Accession=PF00069.15; Description=Protein kinase domain
  Pfam annotation: Domain name=Pkinase_Tyr; Domain location=22-245; Score=-106.9; E_value=6.5e-06; Accession=PF07714.7; Description =Protein tyrosine kinase
  Pfam module annotation: Pfam domain module=NAF::Pkinase::Pkinase_Tyr; Domain location=282-345::22-247::22-245
MVEGEAEAEAEVKKGGVLQGRYELGHVLGARQLRARPRGAGPAHRAWRGGEGARQGQVAAHGHDGADQARDRRHEARVAPQHRGAARGRTWHAATSGSSSPPSTSATRGGVFHRDLKPENLLVDEAGNLKVVDFGLSALADHARADGLLHTICGTPGYVAPEVFRNRGYDGAKADVWSCGVVLYVLLAGSLPFPKDSIAAMFIKMSRRDYRCPPWLSTEARRLIPKLLDPDPDTRITVAQIVETPWFNKPSVSRAVTAAAAEPPAEAACSAKDSGGGDKDELPETLNAFHLISLSAGLDLSPLFDVEGGPARGHREDGHAVRDAGARERRRLLFRERGAARSGGRGCG

SEQ ID NO: 44605 - protein, 43 aa, Zea mays
  Coding DNA Sequence Number=SeqID_2826
MVVPPSAGGRSACPEEERRISAPDFQIWKLLFVLADLNMYGIF

SEQ ID NO: 44606 - protein, 215 aa, Zea mays
  Coding DNA Sequence Number=SeqID_2827
MPRTPGTEPPRRDLGSGSDYFGRAPRSIKSGPLLPMPRTRRAKEEHERENEEVAPPPYSRFIGGGREGVAAALSCWPERIEGVRETTGRVVGIDSREPHSGHAICAREEWISAATADSRGRRVGCLGPSLRASLRLLGSASDLHGRGKTTRLPVISHRDHSTSAGPLSNVANRALSAINSSSLEDMVAGVTWPSILPPGWTVEWDPTSAEEEHEK

SEQ ID NO: 44607 - protein, 167 aa, Zea mays
  Coding DNA Sequence Number=SeqID_2828
MAQFCTDASREHRVQTGRATWTSRDDERCATPQTVAGQRQAVWRDGEGTNREVDGEVRAPANQLQQGPRQDVAMEEREKSRGAMSWEAGRKLEPGHDFGRWSLASELWTTQDESPDELGEMGALEPGAGKKKSELGAMSWGRTPGEGGLGREEWEAAATMGRGCRNA

SEQ ID NO: 44608 - protein, 299 aa, Zea mays
  Coding DNA Sequence Number=SeqID_2829
MQTSYNSPSAQHDIEGLLTQLLLEEARMHSSVQDMAQFCTDASREHRAQMGRAAWTSIDDERRAMPQIVAEHRQAVGRDGRARTGRSTARFGHRRTSYSRDLGKTWPWRRERKAGAPRAGKQGGSWSQGATMEDGAWPANCGRRRMPIADQRAGEQGASWAEGAGDEQRMRHDYNSGHTSHREDAIGTALRARHGQASWHDGENTGEALALASSKDREGAAKIGTPRAGSRAHAELETKRRRAGDGAQGDERPSREPATTSSRSKGGTQMAWLHAIQGRRRTQRRSDRCWELEERATGR

SEQ ID NO: 44609 - protein, 230 aa, Zea mays
  Coding DNA Sequence Number=SeqID_2830
  Gene Ontology: Mol. function=protein serine/threonine kinase activity; Biological process=protein amino acid phosphorylation
  Homolog annotation: Hit_ID=Q337H2; Match level="QueryCoverage=46%, HitCoverage=20%, E-value=4e-32, Identity=67%"; Hit description =Protein kinase domain containing protein, expressed
METVQVHLVEWLKMMVGTRRAEEVVDPDMELKPATRALKRALLVALRCVDPDSEKRPTMGQVVRMLEAEDVPSREDRRSRRGHSGNADSESKASSNRADAVSCDISEDVPSRVVISCDNWKDVDDRWLIGSNQWDECQMRINQNPRYTEELRRRGKGPGAPKAWRWPGGCEHKEKRTEEGGASTTHGKLILCNVWRGVVRASEEGGASTTHGKLILCNVWRGVVRASVRD

SEQ ID NO: 44610 - protein, 77 aa, Zea mays
  Coding DNA Sequence Number=SeqID_2831
MADRERVSQENWSHVIETLDGVAKERNDLGRKLKETGRVVTQMRLEQMGKELGESSEGSRAPSSDDQRSGSLYMRLH

SEQ ID NO: 44611 - protein, 74 aa, Zea mays
  Coding DNA Sequence Number=SeqID_2832
MPALAHGCTPDKFAEKKWKTPDRSNQRKGETLHGCTKNFNSKFEMPLETSELYTWGCDEGDGRLGLGNGGGQVV

SEQ ID NO: 44612 - protein, 217 aa, Zea mays
  Coding DNA Sequence Number=SeqID_2833
MDDQDAFFLCPPSCGGIHQRRRRHGRDTPNFNSVHYALNRKVHYDAKSKGNTLVMFVPQCASEGLGHGERRISDFGEEFPWRREPPSDCALTPLLREKPKLWVSRSGPEMRYLWLSTAAAMGLLRTARGGAVDGVVEQRLRARPRGPLFVVKVVTVAQLASSSEDLGDAGTPPATASVGRSTMMMARGGPQGSNLKRIRAPRPRSHVSDMARKWGVR

SEQ ID NO: 44613 - protein, 144 aa, Zea mays
  Coding DNA Sequence Number=SeqID_2834
  Gene Ontology: Mol. function=DNA binding; Biological process=DNA integration
  Homolog annotation: Hit_ID=O24587; Match level="QueryCoverage=99%, HitCoverage=15%, E-value=4e-55, Identity=73%"; Hit description=Pol
MENLHKLLKGEHMLGLTNVYFEKDRTCVACQVEKQVGTSHPRKNVMTTLRPLELLHMDLFGPVAYLSIEGSMDKSETQETLKRLLKQAQNEFELKMKKIRSDNGSEFKNLQVEEYLEEEGIKHDLHSLHATTKWCSGKEKQDAH

SEQ ID NO: 44614 - protein, 217 aa, Zea mays
  Coding DNA Sequence Number=SeqID_2835
MGRDALQQISLQRPRFDVVDFLICEIEDTVLDGLRARRQLLYAHYLCYIFAQLIRPPQFQGTLEASCLHFGSYRPAPEDLVPVPDPMIDTQAEDTTFHKFETQGTTVPDDDDDDFGILPPPPMPPRSHDHEARSSSAAPAAPSAIDPALAAILQSLTQHSVSAQPPVPPAPAVTTAAVAVSMTTSASTAPGVQPQFESVPAPASTTDPASETDSDPN

SEQ ID NO: 44615 - protein, 82 aa, Zea mays
  Coding DNA Sequence Number=SeqID_2836
  Subcellular localization annotation: CTP_CleavageSite=29; ConfidenceScore=5.37e-01
MALRASRALVTSRTIVSLGTAGASLLGPVCFSFVQLLMSEGDVSLRTFEVLSRVPVFLGTSGPYGHWVVEAAHGSYDSEWRP

SEQ ID NO: 44616 - protein, 482 aa, Zea mays
  Coding DNA Sequence Number=SeqID_2837
  Gene Ontology: Mol. function=binding; Cellular component=ubiquitin ligase complex; Biological process=protein ubiquitination
  Homolog annotation: Hit_ID=Q6ZIQ0; Match level="QueryCoverage=52%, HitCoverage=65%, E-value=1e-101, Identity=84%"; Hit description=Arm repeat-containing protein-like protein
  Pfam annotation: Domain name=Arm; Domain location=118-158; Score =22.7; E_value=0.0013; Accession=PF00514.13; Description =Armadillobeta-catenin-like repeat
  Pfam annotation: Domain name=Arm; Domain location=160-200; Score =22.0; E_value=0.0021; Accession=PF00514.13; Description =Armadillobeta-catenin-like repeat
  Pfam annotation: Domain name=Arm; Domain location=201-238; Score=3.6; E_value=4.3; Accession=PF00514.13; Description=Armadillobeta-catenin -like repeat
  Pfam annotation: Domain name=Arm; Domain location=75-116; Score=36.1; E_value=1.2e-07; Accession=PF00514.13; Description=Armadillobeta -catenin-like repeat
  Pfam module annotation: Pfam domain module=Arm::Arm::Arm::Arm; Domain location=118-158::160-200::201-238::75-116
MADHGVRSHDDAKNQFGGNRELRSYDGRSEARDGALGTNHTQIVTGSTTRNLSFYDKILNDKEHGVTALLNLSICDENKATIVEAGAIRPLVHALKSAVSPAARENAACVLLRLSQLDGASTAAIGRAGAIPLLVSLVETGGARGKKDAATALYALCSGARENRQRAVETGAVRPLLDLMADPESGMVDKAAYVLHSLVSSSEGRAAAIEEGGIPVLVEMVEVGTSCQKEIATLSLLQIYEDNIVYRTMVAHEGAIPPLIALSQSSSARPKLKTKVHTTSQCPHSTKKRGVADRDAAAAAESEPTHAASGSRCHSRPPGTTIPNTVYDPIRRDSLPLEEIKDVYLLDFVGPPGFVEDIAPKVERTELELLCVSKLSEVTSILDFYLTRGRNKLLTEVSTLRGNESGKDVGEVKYVPDNKAETVHKLFKFIEDGDLWRWKIPNSKAFISGLKDLDIEFNVNANNKLFDQVQHCSILGYIQGLD

SEQ ID NO: 44617 - protein, 97 aa, Zea mays
  Coding DNA Sequence Number=SeqID_2838
  Gene Ontology: Mol. function=hydrolase activity, acting on glycosyl bonds; Biological process=metabolic process
  Homolog annotation: Hit_ID=Q75UP5; Match level="QueryCoverage=54%, HitCoverage=14%, E-value=1e-18, Identity=83%"; Hit description =Neutral invertase-like protein
MERIVTRLTVLSYHMWSYFWLDFRQLNDIYRFKTEEYMHTAVNKFNVNPESIPSCGSGSWYLSMKGWPPSSDRERRAWTSASDACRSTATIRVSPPK

SEQ ID NO: 44618 - protein, 231 aa, Zea mays
  Coding DNA Sequence Number=SeqID_2839
  Homolog annotation: Hit_ID=Q9ZU48; Match level="QueryCoverage=35%, HitCoverage=11%, E-value=1e-27, Identity=69%"; Hit description =Expressed protein
  Pfam annotation: Domain name=PB1; Domain location=133-226; Score =59.9; E_value=8.1e-15; Accession=PF00564.15; Description=PB1 domain
  Subcellular localization annotation: CTP_CleavageSite=37; ConfidenceScore=5.19e-01
MHSTPQCCMEPDPWSGGQRANAKLAALGKRQTMGRVRGSALMAPGQSGGRPPAWSRGRNKQEAVEKWIAVQATERKATKRSSALLVLAGPRYGVSHTWPSRTLRPWGARWMGARRRGRLRLMCNFGGRITPRPTDKSLCYLGGETRIVAVDRHASLADVHARLSRSLLGGHPFMLKYQLPNEDLDSLISVSTDEDLDNLVDEYDRIAVTSSGSGSSRTSRIHSSGWTPGSR

SEQ ID NO: 44619 - protein, 203 aa, Zea mays
  Coding DNA Sequence Number=SeqID_2840
  Homolog annotation: Hit_ID=Q9M7N5; Match level="QueryCoverage=59%, HitCoverage=86%, E-value=6e-27, Identity=59%"; Hit description=MFP1 attachment factor 1
MATDELAHAVAPAPAGGDHSPAFSFSIWPPTQRTRDAVVRRLVETLAGDTILCKRYGAVPAADAEPAARAIEAEAFDAAASTGGAAAASVEEGIEALQFYSKEVSRRLLDFVKSRSADAKAGDTPSEEARAPGAPEAEAAQPAAYARALKAKSVSVGCYPSAFHPPFVYTDQCRTTAHEFKLQRAFAGTKCVINSYLYSDEGE

SEQ ID NO: 44620 - protein, 122 aa, Zea mays
  Coding DNA Sequence Number=SeqID_2841
MGFNDSSSSVVRFHGIGEVTGGERESSPEKRKVVASASIKFEGRGEWPVVGAGWRGASGAPFIGVRGGERWPAGLWRVEHSGSEQGRYNDGDETTRRRERDSVVLVHTHNTAGTKRCLTPLE

SEQ ID NO: 44621 - protein, 105 aa, Zea mays
  Coding DNA Sequence Number=SeqID_2842
MALLFLRPISGKENQEMPYSRDAQRPEPEIAGGRTKKARTKKQRMLLGSAIMESGRFERREHPMRRLGKSGREYDDSVPAVAIPPAPLGFIVQGGNGDLLLSRWR

SEQ ID NO: 44622 - protein, 150 aa, Zea mays
  Coding DNA Sequence Number=SeqID_2843
  Gene Ontology: Mol. function=signal transducer activity; Cellular component=endoplasmic reticulum; Biological process=vesicle-mediated transport
  Homolog annotation: Hit_ID=Q10Q55; Match level="QueryCoverage=71%, HitCoverage=77%, E-value=5e-57, Identity=98%"; Hit description=Got1 -like family protein, expressed
  Pfam annotation: Domain name=Got1; Domain location=40-140; Score =210.3; E_value=4.5e-60; Accession=PF04178.3; Description=Got1-like family
MESEIGSLECTQDLQNLLEGEIGLGLTGFGIFFSFLGIVFFFDKGLIAMGNILFLSGLGLTIGLKSTMQFFTKPKNYKGTISFGAGFFLVLIGWPFFGMLLEAYGFIVLFSGFWPTLSVFLQRIPIIGWIFQQPFVTSFLDRYRGKRVPV

SEQ ID NO: 44623 - protein, 298 aa, Zea mays
  Coding DNA Sequence Number=SeqID_2844
  Homolog annotation: Hit_ID=Q10B56; Match level="QueryCoverage=47%, HitCoverage=86%, E-value=6e-34, Identity=51%"; Hit description =Expressed protein
  Pfam annotation: Domain name=PMEI; Domain location=110-280; Score= -6.8; E_value=0.053; Accession=PF04043.6; Description=Plant invertasepectin methylesterase inhibitor
MSGMGCPGGSPSPPTTPLVAPSRGLCCTDRSHRHSLLRSFIHQLLEIREPDLSVGEARIKKYLRGRTKESKMAAAVLSVRTTTTSLLAAVVLCLCVVSLSSRGAAAARVSPGASPIVATCMTGPYPELCVAELGQRLLDVQTSIASAAPDQRAARIAGAPGQVDVRALVAVALEAASEAGAVAVSIFEGKLPGFNTGVPDFRRCLGNCTVTMRSAMQKLHGATAALHSGDTQVARTLAMRSAADVSSCTVSCRELNGDVRLIVVQSLTEFTKMLQIAVSFISKMKPLPPSAPARTATP

SEQ ID NO: 44624 - protein, 231 aa, Zea mays
  Coding DNA Sequence Number=SeqID_2845
  Gene Ontology: Mol. function=isomerase activity; Cellular component =mitochondrial inner membrane; Biological process=metabolic process
  Homolog annotation: Hit_ID=Q45W70; Match level="QueryCoverage=84%, HitCoverage=86%, E-value=1e-78, Identity=74%"; Hit description =Isomerase-like protein
  Pfam annotation: Domain name=FAA_hydrolase; Domain location=30-200; Score=274.1; E_value=2.8e-79; Accession=PF01557.9; Description =Fumarylacetoacetate (FAA) hydrolase family
MAAAAAQRLLAASTKIIGVGRNYIAHAKELGNPVPKEPVLFLKPTSSFLHAGVATAAVEIPEPLESLHHEVELAVVISRRGRDVPEASAMDFVGGYALALDMTARDLQSVAKSAGLPWTLAKGQDTFTPISAVVPKSAVTNPDDLELWLKVDDELRQKGPTSDMLFKIPFLISYISSIMTLMEGDVILTGTPEGVGPVRVGQKITAGEYKVQYSSSTLNRITGPGAIADSS

SEQ ID NO: 44625 - protein, 162 aa, Zea mays
  Coding DNA Sequence Number=SeqID_2846
MGCAVEDDVSCVEGEWYVGPLHLNDWPGEGYMIDPSIVVFFYRFVSNLELDPPVVVVTVGLDAMVVVEAVELGFLGVAGIYCGFVGEDGNVHCGIGAGCTDGDVFAVEKTIESLLLRVSASAPASGCITATTLLRRSYVPCESWAFDDYDEGFGHAIVVSSG

SEQ ID NO: 44626 - protein, 394 aa, Zea mays
  Coding DNA Sequence Number=SeqID_2847
  Gene Ontology: Mol. function=cysteine-tRNA ligase activity; Cellular component=mitochondrion; Biological process=cysteinyl-tRNA aminoacylation
  Homolog annotation: Hit_ID=O82267; Match level="QueryCoverage=80%, HitCoverage=98%, E-value=5e-61, Identity=55%"; Hit description =Putative cysteinyl-tRNA synthetase
  Pfam annotation: Domain name=tRNA-synt_1e; Domain location=79-339; Score=153.7; E_value=4.9e-43; Accession=PF01406.10; Description=tRNA synthetases class I (C)
  Subcellular localization annotation: CTP_CleavageSite=53; ConfidenceScore=5.47e-01
MAAAVVVRRAAGLIPLLSSRFGARMPLHRALSQIPPPRFCRLLSQQTKPFSASASNGAATDRTRELRLYNTKSRKKEQFRPRIPGREVGMYVCGVTPYDDSHIGHARAYVAFDVLYRYLRYLDYEVRYVRNFTDIDDKIIARANQLGEDPFSLSKRFSDDFLSDMANLQCLPPSVEPRVSDHVDEIINMIKQILDNRCAYVVGGDVYFSVDNFPEYGELSGRKLDDNRAGERVAVDERKRNPADFALWKTLRDCEEICQHQQSNTGNPLPANTLNYIQKLHDEFETSMSDDLHTSVALAAMSEPLKVMNDLLHTRKALQQLRDKALRRASITEELVVQKIEERTAARKAKQYEKSDEIRKELAAVGIALMDGPDGTTWRPSLPLPEEEAVLAKT

SEQ ID NO: 44627 - protein, 124 aa, Zea mays
  Coding DNA Sequence Number=SeqID_2848
  Subcellular localization annotation: CTP_CleavageSite=44; ConfidenceScore=5.39e-01
MAPKKATSKATTSIDDAAKAAFLAEKKGKAVLLATSLMRPSRMGQSTASDTTKITRPPQRALFTHVALRDYLGPLRQASPPEVDDIIEDGEVLGILVKDQLKLRALRIKNNHLQKQKEILAAKR

SEQ ID NO: 44628 - protein, 165 aa, Zea mays
  Coding DNA Sequence Number=SeqID_2849
  Homolog annotation: Hit_ID=Q1S3J7; Match level="QueryCoverage=53%, HitCoverage=15%, E-value=1e-09, Identity=42%"; Hit description =Proteinase inhibitor I4, serpin
  Subcellular localization annotation: CTP_CleavageSite=62; ConfidenceScore=5.25e-01
MSSSDPDDAPDGGEDSPLFRRSGGPSSGGTVGDVPVSQSLIKAASNVCFSLFVLAVLVVTVVAVTYQPPDPWLQSSAAITTSLSRVLPNSTFLVPDDSLLPTGEDFNSSTAVPAPVRDEDDAAAAVSAASAAAAGNRTCDPDLRPGFAAGGVLRAGASRRAACVW

SEQ ID NO: 44629 - protein, 537 aa, Zea mays
  Coding DNA Sequence Number=SeqID_2850
  Gene Ontology: Mol. function=acyltransferase activity; Cellular component=integral to membrane; Biological process=metabolic process
  Homolog annotation: Hit_ID=Q2QZN3; Match level="QueryCoverage=87%, HitCoverage=87%, E-value=1e-88, Identity=42%"; Hit description =Acyltransferase family protein, expressed
  Pfam annotation: Domain name=Acyltransferase; Domain location=318 -434; Score=10.5; E_value=0.0004; Accession=PF01553.11; Description =Acyltransferase
  Subcellular localization annotation: CTP_CleavageSite=56; ConfidenceScore=5.45e-01
MSKAFAKSLSQLNKALVRRLKALVVVTRAQPPAPARPTTWSDALPSPSGGGGGVAVCKVEGGLLRSSSAFPYFMLVALEGGGLARALLLLLLYPALRLLGHDTAVRAMAVVTFLGLRKDAAAFRAGRASLPRLLLEDVSAEVFDAAVAPPRRRCVCVSAMPRAMVQPFLAEYLGVDAVVAPEVREFGGYYLGVMEDESEVLRRLDVDKVIAGDKKGGGCGVFGVAGLGSSFDQLFQNHCKEVYAPTESARRRWHALPRRRYPRPLIFHDGRIAFRPTPGATLAMFMWVPLGVALAVARVATFLALPFSLSVPLLAALGMHSRVIANPASASKSLFACNHRSLLDPLYVAAAAGRKDLAAATYSISRLSEALSPIPTFRLTRDRAADRAAMHARLRSCGGLVVCPEGTTCREPYLLRFSPLFAELGHDVAPVALHSSVGMFHGTTAAGWKALDPLFLLMNPTPAYIVHFLDTVDVECGGPEAARAVANELQRRIAEALGYTCTGLTRKDKYLMLAGNEGIVDVSHGGGGAKKRTTCAT

SEQ ID NO: 44630 - protein, 77 aa, Zea mays
  Coding DNA Sequence Number=SeqID_2851
  Subcellular localization annotation: CTP_CleavageSite=36; ConfidenceScore=5.53e-01
MPKPVLALFLSFSFSFSFSFLLALSASSDPRQYSAMAESVVDFTAPFMNHGTRGSRNVTQMLILIPKIYPETSYDAP

SEQ ID NO: 44631 - protein, 321 aa, Zea mays
  Coding DNA Sequence Number=SeqID_2852
MGIKIRHTHALIGFLPIGFRVSGTHCHPYMGGLGISDQILIDVYLRSKIASKDVGGNCIHDADVNSDHPYDLVHKHAPGKLRPQRWELEGECTLRISVPGAKHLRRRRQEEGVVALGGQEEDGERKHWRPGWLMTKYAIEEEHGGGAMVLCKVYRSPRGPGSEVSSSRCKRKACVVVEEEQPAEQTQRPMKRMNEEDMFLTGNIVQPSEFTIEELLMGSSSSTPGGCSSMAIPAASADDQNTEKTDDERQPLNQEEQLMLPCAPQAENEDDVMAISFKELRGASSSSSSSPCAAQSNSPLHVQPKNVGDEIEFTLEELMGS

SEQ ID NO: 44632 - protein, 130 aa, Zea mays
  Coding DNA Sequence Number=SeqID_2853
  Homolog annotation: Hit_ID=Q75ID5; Match level="QueryCoverage=62%, HitCoverage=90%, E-value=3e-19, Identity=54%"; Hit description =Expressed protein
  Subcellular localization annotation: CTP_CleavageSite=10; ConfidenceScore=5.03e-01
MTMTSRFVAAASSSSSSCPLARLISRRGLAGAADGHGPAKVPLWKDPLSPSKWKEEHFVLASLSMWGALFYGGFKFFGGKKEDKIEWSSLFSEEMIIWQQMIRKSGKTIRKWGPDQIWGEIDIHNRASSA

SEQ ID NO: 44633 - protein, 139 aa, Zea mays
  Coding DNA Sequence Number=SeqID_2854
MMENVSIDSATSSDVEAPLGTGIIAAIISVQDTQFHTAETRRWRRQPFREPLATDLAARDPQVLSCAGRFVACGRHITAYVYVLLPASAATTDRGLAAAGVLAANALWDPPAAAAAVANFGLFFFFLGDVPSPWLARYL

SEQ ID NO: 44634 - protein, 322 aa, Zea mays
  Coding DNA Sequence Number=SeqID_2855
  Gene Ontology: Cellular component=integral to membrane
  Homolog annotation: Hit_ID=Q10HL4; Match level="QueryCoverage=67%, HitCoverage=70%, E-value=4e-89, Identity=75%"; Hit description =Peroxisomal membrane protein, putative, expressed
  Subcellular localization annotation: CTP_CleavageSite=45; ConfidenceScore=5.70e-01
MAAAAVATVASPSPAASRRMLPSAAPSFLRLPRPTSRLRRATQVAAAGGEADVLPGPGAEGEAAVPGRLEEQRDEPLAGSQLDIGGLAFQGDVGGGFTGGGAGSGASGGGGDGNKMLDRGINTAIVLAASTYALTKLLTVDQDYWHGWTIFEILRYMPEHNWSAYEEALKANPVLAKMMISGVVYSLGDWIAQCYEGKPIFDFDRARMFRSGLVGFTLHGSLSHYYYHICEALFPFKDWWVVPAKVAFDQTVWSAIWNTDLAELKFAWQDLAASTDEGDVGKFTDAVKEFDSMTRLDPWKTTLLLKAKNELKKKEEDEDDLT

SEQ ID NO: 44635 - protein, 361 aa, Zea mays
  Coding DNA Sequence Number=SeqID_2856
  Gene Ontology: Mol. function=zinc ion binding; Biological process =regulation of transcription
  Homolog annotation: Hit_ID=Q6F2W0; Match level="QueryCoverage=88%, HitCoverage=87%, E-value=5e-57, Identity=43%"; Hit description =Putative Dof zinc finger protein
  Pfam annotation: Domain name=zf-Dof; Domain location=37-99; Score =138.8; E_value=1.4e-38; Accession=PF02701.6; Description=Dof domain, zinc finger
MNICRKERAYRTAYRDSTVVICRRAEVSETQTQPPPPPEQGLRCPRCDSPNTKFCYYNNYSLSQPRYFCKTCRRYWTKGGALRNVPVGGGCRKNKRSRSAAAVAAAAAAAAAASSSRLSLNLPPEAAAAADQQAARLGFLGAHHPVASSTIDGGGPAAADYHHQQAGAAAVGMIALPRLHAPGVVGQYVPFGEWHPGTAGDVVTGGAAVSSSSSSIASSIESLSFINQDLHWKLQQQRLATMFLGAPTSAAAAAAAHADSAAHVGGAFMQMSVAESTMTMPPPPLATSWFMDSSCYALPSPTMTAHASTAAAVAAATGTCNVVNGAGAGDDDSAASNNNNNCGPGSAIQSWGDMSAFAMLP

SEQ ID NO: 44636 - protein, 516 aa, Zea mays
  Coding DNA Sequence Number=SeqID_2857
  Gene Ontology: Mol. function=binding; Cellular component=COPI vesicle coat; Biological process=protein targeting
  Homolog annotation: Hit_ID=Q9SV20; Match level="QueryCoverage=67%, HitCoverage=37%, E-value=3e-15, Identity=22%"; Hit description=Beta -COP-like protein
MENTKPCSDFGMIMADLESENPVTNVAAMNRASELIAEGKLPEPQLLRRLISCLASNLEKPDHESAVKRKVHLTLEAIREAITSNRVNIESPARGEALHAIWCCFMDEGLRCLRQHESMVRMWTVQDQLAAVKTLCATFRRSPVNIKNIRCVTTFAALMLSPYTTVARACEDALLSLPSIPGFAFAIARAYCHIIIAMPPESSPEISSAAAVLGRLNQISMATVEGDHRGFGDLAMDVLGDALANRNLPVRKKALNLVASLLTPRNVCDVLGLLNSELVVAASANLQIEYRQMLEKAIRECHSAHPGSILEFTLDPKYAVFTDCIRYTMDIMNSNPLLRVQLLKGLLRMLRHVRSPPVCAAAVWIISVFSESPVEVDDAIAALSCLFKDLLDRRKIEKQILGSEMEDEYVLPTEYYGVTTARGAQGERQQRPWLVEMDELLFVRIGLTRQADGSYDIASSSKQSSSSARHADRPPSLELTDNLAFLVHSGDSLLADFVQDMLSELVVKAQSCSESV

SEQ ID NO: 44637 - protein, 230 aa, Zea mays
  Coding DNA Sequence Number=SeqID_2858
  Gene Ontology: Mol. function=DNA-directed RNA polymerase activity; Cellular component=RNA polymerase complex; Biological process =transcription, DNA-dependent
  Homolog annotation: Hit_ID=Q6F2V1; Match level="QueryCoverage=71%, HitCoverage=97%, E-value=3e-35, Identity=51%"; Hit description =Putative DNA-directed RNA polymerase II subunit
  Pfam annotation: Domain name=RNA_pol_Rpb6; Domain location=89-142; Score=87.0; E_value=5.7e-23; Accession=PF01192.13; Description=RNA polymerase Rpb6
MADDDYNEIDMGFDSPSSFPPLWVPLFYICVTSNCDSNASYEDEPPEPEIEEGAEEELENNEDAPDDVIGGEGEDKEQEKTKRERKTTKYMTKYERARILGTRALQISMNAPVMVELEGETDPLEIAMKELRARKIPFTIRRYLPDGSYEDWGVDELIVEDSWKRQERSKSRWVVHSIAERKVCRPEHGVFGVFHATALFKTVLYQSLQRWIPCIQIILLIDAFLLWYSG

SEQ ID NO: 44638 - protein, 395 aa, Zea mays
  Coding DNA Sequence Number=SeqID_2859
  Homolog annotation: Hit_ID=O48888; Match level="QueryCoverage=34%, HitCoverage=27%, E-value=4e-73, Identity=98%"; Hit description=ATP sulfurylase
  Pfam annotation: Domain name=ATP-sulfurylase; Domain location=131 -395; Score=107.3; E_value=4.4e-29; Accession=PF01747.8; Description =ATP-sulfurylase
  Pfam annotation: Domain name=RRF; Domain location=106-237; Score= -0.1; E_value=2.8e-07; Accession=PF01765.9; Description=Ribosome recycling factor
  Pfam annotation: Domain name=RRM_1; Domain location=101-170; Score =10.6; E_value=0.015; Accession=PF00076.12; Description=RNA recognition motif. (a.k.a. RRM, RBD, or
  Pfam module annotation: Pfam domain module=ATP-sulfurylase::RRF::RRM _1; Domain location=131-395::106-237::101-170
MAEQYKMHVMNEIQWDYFSVELLDIQHVHIKLVSTDTCFIDLNLAKRLSWKLRGYVKVMIDKQMEVLRKQISIYATICEQLVEMHRILTEHEDTIAVVYHFMSSLSLHVKLEEVKSFFAQCGKVNSVRLPRHVSDKRHFCGTALVEFSEEDEAKGVFEKNLIFARELSKTVAKLAEDGKVAIRNIRRDAIKAYDKLEKEKKFSEDNVKDLSADLQKVLDDYMKKIESIQKQKEQCLLVIRYNLRRGTDENLDLKLTVWPVLEEGVLNPESTVVAIFPSLMHYAGPTEVQWHAKARINAGANFYIVGRDPAGMSHPTEKRDLYDADHGKKVLSMAPGLERLNILPFKVAAYDTKQKKMDFFDPSRKDDFLFISGTKMCTLAKNRESPPDGFMCPGG

SEQ ID NO: 44639 - protein, 72 aa, Zea mays
  Coding DNA Sequence Number=SeqID_2860
  Subcellular localization annotation: CTP_CleavageSite=52; ConfidenceScore=5.47e-01
MRDWAPSIIATALFALLCPGGVLQMPGRHRPVDLMNMKTSFPSTPSSTSCCSCSSSSSCSLTSTSDIHISGN

SEQ ID NO: 44640 - protein, 103 aa, Zea mays
  Coding DNA Sequence Number=SeqID_2861
MALAVLADRDAEGLDRPTDRPAVVRSERGQRAPVAGLGSSGRKRNIRYDAGMLWSVDWRSGSGCEAQQKCWYTAGENCELVSVIAVRVPAPTSEPVGPSVPCA

SEQ ID NO: 44641 - protein, 84 aa, Zea mays
  Coding DNA Sequence Number=SeqID_2862
MESPCCDYAASSVSGGVVFSSPTLCLPAAAVSADDKVYIWAGSDGPARSTVSPERVTWTAGWNKQLIVIWEIDRTMGLNLNLRV

SEQ ID NO: 44642 - protein, 109 aa, Zea mays
  Coding DNA Sequence Number=SeqID_2863
MANFWPTSSDASRVSGGEVVLIADLIGGGEPREVDIGDAVDVQGQTVWANSVDRPRLAESGQQLGSGYWLSLVFPVVPQPNTPLEDRDRNVPSLRYDSCVFALIPLDIP

SEQ ID NO: 44643 - protein, 575 aa, Zea mays
  Coding DNA Sequence Number=SeqID_2864
  Gene Ontology: Mol. function=DNA binding; Cellular component =intracellular
  Homolog annotation: Hit_ID=Q2HUC6; Match level="QueryCoverage=31%, HitCoverage=29%, E-value=2e-32, Identity=41%"; Hit description=ELM2; AT-rich interaction region; Homeodomain-related
  Pfam annotation: Domain name=ARID; Domain location=82-193; Score= -13.9; E_value=0.0036; Accession=PF01388.11; Description=ARIDBRIGHT DNA binding domain
  Subcellular localization annotation: CTP_CleavageSite=35; ConfidenceScore=5.71e-01
MAGNPAPPLPLKSSSSAPAFKSNASGSSRGHEPAKASSTSPAAAELPVPIPSDSLVAVLGVVGELSARGLLQGFTIPEAGGLTDEGASAVFDGMLTAFLAEHGVDPAAASCLPIPPPPLGDGKKVELVSLFLAVRARGGFSAVESWAAVAEAVGLDPTADTAVKLLYGKYLALLEQSCDKPLKQDHMVVSSGNADVLMGSKKERFLSPIKCLTSTAGSASAHLKRKRETLVGMLDWVHLVAKNPGKQGKNRAAGHKQAVVVELRRQMFADKDCLAREELVKTLNWVRLVAKSAGHPGIIGMNNRPDHLATAVELRSAMSLVGMLEWVRLVATSPAEPVVMEGNSLSYRSTALLFREQKFANKKCSRWSAASPQSGISIRPCGQADIPEWTGKRSSPYDDPRTLRFLGEPILLPGSTEHLDGASIGKGRQDDCNCQFPGSIACIRFHVAEKKIELKHELGSAYYEMGFHRIGEDLALTWTKDEETKFNSTVQDNMPASKNKLWDKLLAVLHAKGKEGLVSYYHNVFQVWRRAYQNRLAGNADSDDDSIEPGFLYFRQGGDRSRSRSAASSRKRRRS

SEQ ID NO: 44644 - protein, 173 aa, Zea mays
  Coding DNA Sequence Number=SeqID_2865
MTEKDASKIEPSLVRLRYKYKFETQFGEHCDEWLVAIEEKCNEILEDDDEDKTEAKGLEPFAMTVVTKDSRVPPIAPAAPTITEPFVVSPTATFSLTKVVEEKSESARPTLADEKGKGAMEIEEAKKTIEGDVSLGKGPFGQEFGGRRYRVHHLVGKAMCTKQMAKALGFAEQ

SEQ ID NO: 44645 - protein, 100 aa, Zea mays
  Coding DNA Sequence Number=SeqID_2866
MANWHNGRLQKQTGLILSKALKNQKNIEGEAANKEIMKLWSKVSRLRFDFDEKERILTVLENDFVESQSEVQKLTEEKNEAMELKGTMNAKITELETLNS

SEQ ID NO: 44646 - protein, 106 aa, Zea mays
  Coding DNA Sequence Number=SeqID_2867
  Subcellular localization annotation: CTP_CleavageSite=92; ConfidenceScore=5.03e-01
MAPLPFSSASVGLADSLFSSATLVRENVAVGDTTKGSVMDWGGFDTCKQNSTSGELDACNLKIAAQLRQPLSRIGCLQAESCRRDFDVLYETASTVWSQMTNSINL

SEQ ID NO: 44647 - protein, 112 aa, Zea mays
  Coding DNA Sequence Number=SeqID_2868
MAALCALSSQFRDLRMSLSQLIKGVVQLSVEHDDQVDCEPRIALTNRRRTRQVCRSKADTARCREHRRSDNHGGVTGDGSGDPSLRLLLLRKLHVVARAATVVVSVMVSSSN

SEQ ID NO: 44648 - protein, 180 aa, Zea mays
  Coding DNA Sequence Number=SeqID_2869
  Homolog annotation: Hit_ID=Q6H6J8; Match level="QueryCoverage=33%, HitCoverage=14%, E-value=8e-15, Identity=67%"; Hit description=F-box- like
  Subcellular localization annotation: CTP_CleavageSite=70; ConfidenceScore=5.21e-01
MVRVAWPGGGGGARGGGLRRRAVLVACGVGRASRGGARRGGAGARRGGARRGGATVVSGGVVARGGEESSATAGSGGGGEGVSESGSEKEKEKRRVSASWQIVEHSRAEQAAAWPIVVPLGMLFELLRNCARFCPKLQEDIEATLDEADVERQENVEVFWTKVALLLGRDVSEVRQFKQI

SEQ ID NO: 44649 - protein, 302 aa, Zea mays
  Coding DNA Sequence Number=SeqID_2870
  Subcellular localization annotation: CTP_CleavageSite=53; ConfidenceScore=5.47e-01
MAGDVARRVPRTALQGSRKARRKMAVARLGGSGRTRRRFLGTALIRRLRLRCVAALYRRALRRLRAACASDAVQRVLESAALVGAVRMDAGPPAHSPTLPPSRSWFPPPCGRHTSCRSRASPELLAGHGACSRADHSTGAPCGRTAPVFRSGLRSSVLGTAPCDLASPLRLCALRLRSSMVGSSRPELWAHVVAASSAMASSAKPSSAARNAERAREGQQCDGRPRRDDRRARAGTGFSVGRAFRASPARMGRLSAVLGWCRQPVGRHGPARLSGRAQTGRAGTGSGWAGPCRPFGHLYLRL

SEQ ID NO: 44650 - protein, 151 aa, Zea mays
  Coding DNA Sequence Number=SeqID_2871
MPFKDFLDCLTNTHLKVLILSKALKNRKNIKGEASHKEIVKLRSELSKLCFNYVEKEKMFNVLGEDLVESQSELKNLIEEKNDVVEFEKAMHAKVLDLEILNLQQARSRERNFVDADIVRAMKWIDGEVVDFQGVGYDHVKAYLDPNFMVP

SEQ ID NO: 44651 - protein, 388 aa, Zea mays
  Coding DNA Sequence Number=SeqID_2872
  Homolog annotation: Hit_ID=Q7XDY7; Match level="QueryCoverage=80%, HitCoverage=81%, E-value=1e-36, Identity=33%"; Hit description =Expressed protein
  Pfam annotation: Domain name=WRC; Domain location=170-215; Score =59.6; E_value=1.1e-14; Accession=PF08879.1; Description=WRC
  Subcellular localization annotation: CTP_CleavageSite=16; ConfidenceScore=5.31e-01
MRIRKSASRLLGSAYSASAASPVDSTPPFSPLPPPPPPPPPHLAPCSAPEYCGGLGFSSPSSSSAEPCELSRSPWDLIAELSVSDPQVEDDIVDKYFVHVATRSSWLFSATVPAASAKKKSSSTSGDSKHKQQLRRDAVNKSATSKEKVGEANKKAKVKKEEEGQDGDRGARVWLCKKNDGKRWHCNRPVSQPNTLCEYHSVQKRSYLEAPSVAKLEEAPAPAPAAAPKSSARNKPRKKKPGSDVSATEGFYYYAGFGPFRSTKRQCKSGGTNEPAPAKEDDEGNQAKHASPGQKAEVDEGHHDDTTTNQTATAAYGDTSSCEDDIAGTIAGVDEGSSDDDDFDGLGISGHSMNGNGDPKASSGDVKTKIPWKRWRKPVKARSLKSLM

SEQ ID NO: 44652 - protein, 94 aa, Zea mays
  Coding DNA Sequence Number=SeqID_2873
  Subcellular localization annotation: CTP_CleavageSite=24; ConfidenceScore=5.03e-01
MAAAGAASSSSSSEVPIAARTCVSVGEVAVGAVATSSGDRVATDCGVCAICLDRIALQETALVKGCTSDRVTRLLGVSGRDREVGRAGGGGSLH

SEQ ID NO: 44653 - protein, 92 aa, Zea mays
  Coding DNA Sequence Number=SeqID_2874
MATPASAPAPLNPNLVSGDPPSLLLQQQQEEEVSEPVPEMASTPLTTSIDPTPPVARRARAMTPRLSDGGNGRGDASAVHRAAALERERCEE

SEQ ID NO: 44654 - protein, 131 aa, Zea mays
  Coding DNA Sequence Number=SeqID_2875
  Homolog annotation: Hit_ID=Q8LR61; Match level="QueryCoverage=43%, HitCoverage=18%, E-value=4e-18, Identity=61%"; Hit description =Putative WD repeat domain 45
  Subcellular localization annotation: CTP_CleavageSite=37; ConfidenceScore=5.31e-01
MLAPTCSSAGTPQTLSNPKGLCAVSQQPGSIVLVCPVAQKGQDGRLIATASTKGTLVRIYNVAEGNLLQEEYGKIKIDVRIKENGTQKHRESLGQTTTIYLCVRCKNLKGPEGTMVLSHLIRFGFVKDYTV

SEQ ID NO: 44655 - protein, 146 aa, Zea mays
  Coding DNA Sequence Number=SeqID_2876
MAVCHTRVSGHQGLSANIHQSLPESPHEHTAKAFQKLPLPEYLISVRLLSNALRSLATATATPDANGRPSSLLVHYVRLDIFYSLSIFAAVNVDLALALLLDPDNNESACVGSWFVIDVSFAVALLPNFENRMSIHIGSERWSYGK

SEQ ID NO: 44656 - protein, 92 aa, Zea mays
  Coding DNA Sequence Number=SeqID_2877
MACHGIHISHSLHSLDCNLADGEYVLIPEHGAVHEENQEPAPEPATEDLPAAPAIEGKPRYGGYKCGHCTAAAGVNGALYAKAVRYRIWLMV

SEQ ID NO: 44657 - protein, 1519 aa, Zea mays
  Coding DNA Sequence Number=SeqID_2878
  Gene Ontology: Mol. function=single-stranded DNA binding; Cellular component=nucleus; Biological process=nucleotide-excision repair
  Homolog annotation: Hit_ID=Q10Q89; Match level="QueryCoverage=93%, HitCoverage=92%, E-value=0.0, Identity=55%"; Hit description=XPG I -region family protein, expressed
  Pfam annotation: Domain name=XPG_I; Domain location=913-1001; Score =157.0; E_value=5e-44; Accession=PF00867.9; Description=XPG I-region
MAVGNDDNLDSAAMELNRGDMDEMMDGVASQRQGGTVAVTTLGFTVVVGQDGCGPDTAAQHLAKADADQTQQHDTHTYAPEEALGFTRCGGRAEPAGWHEWLKARKLEELAEQIRSDRAKHDAKGKQVESSNGGETEKTSQNQIGDTNNSEGNVASINQEKVDGMLAASLAAEEDTDFTDEGTHHLTSAPLPEGDEIDEDEDDDEGMIFLLVFFPRTRRRTAHHYIKKRKRSKIDPTSYKAPLRWPKTKPMTTGDIDPAVLASLPPSMQLDLLVQMRERVMAENRQKYQKIKKEPAKFSELQIQSYLKTVAFRREIDQVQKSSSGKGSGGVQTSKIASEANREFIFSSSFTGDKQMLAQRGEKEHNVENTRSKKEIHSSVFASNPTSSLGTMKPPNSKTLSDFGPDVETYRDERGRIRVSRVRAMGIRMTRDIQRNLDFIKENEQVKSKGQTQTNFHNGSTGNEEPPDFPEHLFESNKLQSSCSPDVDLSETDRDNHQTSSQIGTDIISESSCYGNKEAIEISFSVDQTEVKDGDEDIFLQLVSGMAPNNIFSGNNCLVKKMEESVDSECIWEDGVIEAGTSPVKIDMKDHKSSLPENCSDDEMEWEEGDSFVPGVASSSEHNPCNAPKGDLEEAALVQEAIRRSLEDFEKKASENVSTGDIQASVEDRSLQFSNNVPKISESLGENDSHSGVPVVDEINNETRTEINYDKDDMVQGTGLLGTERQESESQPPLVNNDWHADMHRAHPLGSVPPCTTFTSDLAEKPSVSAETNGEDVMIFTTKIPGTALGDCDKTSNLNIMNSDQSKCSKDIASTGESLSHQKNLLIDELLAVTAEQKENATQVDLKFATSEVDYTQICGNDDNHTISASYVDAELSRLRQEQIYLGHERRKLESHAESVSSEMFAECQELLQMFGLPYIIAPMEAEAQCAYMEINNLVDGVVTDDSDVFLFGARNVYKNIFDDRKYVETYFMKDIESELGLSREQLIRMALLLGSDYTEGVSGIGIVNAIEVVHAFPEEDGLQKFKEWIESPDPSIFGKLHMEISGRSKKRKLDENDSDGKGKGLEPECIQGSDDKQSSNEDEHVKEIFMSKHRNVSKNWHVPATFPSEKVVNAYISPQVDSSTEPFSWGRPDLGLLRRLCWERFGWGKEKADELLLPVLREYNKHETQLRMEAFYSFNERFAKIRSKRIKKAIKGITGKSFLDADESEQDNPSTSKTIKKKEASSSSHARGREKRKNDYGVMGSQEDNIIDNTNSLAETVENTRENNNTTKIKRGSSCGRPKGRGRSRTTAGSDATINQEDYEIEYSTSASDEDSCKRHSNSYGSEGRALRRSSRKRKQVTYMEDGHEAYGNDVPMHQNDENNPGQPAAAADVAGEDTGFNIYHQDTSELNSSQMHTGAGITEDINEDSQRFELREDNQVDSTPKDYLFNGGGFCMEGEGDEQEPACDQSGAEVEPGPSGPCGAMDEVSESASISTAMECTENARMEARGASSSQQRRKASRGLSAMPTLIKRRRKS

SEQ ID NO: 44658 - protein, 147 aa, Zea mays
  Coding DNA Sequence Number=SeqID_2879
  Homolog annotation: Hit_ID=Q94HS0; Match level="QueryCoverage=63%, HitCoverage=11%, E-value=5e-31, Identity=64%"; Hit description =Putative salt-inducible protein
MAFKPNTITLNVFLSHFCKQGFGNRALMWAEKLREDSFVFDGATRNIIDGARREMEDDPQANNEDIGRCMFLEFLMFMTYEAMLNSRSSKATHMLTEKSFDPASSSMIRKEVKMRLAVIACLLLNQTFLIDPKYPSFCLINPCYERL

SEQ ID NO: 44659 - protein, 491 aa, Zea mays
  Coding DNA Sequence Number=SeqID_2880
  Gene Ontology: Mol. function=calcium ion binding; Cellular component =mitochondrion; Biological process=embryonic development ending in seed dormancy
  Homolog annotation: Hit_ID=Q94HS0; Match level="QueryCoverage=56%, HitCoverage=71%, E-value=1e-104, Identity=35%"; Hit description =Putative salt-inducible protein
  Pfam annotation: Domain name=PPR; Domain location=123-157; Score =33.6; E_value=7.1e-07; Accession=PF01535.11; Description=PPR repeat
  Pfam annotation: Domain name=PPR; Domain location=158-192; Score =20.1; E_value=0.0082; Accession=PF01535.11; Description=PPR repeat
  Pfam annotation: Domain name=PPR; Domain location=193-226; Score=5.8; E_value=1.5; Accession=PF01535.11; Description=PPR repeat
  Pfam annotation: Domain name=PPR; Domain location=21-55; Score=45.3; E_value=2.1e-10; Accession=PF01535.11; Description=PPR repeat
  Pfam annotation: Domain name=PPR; Domain location=227-261; Score =29.4; E_value=1.2e-05; Accession=PF01535.11; Description=PPR repeat
  Pfam annotation: Domain name=Peptidase_M22; Domain location=226-425; Score=-21.3; E_value=2.7e-05; Accession=PF00814.15; Description =Glycoprotease family
  Pfam module annotation: Pfam domain module=PPR::PPR::PPR::PPR::PPR::Pe ptidase_M22; Domain location=123-157::158-192::193-226::21-55::227 -261::226-425
MPEARRLFDQMAQVGIQVNTITFNVWIDGYAKSGQMDQASAAYREMQARGLVPDSCTFNIIVARAHKFGYAAQLVHDHDMFSSHMSADGLDMLVCRLCWDHRLDDAWELLLGAIEQGVPLRVTGFNALIAAYSKEGLHEEASELYRIMNKLGLAPSSSTFNYLIMGLCNQVRLDEAQLILEHMVIKGYCISTSFTISLDAYFRDGNAVGALKCWDDMGKIGLQTDFIAFSAYINGLSRLDYVNEAYQAFAEMTSRGIVPNNITYNSIISTLCSQTLSYSYFANSYNQPTELIFLHTADEHLLYHGQLAKKGEQFIDVPYVVKSMDVSFSGILSFIEAAAIEKLKNNECTPADLCYSLQETIFAMLVEITESAMAHCDSKDVLIVGGVGCNKRLQEMMKIMCSERGGRLFATDDRYCIDNGAMIAYTGLLAYAHGMTTPLEESTFTQRFRTDEVHAIWREKEMPVLKNTHSDAIAEVSIDEASMATPIVIDY

SEQ ID NO: 44660 - protein, 197 aa, Zea mays
  Coding DNA Sequence Number=SeqID_2881
  Homolog annotation: Hit_ID=Q9AXB0; Match level="QueryCoverage=22%, HitCoverage=11%, E-value=6e-10, Identity=72%"; Hit description =Putative uroporphyrinogen decarboxylase
MERLISVGADLIVRSLLVAELVMFSSCAEEPLLVRAARGEDGIPHWMMRQAGRYMAEYQASAKGKLTFGHQVRGASSCEVLRNSFQILTASSILGTSPLRGCNWSSIVDHFTLTLIPLMKYVLVVLQANDNGQGPCTVSLSVLEKEGVVFSVRPTKKSWKNISNISCGEKKLWENEYSEDMGTRARTVCFKVLRHQF

SEQ ID NO: 44661 - protein, 162 aa, Zea mays
  Coding DNA Sequence Number=SeqID_2882
  Subcellular localization annotation: CTP_CleavageSite=42; ConfidenceScore=5.32e-01
MGSKIQHSVGATQSKSETTVVAYFTAVPQTADQFALTVRSALQGMRSGGSGVDLGGLVNGRGELGEEVGAEQRAVHVEQHRRDGSAVPGAEAAVAPMKGGRRRGPPAPDAARTKQEAELADLGKLQEVKERGTASDAAPYSGIIQRTHWKWRSWGGRMREWG

SEQ ID NO: 44662 - protein, 242 aa, Zea mays
  Coding DNA Sequence Number=SeqID_2883
  Gene Ontology: Mol. function=transition metal ion binding; Cellular component=endoplasmic reticulum
  Homolog annotation: Hit_ID=Q6T7C7; Match level="QueryCoverage=55%, HitCoverage=79%, E-value=8e-56, Identity=77%"; Hit description=Fiber protein Fb38
  Pfam annotation: Domain name=Cyt-b5; Domain location=59-156; Score =65.5; E_value=1.7e-16; Accession=PF00173.18; Description=Cytochrome b5-like HemeSteroid binding doma
MARGARFLLVLALLAALLAVVLQLYRHRKPSAEADKAFAISGNQSSLRRVHRLIAYVRLWMVEELSVYNGTNEELPILLAILGSVFDVTKGRSHYGPGGGYHHFAGRDASRAFVSGNFTGDGLTDSLQGLSSSEVNSVVDWRKFYFERYIFAGKLIGRYYDSEGNPTKYLKGVEVKAKRGTQLLEKQKSDEAKIPGCNSKWSQQEGGEVEDCSRRCKAAHRVRPTKAFFHGHNSTKLNQTDP

SEQ ID NO: 44663 - protein, 448 aa, Zea mays
  Coding DNA Sequence Number=SeqID_2884
  Homolog annotation: Hit_ID=Q10BV4; Match level="QueryCoverage=36%, HitCoverage=6%, E-value=7e-43, Identity=55%"; Hit description =Expressed protein
MSRQDRHQWPRPNHGYDPRAAAAAAQWYGAASMLFPDPGAAALHGINPYGFAPNPFFNNFLPQNSAALAAYQLQQQQAHHFASHAYHQAPTGNTMHRSTKPAAAAKPAPPPGNQQAVLDRAQEAARKAREELVKGGDGVTAWKVAQAVLVALKADSWDSLGVQPQDVPLLRDLFLIEGKAKQTEVSAAKLRANMSGSGNSSQEKDLLKNASFHTHKKALDKRFISLTNRIKELPGINKHIHFDSTDDETNSCTGSEDGKSDGNENENECSILDKKDGDKRVNSCPYPSKTEELERLGLKSEINKRQSLENSKPRDSGKKGKKHILDQEAHTNLTRKHILPLTSDATARYVGEAQCVLGNAKWLPISMAVVSALVGGLRYSLVVFPMVGEDTAAGFLGGDTRPVERAGDGAASRHHDAIGGGVNGAPGSFSLRQRTERLAGRFGATVET

SEQ ID NO: 44664 - protein, 195 aa, Zea mays
  Coding DNA Sequence Number=SeqID_2885
MMLGGGAGGLRTLEDFKAHDPFQDSKRRVPNGPDPIHNSLRYGMKGMFLFHQFLTGGMQSKSNHTSPIPPCITCRNKDCAAVSVPASASASASNPVSNPAEEPASQDDRRDEHDVGSAHAEAWKLPNPKRPAIATCWERRLANRRCVALHTCIAWRKRNRQEVHRGVVGLAGMLGVTRGRWPALSSSKHCYLRRF

SEQ ID NO: 44665 - protein, 386 aa, Zea mays
  Coding DNA Sequence Number=SeqID_2886
  Gene Ontology: Mol. function=nucleotide binding
  Homolog annotation: Hit_ID=Q84T10; Match level="QueryCoverage=96%, HitCoverage=11%, E-value=2e-38, Identity=48%"; Hit description =Unknow protein
MAESGTHAEQIETFIVNNQNVPELPEHEAIWSFSSLSAAKHGSANQGGADTQGVDFQPVHEFSIPNHQKAQVMVSSWPLNYWRTAPVFRTPLINQHASMQEAKVNDAGPSSNLNMPAMYGHTEDSLLSADLERDWIIEENPRTETTLFGDSSSEILDEPQMVMSAEPFHAPAYLNLEAGNSSPTVHVELTNSDEKLANLAEDKNRRLSDASQLRTGSNPMVDVELTNFDEKLANLAEGKNQRLSDASQLRTGSNPMVDVELTNFDEKLAILAEDKNQRLSDANQLRTGRLGEELVEKYLAKQLGSNNVRWVNNRIETGLPYDIVITHPEGFTEYVEVKTTVSSRKDWFDVSAREWQFALEKGDSFSIARVILGRGICPAACSPAAR

SEQ ID NO: 44666 - protein, 47 aa, Zea mays
  Coding DNA Sequence Number=SeqID_2887
  Subcellular localization annotation: CTP_CleavageSite=17; ConfidenceScore=5.21e-01
MSSVGSLRIQPPSIALNRSSVSSNFGFPPKILKNTVARTSPWPAQFR

SEQ ID NO: 44667 - protein, 398 aa, Zea mays
  Coding DNA Sequence Number=SeqID_2888
  Gene Ontology: Mol. function=structural constituent of ribosome; Cellular component=intracellular; Biological process=translation
  Homolog annotation: Hit_ID=Q2R1Z9; Match level="QueryCoverage=91%, HitCoverage=91%, E-value=4e-77, Identity=82%"; Hit description =Ribosomal protein L4/L1 family protein, expressed
  Pfam annotation: Domain name=Ribosomal_L4; Domain location=96-248; Score=22.9; E_value=2.5e-07; Accession=PF00573.12; Description =Ribosomal protein L4L1 family
  Subcellular localization annotation: CTP_CleavageSite=65; ConfidenceScore=5.22e-01
MRALARAASLLRRAAGSAPTTASLYHPPRNVGPCLVKNLPGFFFNGYSTLLAPPNEVLIPPELLSSRTVWTPDRELGQYEDLVARVTNFHNEDKGFMVLDGDVFDVPIRKDIVHRVGTHSTKTISEVSGTGRKPYPQKGTGKARHGTLRGAQFRGGATMHGPKPRSHAIKLQKKVRRLGLKIALSARTAEGKAVLLDGALQSSYIPRIMFSRQVQLLPDFTSNPGAGVCFSTVQPLPCHPEIAAAQEIAGCSHIPDGAGSGSLPQISISFDCCRYGGSLTWLGRIVCKNVKNIYLKSVGWIFELRDMLLIFEDLEVPSHKTKNIVQYIRQMDDSKKVLLVDGGDIDKKLKLATQNLHYVNVLPSIGLNVYSILQHDTLVMTRAAINRIVERMHTPINR

SEQ ID NO: 44668 - protein, 94 aa, Zea mays
  Coding DNA Sequence Number=SeqID_2889
  Subcellular localization annotation: CTP_CleavageSite=42; ConfidenceScore=5.05e-01
MTPSTYLDVRDIFPPVSRVSFALLSLMFLASELMLLRFIFLLLMVFQGMTQRTCIPKGSTFSMLPCKTPNDEATTKENFVASGTTHTKVIRLWN

SEQ ID NO: 44669 - protein, 95 aa, Zea mays
  Coding DNA Sequence Number=SeqID_2890
MAEIIGAESHAPPPLPLYRDWEEEEVVKGWSTSAVAVGAVVNVTRGRAGVANKKRLSKQLSMKEDHQGGLVGRSGSGRYNGRRSSMRLNRTRTTG

SEQ ID NO: 44670 - protein, 91 aa, Zea mays
  Coding DNA Sequence Number=SeqID_2891
MVNMVFGKHSSMWLLDHFVVLFNIVAWAFHIVVKNKMVLNNKSPTLAPTSGEPFFDYLRQVLTFVMPPKKASAPGAAALQPLDLNQETLSL

SEQ ID NO: 44671 - protein, 268 aa, Zea mays
  Coding DNA Sequence Number=SeqID_2892
  Pfam annotation: Domain name=DUF1685; Domain location=100-207; Score =71.8; E_value=2.3e-18; Accession=PF07939.2; Description=Protein of unknown function (DUF1685)
HERQLSEHDSCSVLQGRKKGDDGTSLNQQSLVIYIIIESRTTKAMGSNGRDHRRGVPRPPPLPLYRDWEEEEVVKAGRRRQSPLAQSSTSPAAAAGVANKKRLSKQLSMKETTREVKWEKRKRQIQRQRSSMRLSEADDRAGGSTAVCPVDGEASSSAERVAHWFDEQKGGQDLCDTLPALDFYFAVNRQVSEPRMSFPTSTSSGPSLSATKSSPNLCGTPSPGSPGAHSSNALESWKICNPGDNPLLVKTRLRHWAQVVACSVKHSS

SEQ ID NO: 44672 - protein, 57 aa, Zea mays
  Coding DNA Sequence Number=SeqID_2893
MAVMGSTSEKMYLYQISTTKMFVCDLYYLIPRFWLHGNTEKCNVLVMTHLRSSKKVH

SEQ ID NO: 44673 - protein, 132 aa, Zea mays
  Coding DNA Sequence Number=SeqID_2894
MSTSVNATKDSLHLDRLICACSDQTGMGIVTLTRFRSGLVQLTLGMYLVSLEDDARVLATAGEVADDELTRPEPSARLESTRGRMFANEIEGKGLFVIVSDTGFFEPTIQGDEPSKFCCFSTKVVPKQEEEA

SEQ ID NO: 44674 - protein, 72 aa, Zea mays
  Coding DNA Sequence Number=SeqID_2895
MALGTLVIDTKGLLLPHVNNSQGEKQWAFIGGGSSERGEILCGMFRSWLLDFFPGNSLLRDEDILSVSEVAI

SEQ ID NO: 44675 - protein, 164 aa, Zea mays
  Coding DNA Sequence Number=SeqID_2896
  Homolog annotation: Hit_ID=Q8SA86; Match level="QueryCoverage=93%, HitCoverage=16%, E-value=1e-31, Identity=43%"; Hit description =Putative retrotransposon protein
MATPKIFALKMKNTEEASSESKTFGLRHLGGQELTEEDIFELKEFAIADSYQPGSILFGSIDEEILGCIPDHAGAKIVNTPSKSIGFPKLESDLSNYHKQHITGSLVYSNFKSFLLSKALKLQQEGEDRKTEFIIPGLEKKVEDLESLLKEKDARIESTEANLA

SEQ ID NO: 44676 - protein, 63 aa, Zea mays
  Coding DNA Sequence Number=SeqID_2897
MSHLGAELGVAWRGLWRAGRLKWRAWVSGEVKRHGQNARESGAMRNGTGKVFNPNSNQVSNSN

SEQ ID NO: 44677 - protein, 87 aa, Zea mays
  Coding DNA Sequence Number=SeqID_2898
  Subcellular localization annotation: CTP_CleavageSite=37; ConfidenceScore=5.45e-01
MASRRPCPAPAHRRAAVAPPSPASSRSPGPGVASVVRAEPRRDPCTHGAPGKLAAPTAHGRGARPGVLGSTAPAQRGFGSRGRGAPA

SEQ ID NO: 44678 - protein, 128 aa, Zea mays
  Coding DNA Sequence Number=SeqID_2899
MSLTPSKNVPEAQAEESVLAAGATASKAEVSSLNQSEDSMDIDFNVDNTTIRPTKPSHVDFEKSKIKEGHIEVSEGDASDAEPGLVRLRYKYRFKDEFGEPSDGRLDYIEVKCNEILEPRLYNRPSGM

SEQ ID NO: 44679 - protein, 73 aa, Zea mays
  Coding DNA Sequence Number=SeqID_2900
MVLDSLSSPHRRSQNIFFVSSSKKPQSSRDDSCDLGGIRCVQWFDRRGTEDRVPGKISAATWKVEIPLTSESH

SEQ ID NO: 44680 - protein, 245 aa, Zea mays
  Coding DNA Sequence Number=SeqID_2901
  Gene Ontology: Mol. function=transcription initiation factor activity; Cellular component=transcription factor TFIID complex; Biological process=transcription initiation
  Homolog annotation: Hit_ID=Q10IZ0; Match level="QueryCoverage=73%, HitCoverage=32%, E-value=3e-44, Identity=64%"; Hit description =Transcription initiation factor TFIID component TAF4 family protein, expressed
  Pfam annotation: Domain name=TAF4; Domain location=10-235; Score= -16.7; E_value=3.9e-05; Accession=PF05236.4; Description =Transcription initiation factor TFIID component TAF4 family
METSDGASSMKRVIDHRLRGMMRISMNQFGFMSRSKKQKVSGGFHEQSIDQLNDVTAVSGVNLRRVEVEKSRHHFYPLSSDVRSHIMRVNREAREQWEKKQAEDAERIRKQNDGDGNANVDLEKDRIETRGLSKHAKTYKEDDDKMRTTAANVAARVAAGGDDMLSKWQLLAERNKQRSEGGDGSSGSVPGNMLQHRPSLKSGKDLREEHEVEKRGYSTMLGSGKPDLLSLVFLLLNKSVIKVVP

SEQ ID NO: 44681 - protein, 54 aa, Zea mays
  Coding DNA Sequence Number=SeqID_2902
  Homolog annotation: Hit_ID=Q75KB8; Match level="QueryCoverage=72%, HitCoverage=83%, E-value=2e-12, Identity=87%"; Hit description =Expressed protein, having alternate splicing products
  Pfam annotation: Domain name=DUF1909; Domain location=4-44; Score =8.9; E_value=0.0013; Accession=PF08927.1; Description=Domain of unknown function (DUF1909)
MGGGNGQKSKMARERNLEKNKGAKGSQLETNKKAMSIQALDSHPMLGIGIRTEP

SEQ ID NO: 44682 - protein, 177 aa, Zea mays
  Coding DNA Sequence Number=SeqID_2903
MWGNKSTRFHEAYTMQGDPNAVVAPGGEPMLASTLFLQWTNKAVAGHNANGFVRWTTDYVKNRMTLNRLSGPTHALGRRIHGEDRSAPLDPLAAQPEQLQARPLSQPEHNRPPLLPLYLGLKGVDAGGCELVLGASDLLLTVRLQQLLDIRLAVSWLLLPLEKGQPNDLFSFSLEEC

SEQ ID NO: 44683 - protein, 552 aa, Zea mays
  Coding DNA Sequence Number=SeqID_2904
  Gene Ontology: Mol. function=RNA-directed DNA polymerase activity; Cellular component=nucleus; Biological process=RNA-dependent DNA replication
  Homolog annotation: Hit_ID=Q8S461; Match level="QueryCoverage=98%, HitCoverage=31%, E-value=0.0, Identity=79%"; Hit description =Putative prpol
  Pfam annotation: Domain name=Retrotrans_gag; Domain location=121-192; Score=4.3; E_value=0.06; Accession=PF03732.7; Description =Retrotransposon gag protein
MREASVYTGRTRNTAPAAPGRLGNEHHHRDRRTHLDERVRRGYHPRRGGRYDSGEDRSPSPEPPGPQAFSRAIRRAPFPTRFRPPTTITKYSGETRPELWLVDYRLACQLGGTDDDNLIIRNLPLFLSDTARAWLEHLPPGQISNWDDLVQAFAGNFQGTYRTELPNITDSDVIGAFLAGTTCRDLMSKLGRKTPTRASELMDIATKFASGQEAVEAIFRKDKQPQGRPPEDAPEASTQRGAKKKGKKKSQAKRDAADADLVAAAEYKNPRKPPGGANLFDKMLKEPCPYHQGPVKHTLEECVMLRRHFHRAEPPAEGGRARDDDKKEDHQAGEFLEVRDCFMIYGGQAANASARHHQQERREVCSVKVAAPVYLDWSDKLITFDQADHPDHVPSLGKYPLVVDPVIGDVRLTKVLMDGGSSLNIIYAETLGLLRIDLSSVRAGAAPFHGIIPGKRVQPLGQLDLPVCLGTPSNFRRETLTFEVVGFRGTYHAVLGRPCYAKFMAVPNYTYLKLKMPGPNGVITVGPTYKHAFECDVECVDYAEALICNTRF

SEQ ID NO: 44684 - protein, 282 aa, Zea mays
  Coding DNA Sequence Number=SeqID_2905
  Homolog annotation: Hit_ID=Q10CD0; Match level="QueryCoverage=69%, HitCoverage=53%, E-value=7e-42, Identity=51%"; Hit description=IQ calmodulin-binding motif family protein, expressed
  Pfam annotation: Domain name=IQ; Domain location=112-132; Score=14.7; E_value=0.33; Accession=PF00612.17; Description=IQ calmodulin-binding motif
  Pfam annotation: Domain name=IQ; Domain location=138-158; Score=7.0; E_value=7.4; Accession=PF00612.17; Description=IQ calmodulin-binding motif
  Pfam annotation: Domain name=IQ; Domain location=90-110; Score=16.5; E_value=0.097; Accession=PF00612.17; Description=IQ calmodulin -binding motif
  Pfam module annotation: Pfam domain module=IQ::IQ::IQ; Domain location=112-132::138-158::90-110
MGISARWLKSLVGLRKVGRQQQQRRKDDADVGRMIQHSQDDNSIAAQEIPEVSYGNDPPEDDSNVPSCFEPARSSAHMPFCQTEEAQKEIWAATIIQTAFRAFLARRARRALKGLVRLQALVRGHIVRKRAATTLRCMQALVRVQARVRARRVRMALENQTDRQNTSPEHTIEARVREIEDGWCDSIGSVGDIQAKLLKRQEAAAKRERAMAYALAHQTRLAGLCGSSALEPGYPNSLSHPYRYSLSIPSSQNRATKVPLTSCFFTAGADGVNLSLCFLSGG

SEQ ID NO: 44685 - protein, 132 aa, Zea mays
  Coding DNA Sequence Number=SeqID_2906
MESKSTNVSNSIKEHNGGDSTPSRDAPGDLPTQSALRSPPGGGSRALRGGRRPCAIADHLAPGADRSNVHRECAAPASKPQTVRAAAEGTAKRYTPNEAAQGKYDCSNEGPRYGGRQGCTVRDKCTCDKEVA

SEQ ID NO: 44686 - protein, 167 aa, Zea mays
  Coding DNA Sequence Number=SeqID_2907
  Gene Ontology: Mol. function=nucleic acid binding; Biological process= DNA integration
  Homolog annotation: Hit_ID=UPI00004C1778; Match level="QueryCoverage =91%, HitCoverage=24%, E-value=9e-60, Identity=73%"; Hit description =UPI00004C1778 related cluster
MTGFAEPLKPEKFSGMHFKRWKVKVILWLNAMNVFHVNQGKPKGVLTPEEEKKYDDANPIFTGAILSVLVDRLVDANMQYIDEKELQDALTTKYVASDNDNDLYVMESFHDYKMANNHSIVEQAYAIQCIAKELDQLKIVLLVRFVGGCIIAKVSFYIEELRHISEI

SEQ ID NO: 44687 - protein, 464 aa, Zea mays
  Coding DNA Sequence Number=SeqID_2908
  Homolog annotation: Hit_ID=Q6F3B5; Match level="QueryCoverage=97%, HitCoverage=55%, E-value=1e-94, Identity=59%"; Hit description =Expressed protein
MRSTLGLNDCKLLCINSSTEAGGSNADNSWLPYKALVLNNHDGSCILSVDDLNEIKDFMQDFVSNHIIPYMEQKIRVLNQQPQQERVLEIRSRTCGGEKEMMSQKLQMGQCKYTFTSIESQIRVLGDFAFMLRDYELALSNYRLLATDYKLDKAWKRFAGVQSMGKKFDVYKLQLPVFNMSSLKVLHEDHRTYASHADVGVSESTWQELEEELIPSSSIVKTNWLDTQPMRKYKDSCICVAGEAVKLSVELKNPLQIPVAVSGISIICQLSSTLDALSSDVSGLDLDGGEDKVNTEPSISMLETDGDKFTLSKLDIVLGGGESKRGLPKLTGSIDRMPTKAFAGDLKLLTLNLRNHSEYAVKGIKMKLSNPRFLIPGDSSDIGLKFPHCLKRHVQSESSVVSAKTMKDNFKSLLFAFPQVKWLKALDIEIQAGAALSWPIWFHAATPGNDAIFVTPSRPKCKLS

SEQ ID NO: 44688 - protein, 150 aa, Zea mays
  Coding DNA Sequence Number=SeqID_2909
  Gene Ontology: Mol. function=actin binding; Biological process=actin cytoskeleton organization and biogenesis
  Homolog annotation: Hit_ID=Q41745; Match level="QueryCoverage=42%, HitCoverage=17%, E-value=1e-28, Identity=96%"; Hit description=1 -acyl-sn-glycerol-3-phosphate acyltransferase PLS1
  Subcellular localization annotation: CTP_CleavageSite=60; ConfidenceScore=5.06e-01
MEHVTLFWSCLLLFGAIEFFKWTQLLSTWRGVAFTAAGMALVMGVMHVFIMFSQAERSSSAKAARNRTTTLGHKIVKTKEFLNTSMRSLDEHSGFHRKLKHFAEQCQIDVSLLQEEEKKIRSLVRGTVDYFHGSTGKEEGLPLGLVEVPV

SEQ ID NO: 44689 - protein, 67 aa, Zea mays
  Coding DNA Sequence Number=SeqID_2910
MGKVRATVVPGSPELARNEGDNSANSLARLWPRDWGQRGENSGEKASGGSGQFRVFNPNSNQVSNSN

SEQ ID NO: 44690 - protein, 121 aa, Zea mays
  Coding DNA Sequence Number=SeqID_2911
MGKNKNGGSSSHHSGDKRKREPTPPSEDFGDSEYSEEDFSSESEGSSVHASPPVSSDDSDDSQGLVVEVWTYIRAVERAGLEGSDESEVSSDEENSSDSSEEGGGDGDGEGDFDDGGNGDW

SEQ ID NO: 44691 - protein, 173 aa, Zea mays
  Coding DNA Sequence Number=SeqID_2912
MGELTAGAGEGDKGDQGVGTRGDGRRHGWARCRKRGPRRTPEEGDDDQHHGEQERREDLAGKRSCEGERKVGRGWRSREEAARAGSFDGGDLGELAGDPTPWRAKLRGGTGAGARHGEAAMGSSVEVLARREQAVGAVGRGMCAGAGAPRRRMERIGEGGRCTRRGRNSARRG

SEQ ID NO: 44692 - protein, 153 aa, Zea mays
  Coding DNA Sequence Number=SeqID_2913
MVDVVRCVIGSALGSGQRPCTTLWSACALASMPPSTSVITAIEGAEFIQVAPLLLEEGARCPGGEVRLHGQAQLLVVDAMSWRNHATTGAGQPTTSSQGISALHLFAGSPWRFSLRKFQVWGIGELVGVLAGGTPPVWASVGACWRWKTNRGS

SEQ ID NO: 44693 - protein, 118 aa, Zea mays
  Coding DNA Sequence Number=SeqID_2914
MEREIVERDRAIHWAINSRSIAWDCEVTARARVEEFNVALENLQVYNNAQYEEVHVLYEQLHLNMLPEFVAMGAGAEGAAGGGPYGELDLFGDPPSMNIVDDRPPKASSGVGADKDED

SEQ ID NO: 44694 - protein, 58 aa, Zea mays
  Coding DNA Sequence Number=SeqID_2915
MTSTGNHHRASDYRVELVRVFKGEAQKIQRLTQRRSCEAGKLRHVRRKGNRLKDEKAI

SEQ ID NO: 44695 - protein, 153 aa, Zea mays
  Coding DNA Sequence Number=SeqID_2916
MTASAMASRRAGRSSRGREAARERERQGAAGGVEKKQRAGNPTPWRVKLRGGAGAGARHEEAAMESSIEVLARREQAVGEVQFISPPATTRSDSRLTLRFVLNGVLIVARGSKYRLVDELEPLFHSGRRVLLKTHLPGTVFILIFVEQSLTLL

SEQ ID NO: 44696 - protein, 55 aa, Zea mays
  Coding DNA Sequence Number=SeqID_2917
MWNTVDKFYISSGKVTDPQSLTYVSLSAFAFLFSELVQYNQTQVDNITELERRLE

SEQ ID NO: 44697 - protein, 310 aa, Zea mays
  Coding DNA Sequence Number=SeqID_2918
  Gene Ontology: Mol. function=oxidoreductase activity; Cellular component=proton-transporting two-sector ATPase complex; Biological process=ethylene biosynthetic process
  Homolog annotation: Hit_ID=Q53P53; Match level="QueryCoverage=97%, HitCoverage=99%, E-value=1e-133, Identity=77%"; Hit description=1 -aminocyclopropane-1-carboxylate oxidase
  Pfam annotation: Domain name=2OG-FeII_Oxy; Domain location=160-261; Score=141.3; E_value=2.6e-39; Accession=PF03171.10; Description=2OG -Fe(II) oxygenase superfamily
MAAIPVIDFSKLEGSERAETMAAIAAGFEHVGFFQLVNTGIPDELLERVKKVCSDCYKLRDEAFMDSNLAVKALAELVDKESEGGAPMRKIEGMDWEDVFTLHDDLPWPSNPPAFKETMMEYRKELRKLAEKMLGVMEELLGLEEGHIRKAFTNDGELEPFYGTKVSHYPPCPRPDLVDGLRAHTDAGGLILLFQDDRFGGLQAQLPDGSWVDVQPLDNAIVVNTGDQIEVLSNGRYKSAWHRILATRDGNRRSVASFYNPARLATIAPAIPAADNYPSFVFGDYMQVYVKQKFQAKTSRFAAMATTTTK

SEQ ID NO: 44698 - protein, 156 aa, Zea mays
  Coding DNA Sequence Number=SeqID_2919
MGAVAPWLEHGKGTRFTYCGAAAALNLTPLSPVAHPGRGKPRERRSRSRPARRDHGFLLLCDSVSGWKNPLTDQTHTSVRVRAWVSEAHQTVTDGVERGKVGCAEPPPSSLEFVHAIVIRLAISGAPPELRPRSTMMALVPLPTEPSLLVNHHHCA

SEQ ID NO: 44699 - protein, 226 aa, Zea mays
  Coding DNA Sequence Number=SeqID_2920
  Homolog annotation: Hit_ID=Q5Z6B1; Match level="QueryCoverage=19%, HitCoverage=15%, E-value=1e-07, Identity=60%"; Hit description =Probable tRNA-splicing endonuclease subunit Sen2
MATGLQRAGEEACATSSSNLSDFGGMDFLFTIAGFLTIISFGGGHERREESFEVDLDLTLNELGDGEDTQGSEEKEKELHALKCLAVESEQGTDGCDRAVGSLGLRLRAIRGDVQGVSTPQAEELVCKARQPANQPFSGFFYARSTIIHRTTRCATGLSGEPAEQRLPAPTVDCSDEQCRRRSQRSPDCPVWHGTVRCSKKTKRSNCQQLQTLTGALTWRTSDSEK

SEQ ID NO: 44700 - protein, 137 aa, Zea mays
  Coding DNA Sequence Number=SeqID_2921
MAQSKLEEVVTSRREILAPPVTVLAPRGSGWKNPLTDRTHTSVRVRAWVSEAHQTVTDGVERGKVGCAGELLGPHREEVRVLVGRELGFTNPTPLNRNLVLEIYIYADVIVDIDPQPITLNQRSKLDKYHKNKHSSI

SEQ ID NO: 44701 - protein, 898 aa, Zea mays
  Coding DNA Sequence Number=SeqID_2922
  Gene Ontology: Mol. function=pyridoxal phosphate binding; Biological process=metabolic process
  Homolog annotation: Hit_ID=Q2QMU3; Match level="QueryCoverage=99%, HitCoverage=100%, E-value=0.0, Identity=81%"; Hit description =Expressed protein
MHLSLWKPLSHCAAVLLAKNHRRRGGGGGSNGRRDDSSAFLRQLRDALDAASEDGSLCPPPDAGGADADAAVSRSRSLARLRAQRDFLRATALATAAGPFRSLSDLPLLPHAIATFLAMYPDYASTADVDRLRVDHYSHLDAPGAGRVCLDYCGFGLFDSGWDSSSSSFTLHELNANLSNHALYGGAEPGTVENDIKERILEYLNVPASEYALVFTVSRGSAFRLLAECYPFETNRRLLTMFDHESQSVNWMAQSARAKGAKTRTAWFRWPTLKLCSTELRKEIVGKKKGRRRDAAVGLFVFPAQSRVTGAKYSYQWMALAQQNGWHVMLDAGALGPKDMDSLGLSLFRPDFIITSFYRVFGADPTGFGCLLIKKSVIGTLQGRNGCNASGMVRIVPVFPQYLSDSVDGFDAFDGFEDDPGVDKDEKPSSNAQNGSQLPAFSGVYTSAQVRETFESDPGRDSSSDRDGASTIFEETESVSMGEIMRSPAFSEDCSSENSFWVDVGHSPLGSEKSGQFKKGKLGSPLPSSWFNGRKCNKRMSPNLSSRISRSPLYDGHVISFDAAVLSVSQDADCLKEDPEEENFENGRRAHFRQVSEIQEEPEAEEVACQRAMNGGAEHKESAIRRETEGEFRLLGGRDGNNRFTGGRLFGVEEIDGGLSMGRRVSFSTEANIIADRLNRASDAAEASGYTFPGDDGCASDGYDDAQDWGRREPEIICRHIDHVDMMGLNRTTLRLRYLINWLVTSLLQLKLSDSKGGDGVPLVHIYGPKIKYERGAAVAFNVKQNDGTFVNAEVVQKIAEKNGISVGIGFLSHIKVDMKQKQLNGTLDIPEASFYKNGRRDNKKVTIRVEVVTASLGFLTNFEDVYKMWAFVAKFLDPSFLESERLTIAADHSEGQT

SEQ ID NO: 44702 - protein, 167 aa, Zea mays
  Coding DNA Sequence Number=SeqID_2923
  Subcellular localization annotation: CTP_CleavageSite=42; ConfidenceScore=5.08e-01
MGVPDFCARWRAFNVLQRSSRCKFPKLASSEPRPLGAPDTVRCTPDSPVNYSASALRIPEGAKFSLEFPGAPDSPLVQLFVLGNSTTKISLGNRCKPNSLSGLLYFGGLGCAHRDPEPTGPDGVVSENATLTAHEIPLELFFVRLSVTAQASCLHTVVRGIPNPGYR

SEQ ID NO: 44703 - protein, 105 aa, Zea mays
  Coding DNA Sequence Number=SeqID_2924
  Subcellular localization annotation: CTP_CleavageSite=70; ConfidenceScore=5.23e-01
MGRITRGPPCWMRPQDKMTSPQVFVRRRVGRRVNLPVVLSPLVQRAVHPIKEWKPKSTKKSPTINADNSVADATSPSASNCESANTLNVVDPLMVSFPWRLLKKN

SEQ ID NO: 44704 - protein, 217 aa, Zea mays
  Coding DNA Sequence Number=SeqID_2925
  Gene Ontology: Mol. function=protein dimerization activity; Cellular component=nucleus; Biological process=regulation of transcription, DNA-dependent
  Homolog annotation: Hit_ID=Q10MJ6; Match level="QueryCoverage=50%, HitCoverage=63%, E-value=1e-23, Identity=54%"; Hit description=BZIP transcription factor family protein, expressed
  Pfam annotation: Domain name=bZIP_1; Domain location=59-123; Score =23.2; E_value=0.00044; Accession=PF00170.11; Description=bZIP transcription factor
  Pfam annotation: Domain name=bZIP_2; Domain location=59-120; Score =23.4; E_value=0.0008; Accession=PF07716.5; Description=Basic region leucine zipper
  Pfam module annotation: Pfam domain module=bZIP_1::bZIP_2; Domain location=59-123::59-120
  Subcellular localization annotation: CTP_CleavageSite=45; ConfidenceScore=5.19e-01
MSNIYDAKPTKQISDTDLFTCVLVFTFPIRALCAASHKGSGMVPLAGAQGARRAAVVITEEERRRNRMTSNRLSARKSRMKRQRHVDDLAAEAERLRRENEAMRAGVGDAVLRSRALEQENRVLAAHARQLCAALLLRNSQLSLLGDVAGVPLDVPGVPDHLVQLYGGVQVPVMPLSPSVMPLSPSPPPPLHLQLPLEIQLMLLQPDVMDAVGMLEL

SEQ ID NO: 44705 - protein, 230 aa, Zea mays
  Coding DNA Sequence Number=SeqID_2926
  Gene Ontology: Mol. function=serine-type peptidase activity; Biological process=proteolysis
  Homolog annotation: Hit_ID=Q10MJ1; Match level="QueryCoverage=79%, HitCoverage=22%, E-value=3e-81, Identity=75%"; Hit description =Prolyl oligopeptidase family protein, expressed
MLLLGSHCTTSSTYSDVHLEDELFEEMGRDVMIDIFYARRKTSHAGLSSGDMGYRLPPKEIQDIVDAPPLPVLSFSPNKDKILFLKRRALPPLSDIAKPEEKLAGLRIDGNSNTRSRMSFYTGISIHKLLDDGTLGPEKEEDSKSGKLRVWIADVESGEARPLFKSPEIYLNAIFDSFVWVNDCTLLVCTIPATRGDPPHKPSVPSGPKIQSNESKNVVPSENFPRSSER

SEQ ID NO: 44706 - protein, 418 aa, Zea mays
  Coding DNA Sequence Number=SeqID_2927
  Gene Ontology: Mol. function=serine-type peptidase activity; Biological process=proteolysis
  Homolog annotation: Hit_ID=Q10MJ1; Match level="QueryCoverage=95%, HitCoverage=54%, E-value=0.0, Identity=88%"; Hit description=Prolyl oligopeptidase family protein, expressed
  Pfam annotation: Domain name=Abhydrolase_3; Domain location=191-353; Score=-92.4; E_value=0.1; Accession=PF07859.3; Description=alphabeta hydrolase fold
  Pfam annotation: Domain name=Peptidase_S15; Domain location=120-345; Score=-101.7; E_value=0.012; Accession=PF02129.9; Description=X-Pro dipeptidyl-peptidase (S15 family)
  Pfam annotation: Domain name=Peptidase_S9; Domain location=170-375; Score=18.4; E_value=9.8e-09; Accession=PF00326.11; Description =Prolyl oligopeptidase family
  Pfam module annotation: Pfam domain module=Abhydrolase_3::Peptidase _S15::Peptidase_S9; Domain location=191-353::120-345::170-375
MKVETQDGGDAKVEVSPRDIVYMENAEPINEILGVKSVYGRATGKSTMKLFVALMSDKTDGELLLDQLKILTSKESKTENTQYYLQTWPEKNQVKITNFPHPYPQLASLYKEMIRYQRKDGVQLTANLYLPPGYDSSKDGPLPCLVWSYPGEFKSKDAAGQVRGSPNEFPGIGATSPLLWFVILSGPTIPIIGEGDEEANDSITNYCRYVEQLVTSAEAAVEEVVKRGVAHPDKIAVGGHSYGAFMTANLLAHAPHLFCCGIARSGAYNRTLTPFGFQNEDRTLWEATNTYVEMSPFMSANKIKKPILLIHGEQDNNSGTLTMQSDRFFNALKGHGALSRLVILPFESHGYSARESIMHVLWETDRWLQNYCVNGTSKVDSVSEADSKNKTLSASGGSAAREGLNPEELSSLPRSLLW

SEQ ID NO: 44707 - protein, 47 aa, Zea mays
  Coding DNA Sequence Number=SeqID_2928
MEKSRVLVVGGTGYIGRLFLSCSPRLWDSDRWSADYHQKLGLGNVTV

SEQ ID NO: 44708 - protein, 165 aa, Zea mays
  Coding DNA Sequence Number=SeqID_2929
MAKIERGGIRSLQGKGHQRRHLEGRKQTCGRCQPIFGRWPQSVDNTKKYDVAKKNAKGTLPEREEGVAAREREENEQGGRRPPEREREDPRNAVTISDPRDAAATISDSRDATAICADLRDVASSPYNTPRRPHCVALYLTKAPRRRPNGRSGRLMLLGKAKRTP

SEQ ID NO: 44709 - protein, 164 aa, Zea mays
  Coding DNA Sequence Number=SeqID_2930
METSDTTTCKVLDELQMMEARLTEKINGCCDDVERHVDARCDELHNHFTAHCDTIRQQMDVVALCGEERLMALEVMKTEVDIWKPDLEKKRPCVHLLGGHPTNRLLGHRADKYHREDEPGLSFVQGSRLTTLSRDAQTEDEKTHQFGPLESNALSRQCRFEVAQ

SEQ ID NO: 44710 - protein, 263 aa, Zea mays
  Coding DNA Sequence Number=SeqID_2931
MDQSGTGWADSPVAKAGGGGAGALHGVAGRAGATPWEVLSSAQGLGRTLRSRLDGATKPLTQPIRLSVRQLNAKLPSLTKCHNVVARHPSLRNFATLSSHPPSRVPTEAVLVELSVALWQLGEGAEAVGKEGALTELENQRIIEDADAIDAEVAGVEQRVRESVRELEVARASSHSHGEALGRRRGCEPATLARATMMAQQTSRNVTNSMACCSSRSSSSQCGVWKQTPPRLPIAWSTRMSYSMLRRSGLPMTFVHTLELFIW

SEQ ID NO: 44711 - protein, 148 aa, Zea mays
  Coding DNA Sequence Number=SeqID_2932
  Homolog annotation: Hit_ID=Q6QP51; Match level="QueryCoverage=87%, HitCoverage=51%, E-value=1e-16, Identity=47%"; Hit description =Putative growth-regulating factor 1
  Subcellular localization annotation: CTP_CleavageSite=36; ConfidenceScore=5.51e-01
MAGNHHQHKLQRLMGAIQENNATRPSPTVVPPARVRLTTAKSSLRRNRKLRLARPWASTSGGGLRLARPQGSASEGGLCLARPQGSASTSTSEGGLRLARPQGSASTSTSGGIASSLDPGLGLRRSLRLARPWARTDRATGDTSLPYL

SEQ ID NO: 44712 - protein, 185 aa, Zea mays
  Coding DNA Sequence Number=SeqID_2933
  Homolog annotation: Hit_ID=Q10NW5; Match level="QueryCoverage=89%, HitCoverage=79%, E-value=2e-43, Identity=55%"; Hit description =Expressed protein
MEAGLVATGLPVRRQQLGGAAPDRDGGWAGNDHSTLIVVATLITALSFLLGLSMPGGYWQNDQTFVSNGGVVYHRAAGDPIMRDLHRPRYWVFRGASWVGVTSSMVMTLSLLVRMAVDSRHVLWSFSVAYSSLILTFIVSQSRTHLSLDIIIWLALLAFIWLVISLHPDHRARVVRVLFCFNRDN

SEQ ID NO: 44713 - protein, 425 aa, Zea mays
  Coding DNA Sequence Number=SeqID_2934
MRRRWGQAELTLAVVDAGRRRGDLRGYDEWTGEEWRGERDVAESEASESASKLVERREGERLLGSAGVGSEHRSLVEGEEENGTLIQGPPVRVAGWAERRGGRTEKGRFDAQKCLQPSFFVHKSMNHIRHTSVFKVSSITTHNTEAHDQVADATEAAKFVVRQLRYVASGALVHSVTSRLRAEKAELKNKIERLRTENTNDVREKSAADVRSQCLADKANNLEKENDELSRQLGETCREKLDAGTRASVKRAHSLFVEAYRDLGAETTPFDRSDGLMSYASLVFYEGAANALSHEGCHHFEVFERSNHDFDWEVFQIEDMSLKQSAGTLFDRMWGTHDCSVVRERTAQAMEQVSLTTVDYVGVETGMEEQPSWVGAAIGEPSARETSHHSADDVRGELSGVHNFASDEELELRSLFEDKDLELLL

SEQ ID NO: 44714 - protein, 52 aa, Zea mays
  Coding DNA Sequence Number=SeqID_2935
MADAQTIPHPSLNLEPSWCYRERRSELPTTVEHREVLDPKTTTKIHALGSKY

SEQ ID NO: 44715 - protein, 65 aa, Zea mays
  Coding DNA Sequence Number=SeqID_2936
MSCASDDYYIKDYGVILAPEPSQESSVLAMSCASNDYYINDYGVILAPEVTQMRTNNNDHSPSSG

SEQ ID NO: 44716 - protein, 229 aa, Zea mays
  Coding DNA Sequence Number=SeqID_2937
MSAFRDRGVPKPTSECAACPSPDGSSAWASAKGGEARWPESSVREVPSQGVGRGGSRSAEARAESEPWGRAKRSFVVFRVLARVRALGSGGAEFAVFRVLARVRALGSGGAEFAVFRVLARVRALGSGGAEFAVFRVLARVRALGSGGAEFAVFRVLARVRALGSGGAEFAVFRVLARVRALGSGGAEFAVAPLARPDCLLDSLCRVALQSEWHRRRCPSVRLASGAVE

SEQ ID NO: 44717 - protein, 111 aa, Zea mays
  Coding DNA Sequence Number=SeqID_2938
MMPTTIDPGLTEFWWIDTRAIPKVSSPRSVEAKTVKIKRTPGQGKDQRGWILELAARIAMNTRCSRGSHKKIHGGSQGMVMQGEVYPWPKERGCSSDFFLSDRDILGTIIS

SEQ ID NO: 44718 - protein, 73 aa, Zea mays
  Coding DNA Sequence Number=SeqID_2939
MMPTAIDPGLTEFWWIDTRAIPEGKDQRGWILELAARIAMNTRCSRGSHKKIHAGSQSMVMQGEVYPWPKERG

SEQ ID NO: 44719 - protein, 459 aa, Zea mays
  Coding DNA Sequence Number=SeqID_2940
  Gene Ontology: Mol. function=nucleic acid binding; Cellular component= intracellular; Biological process=chromatin modification
  Homolog annotation: Hit_ID=Q53JG9; Match level="QueryCoverage=56%, HitCoverage=56%, E-value=1e-30, Identity=36%"; Hit description=Zinc finger, C2H2 type, putative
  Pfam annotation: Domain name=zf-C2H2; Domain location=201-224; Score =25.7; E_value=0.00017; Accession=PF00096.16; Description=Zinc finger, C2H2 type
  Subcellular localization annotation: CTP_CleavageSite=10; ConfidenceScore=5.06e-01
MPLATLLLPSVSTPTAGDHRTHSRRHDHHHGSKRKKKPPPPPSPQPSLPLAPRTPPPPGAPSPKVRAAGKNNHAQYQYQQRRGQPTKNRAAAASSSWEQVKSLLSCRTATAAARVHDPSALARLRGASLCAMRDVVLSSASGDRDTAPLNRRRAPSSSAASGAGSSSHHSSLRGLSGCYECRAIDVEPMSRRRYPRPRELCACPQCGEVFTMADSLEHHQAIRHAVSELGPEDSGRNIVDIIFNSSWQKRGRPICHIDRILKVHNAPRTVARFEAYRDAVRSRSRCRAAARVAADGNELLRFHSAPLACALGLGGATALCCAGGASSPCGVCTAIRHGFAPWAGAHPLGVRTTASSARAHDCGCSASPSSVQQTQQPANDAAACRAMLVCRVIAGRVRRGGGGGATSNAADEDQEGPFDSVAVEDAVSSSMYGNLEELFVANPRAILPCFVVIYRVLDA

SEQ ID NO: 44720 - protein, 72 aa, Zea mays
  Coding DNA Sequence Number=SeqID_2941
MSGTGGGGGAGQELSVDYYLVGGVTMFDAQTGLPPAGAEAGQLAVVPSTVPAGLMGTTKGDIGTSLDPWSKF

SEQ ID NO: 44721 - protein, 119 aa, Zea mays
  Coding DNA Sequence Number=SeqID_2942
MVEGRTNVGVGGWGAMGTSLRGRGCGELSTVGPAVTGERCWGGRAGAGTRGAVRAGEDGAEKERSMGDDASWRELRPWRDVEGGAQQGARQGRGRASGSREKRTAGGEDEREKHGWGRR

SEQ ID NO: 44722 - protein, 90 aa, Zea mays
  Coding DNA Sequence Number=SeqID_2943
MGVIPSRANAQPWKIGQGGGHENSKPARHWRTEGRSPASKETNAEQERDPGWEMGRDGAGPNGCQQGEVAIDEQGRRELGARPWRWRPGE

SEQ ID NO: 44723 - protein, 93 aa, Zea mays
  Coding DNA Sequence Number=SeqID_2944
  Homolog annotation: Hit_ID=Q3LRV2; Match level="QueryCoverage=87%, HitCoverage=45%, E-value=6e-13, Identity=42%"; Hit description=Gag
MGDKKKKKMKKVVYYEIDSSDTQPPMSSQHLQSAKSVRSIANHQLFYVEYYSMWSDKMRHHLTSLHESIWDIVEFRVQAPQVCDEDYDSDEAA

SEQ ID NO: 44724 - protein, 91 aa, Zea mays
  Coding DNA Sequence Number=SeqID_2945
MASACGALRRSTFLASKVIVSKLIREVLLFGCWWGVVEDFGDVEVEVGLGSLGVVGTYGWAGGGGVVHCGIFAGGIVGDGQSLLGCADSSQ

SEQ ID NO: 44725 - protein, 93 aa, Zea mays
  Coding DNA Sequence Number=SeqID_2946
MAPKRPNSKAATSINDAAKAVLLANNKGKTPIADDITQEAFDDEAVNIKRQHQTICPHWRAPRAPAALRGYRKHLRRDSSTQRQKTSSKIAKS

SEQ ID NO: 44726 - protein, 211 aa, Zea mays
  Coding DNA Sequence Number=SeqID_2947
  Gene Ontology: Mol. function=ATP binding; Biological process=protein folding
  Homolog annotation: Hit_ID=O80504; Match level="QueryCoverage=45%, HitCoverage=86%, E-value=2e-19, Identity=48%"; Hit description =Expressed protein
  Pfam annotation: Domain name=Cpn10; Domain location=36-113; Score =23.5; E_value=8.4e-06; Accession=PF00166.12; Description=Chaperonin 10 Kd subunit
  Subcellular localization annotation: CTP_CleavageSite=36; ConfidenceScore=5.56e-01
MVPSLLAAMSTSPFLASSGSSRRPLGAAHTRRAGLRVAALKYDPAKKSAGGVLLPKSAVKFERYLMGEILSIGAEVSEVEAGKKVLFSDINAYEVELGTDDEKHCFCRVHTVVFCLPTLPSRDLGRAFVAAIIGPDILPSAPSRDLGRAFIATTPMPLHSLCCALPFSAQCPSIVRPLAPIRRLPRSARTIAAFPNAIETIAAFPLAAPTI

SEQ ID NO: 44727 - protein, 297 aa, Zea mays
  Coding DNA Sequence Number=SeqID_2948
  Gene Ontology: Mol. function=hydrolase activity, hydrolyzing O -glycosyl compounds; Cellular component=cell wall; Biological process= carbohydrate metabolic process
  Homolog annotation: Hit_ID=Q6Z998; Match level="QueryCoverage=88%, HitCoverage=88%, E-value=9e-90, Identity=57%"; Hit description =Putative xyloglucan endotransglycosylase
  Pfam annotation: Domain name=Glyco_hydro_16; Domain location=33-218; Score=288.7; E_value=1.1e-83; Accession=PF00722.11; Description =Glycosyl hydrolases family 16
  Pfam annotation: Domain name=XET_C; Domain location=242-290; Score =38.3; E_value=2.6e-08; Accession=PF06955.3; Description=Xyloglucan endo-transglycosylase (XET
  Pfam module annotation: Pfam domain module=Glyco_hydro_16::XET_C; Domain location=33-218::242-290
MAALLCSPNKLRRSVLLVGVALMLGMHLSAATMDKDIELIWGASHTYFFMDGETESLALSLDDQQGSCFRSKDMYLYGTISMEIKLVDGNSAGVVATAYTISEGPWSYHDEIDLEFLGNETGQPITLHTNIFVNGVGGREQQFYLPFDPAADYHTYTIEWNPKYILIKVDGKAIRAFKNYEEYGVAFPTWQQQRVYGSLWDADEWATQGGRVKTDWSEAPFVAYYRNYTFAWCQPSPGVSWCGAEPKDSARFDLDQRTLDDLRAASDQYMVYDYCSDHKRFNESEFPTECSLQRQGI

SEQ ID NO: 44728 - protein, 397 aa, Zea mays
  Coding DNA Sequence Number=SeqID_2949
  Gene Ontology: Mol. function=zinc ion binding
  Homolog annotation: Hit_ID=Q6Z3M2; Match level="QueryCoverage=90%, HitCoverage=98%, E-value=3e-73, Identity=48%"; Hit description=DNA binding zinc finger protein-like
  Pfam annotation: Domain name=zf-C3HC4; Domain location=352-389; Score= 17.1; E_value=0.0027; Accession=PF00097.15; Description=Zinc finger, C3HC4 type (RING finger)
MAVPPPLLFLFILLCMFRCCHVIITVSDMDEHMGRRTVGGLLFTKGGSILLFREDGSRPKAKNCCTRHGCSGQHPADRAKGKEVHRAAAVGSESTPATPRRSQAFRKPNRRPPHEGSASGSIVRDVGGPCSETGSGSRDAPGRDLLARLKERVNTSRKRSLNRENSPQSPSGLSVCASSPSNSRSVSRPSHRTASRIREADEGANAGADSVVRRNAARRGSERSDDDLLLVEQVTRNQAPSEGFLSGFMARYRSDLQGELSSLDDSMEDPNGYLRFDVGGIEELENYFIFNDRHRGMRMDIDGMSYEELLALGERIGTVNTGLSDDALSACLNRRLYMPTASGSHEDCERKCSEEYLAGEEVGEMACKHYYHLSCIDHWLRQKNWCPICKSVALKIN

SEQ ID NO: 44729 - protein, 437 aa, Zea mays
  Coding DNA Sequence Number=SeqID_2950
  Homolog annotation: Hit_ID=Q69JY6; Match level="QueryCoverage=32%, HitCoverage=46%, E-value=9e-56, Identity=71%"; Hit description =Putative thaumatin-like protein
  Pfam annotation: Domain name=Thaumatin; Domain location=289-433; Score=120.5; E_value=4.8e-33; Accession=PF00314.8; Description =Thaumatin family
  Subcellular localization annotation: CTP_CleavageSite=36; ConfidenceScore=5.03e-01
MTARTGAGILAAASLDDALPFGFPWPPLLLTAARLLCSLVVTSFIGLSAADGCCSEFPAFWMGGRAGSAFYPVPFCENASCPWRLASPTRTLVGGRARTRTGTGECLSVSAPTGKFDPERDPHRPCRGYVGMPTRGLGCCPAGDGDLTFGRMLVSRSTLVPSGLGILLKFDFDTEAVSTDHGPSNSEHRAGRFNGISGAPAGLAGLDRHPHPLLLPRYVRGGSDSFRGSPCLVFFPFCQYQSIPPVRIRGGGRASVTEPVSVSGAVLASVAQGRYAASCSPSPTAARDTVWPGLLSGSGTPPLETTGFALAPGQSRPLYAPQGWSGRFWGRSDCTFDASGKGSYTTGDCGSGEVECRGAGASPPATLAEFTLDGDGGKDFYDVSLVDGYNLPMLVQPAAAGCPDTGCLVDLNERCPDELRADGGRACHIAFSPNFGL

SEQ ID NO: 44730 - protein, 601 aa, Zea mays
  Coding DNA Sequence Number=SeqID_2951
  Gene Ontology: Mol. function=actin binding; Cellular component =cytoskeleton; Biological process=cytoskeleton organization and biogenesis
  Homolog annotation: Hit_ID=Q6Z3N3; Match level="QueryCoverage=96%, HitCoverage=64%, E-value=0.0, Identity=73%"; Hit description =Putative villin
  Pfam annotation: Domain name=Gelsolin; Domain location=164-238; Score= 39.3; E_value=1.3e-08; Accession=PF00626.12; Description=Gelsolin repeat
  Pfam annotation: Domain name=Gelsolin; Domain location=280-353; Score= 26.3; E_value=0.00011; Accession=PF00626.12; Description=Gelsolin repeat
  Pfam annotation: Domain name=Gelsolin; Domain location=417-499; Score= 11.4; E_value=0.049; Accession=PF00626.12; Description=Gelsolin repeat
  Pfam annotation: Domain name=Gelsolin; Domain location=45-119; Score =52.6; E_value=1.3e-12; Accession=PF00626.12; Description=Gelsolin repeat
  Pfam module annotation: Pfam domain module=Gelsolin::Gelsolin::Gelsoli n::Gelsolin; Domain location=164-238::280-353::417-499::45-119
  Subcellular localization annotation: CTP_CleavageSite=29; ConfidenceScore=5.40e-01
MAIYFAPLPQSLPGSFSLLSISQFDRQVQPSSLSYSGLMVWRIENFKPVPVPTSLHGKFYMGDSYIILKTTALKNGSFRHDIHYWLGKDTSQDEAGTAAILTVELDAALGGRAVQPCIMPQSGGVVSGFNHVEVNDQKHVTRLYVCRGKHVVHVKEVSYLKHYIFPTRKVPFTRSSLNHEDIFILDTKSKIFQFNGSNSCIQERAKALEVVQYIRDTFHEGKCEVAGVEDGKLMADAEAGEFWALFGGFAPLPKKTLSEDNGEDKEIIIKLMCINQGKLEQINFESLARELLEPNKCYLLDCGAEIYVWMGRSASLQERKGASKIAEKLLIDASRTKSHVIKVIEGFETVTFKSKFIEWPPTPDLKLSSEDGRVKVAALLKSQGLDVKGLMKTAPVKEEPRPYIDCTGHLQVWRVNGNGKTLLSCADQSKFYTGDCYIFQYTYSGDDKEECLIGTWFGKRSIEVERVSALSLASKMVQASKFQAIQARLYEGKEPIQFFVIFQSFQLFKGGLSSGYKNFVVENDIVDDTYSEGGIALFRIQGSGSENMQALQVDPLASSLNSSYCYILHNGNTVFTWIGNVTTSLDHDLVERQLDVIKISS

SEQ ID NO: 44731 - protein, 67 aa, Zea mays
  Coding DNA Sequence Number=SeqID_2952
MRPNTTEISLFLQGSVSGSMKERKGQMSLLAWRALAGSHMQEVLLKKGKTGSTAQDSYSLQLQLFFT

SEQ ID NO: 44732 - protein, 80 aa, Zea mays
  Coding DNA Sequence Number=SeqID_2953
  Subcellular localization annotation: CTP_CleavageSite=24; ConfidenceScore=5.16e-01
MAHGPWPLGDPSAGHDLSATLPPRLSLRWCHLCRRMRNGRGESGWSASFVARLPGWLAGFPLATPTRHSRTTVPLLASTV

SEQ ID NO: 44733 - protein, 271 aa, Zea mays
  Coding DNA Sequence Number=SeqID_2954
MGRSVSDPVRTVEKLLLLLLLRRRVRSKESGALRLSATAAGLHGITDTGGNDGLATPKKRTASASLPFAAAEPTVLEVTRRAAAGSLLLTTGPVVRRSRTVTAATPWPRRRVGWWTSAGARAPGNTSAVAHRRTGRGEAQRAGAILGSREEGRAPRCHRPVQMPEQTRRMETGRGISRGVDESDSVLASSGETGRGCESLEDGTTHAILTRFLASSCVPCFVDLRPQAAYYGYGHGVPCRASRAVRVGGPPNPCGHTHTYDGCAVRATVRV

SEQ ID NO: 44734 - protein, 112 aa, Zea mays
  Coding DNA Sequence Number=SeqID_2955
MDDKMSRPKYIQNTILRVATNFVTTSSELAQPLLAAGARPSTVHDLWQEEGSSRQTEIALVLRPPAAYPARLRVANRSQYKTVPTWPRGGGVPRPRATCCPFPLTSRDVFTV

SEQ ID NO: 44735 - protein, 46 aa, Zea mays
  Coding DNA Sequence Number=SeqID_2956
MGPSAAVAAQAWPVALLAVPARYIGKLSKGDTEAEHQSLNPRPSRL

SEQ ID NO: 44736 - protein, 546 aa, Zea mays
  Coding DNA Sequence Number=SeqID_2957
  Gene Ontology: Mol. function=amino acid transporter activity; Cellular component=integral to membrane; Biological process=auxin mediated signaling pathway
  Homolog annotation: Hit_ID=Q10P71; Match level="QueryCoverage=95%, HitCoverage=95%, E-value=0.0, Identity=79%"; Hit description=AUX1 protein, putative, expressed
  Pfam annotation: Domain name=Aa_trans; Domain location=47-467; Score =307.9; E_value=1.8e-89; Accession=PF01490.8; Description =Transmembrane amino acid transporter protein
MSSEASSVVVADENGAAETVGVGRYVEMEKDQESSAAKSRLSGLLWHGGSAYDAWFSCASNQVAQVLLTLPYSFSQLGMLSGILFQLLYGLMGSWTAYLISVLYVEYRARKEREKADFRNHVIQWFEVLDGLLGRKKICCSRAANGLVCSPAATNFFPLGRHWRNVGLAFNCTFLLFGSVIQLIACASNIYYINDKLDKRTWTYIFGACCATTVFIPSFHNYRIWSFLGLVMTTYTAWYLAVASLIHGQVDGVKHSGPTKMVLYFTGATNILYTFGGHAVTVEIMHAMWRPQKFKAIYLMATLYVLTLTLPSAASVYWAFGDQLLTRSNALALLPRTAFRDAAVVLMLAHQFITFGFACTPLYFVWEKLVGLHDCRSLCRRAAARLPVVVPIWFLAIIFPFFGPINSAVGSLLVSFTVYIIPALAHMITFRSATARENAMEPPPRLLGRWTGAYMINAFVVAWVLVVGFGFGGWASMTNFVRQIDTFGLFTKCYQCPPPPPLPFPGGGLGNITMPFNGDGLPPTPAPSPAHYFFRHHRHHSHHRGL

SEQ ID NO: 44737 - protein, 251 aa, Zea mays
  Coding DNA Sequence Number=SeqID_2958
  Homolog annotation: Hit_ID=P93499; Match level="QueryCoverage=40%, HitCoverage=59%, E-value=7e-23, Identity=56%"; Hit description=DnaJ -like protein
  Pfam annotation: Domain name=DnaJ; Domain location=152-214; Score =103.7; E_value=5.3e-28; Accession=PF00226.21; Description=DnaJ domain
MGQTRDPLEWFPFGTPSCEIDAPRSRFLKIKSYSAAANTGSPQTKLTKGAQPTAESDARQINGGGASSNLLPASSRIGQPQSFHPVPRLPLPPPPTSMISPRPALSPSFLAFRSGSPAASPPSSPRLHAPPPLSASFSTVATAAPGHAAASSFYDVLGLRPGASAREIKAAYRRLALAVHPDAAPHPTSSAEDFIRVHAAYSTLSDPDKRADYDRRLLLSGATVRRTVALGRSPSFPAHRSRRTWETDQCW

SEQ ID NO: 44738 - protein, 228 aa, Zea mays
  Coding DNA Sequence Number=SeqID_2959
  Homolog annotation: Hit_ID=Q949B2; Match level="QueryCoverage=34%, HitCoverage=34%, E-value=5e-34, Identity=89%"; Hit description=AP2 domain-containing protein Rap211
  Pfam annotation: Domain name=AP2; Domain location=57-121; Score =146.7; E_value=6e-41; Accession=PF00847.10; Description=AP2 domain
  Subcellular localization annotation: CTP_CleavageSite=66; ConfidenceScore=5.81e-01
MAMDDSSSGSEPTSSSSAEAPASPGTTASSSSDSSSSSSATAASSKKRRRTTDGQHHPTYRGVRMRAWGKWVSEIREPRKKSRIWLGTFATAEMAARAHDVAALAIKGRAAHLNFPELADELPRPATAAPKDVQAAAALAAAADFPAPAANNNAAGARDPDGGASPAVAPLDDDALFDLLPDLLLDLRHGASSCQLSCAPSWPYDDVSFSGTAAAGAFRLEEPLLWDY

SEQ ID NO: 44739 - protein, 270 aa, Zea mays
  Coding DNA Sequence Number=SeqID_2960
  Gene Ontology: Mol. function=kinase activity; Cellular component =nucleolus; Biological process=lipid metabolic process
  Homolog annotation: Hit_ID=Q6QP54; Match level="QueryCoverage=74%, HitCoverage=37%, E-value=3e-18, Identity=73%"; Hit description =Putative kinase
MAPPVDVVGPCPRLGEVEAPPRSRSTLSSKVEVKSEPPGRTRRRPSAEARAESEPWGRAKWSSSSFGAEPESEPWGRAKRSSSSSGAKPESEPWGRAERGSSSSGAEPESEPWGRAERSSSSSGAEPEFKPWGRAERSSLSSGAEPESEPWGRAERSSSSSGAEPESEPWGRAERSSSSSGAEPESEPWGRAERSSSSSGVEPESEPWGRAEWSFPWRLGPDLAAVSLTLSSGSAVGAAQAALSSCQTGQWSGEVTAVTSALSTGGRASG

SEQ ID NO: 44740 - protein, 54 aa, Zea mays
  Coding DNA Sequence Number=SeqID_2961
MGASGEGYFGFDVHQSPLDSRQESQAQGPDNKGARCSPSCTPKAFPPTAKVKVA

SEQ ID NO: 44741 - protein, 140 aa, Zea mays
  Coding DNA Sequence Number=SeqID_2962
MGTLPGGLFAECPNWHSAKRSALPSAYGQTLGKDIFVAECFAECYRHSAKLLIPVVPITGSPPEPISLHTPPPHPGPHRRDPLPPPPRLRARRHPPSPHASRPTISVLVGDILSLLHLGSAPLSALALTSFHSPETQSGV

SEQ ID NO: 44742 - protein, 1068 aa, Zea mays
  Coding DNA Sequence Number=SeqID_2963
  Gene Ontology: Mol. function=RNA-directed DNA polymerase activity; Cellular component=intracellular; Biological process=RNA-dependent DNA replication
  Homolog annotation: Hit_ID=UPI00005A975E; Match level="QueryCoverage =95%, HitCoverage=59%, E-value=0.0, Identity=88%"; Hit description =PREDICTED: similar to Retrovirus-related Pol polyprotein from transposon 297
  Pfam annotation: Domain name=RVT_1; Domain location=56-225; Score =143.0; E_value=7.8e-40; Accession=PF00078.17; Description=Reverse transcriptase (RNA-dependent
  Pfam annotation: Domain name=RnaseH; Domain location=455-582; Score =0.5; E_value=5.2e-05; Accession=PF00075.14; Description=RNase H
  Pfam annotation: Domain name=rve; Domain location=780-939; Score =108.4; E_value=2.1e-29; Accession=PF00665.16; Description=Integrase core domain
  Pfam module annotation: Pfam domain module=RVT_1::RnaseH::rve; Domain location=56-225::455-582::780-939
MPGIPRDVAEHSLDIRAGARPVRQPLRRFDEEKRRVIGEEIHKLMAAGFIKEVFHLEWLANPVLVRKKGGKWRMCVDYTGLNKACPKVPYPLPRIDQIVDSTAGCETLSFLDAYSGYHQIRMKESDQLTTSFIMPFGMYCYVTMPFGLRNAGATYQRCMNHVFGEHIGHTVEAYVDDIVVKTRKASDLLSDLEVTFRCLKAKGVKLNPEKCVFGVPRGMLLGFIVSERGIEANPEKIATITSMGPIKDLKGVQRVMGCLAALSRFISRLGERGLPLYHLLRKTECFAWTPEAEEALGNLKALLTKAPILVPPADGEALLVYVAATTQVVSAAIVVERQEEGHALPVQRPVYFVSEVLSKTKIRYPQVQKLLYAVILMRRKLRHYFESHPVTVVSSFPLGEIIQCREASGRIAKWAVEIMGETISFAPRKAIKSQVLADFVAEWVDTQLPAAPIQPELWTMFFDGSLMKTGAGAGLLFISPLGKHLRYVLRLHFPASNNVAEYEALVNGLRIAIELGVRRLDARGDSQNVIDQVMKNSHCRDPKMEAYCDEVRRLEDKFYGLELNHIARRYNETANELAKIASGRTTVPPDVFSRDLHQPSVKLDDTPEPEAPSAQPEAPSTRPEAPSVQPEVPSAPEREALHVEEEQSGATPDRNWQTPYLQYLCRGELPLDQADARWVARRAKSFVLLGDEEELYHRSPSGILQRCISIAEGHELLREIHSGACGHHAAPRALVGNAFRQGFYWPTAVADATRIVRTCEGCQFYAKQTHLPAQALQTIPITWPFAVWGLDLVGPLQKAPGGYTHLLVAIDKFSKWIKVRPLNSIRSEQAVAFFTNIIHRFGVPNSIITDNGTQFTGKKFLDFCEDHHIRVDWAAVAHPMSNGQVERANGMILQGLKPQIYNDLNKFGKRWMKELPSVIWSLRTTLSRATGFTLFFLVYGAEAILPTDLEYGSPRTRAYNDQSNQASREESLDQLEEARDKALLHSARYQQSLRRYHARGVRPRDLQVGDLVLRLRQDARGRHKLTPPWEGPFVIAKVLKPGTYKLANNQGEIYGNAWNIKQLRRFYP

SEQ ID NO: 44743 - protein, 598 aa, Zea mays
  Coding DNA Sequence Number=SeqID_2964
  Gene Ontology: Mol. function=glutamate-ammonia ligase activity; Cellular component=nucleus; Biological process=nitrogen compound metabolic process
  Homolog annotation: Hit_ID=Q5QMQ4; Match level="QueryCoverage=52%, HitCoverage=81%, E-value=2e-86, Identity=53%"; Hit description =Homeobox transcription factor-like
MDLCGHGGRCWLARERERKDRGRRGAFDSLLAALDTRGTREAQLHSMLQVIEPTFKEAIKRNVSIELSAGRYPKNGATDMIRANYHSEVGSSSSTPSATSDSITAYSDSFKVELGRNDFEKTAISKRADIFLKWMWREFYNQELTCAMKYGKKRCSELLHSCNCCYQIYLAEERHCSSCHKTFKSIYNFSDHTTQCEEKQRTEPFWNMQNTDYSVPIGMAYIPSEALQPFWTDVYRKSWSVKLYTTKSIAEIFQLLTVLEGAIRPDCLSSDFETSECLNSQVGSASVLPWVPDTTSAVMLRMLDLDSAILYVQNQKMDRDDGGFMKFPSRYTVAKSKQETTPETAGLDLYDGRWLPGSGRRGRGRGSRGGSRGGRGRSRGGRIPRGVSSSSRIEFKGGIVASDKAPRKNVRRGRGRGRGRRRGRRTVRPRQPSVGRARSIPKENLLGSFSMLSSSKAATIEESPRSSGADEWGLETRTTYTECDENSSGSQSEDNEENGQPMDDDYEDQVPDYSIGYSTGSRHHVMMSMMDHDSDEEDEDAEGDENVEEDADLAVDDADVEMDEDDEIGDDGEDGGVGGEMNADEDPDATSYSSDYSD

SEQ ID NO: 44744 - protein, 158 aa, Zea mays
  Coding DNA Sequence Number=SeqID_2965
MERVGWDGIISSVGSCPGARISWGLIFAERWWAFCAFDWLAGFWWEICDLDLVLWGWMDLDVWEPGARDRDGLTDTTTPASEPVPVGTWLVAGPSFGGLPAALQPDRWWVSAQTKVRPSNRMPDMNDEPDTGSGCIMLHSRLSVLELKTNRKNCQTDC

SEQ ID NO: 44745 - protein, 336 aa, Zea mays
  Coding DNA Sequence Number=SeqID_2966
MRSEDSDPCPTSLVMSYEMKTPGRRCLPERMFGQSQLRDENTHTCSWTVILKEFCSRVSSDRSSPPFNLIAEGKLKEKAALRVAVQRQRSVLETGEEWSPTANTEPSVRLIHTSAAGKPPKDGPATSHVPTGTGSEAGVVQQQLDCSTTTAAAAQHKTHSRLHSPTEKKQNKTKEIRSLSLSASTPQAKRERTGAERKKGGLVFIGCTQWQQRSEPNPHLRSAWVIIPVRAVATRPLLLFLACGFANLRHTPILSLLRRLTHHPIRCGGVRGVQVIVFGGVIIPFPPPSSSHRCWVFFATGIQPHIDSPFSTPSLRDAGYNSDCEAFGAGRRYEVG

SEQ ID NO: 44746 - protein, 758 aa, Zea mays
  Coding DNA Sequence Number=SeqID_2967
  Gene Ontology: Mol. function=sequence-specific DNA binding; Cellular component=nucleus; Biological process=regulation of transcription, DNA-dependent
  Homolog annotation: Hit_ID=Q5QMQ5; Match level="QueryCoverage=25%, HitCoverage=80%, E-value=4e-61, Identity=64%"; Hit description =Homeobox transcription factor-like
  Pfam annotation: Domain name=Homeobox; Domain location=54-110; Score =70.8; E_value=4.4e-18; Accession=PF00046.19; Description=Homeobox domain
MDAGGDEDGAGKAALESTAEAATLPPASTVAVPSPVPASAPGAATGTSGSGEKPVKRMMKTPYQLEVLEKTYAVEQYPSEAMRLELSAKIGLSDRQLQMWFCHRRLKDRKPPSKRQRREEESALVPVMPPPPVLPAPVMPLASSDLVVGAPGPYDEPLHPLHSRRGAGRGRSSAVPRISMPDIGRRYYEPPPIMIAPPIPSMQLTQYELRVINSVESQLGEPLREDGPALGVNFDPLPPGAFGAPIAWHFLAHAHLKRLKISISTFILRKCSTYVTTIPNLQLCKLVEFVELEIPGFINSWNWSSLKETHQATSAATNIYFILATEDVMIVPEQQKQPVRSYDAEIFSWHDQKLLKASAFLPNMESPFVPNSFTGKRKSPVGNSAIVQPHVGSRAVHEYQFLPEQPSDTYERATRSHYYDTPVEVSNARIPSITSGSQLLHGSEEAAPSYAFQGHTSGSSLLPPSSRPQVFPAAPTDYEMTQSNSNLSSVPVEGQFDISQVAAFENPPVSSEIIAYHDEDTSRVERKRKHSEEAKIAKEVEAHERRIRKELEKQDMLNKKREEQRRKEMERLDRERRKEEERLLRERQREEERFQREQRREHERMEKFLQKQSRRAEKQRQKEELRKEKEAARQKAANERATARRIAREYMELVEDERLESMELAAQNKGLPSMLYLDSDTLQQLDSFRGMLSQFPPTTVRMKLPFSIKPWTGSEDNVGNLLMGKSSGRVAECTRPDPKMRGPRGLPDRMDEHKNTRI

SEQ ID NO: 44747 - protein, 697 aa, Zea mays
  Coding DNA Sequence Number=SeqID_2968
  Gene Ontology: Mol. function=glutamate-ammonia ligase activity; Cellular component=nucleus; Biological process=nitrogen compound metabolic process
  Homolog annotation: Hit_ID=UPI0000162EFD; Match level="QueryCoverage =87%, HitCoverage=34%, E-value=1e-153, Identity=51%"; Hit description= HB-1; transcription factor
  Pfam annotation: Domain name=DDT; Domain location=63-113; Score=58.6; E_value=2.1e-14; Accession=PF02791.7; Description=DDT domain
MAVQPRKRAQLARGFIWRDLALSRASHLKMEKSDLCHHTARSYNVDRKLEIKKKSAPKSKKIVWKFLITFTDVLGLCPVTLDEFVQSLHDYDSRLLGELHIALLRSIIKDIEDVARTPSIALGVNPGGGHPQIVEGAYAWGFNIRSWQRHLNLLTWPEILRQFALSAGFGPQLKKRTVEDSYYRNDNEGHDGENVILTIRNGTAAVNAAAKMKERGYTNRRRSRHRLTPGTVKFAAFHVLSLEGSNGLTILEVAEKIQKSGLRDLTTSKTPEASIAAALSRDTKLFERTAPSTYCVKSPYRKDPADSEAVLSAARERIRAFQNVLSDSEAEKEVDEAERDDDSDCDDGDDDPDGDDVNTEVEDDKDPLLAVKSQDEVPSTTTVIGIKANLDGVGNALNSSSSFTKSAKGAPLPSLGRSNAADTSNDLPLGVSSANHEVVPDDSENTQIDESNQAEPWVRALAEGDYCDLSVEERLNALVALVGVATEGNSIRAVLEERLELANALKKQMWAEAQLDKRRFKEEFTSRVQYNSDMGLKPDIYQENNVTEITSTPACDAYRENDEHVGTINNCEMLDQHNQGNAGSLPYERNGVCQEILATPDTSYVQQYAYADKRRSQLKSYIGHRAEQLYVYRSLPLGQDRRRNRYWQFTTSASPNDPGSGRIFFESKDGYWRVIDSEEKKSKGSSRLSYKYQCTSR

SEQ ID NO: 44748 - protein, 131 aa, Zea mays
  Coding DNA Sequence Number=SeqID_2969
  Subcellular localization annotation: CTP_CleavageSite=41; ConfidenceScore=5.47e-01
MAATSITTTAHFVLLTPTHTTPSVTPPTTPQPNYPSPLALSVSMPPQHLGPHRCARHNPHGPLPHDAQGPGRDHLTPNLPNYLVYLNVALLLVVAVYNLNPASFAYTRGGHTDVTYLNVEVGVTKIDPGTC

SEQ ID NO: 44749 - protein, 636 aa, Zea mays
  Coding DNA Sequence Number=SeqID_2970
  Gene Ontology: Mol. function=pyridoxal phosphate binding; Biological process=metabolic process
  Homolog annotation: Hit_ID=Q9AX15; Match level="QueryCoverage=99%, HitCoverage=99%, E-value=0.0, Identity=66%"; Hit description =Putative aminotransferase
  Pfam annotation: Domain name=Aminotran_1_2; Domain location=124-542; Score=-111.8; E_value=0.088; Accession=PF00155.11; Description =Aminotransferase class I and II
  Pfam annotation: Domain name=Aminotran_5; Domain location=91-538; Score=-60.2; E_value=1.3e-09; Accession=PF00266.9; Description =Aminotransferase class-V
  Pfam module annotation: Pfam domain module=Aminotran_1_2::Aminotran _5; Domain location=124-542::91-538
MPLLVLRVPLASTNNTSTCSGAAPPVAVAPAAEHSDGLLFDGLALGHGDDVDDKAEADGDDAATVKLEWLRSQIIGAEAEFASPFGTRRITYADHTASGRCLRFVEEFVLRNVLPFYGNTHTTDSYVGMHTSKLAGDAARYVKRSLGAGPRDMLLFCGTGCTAAIKRLQEVTGMAVAPTLRAAVLAALPPSDRWVVFVGPYEHHSNLLTWRESLAEVVEVGLRAADGLLDLAALESELAARAPSGRPMLGAFSACSNVTGLRTDTRAVAALLRRHGAHACFDFACSAPYVRVDMRSGDADGYDAVFLSPHKFLGGPGSPGVLLMASRLYRLRATAPSTCGGGTVRYVSAYGDTVYSDDAEEREDAGTPAIIQKVRAALSFRVKEWVGEACIEAQEARMLALALRRVRAGANPSLRLLQGADAAASAPRLPVLSFVVYAPPRDGTEPEGRLQLHCRFVTKLLNDLFGVQARAGCACAGPYAHRLLGISPARAKAIRSAVEQLANEFGIDGNVQGYHGVLPGWTRVSLAYYTSMQEAEFVLDAVAFVASFGHRFLPLYTFDWKTGDWHYDHSCARGLVPNIVGGNPSGRVKAENCYQSYMAFAHCLAESLATTCTGLSSDPAIRIPKSVDPQLVYFLV

SEQ ID NO: 44750 - protein, 106 aa, Zea mays
  Coding DNA Sequence Number=SeqID_2971
RELGVPGAHAQENRGEEKLLGYGSGCLLEEEEGEGMERGAALGAEHASEQDPGEEWRHGSKEKFLLFLQRRRARLGARAPWEAAAPSREQAGGEVVEGRGCCAACL

SEQ ID NO: 44751 - protein, 131 aa, Zea mays
  Coding DNA Sequence Number=SeqID_2972
MGAPDSLVRHQTLSDGWNFEVASESDGDLTDGDDLQFLVDGELDSDTSTDWSWTYDRESSNVESFDNDDDLMSGHWMGIGSSDDEDKNDNGSSDEDSDDNGDDDGDDDGGASQCDEMPPSKRRRLLHGSLF

SEQ ID NO: 44752 - protein, 60 aa, Zea mays
  Coding DNA Sequence Number=SeqID_2973
METDPAWHRDHSRLHTDTAQHACLARLALALHRCVSDGKRSLDYIFFIQLKENISLNICE

SEQ ID NO: 44753 - protein, 294 aa, Zea mays
  Coding DNA Sequence Number=SeqID_2974
MAPPSPSDDASLTLALENQTREIEVDTGSRLTAIESAVQLFDCWRPRVDSSLDAMKTNLDRLCSEASRMEVVGFQGVFGGFPGVLGSPGSGATSSGLLGSPPSFAPTGAVPVRPSATVDHSDAYRFGPSYENYLRDSGLRYPDCRWPLPGHGKRRILLAVVTFDVPVQNGIYEPIHVAPKIVAVQWWIVRLLSRAPSCPRHRNFSQPPDLPATDIDRPVATSSILFFLAFDGSPRHAMLPGGSLLLHPDFQAPIFTSDTTPRTSCPPPPSLLPVLHGFALARAGRARGLAPRLA

SEQ ID NO: 44754 - protein, 300 aa, Zea mays
  Coding DNA Sequence Number=SeqID_2975
  Gene Ontology: Mol. function=dihydrofolate reductase activity; Biological process=one-carbon compound metabolic process
  Homolog annotation: Hit_ID=O81395; Match level="QueryCoverage=94%, HitCoverage=54%, E-value=1e-156, Identity=96%"; Hit description =Bifunctional dihydrofolate reductase-thymidylate synthase (DHFR-TS) [Includes: ...
  Homolog annotation: Hit description=Dihydrofolate reductase (EC 1.5.1.3); Thymidylate synthase (EC 2.1.1.45)]
  Pfam annotation: Domain name=DHFR_1; Domain location=1-167; Score =221.4; E_value=2.1e-63; Accession=PF00186.9; Description =Dihydrofolate reductase
  Pfam annotation: Domain name=Thymidylat_synt; Domain location=209 -300; Score=-91.1; E_value=6e-06; Accession=PF00303.9; Description =Thymidylate synthase
  Pfam module annotation: Pfam domain module=DHFR_1::Thymidylat_synt; Domain location=1-167::209-300
MGIGKDGVLPWKLPGDLKFFKELTLTTSDLVKKNAVIMERKTWESIPVKSRPLPGRLNVILTRSGTFDFATVENVVICGSMESALELLASTPYCLSIEKVFVIGGGQVLREYLKGPACEAIHLTDIQSSIECVTFIPPVDFSVFQPWYSSFPVIESNIRHLFVSFVRVRKSVAETHESNGKESTEVDTKNDKFEKENFSFLPKMVYDRHEEYQYLNLVEDIIRSGAQKNDRTGTGTLSKFGCQMRFNLRKKIPLLTTKRVFWRGVVEELLWFISGSTNAKLQKEKKASEQAPGAAIAHAP

SEQ ID NO: 44755 - protein, 257 aa, Zea mays
  Coding DNA Sequence Number=SeqID_2976
MGDLGELGDDARAWASTGMGGTPRELDMAELGLKHARQDLHDVPMVFSGGRKMSKSAGGAWGRSRVEQGGIHDHGRQEPAAFDVEDRGGAGKHEEDELEADTTGEKRGIRGIHREELRAGVEGGRGHGRERRKLRPTKGRGARRWKLREASRDGWKMKAPRGEEDTARERKERPRQRKEVRAVDISAKMRGERKKSPRPWAAVKYQREDKPGTHRKKKIQRRIFSGERAVEKSSRRKYPRQKLMCSDMDKERRVGGK

SEQ ID NO: 44756 - protein, 161 aa, Zea mays
  Coding DNA Sequence Number=SeqID_2977
MVVDPSLLDPASAPSTSGGPAHLVATRKHHRDIMQLVLVAVDLELCVDSAMPNTIHLPPLPAMAASSLHSSPELLSVNPSNAPFLAGGVRLKLVFFVLAPAQSRPLLHRHQRRPKLGVPPMASSPVIPTPSRIPSLIPFPAKLLPCGSLMAPRISSHASPY

SEQ ID NO: 44757 - protein, 122 aa, Zea mays
  Coding DNA Sequence Number=SeqID_2978
MEQWARLSRGKHEEDELEADTTGEKRCSRGNHQEELRDGVEGGRDHGRERRKLRPTKGRGARQWKLREASRDDWKMKAPRSEEYTARERKERPRQRKEVRDSDCLQQRPLYTSSISVLYILL

SEQ ID NO: 44758 - protein, 90 aa, Zea mays
  Coding DNA Sequence Number=SeqID_2979
MEEDNIGEYDLLGDDLVDYGASPEHPVMDDSAPIADNTGPEAGWVGPLLDSPTSEAEQPFKQRPRSFSRTYSQGSSTKFTGSNIVPVEES

SEQ ID NO: 44759 - protein, 116 aa, Zea mays
  Coding DNA Sequence Number=SeqID_2980
  Gene Ontology: Mol. function=pyrroline-5-carboxylate reductase activity; Biological process=amino acid biosynthetic process
  Homolog annotation: Hit_ID=Q4TZJ2; Match level="QueryCoverage=66%, HitCoverage=27%, E-value=1e-15, Identity=60%"; Hit description =Pyrroline 5-carboxylate reductase
MDSARSWLQKLQPRDKDIEWGAKTPTPAPTSPKRGEAFTSFSACLLKTNAQVVDDIDVIVISMKPQIVKQVLLELRPQLSEEKLLVSIAVSTKMQDLQAISVMKQRILDAPQPDAR

SEQ ID NO: 44760 - protein, 959 aa, Zea mays
  Coding DNA Sequence Number=SeqID_2981
  Gene Ontology: Mol. function=binding; Cellular component=trans-Golgi network; Biological process=protein transport
  Homolog annotation: Hit_ID=Q5ZEA1; Match level="QueryCoverage=80%, HitCoverage=71%, E-value=1e-164, Identity=84%"; Hit description=Beta adaptin-like
  Pfam annotation: Domain name=Adaptin_N; Domain location=115-831; Score=189.0; E_value=1.2e-53; Accession=PF01602.10; Description =Adaptin N terminal region
  Pfam annotation: Domain name=HEAT; Domain location=224-260; Score =15.5; E_value=0.19; Accession=PF02985.12; Description=HEAT repeat
  Pfam annotation: Domain name=HEAT; Domain location=351-386; Score =8.3; E_value=4.1; Accession=PF02985.12; Description=HEAT repeat
  Pfam module annotation: Pfam domain module=Adaptin_N::HEAT::HEAT; Domain location=115-831::224-260::351-386
  Subcellular localization annotation: CTP_CleavageSite=50; ConfidenceScore=5.47e-01
MSPLGASWLHSWAVLLGWGWQPPTRGYASTPRRKCVGSFLRRVRRRCNCRCGRARGRGACGSGAGRRQMWLLDVEACMKRSEVEAEMREATVGTRRQGLPARAGRYGLSRGRKSEVTDLKQQLRQLAGSRAPDADAQRRDVFKRVISCMTAGIDVSAAFGEMVLCSATSDVVTKKMCYLYVGAHARAHPDLALLTINFLQRDCQDQDPTIRGLALRSLCSLRVPNLVEYLVTPLTTGLKDPSAYVRMIAAVGAAKLYHISATACIDADLPASLKALMLSDPDAQVVANCLHALQEIWALEAAKSEAAAREIETLHSKPVVFYLLNKIKEFSEWAQCIVLELASKFLPSDNNEIFDIMNLLEDRLQHANGAVVLATIKVFLHLTMSMTDVHQQFDVYPETPVKSGGEELRLFVWWWHGRSVAQESQELILVVLHCGAERQACHLAQRAAAQGRPKTLLAQSFKARLVQHGLFAPQHEGPLLCSACEMGETWAGDEGSITDEADASWTSITPNRAVSADRWLRINVWESYICRRNAMKEFCDTGDVLVAAAAPEVVGMVVVTGETEGWGGSSDILGSVYERIKAPLLTLVGAGSPEQSYSVLCHLHLLVMRAPMLFSSDYKSFYCQFSDPSYVKKLKLEMLTAIANESNTYEIVTELCEYAGNVDVPIARESIRAVGKIALQQYDVNAIVDRLLQFLEMDKDYVTAETLVLVKDLLRKYPQWSHDCIAVVGNISSKNIQEPKGKAALIWMLGEYSQDMHDAPYILENLVENWDEEHSPEVRLHLLTAVMKCFFKRPPETQKALGATLSAGLSDTQQDVHDRALFYYRLLQYNPNVAERVVNPPKQAVSVFADTQSSETKDRIFDEFNSLSVVYQKHYIVHKKHTSRDLPFMSLVTSSITKAKSLASASEIQASTFFTSMFTTDSHAKLASHLPAPLLILHSRPELTTQLMNFLIDASEYEG

SEQ ID NO: 44761 - protein, 41 aa, Zea mays
  Coding DNA Sequence Number=SeqID_2982
MAIPQNWIQLRLAEQNPREAGGFGEWPDWRLVAWKHRAGLS

SEQ ID NO: 44762 - protein, 78 aa, Zea mays
  Coding DNA Sequence Number=SeqID_2983
  Gene Ontology: Mol. function=serine carboxypeptidase activity; Biological process=proteolysis
  Homolog annotation: Hit_ID=Q9FYP7; Match level="QueryCoverage=88%, HitCoverage=13%, E-value=1e-12, Identity=55%"; Hit description =Similar to Hordeum vulgare carboxypeptidase D
MAFSATTTVAEVEHIGSLPDQAPINFSMNFGYVIVDAMAGRALLYWLITTWTAASVPVESMSLMLWLNGGPKCSSIDV

SEQ ID NO: 44763 - protein, 42 aa, Zea mays
  Coding DNA Sequence Number=SeqID_2984
MGTPPVEKRPPQNGRTPSSPIGEGHRGSRLKLGSICYRGLMF

SEQ ID NO: 44764 - protein, 506 aa, Zea mays
  Coding DNA Sequence Number=SeqID_2985
  Gene Ontology: Mol. function=guanyl-nucleotide exchange factor activity
  Homolog annotation: Hit_ID=Q93ZY2; Match level="QueryCoverage=59%, HitCoverage=68%, E-value=2e-40, Identity=46%"; Hit description=Rop guanine nucleotide exchange factor 1
  Pfam annotation: Domain name=DUF315; Domain location=62-450; Score =402.4; E_value=6.5e-118; Accession=PF03759.4; Description=Domain of unknown function (DUF315)
  Subcellular localization annotation: CTP_CleavageSite=52; ConfidenceScore=5.07e-01
MLMLRWGFVSSCLFQLLLLALRRGKRRGARRDRRRMKMKALACCRRRPQDLSIDMDQEPDRVMTYNGLETCIINCSAYDDDSGISATTCGDGCVTADSLDDEVSSCFSKDASGSSFSSHCLSKQEEHSLDELGTPIAIHLLPFKAKKPITYTLSASDIENMKKKFAKLLLGYDTSGGARGVCAALALSNGIINLSATVFGELWKLEPLCEDKKIRWRKEMDWLMSPTTYIVELVPRKQSGADGCTFEIMTPKARSDVHVNLPALQKLDTMLIEVMDSMIDTEFWYEESGSRADGPSGRASLGEDLYQAITTEYIPIEEIFVSLSLKTEHSVLETMNQLEGAMFAWNQRILEERSKRSPGRHSWSFMKDSSSELDKMSACIERVDTLVQLLKARYPNLPPTFIDVLKVQYNVDVGNAIVEAYSRVLVGVAFSILSRVAEILLEDDLVKRPNTPMASLKFDLSSDVYLAGITETPPGHVRRSLMDQISMVDGRFNAAVKKKGAKQLRW

SEQ ID NO: 44765 - protein, 81 aa, Zea mays
  Coding DNA Sequence Number=SeqID_2986
MTMIYGAIDDVCSRHSIKILQCEFMVTSHYGYLILKMLELKGIIFVASNRVEAMSMAKKQMPSCHTAQKLSLENDSSSSEP

SEQ ID NO: 44766 - protein, 164 aa, Zea mays
  Coding DNA Sequence Number=SeqID_2987
  Subcellular localization annotation: CTP_CleavageSite=54; ConfidenceScore=5.22e-01
MAKYVAHPGARCMDFSLCFPGSYKEALVAALSFRLVHTSSHTSALATAVRGEVRGSSVVVPPLVKIVIAGTLSSEWGLAGSPTSRVAVCDLNWKAGLGERGQFLTFIPAPSCFCPSPWTAIPTARLEIIIMYFVYMFEEPVTEDPGAQQIEVAEQELIEGKLCP

SEQ ID NO: 44767 - protein, 277 aa, Zea mays
  Coding DNA Sequence Number=SeqID_2988
  Subcellular localization annotation: CTP_CleavageSite=35; ConfidenceScore=5.24e-01
MHATLPLDPNRAVQTRDRSGPSVNTSTDPSYLRSLAERRAYRRSRRSRWGNTYLGLLPRFWWSRYDVGSAEQLDSDKKSRDHRRPLLPSASRDASATPRALASTGMPRARQCRTPAWRQPSRSLSTFSLCSRSALGCSNGDVSIVLADGQLEEVIGINTQGQGRDGCNGPGFSSVHSGNRTTGARAFCCAPAQEEGADEMAPSAATLRPSPSDRQMGPHAFAALVTVEARPGDDKADIPSGPPQRNLARAQGTTSAECKTGILAELTVMSSSGLSHD

SEQ ID NO: 44768 - protein, 142 aa, Zea mays
  Coding DNA Sequence Number=SeqID_2989
MAYMYLIHCIHLDCNLADGEYVLIPEQGIAQEEPINLPAPACGVEIWARRVSCPSPGDTLADPASASNDAWRRLETAALVVVNKILLTAASELLVVVPHRGEIHVSRCIGVVASAVLRGCAAVLCRTYRGRRVVMQCSHWIS

SEQ ID NO: 44769 - protein, 153 aa, Zea mays
  Coding DNA Sequence Number=SeqID_2990
MAEYAAHPGARCVDFSLCFPGRYQEALVAALSFRLVHTSSHTTALATVVRGEVGGSSMVVPPPLKLIIAGTPSSEGGQAGSPTSRVAVCDLNWKAGLGEHGQFLTVIPPPSCFRPLPWTVVPTARLEGTTSAECKTGIPAELTVMSSSGLPHD

SEQ ID NO: 44770 - protein, 84 aa, Zea mays
  Coding DNA Sequence Number=SeqID_2991
MGLQVHAIYTPKAKSEPKKGDEVIRKAWVYMGINTLLCRINDIFKAFIGLVLVFGVFIRVWDKRLRYICYVGQVVGYGRVDLGH

SEQ ID NO: 44771 - protein, 87 aa, Zea mays
  Coding DNA Sequence Number=SeqID_2992
MAWANSGDGGGGSNGEERRRPGAGQVRGSAVLAWRGVAWARSGSVPGTVAGGSVAGSGRGILRAPGGVPGREKERGKERDGPSGARA

SEQ ID NO: 44772 - protein, 124 aa, Zea mays
  Coding DNA Sequence Number=SeqID_2993
  Subcellular localization annotation: CTP_CleavageSite=50; ConfidenceScore=5.21e-01
MVRSSTDWKLLWVNYSSRHDLSTLAAKRSRGRPSTSSRAGKQQIGSLSCRGDGSKDPIGEQRNEEGRWDGTYLFIDDDVLEEAGVQHPRWWGWSSRDEELRRGFRAQHVDLAVVRCADLSQPRA

SEQ ID NO: 44773 - protein, 122 aa, Zea mays
  Coding DNA Sequence Number=SeqID_2994
  Gene Ontology: Mol. function=structural constituent of ribosome; Cellular component=intracellular; Biological process=translation
  Homolog annotation: Hit_ID=Q9M2F1; Match level="QueryCoverage=82%, HitCoverage=100%, E-value=5e-31, Identity=81%"; Hit description=40S ribosomal protein S27-2
MVLQNDIDLLNPPAELEKLKHKKKRLVQSPNSFFMDVKCQGCFSIYTHCFIKFSYAFWWKEPLFSATPRLLLCALAAKLSSANPQEERQGSLRAALSAGRETRADVVFKFCSMPDTSVMNCL

SEQ ID NO: 44774 - protein, 152 aa, Zea mays
  Coding DNA Sequence Number=SeqID_2995
  Gene Ontology: Mol. function=protein dimerization activity; Cellular component=nucleus; Biological process=regulation of transcription, DNA-dependent
  Homolog annotation: Hit_ID=Q8RZ35; Match level="QueryCoverage=98%, HitCoverage=36%, E-value=2e-32, Identity=56%"; Hit description =Putative ABA response element binding factor
MASEMNKNVKALDEQEVSLQHSRAQTSDVAEEQQQQQQAVDPLARQSSIMSLTLEELQNSLCEPGRNFGSMNMDEFMANIWNAEEFQAATAGWNKEGVYREPVLVATTMGTGENGGGGRGLVRQGSFVLSSPLSRKTAEEVSAEISQGPADF

SEQ ID NO: 44775 - protein, 71 aa, Zea mays
  Coding DNA Sequence Number=SeqID_2996
MKTRQIDVGRLRGEVEREPGRGVEERVNCRGFPVRQAQAKLTVAKALADVQASSGDGRTAKQQRRGGGAAG

SEQ ID NO: 44776 - protein, 172 aa, Zea mays
  Coding DNA Sequence Number=SeqID_2997
MACREHDTATRVGVGTRHAGATQDAREAAPRARTSESRASREHAGHAQAKTVLRAHAAAPGAQLATPGACRTERRSLVRTTANSRVPGLTTHHTASRAGCVGRWRSHAQRAAGRVDRGGACRRDVQQGGHARATRRWPSERAQVAALSATTRSRVGGVECAARWAYGRGCAT

SEQ ID NO: 44777 - protein, 145 aa, Zea mays
  Coding DNA Sequence Number=SeqID_2998
MAEPPDTPATKSWSQLVAPRAIETPAPPLRHHDSAAQLGRHIMLGQTTRGKDKDRFLMKTPMKPMDDASEKNIENLVKVGQKLLQMPVAETDIASGYYHYRRKLPVRGTRQKLPTNGQELHRFAKMLSKERKLRLKNQREGRTSS

SEQ ID NO: 44778 - protein, 164 aa, Zea mays
  Coding DNA Sequence Number=SeqID_2999
MAAALGLHQGTTGDRGQSKLEGERVIRGKSERLAPREIEREMGFNIFQYFFWCLMTITTVWANYFAKYMVIDLCIGGTPYLSGFNYRFWFQQLDDVAIDVAWSGGAPDQSGEALTRLFPLEWSPATSYQRYGGAPNRHCSRSGAPADCADLPIHSNGYICSWRL

SEQ ID NO: 44779 - protein, 293 aa, Zea mays
  Coding DNA Sequence Number=SeqID_3000
  Homolog annotation: Hit_ID=Q9XE79; Match level="QueryCoverage=30%, HitCoverage=20%, E-value=1e-25, Identity=67%"; Hit description =Patatin-like protein
  Pfam annotation: Domain name=Patatin; Domain location=41-232; Score =61.4; E_value=2.9e-15; Accession=PF01734.12; Description=Patatin -like phospholipase
MGGGGSKAPFSNTNTDAASPEKLPPLERLPPARYGKHITMLSIDGGGIRGLIPLVILESLEKKLQDLDGKQARIADYFDVIAGTSTGGLIAAMLAAPDEERKRPRFRVQEITSFYKDHGHNIFKSPCGSIETPKRKGSNFRGSGPLLITVKVPEAKCRLGDPIGVMDGHPEPGKIVENTQGSYLACQLPAFRTSAPTTKYLCARSRLRTVFYPGKAALSVCVLSSLLMLIMTGDLQFMKTKYCRSCSRIKATASHNEQVDLCAMTSPGLRSLGLSMARRIAGPMDGPRTQAYA

SEQ ID NO: 44780 - protein, 268 aa, Zea mays
  Coding DNA Sequence Number=SeqID_3001
  Gene Ontology: Mol. function=phospholipase A2 activity; Biological process=lipid metabolic process
  Homolog annotation: Hit_ID=Q2R189; Match level="QueryCoverage=80%, HitCoverage=52%, E-value=1e-42, Identity=42%"; Hit description =Patatin-like phospholipase family protein, expressed
  Pfam annotation: Domain name=Patatin; Domain location=1-112; Score= -10.8; E_value=8.4e-05; Accession=PF01734.12; Description=Patatin -like phospholipase
MPVLMGPKYDGVYLRDRIEEKMKGLTMGDTRTNIVVPAFNVRSMMPVVFSSFGPRRGPWSRLADICIATSAAPTYFPAHNFPIRSSTTNGSQYHHDLVDGGLAANNPTMIAMAMVAQQINHYRNRYFPPRLDYDKLIVVSLGTTYAKEIDSYTAGDVAQWGALRWVRDGPRRTPLFDMLSCANDYLVNVNIAFLFHSKKFQNNYLRIQDVTLAKRKDNVLSFADKYIRIKSVVPLDWRDWGGGISSFLSKSPPITEGIEVYESRLEGR

SEQ ID NO: 44781 - protein, 60 aa, Zea mays
  Coding DNA Sequence Number=SeqID_3002
MKSTKCQSQRIPNFMEKHVSVRGSYAEKQSEAKDTGFDLALHCSSSSKSANGSSLDTVMW

SEQ ID NO: 44782 - protein, 149 aa, Zea mays
  Coding DNA Sequence Number=SeqID_3003
MGKNNKCKHEPTPPSEDFGDSEYSEEEFSSESEGSPAPVSPPASSDDSDDSQGIAAEVWTYIRAVERSGLEGSDESEYSSDEEDSDGGGEDEDDDDGDDDDGGDGDGDGSGSGRGSSGGGSSRGSNRGGSSKGSTRGGGGGGSSNRASG

SEQ ID NO: 44783 - protein, 103 aa, Zea mays
  Coding DNA Sequence Number=SeqID_3004
MVADTWDMHSREDVVEWIVLPAWSRTGGTLPKGTGGGMWHDRGGRVKAKQLRVKDVAVGSKSQELVHFALGGVDRLYTLWITTYALAMQFLVVVRVDSRLSSF

SEQ ID NO: 44784 - protein, 79 aa, Zea mays
  Coding DNA Sequence Number=SeqID_3005
MEVAAATAGKTLTSEALWSSIDSALGILVAFVGDKPGRTIHTQADYRGCLTHEEAIALALPVLISEPGVDKKTVVDGLA

SEQ ID NO: 44785 - protein, 93 aa, Zea mays
  Coding DNA Sequence Number=SeqID_3006
MERRLHAQYRRIASDLKAQICPDTTTGNESKGGRRSRTPDDGSNGADAGSSGGVERTPGGGTSGRRAAAGGGRAVNDQVTGLWLAKWAKWLLG

SEQ ID NO: 44786 - protein, 479 aa, Zea mays
  Coding DNA Sequence Number=SeqID_3007
  Gene Ontology: Mol. function=RNA-directed DNA polymerase activity; Cellular component=mitochondrion; Biological process=RNA-dependent DNA replication
  Homolog annotation: Hit_ID=UPI00004C1731; Match level="QueryCoverage =93%, HitCoverage=30%, E-value=0.0, Identity=90%"; Hit description =UPI00004C1731 related cluster
  Pfam annotation: Domain name=RnaseH; Domain location=1-123; Score= -5.5; E_value=0.00019; Accession=PF00075.14; Description=RNase H
  Pfam annotation: Domain name=rve; Domain location=202-361; Score =118.0; E_value=2.7e-32; Accession=PF00665.16; Description=Integrase core domain
  Pfam module annotation: Pfam domain module=RnaseH::rve; Domain location=1-123::202-361
MFFDGSLMKTGAGAGLLFVSPLGKHLRYVLRLHFPASNNVAEYDALINGLRIAIELGVRRLDARGDSRLVIDQVMKNSHCRDSKMEAYCDEVRRLEDKFYGLELNHIARRYNETADKLAKIASGRTTRCISIAEGQELLQEIHSGACGHHAAPRALVGNAFRQGFYWPTVVADATRIVRTCEGCQFYAKQTHLPAQALQTIPITWPFAVWGLDLVGPLQKAPGGYTHLLVAIDKFSKWVEVQPLNSIRSEQAVTFFTNIIHRFGVPNSIITDNGTQFTGRKFLDFCEDHHIRVDWAAVAHPMSNGQVERANGMILQGLKPRIYNDLNKFGKRWMKELPSVVWSLRTTPSRAMGFTPFFQVYGAEAVLPTDLEYGSPRTRAYDDQSNQASREDSLDQLEEARDKALLHSARYQQSLRRYHARGVRPRDLQVGDLVLRLQQDARGRHKLTPPWEGPFVIAKVLKPGTYKLANSQGEVYDNA

SEQ ID NO: 44787 - protein, 166 aa, Zea mays
  Coding DNA Sequence Number=SeqID_3008
  Homolog annotation: Hit_ID=Q9FG92; Match level="QueryCoverage=80%, HitCoverage=39%, E-value=2e-20, Identity=46%"; Hit description =Genomic DNA, chromosome 5, P1 clone:MQD19
  Subcellular localization annotation: CTP_CleavageSite=19; ConfidenceScore=5.35e-01
MAHGGYPRRGAAVRRPKSSASAAVADRKRKRTAAAAKTTSLKNQIRSTERFLRKDLPDEIRVAQEKKLEELKRQQELQNQLVVQRTLQFRDRKIKFFERRKIERMIRRLEKQQRSNGDGVNNNLSKLREDLEYVRVSFLHYCPAHDDMTYKYHYNFVFCDVSFSLH

SEQ ID NO: 44788 - protein, 226 aa, Zea mays
  Coding DNA Sequence Number=SeqID_3009
  Homolog annotation: Hit_ID=Q1RVF4; Match level="QueryCoverage=41%, HitCoverage=61%, E-value=5e-17, Identity=37%"; Hit description =Dirigent-like protein
MAGKIEIFTMYQHDRLNETGIYVFRDDLTLHNDSDSPVAGVMEGASIMTSFDGLHNLLAAKISLRHRGYRGSVSVLGGSHNTKPLVYPVVGGTGDFLYTEGGSVSVLGGSHNTKPSVYPVVGGTGDFLYTESLLIGLLALSQLFSLIYRRGGSHADGGYGYQQSNFKIKSKGKAVVPISDDDSDFPTSLEEKKGKIASAWEVAIQTAHCASCDVKQFNMFFVDDIS

SEQ ID NO: 44789 - protein, 365 aa, Zea mays
  Coding DNA Sequence Number=SeqID_3010
  Gene Ontology: Mol. function=protein dimerization activity; Cellular component=nucleus; Biological process=regulation of transcription, DNA-dependent
  Homolog annotation: Hit_ID=Q41786; Match level="QueryCoverage=99%, HitCoverage=100%, E-value=1e-134, Identity=65%"; Hit description =Opaque2 heterodimerizing protein 2
  Pfam annotation: Domain name=bZIP_1; Domain location=170-234; Score =40.6; E_value=5.3e-09; Accession=PF00170.11; Description=bZIP transcription factor
  Pfam annotation: Domain name=bZIP_2; Domain location=170-224; Score =22.5; E_value=0.0015; Accession=PF07716.5; Description=Basic region leucine zipper
  Pfam module annotation: Pfam domain module=bZIP_1::bZIP_2; Domain location=170-234::170-224
MERVFSMEEIPNPYWAPPHPQPAAGGAVAAPGGVGGAGDAAGAMNRCPSEWYFQKFLEEAVLDSPGPVAGVGRSSGQAGVEAAESKPLGAAAPASVSSSVVDPVEYNAMLKQKLEKDLAAIAMWRHLQIFLRLLLPCQVSVLRMQLLLNPSESDDDDMEGDAETNGNGNPVQQRQQRRKQSNRESARRSRSRKAAHLNELEAQVAQLRVENSSLLRRLADVNQKFNEAAVDNRVLKADVETLRAKVKMAEDSVKRVTGMNALYPAVSDMSSLSMPFNGSPSDSASDSTVPVQDDLNSYFANPSEIGCNNGYMPDIASSVQQDDNFVNGYQAAGKMGRTDSLQRVASLEHLQKRMCGGPASSGSTS

SEQ ID NO: 44790 - protein, 151 aa, Zea mays
  Coding DNA Sequence Number=SeqID_3011
MAGLLQHASTSGRGRRRGLVALNLKMATSGSAKHALTYSPSFDLILNPPLMTHDTTAGLDWEMRNYKAELSETATGVWYLAAATASRASAATLIPGAHRPRHIPYAAHAQPGLLDPDLCPGSGGDAEDSGVASARGSGNEWEELEQRGDDR

SEQ ID NO: 44791 - protein, 592 aa, Zea mays
  Coding DNA Sequence Number=SeqID_3012
  Gene Ontology: Mol. function=GTPase activity; Cellular component =signal recognition particle, endoplasmic reticulum targeting; Biological process=immune response
  Homolog annotation: Hit_ID=Q10C30; Match level="QueryCoverage=93%, HitCoverage=95%, E-value=0.0, Identity=86%"; Hit description =Guanylate-binding family protein, putative, expressed
  Pfam annotation: Domain name=GBP; Domain location=49-285; Score =101.9; E_value=1.8e-27; Accession=PF02263.9; Description=Guanylate -binding protein, N-terminal domain
MWRGRCAPGISVAALALLAVAAAAGAAAGDPDPDDLERAFPIVEPDHRHTKLRLSEQGLEAIRRIETPIAVVGVIGPYRSGKSFLLNQLLSLSCDKGFGVGHMRDTKTKGIWIWGTPVEMDVDGSKVSVLYLDTEGFESVGKSNVYDDRIFALATVLSSVLIYNLPETVREADISRLSFAVEIAEEFYGRVKGQDVAFEPAKLLWLIQRDFLRDRYINEVNQIRDSLAVMGNHSTAFSLPQPHLQRTKLCDMEDKELEPLYVKRREQLKQLVSSIVKPKIVQGRTLNGKDFVSFLQQILEALNKGEIPSTGSLVEIFNKAILDRCLKVYREKMDSLNLPVPVDELQKLHEMTNGEARILFDKQHFGKHHAAQSALKLEDEIKEVYRNFLLANEYQSSKLCEARFSECEDKMDHLQVLKLPSMAKFNAGFTHCNQSFVKDCVGPAKESYERRMSKMLAKSRALFIKEYNNKLFNWLATFSLVMVVIGRFVIKFFLLEIVAWVMFIFLETYTRMFWSAESLYYNPAWHIIVSSWEMIVYSPILDLDRWAIPIVIMLSLGVLYWRCFGRRRKRVKGSLLPLYKNSYKNSSRPRSD

SEQ ID NO: 44792 - protein, 667 aa, Zea mays
  Coding DNA Sequence Number=SeqID_3013
  Gene Ontology: Mol. function=metal ion binding; Cellular component =intracellular; Biological process=thiamin biosynthetic process
  Homolog annotation: Hit_ID=Q6F382; Match level="QueryCoverage=86%, HitCoverage=94%, E-value=0.0, Identity=80%"; Hit description =Putative PPR repeat containing protein
  Pfam annotation: Domain name=PPR; Domain location=200-234; Score =38.9; E_value=1.7e-08; Accession=PF01535.11; Description=PPR repeat
  Pfam annotation: Domain name=PPR; Domain location=301-335; Score =44.4; E_value=4e-10; Accession=PF01535.11; Description=PPR repeat
  Pfam annotation: Domain name=PPR; Domain location=336-370; Score =29.0; E_value=1.7e-05; Accession=PF01535.11; Description=PPR repeat
  Pfam annotation: Domain name=PPR; Domain location=403-437; Score=7.9; E_value=0.87; Accession=PF01535.11; Description=PPR repeat
  Pfam annotation: Domain name=SNN_transmemb; Domain location=225-255; Score=20.0; E_value=0.0083; Accession=PF09049.1; Description=Stannin transmembrane
  Pfam module annotation: Pfam domain module=PPR::PPR::PPR::PPR::SNN _transmemb; Domain location=200-234::301-335::336-370::403-437::225 -255
  Subcellular localization annotation: CTP_CleavageSite=45; ConfidenceScore=5.15e-01
MSSAPLTATPAPLLPANKPKSAAPQHPLLSHLPHCTSLRGLAQLHAAAVKAGLAAHPALVTRLLTLCTGPGAGPAHLAYARQVFDRVTQPSDAVWYNTLLRGYARSSSSSSSSSAAAVRVFVRMLEEGVAPDTYTFVSLLKACAAARAGEHGRQAHAVAVKLGAAGHDYVRPTLINMYAECGDARAARVTFGRADGDCVVSYNAMIAAAVRSSRPGEALVLFREMQAKGLNPTPVTVISVLSACALLGALQLGRWLHDYVRKLGLGSLVKVSTALVDMYAKCGSLEDAIAVFQGMESRDRQAWSVMIVAYANHGYGREAISLFEEMKKQGMKPDDITFLGLLYACSHSGLVSEGLRYFDDMKDHGIVPGIKHYGCVTDLLARSGQLERAYKFIDELPINPTPILWRTLLSACGGHGDVELGKRVFERILELDDSHGGDYVIFSNLCANTGYWEEMNRVRKLMSDKGVVKVPGCSSIEIDNTVHEFFAGDGRHPKSQEARKMVDEVIDQLKLVGYIPDTSHVFHVEMGEEEKAISLKYHSEKLAIAFGLLNTAPGATLRVVKNLRVCPDCHSMAKFVSMVFNRRIILRDLNRFHHFERGICSCAASPVSPHRCPRPPWIGVLCGPLPTSSSYAKLLTLCHNVAAKGAKEPTSTVVAAVMLQACDTFMS

SEQ ID NO: 44793 - protein, 201 aa, Zea mays
  Coding DNA Sequence Number=SeqID_3014
  Homolog annotation: Hit_ID=Q6F381; Match level="QueryCoverage=56%, HitCoverage=87%, E-value=1e-19, Identity=42%"; Hit description =Expressed protein
MTLAPGESGRYRLALARAGALGRARGRREGGEALLLSPQCKIQPATVLLASAVILHRASRTPPFPTLMRLSHCESHCAGPFRFIPCLLPSKDASRDAASAPAPRPAAVAEEEPPPVQKIEVPEAGKDGDAEKHEDDEKATAPAKSCLKRTSCGDDRCADKGNVKWLDLLGKDLTEIKEYEPRSDDGWHCRSILGIEQVYLY

SEQ ID NO: 44794 - protein, 917 aa, Zea mays
  Coding DNA Sequence Number=SeqID_3015
  Gene Ontology: Mol. function=exonuclease activity; Cellular component= intracellular; Biological process=regulation of transcription, DNA -dependent
  Homolog annotation: Hit_ID=Q10C49; Match level="QueryCoverage=70%, HitCoverage=100%, E-value=0.0, Identity=75%"; Hit description=5'-3' exoribonuclease, putative, expressed
  Pfam annotation: Domain name=XRN_N; Domain location=1-256; Score =589.7; E_value=2.7e-174; Accession=PF03159.8; Description=XRN 5'-3' exonuclease N-terminus
  Pfam annotation: Domain name=zf-CCHC; Domain location=263-280; Score =28.5; E_value=2e-05; Accession=PF00098.13; Description=Zinc knuckle
  Pfam module annotation: Pfam domain module=XRN_N::zf-CCHC; Domain location=1-256::263-280
MGVPAFYRWLADRYPLTVSDAEEEEPVELEPGAFVPVDLRRPNPNGLEFDNLYLDMNGIIHPCFHPEGRPAPTTYDEVFKSIFDYIDHLFGLIRPRKLLYMAIDGVAPRAKMNQQRSRRFRAAKDAADAAAEEERLRKEFEAEGRTLAQKEKSEAIDSNVITPGTEFMFVLSTALQYYIQLRLNHTLGWQSVKIILSDSNVPGEGEHKIMSYIRLQRNLPGFDPNTRHCLYGLDADLIMLALATHEVHFSILREVISMPGQHEKCFLCGQVGHLAAECRGPSQPDNSVELPPIHKKKYQFLNIWVLREYLAKDLEIIDAPFKINFERLIDDFVFMCFFVGNDFLPHMPTLEIREGAINLLMSIYRSEFTSMGGYLTDVGEVKLGEPGYRERYYADKFKEEAESKPIVQVRRDVSLRRLRAAARLLLQRIGGRRDDEVGVTAVAAREREKRGEGGRRCSNALPKYYGDLMSDPDSPLKSFYPKDFEIDMNGKRFAWQGVAKLPFIDERRLLAETRKLEDTLTEEEKFRNRTMLDIIYVRDTHPLITQIIFLYQNYYHLSRTDPYVIPIEPAASGGMNGFLCLSERNWYSVTVTSPVKGFNGIAQNRVLNAAYLNPQYHKHIPEPPAGVIIPAKILKPSDFKPFPVLWHQDNSRRQVRERPQVSGALSGSLLGEAAHRLVKNSLQIRSGNAAGLLYMPYRGAPYGPGNRPRPAGPLGYERGFVDNPYHAHMSRSVPNPHAQFFGDSQANRQPMRILERPDSRSHDAGIRASMSKLTIQEGPRPHQNNRMQNSGYWPNQPHPTHFTGPPAQRPMQNISFTPQRPFQTGGFPQQRPVNGAPPPLPPSNWIGKQPSGCHMSVSPAKLDPRTAPDRQPKQDNPRSQQDKRQQATKRVSMYPSHNLPFDVELFVVLPGKESAKF

SEQ ID NO: 44795 - protein, 75 aa, Zea mays
  Coding DNA Sequence Number=SeqID_3016
MDSGVHGPQAGMMKLGASGRGAKVYTDSSMGIWDWDQDRYISHFSRMQKCSCFALVSWLGFTGGSVLMFIRKPSE

SEQ ID NO: 44796 - protein, 503 aa, Zea mays
  Coding DNA Sequence Number=SeqID_3017
  Gene Ontology: Mol. function=receptor activity; Cellular component =cellulose and pectin-containing cell wall; Biological process =protein amino acid phosphorylation
  Homolog annotation: Hit_ID=Q6F383; Match level="QueryCoverage=64%, HitCoverage=82%, E-value=1e-165, Identity=84%"; Hit description =Putative leucine-rich receptor-like protein kinase
  Pfam annotation: Domain name=LRRNT_2; Domain location=39-78; Score =15.7; E_value=0.02; Accession=PF08263.3; Description=Leucine rich repeat N-terminal domain
  Pfam annotation: Domain name=LRR_1; Domain location=112-134; Score =8.8; E_value=6.4; Accession=PF00560.23; Description=Leucine Rich Repeat
  Pfam annotation: Domain name=LRR_1; Domain location=136-158; Score =11.3; E_value=2.2; Accession=PF00560.23; Description=Leucine Rich Repeat
  Pfam annotation: Domain name=LRR_1; Domain location=160-179; Score =3.9; E_value=54; Accession=PF00560.23; Description=Leucine Rich Repeat
  Pfam annotation: Domain name=LRR_1; Domain location=183-205; Score =6.7; E_value=16; Accession=PF00560.23; Description=Leucine Rich Repeat
  Pfam annotation: Domain name=LRR_1; Domain location=206-229; Score =0.0; E_value=2.8e+02; Accession=PF00560.23; Description=Leucine Rich Repeat
  Pfam annotation: Domain name=LRR_1; Domain location=232-254; Score =4.8; E_value=36; Accession=PF00560.23; Description=Leucine Rich Repeat
  Pfam annotation: Domain name=LRR_1; Domain location=256-278; Score =14.5; E_value=0.38; Accession=PF00560.23; Description=Leucine Rich Repeat
  Pfam annotation: Domain name=LRR_1; Domain location=280-302; Score =13.9; E_value=0.58; Accession=PF00560.23; Description=Leucine Rich Repeat
  Pfam annotation: Domain name=LRR_1; Domain location=88-110; Score =3.0; E_value=80; Accession=PF00560.23; Description=Leucine Rich Repeat
  Pfam module annotation: Pfam domain module=LRRNT_2::LRR_1::LRR_1::LRR_ 1::LRR_1::LRR_1::LRR_1::LRR_1::LRR_1::LRR_1; Domain location=39 -78::112-134::136-158::160-179::183-205::206-229::232-254::256
  Subcellular localization annotation: CTP_CleavageSite=30; ConfidenceScore=5.35e-01
MTRMSLAVSATFFVLAVASAAQPAPSMPPPAVAVNSSRLEKAYVALQALRRAITDDPKKLTENWCGPDVCNYFGVYCAPAPDDPCQRTVASVDLNHGDLAGTLPEELGLLSDLAVFHLNSNRFCGSLPESLRSLHLLHEIDVSNNRLSGPFPSQLLCLPSVQYVDIRFNNFCGEVPAAIFDKKIDALFINNNHFEFTLPASFTNSTASVIVLANLPRVSGCLPSSIGDMAGTLNELILLNSGISSCIPPEIGKLDKLTVLDLSFNSIAGALPDTIGGMRALEQLDVAHNRLTGEIPESICELPHLKNFTYSYNFFCGEPRRCLEVPRVDDRQNCIAGRPDQRPGEECVSFLHQPQVHCDAHGYSGHCRGSNAEVPSTGVDWSHRRGLVMVHFIVLTWLDSIVSALPPCRCARQRVGCRLAGLLGGRVGRQSRFAGSLDRRVGRLSRLAKSLDRRLVGSSASPDHSVGGLVGSTGVLLGQAKRASTRHNIFGPIRARHDTKFGG

SEQ ID NO: 44797 - protein, 116 aa, Zea mays
  Coding DNA Sequence Number=SeqID_3018
  Subcellular localization annotation: CTP_CleavageSite=46; ConfidenceScore=5.22e-01
MGLAIHPSGSCSSESSMLWLELPPSSSSPSQSGSPPAAGIPYSGVEASLVEVQGKAASQTPPPTEARGRVLLLLLLVSVLLLLVQAAMQSLQVARLTCHRATQWALHKPRGQKGDH

SEQ ID NO: 44798 - protein, 152 aa, Zea mays
  Coding DNA Sequence Number=SeqID_3019
  Subcellular localization annotation: CTP_CleavageSite=39; ConfidenceScore=5.36e-01
MAGRPPPPPSAAAATFPPLPLSYRAALVAPLAAAFDQARAAPATGVPPGLVAPLELSAITSSLRAPSDDAASILTATRVAVTMACQKAQDVARALEQEQVVVDAIKRQYTETYRHLAVKGVSNGSPTFARHSADTFKPAPTLASTLRASLHA

SEQ ID NO: 44799 - protein, 81 aa, Zea mays
  Coding DNA Sequence Number=SeqID_3020
MAGLLVSGELSSQDRAAPLRPSQPWPLDLGRLFEIGWFGLNPNNEQLMVPECVAKDPSQQQPGGEAGNMEDFEEFQDYDEF

SEQ ID NO: 44800 - protein, 89 aa, Zea mays
  Coding DNA Sequence Number=SeqID_3021
MARSFSRCQKPDMGEMSNSWSLVNNWRQVLVLWMGNYPTELMAYSIYRSPERWLVNLKETRGGRRGGRALAQAIGGIYRGGLTGDDRMC

SEQ ID NO: 44801 - protein, 742 aa, Zea mays
  Coding DNA Sequence Number=SeqID_3022
  Gene Ontology: Mol. function=RNA-directed DNA polymerase activity; Cellular component=exocyst; Biological process=exocytosis
  Homolog annotation: Hit_ID=Q5Z4V4; Match level="QueryCoverage=87%, HitCoverage=96%, E-value=0.0, Identity=73%"; Hit description =Putative Exo70 exocyst complex subunit
  Pfam annotation: Domain name=Exo70; Domain location=116-706; Score =447.0; E_value=2.5e-131; Accession=PF03081.6; Description=Exo70 exocyst complex subunit
MHEATRESQRGLQLASNTPADDLGSSDDVAGPGNQSLTKNKNGGTAFAAAPQACSRPGAGVRACVLRMGASHDDEAGPLASLLAARRALRAGLDKSRALSRALAPRLEGIQARLPAMEASVRPIRAPPEALATAGPNIDRAVGPAAAVLKVFDAVHGLEPPLLDRAAAAADLPGYLAVLAQLEAALRLLSDNCGLATQWLADIVAYLGERRLADARFVAGLAAALDRLRDDASAGLDAGLLAAALDMLQAEFRRLLKDHSAPLAMKDPDGSGSDPPPVVPSRIPAAVVHKLSLILDRLAANGRLDHCSSAYGDARGDTVCASLRALGLDYLKETSGDAQALSPSVERWARHLEFAVHHLLEAERKLCVAVFERRPEAAPLCFAEIAARAGILDFLDFGRALADARKDPIKLLRLLDVFHCLNKLRLDFNRLFGGKACVEIQSRTRELVKRVVDGAVEIFEELLVQVELQRTIPPPVDGGVPRLVSFVAKYCNQLLGEQYRSVLTQVITIHRSWRKEVFNDKMLVDAVLNIVKTLELNFDTWSKAYGDTTLSSLFMMNIHWHFFKHLKGTKLGELLGDPWLREHEQYKDYYSAMFLRESWGTLAPLLSREGLIMFSKGRATARDLVKQRLKSFNASFDEMFQKQSKWVISDRDLQQKTCHLVVQAVVPVYRSFMQNYGPLVEQDVSASRYVKYSAEDLDKMLNTLFLSKPGRPMRAGSFQIKNSNDKITSAMTGLYRSASTLK

SEQ ID NO: 44802 - protein, 63 aa, Zea mays
  Coding DNA Sequence Number=SeqID_3023
MCVLRSSLAVWISEVPQGVSLDLWTAAGRDCGSLGMGEDRGEMEHGVGRRLESLDSGEWPGRD

SEQ ID NO: 44803 - protein, 988 aa, Zea mays
  Coding DNA Sequence Number=SeqID_3024
  Gene Ontology: Mol. function=protein binding; Cellular component =membrane; Biological process=defense response
  Homolog annotation: Hit_ID=Q7XI19; Match level="QueryCoverage=91%, HitCoverage=99%, E-value=0.0, Identity=42%"; Hit description =Putative disease resistance protein RPR1
  Pfam annotation: Domain name=ABC_tran; Domain location=188-327; Score= -62.6; E_value=0.06; Accession=PF00005.17; Description=ABC transporter
  Pfam annotation: Domain name=LRR_1; Domain location=600-621; Score =14.5; E_value=0.39; Accession=PF00560.23; Description=Leucine Rich Repeat
  Pfam annotation: Domain name=LRR_1; Domain location=623-644; Score =10.9; E_value=2.6; Accession=PF00560.23; Description=Leucine Rich Repeat
  Pfam annotation: Domain name=LRR_1; Domain location=728-751; Score =3.9; E_value=53; Accession=PF00560.23; Description=Leucine Rich Repeat
  Pfam annotation: Domain name=LRR_1; Domain location=775-797; Score =8.0; E_value=9.3; Accession=PF00560.23; Description=Leucine Rich Repeat
  Pfam annotation: Domain name=LRR_1; Domain location=847-869; Score =5.7; E_value=24; Accession=PF00560.23; Description=Leucine Rich Repeat
  Pfam annotation: Domain name=NB-ARC; Domain location=151-461; Score =311.1; E_value=2.1e-90; Accession=PF00931.13; Description=NB-ARC domain
  Pfam module annotation: Pfam domain module=ABC_tran::LRR_1::LRR _1::LRR_1::LRR_1::LRR_1::NB-ARC; Domain location=188-327::600 -621::623-644::728-751::775-797::847-869::151-461
MADALLVVLRKVALFLGEGALEKIGKEVVEAAPLMTDFEHSMKQIEGELSVLQAFINQVSAQRVSDKAFDAWLNQVRDAAHEVEDIIDEYAYLTAQAVDTSSFFKRKFHQIKNIAAWQKFPSQISQVEARIQRLSEMRNRYGFSLGEIDRNNNFQLSSHFCLSDSEIVGNADEIGKLTQWLLEEKQDRSLIAILGMGGLGKTAVASTVYKNQKIITSFDCHAWVIVSQTYQVEELLREIINQLIIKERASMESGFMTMSRIRLVEVIQSYLQDKKYFVVLDDVWDKDVWLILNYAFVRNRHGSKVLITSRRKDVSSLAADKYVIELKTLKDAESWELFCKKAFHASEDNICPENIRYWANKIVAKCQGLPLAIVTIGSILSYRDLKEQEWAFFFNQLSWQLANNPELNWISRVLKLSLNDLPSYLRSCFLYCSIFPEDYKIRRKMISKLWIAEGLVEERGDGTTMEEVAECYLMELTQRSLFEVTERKTCGRARTFLMHDLVREVTSIIAKKEKFSIALAHGGASTTQVAHEARRLCIQRGAQTINSLRSSRLRSFILFDAEVPCSWIHDTVSCFRLLRVLCLRFVNVEQVPSVVTELYNLRYLDMSYTKVKTVPASFGKLVNLQSLDLRETYVEELPLEITRLTKLRQLQVYALYDILQRSSKFLSATKIPGNICHLKDLQTLHVVSANKVLVSQLGNLKLMRSLAIAEVQQSYIAELCNSLTKMTNLKTLFISTCNVNETLNIEMLKPLPNLTSFLLSGKLERGLPPSIFSMNLKQLKLFGSSLKKDPVSSFSHMLNLVNLFLTGAYDGEQLTFCTRWFPNLKYLQLADMEHLNWIELEDGTMMNLQYLSLAGLRNLKAVPEGIKYIRALHEMLLTDMPNEFMLKLHGSDNHIVQHIPNIKKYDSSDSQAVNNLAYLPWLANKFGPGAAIKPESFLVKALYTDLTEKIIILSEFPTNYISVCLPGGRSVCILVAYMSQATLDSVDA

SEQ ID NO: 44804 - protein, 222 aa, Zea mays
  Coding DNA Sequence Number=SeqID_3025
  Gene Ontology: Mol. function=calcium ion binding; Cellular component =membrane; Biological process=homophilic cell adhesion
  Homolog annotation: Hit_ID=Q3DVE9; Match level="QueryCoverage=96%, HitCoverage=46%, E-value=4e-09, Identity=28%"; Hit description =Putative Ig
  Subcellular localization annotation: CTP_CleavageSite=52; ConfidenceScore=5.22e-01
MQRPDGRNTGQSSVHSRDTISPRPNPASGRNNRPRWIHASPEGLLKQRAHLRLARGPARAGFAEKQPWPDRLANRPYRRSIQCKDRLTPYPDARSSVDRAEPSPASGTIGSSASPDPRARPPPRPRTMVSASPDPRAQTQPRPWKTVSASPDPRARTQPRPRKTVSASPDPRARTQPRPRKTVSASPDPRARTQPRPWRSHHLARPWARTDHVTGGPSLPYP

SEQ ID NO: 44805 - protein, 57 aa, Zea mays
  Coding DNA Sequence Number=SeqID_3026
MESWELLLLHNLQFQFGNRQDEGVVNNRFFSNLFYVQSTKNALTDISKYANQIAVDR

SEQ ID NO: 44806 - protein, 171 aa, Zea mays
  Coding DNA Sequence Number=SeqID_3027
MSVVAAVGPAAAASYGQPLCGGGARKRKDAGVVQDQDQDQDAGSSLRGGKNAALFVLETVEEEADADTERSSIGAASEDGDDEEEEEVASGGTKGAGAALACMDMGALDDALPHQAKKSLADGPALKPDGPRFGQFAVVARTVRAYTESVRVTSLSQNLLPKTAGLTQKSV

SEQ ID NO: 44807 - protein, 91 aa, Zea mays
  Coding DNA Sequence Number=SeqID_3028
MVVPVIPSTFARCPHLVFVSEKNPRIMGKGKLQRIIHQVFCDLGESVVVVVLVNTKSICDVFLCGLYMLFCGEGLSFGRVRLGIADRLFDD

SEQ ID NO: 44808 - protein, 68 aa, Zea mays
  Coding DNA Sequence Number=SeqID_3029
MEKGHVGYGLRRSYSGEVGRLVALAPAKFSAHTIAARAAISRESVAAEGNELTQVSLVIYFFMVFIHM

SEQ ID NO: 44809 - protein, 109 aa, Zea mays
  Coding DNA Sequence Number=SeqID_3030
MPMDAVRSTTMRGTAPSPSTDEKSREHQRRLVRPEDTGGHPRSRRTPTTTRRDQNIVTEGDRRPLLLLMQATMQSLQVTGARTLQSPPCCHLHLLSTVYSGDNLGWGGL

SEQ ID NO: 44810 - protein, 333 aa, Zea mays
  Coding DNA Sequence Number=SeqID_3031
  Gene Ontology: Mol. function=protein binding; Biological process =regulation of transcription
  Homolog annotation: Hit_ID=Q6K7T6; Match level="QueryCoverage=87%, HitCoverage=49%, E-value=7e-55, Identity=42%"; Hit description =Putative tesmin/TSO1-like CXC domain-containing protein
  Pfam annotation: Domain name=CXC; Domain location=175-216; Score =78.9; E_value=1.6e-20; Accession=PF03638.5; Description=TesminTSO1 -like CXC domain
  Pfam annotation: Domain name=CXC; Domain location=67-107; Score=53.0; E_value=1e-12; Accession=PF03638.5; Description=TesminTSO1-like CXC domain
  Pfam module annotation: Pfam domain module=CXC::CXC; Domain location =175-216::67-107
  Subcellular localization annotation: CTP_CleavageSite=26; ConfidenceScore=5.11e-01
MEQGRNQQHPQQLSSPPVLAAASEIKAPAVPSQQPKPAAPVMSVPRQWPIAFNPLKSSTEEKSVTPKKKKHCNCRNSKCLKMYCECFQELQYCDGCNCSNCGNIVGNENARNEAIEAIRQRNPSAFQPKIGNDSNTLNVRKLITASFPSEHGILFMNSRSEILEDNSGAVPLVAKHHKGCHCKKSGCLKKYCECYQANVFCSKNCRCMHCKNSEGNKDTETSIQRDHASDRNHIEQAANIAFNGSVGSSGYICSLSRKRSHEDTQCVRINSEGSMPETQYQQGNHADVSMLPPCSTGFDGHNAANTKPYNPNYSPSGMNVTFGALWEQDVCDL

SEQ ID NO: 44811 - protein, 172 aa, Zea mays
  Coding DNA Sequence Number=SeqID_3032
  Subcellular localization annotation: CTP_CleavageSite=37; ConfidenceScore=5.07e-01
MAHGAALQRDPGGNQWLVHRSQAGGRRVKFTVEARCRKGMVWQSDSRGGRGVCLRRAILAGKKKTGRREGPLAAAVAVVDAWGEWLRGSDCVCLREIHGWTTEIHCVVDSGEKTTSDSTDPRVREIDNGTRSGRLTTRTHQPVTRETALDGHIRRSALFPGLGCAEGDRKMG

SEQ ID NO: 44812 - protein, 245 aa, Zea mays
  Coding DNA Sequence Number=SeqID_3033
  Homolog annotation: Hit_ID=Q6K7T6; Match level="QueryCoverage=73%, HitCoverage=31%, E-value=3e-33, Identity=48%"; Hit description =Putative tesmin/TSO1-like CXC domain-containing protein
MQCFLRSPLANTIHLSEVNDLVKQLVMVCRMAAATIADDETDLIAEEKGSQSNNGLSNGNCKQQDFKEASSMVILSEGCSDQPNIDETGSHRSKTLDFSRPASPTTQALMCDEQDATFGNEPASPTTQALMCEEQNTTFGNDYRSSFPLVSCDQDISEINAAQENLVLTGLREYLRVIITRGKINEHKSSLEAAMELDAQQHHGAPPALSATEDEEKSPPSSTIETPRTNQQPTPNGGSKDSIGS

SEQ ID NO: 44813 - protein, 151 aa, Zea mays
  Coding DNA Sequence Number=SeqID_3034
  Gene Ontology: Mol. function=protein kinase activity; Biological process=protein amino acid phosphorylation
  Homolog annotation: Hit_ID=Q7XE14; Match level="QueryCoverage=54%, HitCoverage=18%, E-value=8e-18, Identity=58%"; Hit description =Protein kinase domain containing protein, expressed
  Subcellular localization annotation: CTP_CleavageSite=67; ConfidenceScore=5.64e-01
MRCLPFLHGDVSEKDPVTKSASVRSMSTTSRSRSGSDFTSLNVSDMSAESIRRTQYPSFTDCPSNLRVFSFAELKSATRNFSRSLMLGEGGFGCVFSGIIKTSDKPNERIEIAVKQLNRKGLQASDSRHVSFFLSDNMYESSTSLYSVENN

SEQ ID NO: 44814 - protein, 193 aa, Zea mays
  Coding DNA Sequence Number=SeqID_3035
  Gene Ontology: Mol. function=nucleoside-triphosphatase activity; Cellular component=membrane
  Homolog annotation: Hit_ID=Q6K7R4; Match level="QueryCoverage=81%, HitCoverage=26%, E-value=2e-73, Identity=73%"; Hit description =Putative ABC transporter
MAAAAAASMVVVREVLGLDVVDEVDQPIIDYIANVLADEDFDFGAPEGHGIFEALGELLIDSGCVSDQEHCLQVCSKLCEKFGKHGLVKPKQAMRSLVTPLRMNAGMDDDVAPKKPQPEVQYQMHIAEMETLRAGMPPVYVNHSNDGGPAVRDIHMENFSVTVGGRDLIQEATITLAFGRHYGEYSVVFGSFQ

SEQ ID NO: 44815 - protein, 127 aa, Zea mays
  Coding DNA Sequence Number=SeqID_3036
MVEYVGEPSPNPLQLAILDSNQPYSKRTRLRTWEHTRTGDGDDRDPSPWPVVACDGGESRLSIPGAPDGSPAQRRYKYVRRGRVMVPGARDRRRVFPSVALPDHGDGSPGAVHRASPGVKAVLDFRC

SEQ ID NO: 44816 - protein, 50 aa, Zea mays
  Coding DNA Sequence Number=SeqID_3037
  Gene Ontology: Mol. function=protein serine/threonine kinase activity; Cellular component=membrane; Biological process=protein amino acid phosphorylation
  Homolog annotation: Hit_ID=Q8LCP3; Match level="QueryCoverage=92%, HitCoverage=12%, E-value=1e-09, Identity=59%"; Hit description=ATMRK1
MANIIRKCWDPNLDKRPDMDEVVRLLEALDTRKRGGMTPKGQAGGMLEEL

SEQ ID NO: 44817 - protein, 219 aa, Zea mays
  Coding DNA Sequence Number=SeqID_3038
  Gene Ontology: Mol. function=calcium ion binding; Cellular component =flagellin-based flagellum; Biological process=ciliary or flagellar motility
  Homolog annotation: Hit_ID=Q75HH1; Match level="QueryCoverage=55%, HitCoverage=55%, E-value=5e-17, Identity=51%"; Hit description =Putative calcium-binding protein
  Pfam annotation: Domain name=efhand; Domain location=151-179; Score =28.8; E_value=1.9e-05; Accession=PF00036.22; Description=EF hand
  Pfam annotation: Domain name=efhand; Domain location=190-218; Score =33.8; E_value=5.9e-07; Accession=PF00036.22; Description=EF hand
  Pfam module annotation: Pfam domain module=efhand::efhand; Domain location=151-179::190-218
  Subcellular localization annotation: CTP_CleavageSite=88; ConfidenceScore=5.09e-01
MLELLVLPPALDLLLHSCLIVSVSSLLIMLALQPLLPGGTDVASASRGVRSASRAVLARLLPSSSRTRSGVPVAPPPPPPPPRHCELCAASSWPGTVAAVTATLHLDADADGDTERSSISSAEEDGTACGGCAALAAVEELLGSKEATERELREAFRVFDRDEDGFVGAAELWYVLRRLGMGGSSSAREDCARMIAAHDADGDGRISFREFRDMMERAV

SEQ ID NO: 44818 - protein, 459 aa, Zea mays
  Coding DNA Sequence Number=SeqID_3039
  Gene Ontology: Mol. function=DNA binding; Cellular component=nucleus; Biological process=regulation of transcription
  Homolog annotation: Hit_ID=Q75HE5; Match level="QueryCoverage=61%, HitCoverage=93%, E-value=1e-112, Identity=71%"; Hit description =Putative NAC-domain protein
  Pfam annotation: Domain name=NAM; Domain location=153-284; Score =292.8; E_value=6.5e-85; Accession=PF02365.6; Description=No apical meristem (NAM) protein
MGPESADVARDATRGPVQSRVAEVAVHEPVAPPRALSLPNPHPPPLSRGIALPPARRYISFLCPRFSASMTAQNPPTGQDTQSRATPPTIGDQQPAAGASCLKTPSRSRTEDWQAQPKPPLLVLGFIASNPDHIMGQPVTRRRERDAEAELDLPPGFRFHPTDDELVEHYLCRKAAGQRLPVPIIAEVDLYRFDPWDLPERALFGAREWYFFTPRDRKYPNGSRPNRAAGDGYWKATGADKPVAPRAAAADARTLGIKKALVFYAGKAPRGVKTDWIMHEYRLADAGRRAKKGSLRLDDWVLCRLYNKKNEWEKMRLGKGAAAGAVKEEEAMDMSTSHSQITHSWGETRTPESEIVDNDLPFPDPAMMVPKKERVDDGGSARTSDLFVDLSYDDIQGMYSGLDMLPPAGEDLYSSLFASPRGQGEPAHRTRGVGPLLSELRRGWRHGDQERRRTALPTL

SEQ ID NO: 44819 - protein, 390 aa, Zea mays
  Coding DNA Sequence Number=SeqID_3040
  Gene Ontology: Mol. function=methylenetetrahydrofolate reductase (NADPH) activity; Cellular component=mitochondrial large ribosomal subunit; Biological process=methionine metabolic process
  Homolog annotation: Hit_ID=Q9SE94; Match level="QueryCoverage=84%, HitCoverage=67%, E-value=1e-125, Identity=89%"; Hit description =Methylenetetrahydrofolate reductase 1
  Pfam annotation: Domain name=MTHFR; Domain location=31-298; Score =394.5; E_value=1.6e-115; Accession=PF02219.7; Description =Methylenetetrahydrofolate reductase
MEGAVQLRTTYYKRVGAAQVQDTDTRVPLPQLQRRQQPQPPNPTRARQTITDGNTVPELLSSYIYNSSTKVCVETMMHLTCTNMPVEKIDHALETIKFNGIHNVLALRGDPPHGQDKFVQVEGGFACALDLVQHIRSKYGDYFGITVAGYPEAHPDAIQGEGGATLEAYSNDLAYLKRKVDAGADLIVTQLFYDTDIFLKFVNDCRQIGITCPIVPGIMPINNYKGFMRMTGFCKTKIPSEITAALDPIKDNEEAVRAYGIHLGTEMCKKIIASGIKTLHLYTLNVDKSALGILMFTRPRGRGKKLQEEWAVPLKSVEGISERFTNFCQGKLTSSPWSELDGLQPETKIIDDQLVKINQKGFLTINSEPAVNGEKSDSPTVGYSTLRAVF

SEQ ID NO: 44820 - protein, 125 aa, Zea mays
  Coding DNA Sequence Number=SeqID_3041
  Gene Ontology: Mol. function=sugar porter activity; Cellular component=integral to membrane; Biological process=transport
  Homolog annotation: Hit_ID=Q53WP9; Match level="QueryCoverage=99%, HitCoverage=23%, E-value=6e-61, Identity=90%"; Hit description =Putative anion/sugar transporter
  Subcellular localization annotation: CTP_CleavageSite=32; ConfidenceScore=5.18e-01
MVGGALADKYGGKKVMAGAAALWSLATILTPWAASRSTLMLLAVRALFVLAEGVAFPTMSTFLPKWFPTHERATVVAISMGGFHLGNVISFLATPIIMSHIGLSGTFTFFASLGYLWLSVWMVNV

SEQ ID NO: 44821 - protein, 141 aa, Zea mays
  Coding DNA Sequence Number=SeqID_3042
MDLTPPASAGPPPAPPSAAGPDSDICRSLDLDRVARLVTGWLVAFLLGQGRKRNLVVDHEAEPAKAKPTWLYRYGAAGTKQGSHLFTYGPNRAVVILALSLLRSAQPVQAALSLLRSLSSLGQFSILADACTVLAVAWPPW

SEQ ID NO: 44822 - protein, 158 aa, Zea mays
  Coding DNA Sequence Number=SeqID_3043
  Homolog annotation: Hit_ID=Q10MR5; Match level="QueryCoverage=82%, HitCoverage=61%, E-value=2e-17, Identity=42%"; Hit description =Expressed protein
  Pfam annotation: Domain name=DUF588; Domain location=2-140; Score =21.3; E_value=0.00013; Accession=PF04535.3; Description=Domain of unknown function (DUF588)
  Pfam annotation: Domain name=MARVEL; Domain location=4-153; Score= -3.7; E_value=0.013; Accession=PF01284.13; Description=Membrane -associating domain
  Pfam module annotation: Pfam domain module=DUF588::MARVEL; Domain location=2-140::4-153
MDGAPARARLLLRALAWLFSLLALVVMASNQHGGSQDFREYPEYKSVHYCLGISIVAWLYATAQVLRDVHRLGSGRDLIAARKASAVVDFAGDQVVVAYFLISAMSAAAPVTDYMRQAADNLFTDSAAAAISMAFFAFVAIGLSALVSGYNLSMEALV

SEQ ID NO: 44823 - protein, 135 aa, Zea mays
  Coding DNA Sequence Number=SeqID_3044
  Gene Ontology: Cellular component=integral to membrane
  Homolog annotation: Hit_ID=Q84TX7; Match level="QueryCoverage=76%, HitCoverage=32%, E-value=7e-17, Identity=81%"; Hit description =Putative amino acid transporter
MADRSRFRPVLVQAIAGVTVVYICFGACGYLAYGDATKDIITLNLPSTWWCCAASRRGPGGPAREPRGGAGGAVRCGVLRAGVRVVRVLRREHGVRAALLRAARVLFHLRVVDWGILLFGLAFAAHGLYAVLSRH

SEQ ID NO: 44824 - protein, 134 aa, Zea mays
  Coding DNA Sequence Number=SeqID_3045
  Gene Ontology: Mol. function=structural constituent of ribosome; Cellular component=ribonucleoprotein complex; Biological process =translation
  Homolog annotation: Hit_ID=P49216; Match level="QueryCoverage=62%, HitCoverage=62%, E-value=2e-25, Identity=68%"; Hit description=40S ribosomal protein S26
  Pfam annotation: Domain name=Ribosomal_S26e; Domain location=1-119; Score=258.4; E_value=1.5e-74; Accession=PF01283.9; Description =Ribosomal protein S26e
MTFKRRNGGRNKHGRGHVKYIRCSNCAKCCPKDKAIKRFLVRNIVEQAAVDQRNCPNMFIWTGYVLPKLYAKVHHCVSCAIHAHIVRVRSRENRRNREPPQRFRRRDDGPRPGQGPPRPGGAAPAAAAAAAPRT

SEQ ID NO: 44825 - protein, 125 aa, Zea mays; identical to SEQ ID NO: 44820
  Coding DNA Sequence Number=SeqID_3046
  Gene Ontology: Mol. function=sugar porter activity; Cellular component=integral to membrane; Biological process=transport
  Homolog annotation: Hit_ID=Q53WP9; Match level="QueryCoverage=99%, HitCoverage=23%, E-value=6e-61, Identity=90%"; Hit description =Putative anion/sugar transporter
  Subcellular localization annotation: CTP_CleavageSite=32; ConfidenceScore=5.18e-01

SEQ ID NO: 44826 - protein, 132 aa, Zea mays
  Coding DNA Sequence Number=SeqID_3047
MANLPLLSLSRSTLSMNYNSLHLYLSRPVIVTLTLILDLLKLCTKLAPLPLLDGSGAPLLVFVFRFIEVVGLWTRFHNACVARREEPTKPTEAVAMSMDSDSADDELNLDVVIKVKDKWVILTQMWNQNKIL

SEQ ID NO: 44827 - protein, 149 aa, Zea mays
  Coding DNA Sequence Number=SeqID_3048
MSPHALLPVGSRIHDPQYDRTRIPSEPQDVDLTVTNFESRPKHPTVRSYINGPNLPAPRSNLNRTFTIQGPSALFPLLQPLPAAMSRTAAELGRSWPNPTPRRAQTPIRRMLRKAVMTANMAKGILPAKTSQRSRATARAGSTTGQQVW

SEQ ID NO: 44828 - protein, 409 aa, Zea mays
  Coding DNA Sequence Number=SeqID_3049
  Homolog annotation: Hit_ID=Q53ND9; Match level="QueryCoverage=55%, HitCoverage=51%, E-value=3e-20, Identity=64%"; Hit description =Expressed protein
  Pfam annotation: Domain name=DUF623; Domain location=284-343; Score =103.6; E_value=5.8e-28; Accession=PF04844.4; Description=Protein of unknown function, DUF623
MQDTSARINCYHPDIGSLPFELAGLTKGGLASIFSSSKHSKPSAGSSASAPSPPWPWPSCATKPQTASFRGHAGGGDDRPCTTSAAGRFEEAAAAPCGGGRLRPRPWRGAAPGDEMYKTVNSVYFDAADSRRFFFFDDDDDGGDDDAADDLLDLEVGSFCTTTASEEWSEAVIRSLGRTSTDRFFFDAGPAPGPAAASNSVLAASPSPSPSPGRALAPPPRVEAPMSLQAALSPSAAAAMTLSDDPADSGSNDGVSEAELPPPASASASASALVEESVAVALDSEDPFRDFRASMHEMVAAHGLRDWAALQEMLLWYLRINGKHNHALIVGAFVDLLVGLATSTSSSSRAASPSATTTTMTTTTACCCCSSSSTSSSSTSSSAASGGDGSSTSAAAAAMQPRMSDAAVE

SEQ ID NO: 44829 - protein, 124 aa, Zea mays
  Coding DNA Sequence Number=SeqID_3050
  Gene Ontology: Mol. function=caspase activity; Biological process =proteolysis
  Homolog annotation: Hit_ID=Q8LJ88; Match level="QueryCoverage=52%, HitCoverage=15%, E-value=6e-23, Identity=78%"; Hit description =Putative latex-abundant protein
MVLAQCFVVKPPDRTMNLMIWHSTIPGKQGVMEQEVHSVDEVYAVTKAWAPNNGILISGCQTNQTTADATTPQGVSFGALSNAIQIILANEHEKVTNAIQTIPADASTRHTSCAVSCMASETSA

SEQ ID NO: 44830 - protein, 82 aa, Zea mays
  Coding DNA Sequence Number=SeqID_3051
  Subcellular localization annotation: CTP_CleavageSite=46; ConfidenceScore=5.14e-01
MALDPNSAHQRNPGQPRARFLPPRYADSWGPLGSATRAHESNRSSRCARGAHLSPLHHTTGTTALARSATSTRHDPINAATS

SEQ ID NO: 44831 - protein, 252 aa, Zea mays
  Coding DNA Sequence Number=SeqID_3052
MAESDLPGISASSWGKMELTPWAHVVEAGVRQATTAARSHHQRAPGHEQRGPRWRITPTSNSPFPGLYPYTTRTWTPSVSTSERPRSRTWTRRALSEDFLAWRLRRELDTEGRGFAVPGKEIPSSGAPVDAIASFGVTPRSFPTRSRPPITDVGKVLWWRRLQVLCALGAVLVCEDQGGRKHGLYRHKDSWWPTDYAESNHPANARRSVMAESDLPGISASSWGKMELTPWAHVVEAGVRQATTAARSHHQR

SEQ ID NO: 44832 - protein, 171 aa, Zea mays
  Coding DNA Sequence Number=SeqID_3053
MSIRIRASRQDINLGLVYLTGDKNATIAVFTARTSGRCAAFISPEHPFDARILRDPPPQRGPPSLFFVPPIPLSFQAPDDASYGMGSFQRKRFDGGSIMATMGSTSEKMYLCQTNTRKANMQWEWRDGESSVYPPWQEAGRWCICALGWREPGLVLRNMAPYLDSLKPAYP

SEQ ID NO: 44833 - protein, 103 aa, Zea mays
  Coding DNA Sequence Number=SeqID_3054
MVPPLPAHTTACAREIGHHKIRAVQSRSKDSEPIPVQWESDLICAISRGSDDSDSAATLRPRGFCERTPKGCVGRFYRINPDLLCISAPSPGIKENRKKRVRN

SEQ ID NO: 44834 - protein, 133 aa, Zea mays
  Coding DNA Sequence Number=SeqID_3055
MEVALAWMATPRRMPTTSDHSGVCEIPPLGDPGEHDDGRQQSPAAAAIELVAHQRRRGVKVTASSLPAFSLSPRDLPISLYGAHWFDVLLITGHDWDSIFIPKNEQSPSADQGVGPTVLVANSLIRLRSSCGG

SEQ ID NO: 44835 - protein, 42 aa, Zea mays
  Coding DNA Sequence Number=SeqID_3056
MAAPPLLRLRSPASSPNSALRYSESLRTGLYTHPKLLQAKHA

SEQ ID NO: 44836 - protein, 38 aa, Zea mays
  Coding DNA Sequence Number=SeqID_3057
MRLHTLRVILADDVVLYSQRYLIHVENERSSSTSTFTL

SEQ ID NO: 44837 - protein, 48 aa, Zea mays
  Coding DNA Sequence Number=SeqID_3058
MTKAYPSFERDDLILLQEIASYMIFACGAVYVISEIVSVLQVTNYHPH

SEQ ID NO: 44838 - protein, 106 aa, Zea mays
  Coding DNA Sequence Number=SeqID_3059
MGHGDADGTDLLPRFKFSLPLDGLTVPYSIFNLIEGCKIHGVVRELIPVKAMATERLVVNTNIHKIYLYFLKLGEVIRLTASLGVLSRMDGGSIPPRFFSVCSVLA

SEQ ID NO: 44839 - protein, 225 aa, Zea mays
  Coding DNA Sequence Number=SeqID_3060
MAPPVDVAGLRPRLGDVEAPPKPRSSLSSVAEAESEPLGRARRRSSAEAGAESEPWGRSKRSSSSSGAEPESEPWVGRSGVRRLPGLSPSPSPGVGRSGVRHLPGLSPSPSPGSGGAELPMVPLAGPDCLSVSLCQVALQSEWSRRLCPSIRPFICAKWLRSKNQESSAFLVNNFVRVRGSNLWRFLTNGKTSLRKKIVVFKWIIGSLEKGLSATLVYWDATTWK

SEQ ID NO: 44840 - protein, 234 aa, Zea mays
  Coding DNA Sequence Number=SeqID_3061
MAGGKKGKKGHRPTDGKRKRPLSPPFEDSKYSEEVFSDYDRSPVPASPVAASDDLDDSMGLSVVEQAYARSIERVGLGGSNDSEEAPSEEVEDSSNSEEGSDNEGGDDGDEGDDDSSGGGDGSSKGGDSSGDDGAKGVPFHPHGCTVILGGHSTNRDLRVQSMDGEFYSQKVEGVLSKTTTSKGTAVYLGSAHGATAMAGAGDSAQANRARGGGDWPGGLCSTARDRNPTITGD

SEQ ID NO: 44841 - protein, 276 aa, Zea mays
  Coding DNA Sequence Number=SeqID_3062
MAKLQRGVSPAIEEVASLPTEESGSAAALVLRRGIQPQPDITSVIASIPSFANLQSGLGAGLCTLEKTNGSDQQSVRVGLRQAETRGRSWVAPMDPATCARAEHIRAVQRRKGENGRADVKSPPASEMGARAEAGLRAPNEHLGDNGDVGKPRVDSGGLRLHEEDSGERGQGKPEGLEVNREMFRVAYGEAELTEATGATRARQRSQNGRRASVSCGGATWSRAQSERGGERAQLRAQMSRGRWASGVQVLKGRGREDVARERAVVGASTVRVWAR

SEQ ID NO: 44842 - protein, 210 aa, Zea mays
  Coding DNA Sequence Number=SeqID_3063
  Subcellular localization annotation: CTP_CleavageSite=54; ConfidenceScore=5.59e-01
MGAARPRLWPAAAPRRPAPQLHAPRPRTRRPPSLGPARPRSGDPAPVPDPARPRTGRRSPAPPGSAVRRRRPARPRPRARSGEPPARARLPASSAPPGSTAPVPRFNRPSPRSASSGRILARSRSLAPACLPARPAVPCSRRVGPCVASSLAQRAYGARLRARLAHGPDVRTRYFGTGGYEIDGSGYDYGAGEDEAVEGDFQEFQDYDEF

SEQ ID NO: 44843 - protein, 78 aa, Zea mays
  Coding DNA Sequence Number=SeqID_3064
MIRVSASLSKLRRTPFQVAPAAGPAPAILAPTPVIPSISAPYITISGDRMDASALANMVVDVPREGVILTSAEYEYIS

SEQ ID NO: 44844 - protein, 465 aa, Zea mays
  Coding DNA Sequence Number=SeqID_3065
  Gene Ontology: Mol. function=transferase activity
  Homolog annotation: Hit_ID=Q5QPY7; Match level="QueryCoverage=99%, HitCoverage=96%, E-value=1e-131, Identity=51%"; Hit description =Glycosyltransferase
  Pfam annotation: Domain name=DUF563; Domain location=86-329; Score =335.1; E_value=1.2e-97; Accession=PF04577.5; Description=Protein of unknown function (DUF563)
MKSLVQSHINVGVIAGVLFVLLTYLVVSQQTAISRPNVVTTVAQWLSNKQQIGGGPGEKVVTTGEQQIADKQLIQGPSKTEKANKVVCSTEERLSDYCEVDGDVRVNGKAWSVDIVPPSGWSERREWKIRPYSRRSAANVDRLNVTQLQDPAAAPPCTVTHHVPGVVFALGGYSGNAFHDHADVLLPLFLASLRYGREVQFLVINRVQPWWLGKYRLALRRLSRYDVVNLDGDAHVRCFPHLTVGLRLHKDFGVVPEWVPGKRRVSMPDFTRFLREAYALPRGAPVSREPGKRPRLMLIQRQRSRRFLNGEEMARAAEAAGFEVVVTELMLDAAVDEQARVVNSFDVMVGIHGAGMTNEVFLPPGGVLIQVVPWGKLDLMARIEYGEPATDMGLKYLCYNVTLEESSLLELLGRDHPAIKDPDSVHRSGWAAMYDIYMTKQDVRLDITRFALTLAEAMDHLRRLQ

SEQ ID NO: 44845 - protein, 100 aa, Zea mays
  Coding DNA Sequence Number=SeqID_3066
MGVPDFCARWRAFNALEACLPEQRATYDSVGVGIQLRADCHYLNRPLKTSHKNYHKHWFYMENHDPKLLEFIRFPKLEWMCDGPPFIEDVLVVMKRIHGT

SEQ ID NO: 44846 - protein, 55 aa, Zea mays
  Coding DNA Sequence Number=SeqID_3067
MEGGEIERRRGVWKIKAVLGRCHPGSAATTLEDPQPLRRSKEIGGEADVEGTKGG

SEQ ID NO: 44847 - protein, 60 aa, Zea mays
  Coding DNA Sequence Number=SeqID_3068
MEQMETLLAVLCANCVPPVNQLCATSEPIVCHRLPPTWLMQSGYREKPTKHVDSVDSGRR

SEQ ID NO: 44848 - protein, 140 aa, Zea mays
  Coding DNA Sequence Number=SeqID_3069
MAEMEPSIGNHMAEDQPTPAASTVEEAAMDADTSGERRSAAALVGLLRGFLAVQQRRAEAYSTLRSLERGSRYSIGLFQRFIGNSSVPAKIGEFPAKTLDIHPGEGIVLVKILLGFRKFLALNPPKLFIVYNSRPKILRT

SEQ ID NO: 44849 - protein, 56 aa, Zea mays
  Coding DNA Sequence Number=SeqID_3070
MATPTPDPKRPSTDLWTDFNVAKRAYKLTPPRITVGRCAYPRAAEHADTVTIPPDA

SEQ ID NO: 44850 - protein, 117 aa, Zea mays
  Coding DNA Sequence Number=SeqID_3071
METMIVGEVMGVEAPGHKVLDDVAMVDQPWHVEDDVDLERLGVDVKPSVEAGFLASNLIATVDKLYGLDALFRKVGRLGKVDVDDVVGGACFDEDEHQVGTFQEHGVSTTRTLESWG

SEQ ID NO: 44851 - protein, 185 aa, Zea mays
  Coding DNA Sequence Number=SeqID_3072
MSTEMEWLETLAADLTKHMDKVQEHLAKVDVCLGNMKQGGSKNEIATAAKEKLECEAVTKQLEVETKHAIDQARRAFLKEETARSLTVLELVEEVANWQKTTDIERLRQRVFWAAKTTQTLRELASLQKTSTIDDYMEHILTHVVRTETLDEQQQVNVYTADLLEPLKTCRALEPQDIEMAMSLP

SEQ ID NO: 44852 - protein, 118 aa, Zea mays
  Coding DNA Sequence Number=SeqID_3073
MTNAISTTTTRHTYKRHIRTPAQNGLGHASEPPNPASALYLVKVRVTRIRHPSPDQRRRQGQGPSRRPYCYRGSDSSPLITTTRHPCTPRLPPYDYKRSPGSLRRGDRRRTTLHRLLS

SEQ ID NO: 44853 - protein, 165 aa, Zea mays
  Coding DNA Sequence Number=SeqID_3074
MNSRSGRGCAPCLVHFFCGARVLEIISLLSMPEFSRSDLADLLKGVQAHEKEKLHLTAKIQVLKKAGRPSERLVNHADCRSRSMAQHVCVHVKEITEAAGTEDAEADAEYDAALKEAIQGVQVAVSSINEHMEEVRYEIDGLEAETIGSKWSEVEEAFPGTLSIK

SEQ ID NO: 44854 - protein, 83 aa, Zea mays
  Coding DNA Sequence Number=SeqID_3075
  Subcellular localization annotation: CTP_CleavageSite=57; ConfidenceScore=5.38e-01
MATPTPDPKRPSTDLRTDFNVAKRYRSSNPCRPPTDLRSIVSLTQIKSQPPATDPAVAESSSHTTNRHGGAPKAAADPSPASR

SEQ ID NO: 44855 - protein, 98 aa, Zea mays
  Coding DNA Sequence Number=SeqID_3076
  Subcellular localization annotation: CTP_CleavageSite=78; ConfidenceScore=5.41e-01
MAFSFSSGHHSLSPVAIGRLVPPTHDSPGRHWAVIVLSQSFVLAAGSWCARLLFTSAWSLLAPARNIGLQNDWCRTPRATAVSPDRPLARAWHLLHDD

SEQ ID NO: 44856 - protein, 109 aa, Zea mays
  Coding DNA Sequence Number=SeqID_3077
MGIWSVDAASHDSTDVASDAYADATSDANTDATANEIVDAATTYVLGISSYGAVTNALGVCSMADTATTITKSAKPTSLCLRQMYDLLTATWQCPRMAGCPFKNVGHSG

SEQ ID NO: 44857 - protein, 72 aa, Zea mays
  Coding DNA Sequence Number=SeqID_3078
MAAYAAGGGVRHWRFPIGDDIVDRQSYSRCMVAEYFSKALLRLRQRTTRLHMVMDYRVLGHVPIESRLEGGE

SEQ ID NO: 44858 - protein, 123 aa, Zea mays
  Coding DNA Sequence Number=SeqID_3079
MAGSEKEATIQTMPEPRSRAQIWCPGESRELWRSSWSLVRRGDRPRPAESLDEVIEAPRIRKLSCTAPTASQSPSFNRALVHWVAMRLPPAMARPWGGSGAAAFVRGCGSLRSVVGQKESGQD

SEQ ID NO: 44859 - protein, 117 aa, Zea mays
  Coding DNA Sequence Number=SeqID_3080
MALSPTNRSVGTCSQLQGDPTRVDNDARNTRRPRRARYNGPDHTRASELDAAARWDDDVAGLRLVPNLAKGVLARFVSGGPATAAKALSEGWHLCLRPNICPPRDQFDKVTWCGRRH

SEQ ID NO: 44860 - protein, 113 aa, Zea mays
  Coding DNA Sequence Number=SeqID_3081
MEPELRPYFERKKKELVDDDASGSGTVTAALGLGDSALGLGDGGRSSSVKGTAALGLGEGDGVAWALGDGGARARGRGRRRSSSGTAALGLVLGDGDTTVAWRRNCVSSGGKS

SEQ ID NO: 44861 - protein, 69 aa, Zea mays
  Coding DNA Sequence Number=SeqID_3082
MEHTRARLDGMAAGGGSDARSYTCEGTAMTREEWKTRSAERAMRSASVTAASEGEGADRGGPQERIIPF

SEQ ID NO: 44862 - protein, 123 aa, Zea mays
  Coding DNA Sequence Number=SeqID_3083
MAGSEKEATIQTMPEPRSRAQIWCPGESRELGRSSWSLVRRGDRPRPAESLDEVIEAPRIRKLSCTAPTASQSPWFNRALVHWVAMRLPPAMARSWGGSGAAAFVRGCGSLRSVVGQKGSGQD

SEQ ID NO: 44863 - protein, 358 aa, Zea mays
  Coding DNA Sequence Number=SeqID_3084
  Gene Ontology: Mol. function=DNA binding; Cellular component=nucleus; Biological process=regulation of transcription
  Homolog annotation: Hit_ID=Q0PJK4; Match level="QueryCoverage=44%, HitCoverage=49%, E-value=1e-62, Identity=69%"; Hit description=MYB transcription factor MYB84
  Pfam annotation: Domain name=Myb_DNA-binding; Domain location=23-70; Score=48.0; E_value=3.2e-11; Accession=PF00249.21; Description=Myb -like DNA-binding domain
  Pfam annotation: Domain name=Myb_DNA-binding; Domain location=76-121; Score=46.5; E_value=9.3e-11; Accession=PF00249.21; Description=Myb -like DNA-binding domain
  Pfam module annotation: Pfam domain module=Myb_DNA-binding::Myb_DNA -binding; Domain location=23-70::76-121
MTTRSKHRRHEEDQEMTMVELRRGPWTLEEDNLLMNYIACHGEGRWNLLARCSGLKRTGKSCRLRWLNYLKPDIKRGNLAPEEQLLILELHSKWGNRWSRIAQHLPGRTDNEIKNYWRTRVQKQARQLRVDANSAVFRDAVRCYWMPRLLEKTMAAAAASTSGEVLLPPLPPPPQLHPSRVAGLLASSSSSPVQRDTSDSDYLPQRYHHHPVDPSPSASSTVSSSAALAPVPCFSELSWVDQYGYGPYYSYGANLDDGAGVFDDSAALEEGLGLDALDLGPADDSDVAHSDATLLDYLNSACAGGGTMMMAVTGGGGGVQSSGCGATGGADADYRPSPCTWRTDELGDPRQHQWGGGI

SEQ ID NO: 44864 - protein, 76 aa, Zea mays
  Coding DNA Sequence Number=SeqID_3085
MGQQEHGVSDGLYTYRHHHEGGADIHTIFMKKSKFRILLSCSRRPNDCGSALFINSLSRRDGHRQQQLIDISGHGT

SEQ ID NO: 44865 - protein, 66 aa, Zea mays
  Coding DNA Sequence Number=SeqID_3086
  Pfam annotation: Domain name=ATP-synt_C; Domain location=8-53; Score =25.3; E_value=6.1e-05; Accession=PF00137.12; Description=ATP synthase subunit C
MNPLIVAASVIAAGLAIGLASIGPGVGQGTAAGQAVEGIARQPEAEGILGTFRQRRSFTGQTGPKT

SEQ ID NO: 44866 - protein, 170 aa, Zea mays
  Coding DNA Sequence Number=SeqID_3087
  Gene Ontology: Mol. function=oxidoreductase activity; Cellular component=mitochondrion; Biological process=electron transport
  Homolog annotation: Hit_ID=Q8LP96; Match level="QueryCoverage=67%, HitCoverage=28%, E-value=2e-54, Identity=86%"; Hit description=Moco containing protein (Os08g0530400 protein) (Moco containing protein(OsMCP))
  Pfam annotation: Domain name=Mo-co_dimer; Domain location=38-162; Score=113.4; E_value=6.5e-31; Accession=PF03404.6; Description=Mo-co oxidoreductase dimerisation domain
MPRSSAEATPAVREEVGDDKRVPRLSEGLSSARGRAGQWARMAASTRDTRANGGSEARIAGYALSGGGRGIERVDVSADGGKTWVEARRYQKDNVAYVSDGPQSDKWAWVLFEATLDVPANPEIVVKAVDSAANVQPEKVEDIWNLRGILNTSWHRIKIQRSSCVERSKL

SEQ ID NO: 44867 - protein, 73 aa, Zea mays
  Coding DNA Sequence Number=SeqID_3088
MQLCLPGAVVPGAWCLPAGGGGLVEWWGAAADLGLEQSGGESLNGAAERSQTRYALNPVNVHDFMDELIIGKQ

SEQ ID NO: 44868 - protein, 80 aa, Zea mays
  Coding DNA Sequence Number=SeqID_3089
MQYNGSSSLISCEKQTIRIEFLNLARAHRLGVQCLTDPDSCRAVTALVPTITGMGDHVSGPVRAKSAARFTQWVNIDLCG

SEQ ID NO: 44869 - protein, 98 aa, Zea mays
  Coding DNA Sequence Number=SeqID_3090
  Gene Ontology: Cellular component=integral to membrane
  Homolog annotation: Hit_ID=Q2QLQ4; Match level="QueryCoverage=74%, HitCoverage=53%, E-value=4e-20, Identity=56%"; Hit description=Erg28 like protein, expressed
  Pfam annotation: Domain name=Erg28; Domain location=5-78; Score=23.1; E_value=1.8e-06; Accession=PF03694.4; Description=Erg28 like protein
MQYDLGFSVTGVHGRTVAVWTLLSCTLCFLCAFNLSSKPLYAATFLSIVYAIGHLSVECVVYHTISAASLAPFTFITVTTMVSLQEKPKFSWAKNPRK

SEQ ID NO: 44870 - protein, 102 aa, Zea mays
  Coding DNA Sequence Number=SeqID_3091
  Subcellular localization annotation: CTP_CleavageSite=27; ConfidenceScore=5.07e-01
MPPPKHRARTAPGQTGRLAPASIGAPKAAHLEPPRQPPRTVPWSRLGPAIRASAAAHPTRTQPSPASLDALKPTEARNRPPHLSQTPRPRHPAARRPDEDLA

SEQ ID NO: 44871 - protein, 112 aa, Zea mays
  Coding DNA Sequence Number=SeqID_3092
MWFRGEGDTWQCDPTNQRPGARQGGISTGQQGPHNSGASNTTAREQALWQWGPNGVRLAKATRLVQLEDTNKRVLQAYGSTASLFMQMGSYKMLSDWGYGYVYIVVVVVNCT

SEQ ID NO: 44872 - protein, 404 aa, Zea mays
  Coding DNA Sequence Number=SeqID_3093
  Gene Ontology: Mol. function=exonuclease activity; Cellular component= intracellular
  Homolog annotation: Hit_ID=Q2R3D7; Match level="QueryCoverage=62%, HitCoverage=45%, E-value=5e-18, Identity=59%"; Hit description =Exonuclease family protein, expressed
  Pfam annotation: Domain name=Exonuc_X-T; Domain location=138-273; Score=-6.8; E_value=0.0045; Accession=PF00929.14; Description =Exonuclease
MKTPLLTEEMQVNNEAPLGCLKPNISQYNSPEQIGGVEGFPENNEKRNDIVAAEKIWEATPNQGLSRPIYRQEFYAWPYIYSDYQIVRQPLPYGFDNQFYQINRDHGFPIENRVQYLPFKMLPQGHPHDAQLQEFQYFVVIDFEATCDKVNNPFPQEIIEFPSVLVNSATGKLEECFQTYVRPTYHQFLTDFCKELTGIQQIQSVGHAVFYFSATQLVCYNGAESSFRADAAHDGGHGRCREEELSKKIDGLGSLHNKLAEIEKRQMGHEKEVQFLQAKIDLSMKSLAQAVLGEFDLYTHSDKMLELLTLKQTGSAAEFSTQFTTLVDRGVPLGEALLMHDKWLEDKGIKNTNFAIVTWSNWDCRIMLESECRFKRIRKPPYFNRAMGHVGYANDYYPASKCAL

SEQ ID NO: 44873 - protein, 222 aa, Zea mays
  Coding DNA Sequence Number=SeqID_3094
  Gene Ontology: Mol. function=exonuclease activity; Cellular component= intracellular
  Homolog annotation: Hit_ID=Q2R3D7; Match level="QueryCoverage=77%, HitCoverage=46%, E-value=6e-31, Identity=45%"; Hit description =Exonuclease family protein, expressed
  Pfam annotation: Domain name=zf-GRF; Domain location=177-222; Score =16.0; E_value=0.00034; Accession=PF06839.3; Description=GRF zinc finger
MQTSPQVTWMDLLDREAWWRTEPEESPEWGGLETLIGRPGGRGATAAMWINLRVPFQEVYGDVRCNLKEAVQLAGLTWEGRAHCGLDDARNTARLLALLMHRGFKFSITNSLVWQPAAAPQSTAATCHFSPDRSPDPVVVQLQHQQQQHKPKEALGSPASLVNPSYATPAGGKDRAMYCYCGVLSRWSVVRKPGPMQGRYFFGCGNWTATRRAICPYFAWAS

SEQ ID NO: 44874 - protein, 156 aa, Zea mays
  Coding DNA Sequence Number=SeqID_3095
  Gene Ontology: Mol. function=nucleic acid binding
MYVNAIVVNIVLDACATNSCPAHQFIEKFFTYRFIMGVRNEYDALRARLLHTSDSHTIAKALSSLLAKETRLKSMSSATGSGSHSVLAAAQKSYALRSSFLVPCEHCKKNTHRTGHCLAKFPEKLADFRAWCAAHGRDTGSAPRGSVAIASTSPAD

SEQ ID NO: 44875 - protein, 113 aa, Zea mays
  Coding DNA Sequence Number=SeqID_3096
MENQHSRRRLPRRRGSPDRSEVLEPALTVTTRPIARCRRQGSARGGDAASGAHGDKAARTETEATESPGVPGRQAGGKTAPGHYIKKTFSRRSRKPPNSCPTHTQRLYNPCEN

SEQ ID NO: 44876 - protein, 74 aa, Zea mays
  Coding DNA Sequence Number=SeqID_3097
MGTGVGADETGSTFASYNSNGGEVVAIAEEEYEEEGEREREDDVGPRPAVVAVDLSPCHRSLLPDASLTLLMAT

SEQ ID NO: 44877 - protein, 92 aa, Zea mays
  Coding DNA Sequence Number=SeqID_3098
MAPPRALELWWSESENERWCLSVSVRACCWGATDADEFERTVEIIMADEVLHIISSCETRRSMQLLGDVTLQWMSHNQMKYLLSDSKRLKVL

SEQ ID NO: 44878 - protein, 81 aa, Zea mays
  Coding DNA Sequence Number=SeqID_3099
MSWGLHGVLGARKEYQALEHLHSLRTRALSLPKTLHLPRSTLLPFLNIFPSDNDEATNEEACAPMVKGDQQDHSRDVPDTT

SEQ ID NO: 44879 - protein, 86 aa, Zea mays
  Coding DNA Sequence Number=SeqID_3100
MTVGAPGSHITFGTLDFFVIAVGELSLVVPDMPDIMGTQPRHSTRTKAEKRCLKRRVTALRWRLNRHTGTKVVEASCSTLVAVIDR

SEQ ID NO: 44880 - protein, 78 aa, Zea mays
  Coding DNA Sequence Number=SeqID_3101
MAELCSRAESLESEEAPLHSEGEELWKMLSQADDAKRTTEDMKATFEARVREILLACDGAITTSDKAAIVLSKRSAKL

SEQ ID NO: 44881 - protein, 44 aa, Zea mays
  Coding DNA Sequence Number=SeqID_3102
MMPPQVERSPPPRASFPSGEAPPRKIMGQRKETGDDKTGNKDES

SEQ ID NO: 44882 - protein, 147 aa, Zea mays
  Coding DNA Sequence Number=SeqID_3103
MGTNGHLDLDTGGKSVDQKIRPIHPPSRRLSEGEVGEKDKTSLKDEANDEEPIDSKRRKKGWQEKCIKKIVYYETHSSTLPSPSSGEEPTSERHQQKNDISSNETVMHYRNRRLCRVPEALGKLFAECRTQQTGLDTQCIGKDFFAE

SEQ ID NO: 44883 - protein, 459 aa, Zea mays
  Coding DNA Sequence Number=SeqID_3104
  Gene Ontology: Mol. function=mannose-6-phosphate isomerase activity; Cellular component=cytosol; Biological process=carbohydrate metabolic process
  Homolog annotation: Hit_ID=Q9FTR6; Match level="QueryCoverage=93%, HitCoverage=96%, E-value=1e-180, Identity=74%"; Hit description =Putative mannose-6-phosphate isomerase
  Pfam annotation: Domain name=Cupin_2; Domain location=381-452; Score =8.7; E_value=0.037; Accession=PF07883.2; Description=Cupin domain
  Pfam annotation: Domain name=PMI_typeI; Domain location=30-416; Score= 378.3; E_value=1.2e-110; Accession=PF01238.11; Description =Phosphomannose isomerase type I
  Pfam module annotation: Pfam domain module=Cupin_2::PMI_typeI; Domain location=381-452::30-416
MEDPPALPLPEPESEPDPDPEASPAPPQRLLRLRCAVQHYEWGQRGAASLVARLADQNPDPARPYAELWMGTHPSAPSTLLDDGTLLSDWLARNPDALGPAVAARWGVDLPFLFKVLSVAKALSIQAHPDKKLAEVLHALRPSTYKDDNHKPEMAIAITEFRALCGFAGIEELKDVLRAFPEIEGLVGHEDTGKLMNMKEDDGVSEVKSSLQSAFAKLMTASKDMVSEAVAKLISRLNTKSKKYGSSPGDELVKFFGKLGLLFLIRTLTDKEQLVLSLERQYQDDVGVIAALFFNYVKLSPGEALYIGANEPHAYLSGECIECMATSDNVVRAGLTPKYRDVQTLCSMLTYKQGFPEILRGVPVQPHVRRYTPPFNEFEVDWCLVPPGGLVVISPVPGPSIFLVITGEGEIQLDFMSDGEKAEEGDVFFVPAYTEVKISACGPESVQLYRAGVNSRFFS

SEQ ID NO: 44884 - protein, 89 aa, Zea mays
  Coding DNA Sequence Number=SeqID_3105
MAAHQPQRAVAPLPRTRIPSPAPEALIGYALFHAETKTNWGEEFLPRLRAQRPPTTARCDPNCYQSPRHPRDADDSVEEGRLTAWAHVF

SEQ ID NO: 44885 - protein, 127 aa, Zea mays
  Coding DNA Sequence Number=SeqID_3106
  Subcellular localization annotation: CTP_CleavageSite=37; ConfidenceScore=5.60e-01
MPLAARGGPPLPGPVSPPPAWPGSLRPRPWLGPLPVRSSAPGAAPCRVPARCGAPAQRGFNSGGRGAPTWRAPCPRLGPGVCVARSRRVNAALRARACVVRNALARARRVLGVTHNVLSRGDVPVYP

SEQ ID NO: 44886 - protein, 80 aa, Zea mays
  Coding DNA Sequence Number=SeqID_3107
  Gene Ontology: Mol. function=nucleotidyltransferase activity
  Subcellular localization annotation: CTP_CleavageSite=56; ConfidenceScore=5.07e-01
MEDNITLCGTIVVGTIRKAGMAGVGSPMPSGFLTTGVPIVWKNTSEVIGSLLDTAFANMSVSSFLLSFYMLECESFELFL

SEQ ID NO: 44887 - protein, 83 aa, Zea mays
  Coding DNA Sequence Number=SeqID_3108
MAGKKKVRGFWRKFTETQRIGNEDGGLNRYNLGVSLTKYTREGVSTVSGRWITFGSESNDGNSMHARSDWIRRIISNGPRSKS

SEQ ID NO: 44888 - protein, 70 aa, Zea mays
  Coding DNA Sequence Number=SeqID_3109
MLCFPGKLLVGELVARRHGKRGHVREIASVGGAERDKARWERNKVWRLWEKQLAESDISYVRQSLRAFGN

SEQ ID NO: 44889 - protein, 74 aa, Zea mays
  Coding DNA Sequence Number=SeqID_3110
MGKPGPSLLMLLLCRVTTLVPTITGMGDHISGCVRRAICGQHYSFEDNGSRTKVDKSLITKLNLRNELSRNIVR

SEQ ID NO: 44890 - protein, 84 aa, Zea mays
  Coding DNA Sequence Number=SeqID_3111
MAVGVSEALYAKAHWIAGVLVPGIAMRGFAGVSAAADICCTLGYREVDDVFVAVDAEWAVGIGATYRFVPWGSGTSRSDSTCAM

SEQ ID NO: 44891 - protein, 94 aa, Zea mays
  Coding DNA Sequence Number=SeqID_3112
MLGRRRNVPLTPEARTRGFKTEDEEGLKIEPHCEVLRDNTRAKTHELPLPGQAEAKTIKDSRDRRIRTMKTMHCNLPHCKRGPMHQTVSYSATV

SEQ ID NO: 44892 - protein, 163 aa, Zea mays
  Coding DNA Sequence Number=SeqID_3113
MALRGNWPVTPCEAFMVGTGATLDHLRKKSLKILGDTPNGCAQGVSWGRRGRDWPRRADGKRKRAPSPPSEDFDDSEYSEEASSEYDRLPALASPSASSEDLDDSMGLSTAARAYLRSIERAGLDGSDESEEVSSEEVDSSDSSEEWSGDDGDDEGDGSKGQQ

SEQ ID NO: 44893 - protein, 110 aa, Zea mays
  Coding DNA Sequence Number=SeqID_3114
MDLLSDVSGRLMEVVVDGSWRHGRPAKTEAHRGRGCRTQRKIWWARAERAVEGAGRTKRAQQRAIMSSACAVRMRGPRAASGGENASDYRRCNLKLVVNLSQPTREQHYS

SEQ ID NO: 44894 - protein, 423 aa, Zea mays
  Coding DNA Sequence Number=SeqID_3115
  Gene Ontology: Mol. function=cation transporter activity; Cellular component=membrane; Biological process=cation transport
  Homolog annotation: Hit_ID=Q9LDU0; Match level="QueryCoverage=76%, HitCoverage=94%, E-value=1e-137, Identity=69%"; Hit description =Putative cation diffusion facilitator 9
  Pfam annotation: Domain name=Cation_efflux; Domain location=182-417; Score=164.3; E_value=3.2e-46; Accession=PF01545.11; Description =Cation efflux family
MGDDDDHNEGLRAGPTASWRLNVSDFHMPERPKEPPFVARVFLRSHGPDSGTEPPSPANHGTAKTPGPGAGAETMGSPHHGHGVDGGGRSDDEEGDAGSWRLRMDSGFSVPDRFHRQPPFYARIFGGSHGKQRKIAKYYKKQENLLKDFSEMETMNEMGGLDQNAPTEEEQKQLAKSERFAINLSNAVNLVLFVTKVVASVESASMAVIASTLDSLLDLLSGFILWFTAYKMKKPNKYNYPIGKRRMQPVGIIVFASVMGTLGFQVLIESGRQLITQDHFFDVITNSVGLVSALLAVRFKWWMDPVGAILIALYTITTWARTVLENVGTLIGKSAPAEYLTKLTYLIWNHHEEIQHIDTVRAYTFGTHYFVEVDIVLSGDMPLSQAHDIGESLQEKLEQLTEVERAFVHVDFEFTHRPEHKAE

SEQ ID NO: 44895 - protein, 298 aa, Zea mays
  Coding DNA Sequence Number=SeqID_3116
  Homolog annotation: Hit_ID=Q9LG92; Match level="QueryCoverage=97%, HitCoverage=98%, E-value=4e-89, Identity=62%"; Hit description =Putative seed specific protein Bn15D17A
  Pfam annotation: Domain name=DUF260; Domain location=4-109; Score =124.5; E_value=3.1e-34; Accession=PF03195.5; Description=Protein of unknown function DUF260
MRMSCNGCRVLRKGCSDNCAIRPCLQWIRSPDAQGNATVFLAKFYGRAGLINLITAGPEHVRPAIFRSLLYEACGRMLNPVYGSVGLLWSGNWQLCQAAVESVLRGIPIAQPPPTATAVPPLRSCDIRHVARREAGRGAVDAGLHRMANSSRGQFKRSGAQHRSADSGSIELVFSQPSAASSMLVDIRQAQPLNWAPRHPSPHQYYSASHDDDAVRESDDSKASVDTVDVSHVSQSEPAEPPRESNERADGLDLTLGLPPTAHKVERLETSSDVDDDQTSHRGEPTKLGFAMADSRAR

SEQ ID NO: 44896 - protein, 138 aa, Zea mays
  Coding DNA Sequence Number=SeqID_3117
MSCRPGWPYIEAVATEEGTEEEEDKLAEKELAQTSMQATNKRPQRRYPVAPIVMCLVLAWASCLHGDDTKLLAAAVPLPRRPAATSSVAAAGGMPVVVGYRPRPQAGAAAGRSAPRSTAWIGDDKRQIPSCPDALHNR

SEQ ID NO: 44897 - protein, 630 aa, Zea mays
  Coding DNA Sequence Number=SeqID_3118
  Gene Ontology: Mol. function=structural constituent of ribosome; Cellular component=intracellular; Biological process=translation
  Pfam annotation: Domain name=DUF1666; Domain location=391-629; Score =468.1; E_value=1.1e-137; Accession=PF07891.2; Description=Protein of unknown function (DUF1666)
MPPLLFRSLASLNLLLLVGYLLLVLLAKLFARLHHRATAKDRTSNWYDGRCDHRTEALATDEAEYAAAAADIVQAQQADTLSWFDEAAFEDSTLVLGDEGKDHPYAATAATARCCLQVVESNFPMQESARISPRNQNRRVDVDVEAEPMQQQQHVLEEAKGIAVDVQQATVLEPERRRSAPAPVVVSPEDVSIQGSLLGNKQESNRPGEDTRRDAHAEHEDEEGQQGKSLAEGHHNVKLFVNNRALADARKLLLEGAVNGAQAQLQLQLQDDKDNKNGDSCRLDASTLTSGSSTSKSSVEWQSSTVTKDSETEYPFSCSSRRSSARWEPYTLFRKYDEDMVYFHRVGAQKLTETVIQVHQVPAAVGVGEDRAQADAELGRAPASSACGTRTRELERAYVAQVCLTWEALNWNYTSFRRHNGSDDGSVAARCCPARVAQEFQQFQVLLHRFVENEPYEHGRRPEVYARTKNSTPKLLLVPEFRDEDDEKDDLISAVQFLLILEESIRTFMAFLRADKRSHYEMFRETVKRRASAMDQTPVVTLKKANKKKKSRLKDLTRPRRCLRRTRLRQQEELSILLGLIDLKVVARVLRMPEITDQQLHWCEEKMNMVRIDLVGKMQRDSAPLFYPAH

SEQ ID NO: 44898 - protein, 124 aa, Zea mays
  Coding DNA Sequence Number=SeqID_3119
APGPASGEGASLQVGLESDWRLACCSYVPVDALTCGSRWSVPLPVVNYGPSIAAKELHGSHVVGVLGPAADSASWVFKYRPCAPFLRCPTPRQHLRRRVPHEGCPLPPPSHVSAWIEFSASPDL

SEQ ID NO: 44899 - protein, 219 aa, Zea mays
  Coding DNA Sequence Number=SeqID_3120
  Gene Ontology: Mol. function=DNA binding
  Homolog annotation: Hit_ID=Q651V3; Match level="QueryCoverage=65%, HitCoverage=37%, E-value=1e-18, Identity=32%"; Hit description=NAM -like protein
MENYNYDQPSQAPGDYVPCTYTEGIDLTEIDDEGNMNFAFTKCMNMEDSQHSTPTDPKPKKVTTWRLGNYTQAEDGILVSAYMNMSKDPTIGTNQSGKAYWCHISDYYNEHKKTANARTQHSLEHRWSDIQRDTTKFCAAYDKVIRLKQSGKSEDDKAKQGEDEFGSPSDTFVRPMGRDRAKKARSTSTSSNSTACMALLEKFQEDRARFEEKATKYED

SEQ ID NO: 44900 - protein, 88 aa, Zea mays
  Coding DNA Sequence Number=SeqID_3121
METRKDVQEWANTTVGETHLGKRKTKIGPSERKQKRVKFVDKRAKRKRLGLKKAQLTLVKVMVATIMMMVAIGMVQVMLEYMVLEIAM

SEQ ID NO: 44901 - protein, 176 aa, Zea mays
  Coding DNA Sequence Number=SeqID_3122
MPPVSAVRSRRRRGHNPDEGLGYLGSTRAHSGRSGELNRGHNVGAGAPEGANRGRVAQRRHGLAPASNHAKDRTTNGFMGVAHLERKLWRTGATMGTQGCLESTTVGLRLHGGNAGERGPGETERLRANQKVARVADEEAELTEATNAVDARRRPRNGGGSRRSSTGAVRRAREFI

SEQ ID NO: 44902 - protein, 77 aa, Zea mays
  Coding DNA Sequence Number=SeqID_3123
MSFTPGEEPRVLRGGEGKPLNARRMFGAMHKSDSPSFLQTPIGFVYGRSMVVFKISSRRFGWSSRFVVQIMCDEAML

SEQ ID NO: 44903 - protein, 175 aa, Zea mays
  Coding DNA Sequence Number=SeqID_3124
MAAKEGWHDIARGCAARQRRWTVRRIEPKKLTTMSKTVLDGVEGRGQPWGLDNDEWRSRGAVRPTVLRGGDGAAHHRGAEGKGAATAVEKELDSMVLATSRLGEGAEKGGRTPAFGRRGAVEQRARRGKPAGDRCRERGAERHGRRSEWGKRWRAPSRGWLGHDKSREGEARVQV

SEQ ID NO: 44904 - protein, 160 aa, Zea mays
  Coding DNA Sequence Number=SeqID_3125
MYTKPKKIKNKYKKVKLAVLQFYKVDDATVKVTGLRKECPTPSVMRGCSWPTTSTATTAPLTDCLFGEQRAGLGVPPPPQRLQAPLTTSPLSGFSTDYGDLKLETPVISDIASLSASPFSISLSPSSPPFEDGRLNSGVEWYQVLPIAAPKNAPRMGASV

SEQ ID NO: 44905 - protein, 126 aa, Zea mays
  Coding DNA Sequence Number=SeqID_3126
MDGGGGPRFAWAERERERAGQRAQMEEGRWASRARGLGRGRRSRERGRVHGGEILGERVLHGANHRMQLVDDLKKDGHDQWMLAKLYSSLDLRQSLPCWMMVGTSAAIARRKPGTIGALYAKAVPP

SEQ ID NO: 44906 - protein, 124 aa, Zea mays
  Coding DNA Sequence Number=SeqID_3127
MHALTTFYAFHPLEMVTHPIGLFLAAKEDDPMWKDRVDHAKEVEERNHTIEVLENQLQNTQQQLEEANEHLDMHHQEMHHDMEEDEDVDIEGEDPELASSLDTASTAHSGGPPCPESSVASHAR

SEQ ID NO: 44907 - protein, 179 aa, Zea mays
  Coding DNA Sequence Number=SeqID_3128
MDEERMHGWVELGLEDDERHGGIATRYRNWAIGRGARKVREPRPWEIRASAGKQQRRREESGLIAAQRERGHHGQRPGARGKGDPRVSGARSKDGARRAARLVSSQGEATARERHAGNSAQRASRRQNVGQGVQPPANGSAIGECRSEPRAPRARREISVGRHGCRRLRTGKLDGWGWD

SEQ ID NO: 44908 - protein, 147 aa, Zea mays
  Coding DNA Sequence Number=SeqID_3129
MGFDSVADGAAQHNKHLTGITVCCSLCSTPPRHLAEHLACAQCWQRGSKIGIGSTRGGLLFCGEERRSRGLKLGGIGLSPWVELGWGDVPMGEEFGCPPWLRRSQARQGGRVVGPGRSLAAAGKNKARRLELRQRHGRQGGALSTGA

SEQ ID NO: 44909 - protein, 70 aa, Zea mays
  Coding DNA Sequence Number=SeqID_3130
MAKRLISIPYFRYQNHNEAKSVVLTALPDVLRANRLRTRRQVDDACGQRWRYGRGDGTGPHAQQQRQAPE

SEQ ID NO: 44910 - protein, 94 aa, Zea mays
  Coding DNA Sequence Number=SeqID_3131
MARSNIKILAIPAIDDGKKSRKDVRKNSTVDCGTYTKNIIYKEYLLVSYATILQNSFSLQASLLKKIPSAYANGSIKEQVFTQNLALFFTSILR

SEQ ID NO: 44911 - protein, 163 aa, Zea mays
  Coding DNA Sequence Number=SeqID_3132
MAKDRAYADLYKLLSTKEGEDIYRMATVHERKTGGFNQVKCIKDETEHSLVKEDEIIHCRFVSKLWDLISGIELQPEVEDRHIFSIAPNGVYSAKSAYEGNLVFIHSHHSRPQTPSWDGGKWWGEQYLDSQKRALTLSSFWELGLYGIIEINAFLMAATQVCP

SEQ ID NO: 44912 - protein, 92 aa, Zea mays
  Coding DNA Sequence Number=SeqID_3133
MARSLVVFNSQPTALARPEYFRYQILPLARRPINSSDVAATSEQRWRRLPPHTSPSPPPSLEKTRLCREDTAVHRRQRRCREDTEIGLQDKN

SEQ ID NO: 44913 - protein, 165 aa, Zea mays
  Coding DNA Sequence Number=SeqID_3134
MTRFSKLRMASNDSNVVYTPNIAIRFGSLDSIVNNEGEMTRAPETLVPSTTDLPNVGRGLGDLWLCPPQEERGLQGSARPTRTDVIGVLDPIRDSFLDILLLGSEDGLSSSHSEASCNPVQECLAANTTRDHFPYAGSLGGLLLVSRYVPRCLPHPSSLGPSVGP

SEQ ID NO: 44914 - protein, 250 aa, Zea mays
  Coding DNA Sequence Number=SeqID_3135
MENMSSDCGGSKRGIRFGFSWADEVEREELEQEEEERRRWDTEREQIKADPFGGARPLGVEHRRSEMEREKVKADPFGAARPREVVLAEKGVDWRARDCELDLRLRTAPRPRRSQKHAAATATSKGTVAAHGATPARGAPRDQDAAGAGRTPHPRGQRAAFSTPLPPTVSHSAWGGSKRKCAGEGPGPSRRVQTVDNQRKVFGELNVGEGCGSSIRTSNNKSCDSGGSQAEGIKSNMPAVADECTVLPTP

SEQ ID NO: 44915 - protein, 76 aa, Zea mays
  Coding DNA Sequence Number=SeqID_3136
MAALSPPVASLDIGRPAPPDVGRLVLAHSPVCHRLPAGADVIKGIDKFTPLTLVAYCIRGINRFLRVFTRACRVNL

SEQ ID NO: 44916 - protein, 285 aa, Zea mays
  Coding DNA Sequence Number=SeqID_3137
  Gene Ontology: Mol. function=nucleotide binding; Cellular component =endoplasmic reticulum; Biological process=small GTPase mediated signal transduction
  Homolog annotation: Hit_ID=O04834; Match level="QueryCoverage=79%, HitCoverage=100%, E-value=5e-77, Identity=66%"; Hit description=GTP -binding protein SAR1A
  Pfam annotation: Domain name=Arf; Domain location=44-266; Score =327.6; E_value=2.2e-95; Accession=PF00025.11; Description=ADP -ribosylation factor family
  Pfam annotation: Domain name=MMR_HSR1; Domain location=60-206; Score =17.0; E_value=2.7e-05; Accession=PF01926.13; Description=GTPase of unknown function
  Pfam annotation: Domain name=Miro; Domain location=61-206; Score=4.1; E_value=0.0022; Accession=PF08477.3; Description=Miro-like protein
  Pfam module annotation: Pfam domain module=Arf::MMR_HSR1::Miro; Domain location=44-266::60-206::61-206
MAKVANKSHRDRIQDFNQYMANLSKHAKRKRKRSAGVVKMFLVDWFYGVLASLGLWQKEAKILFLGLDNAGKTTLLHMLKDEVLSTSDIRPFSLRIPVLYAFDLTGIPDLVRLGSSQRLVQHQPTQYPTSEELSIGRIKFKAFDLGGHQIARRVWKDYYAKVDAVVYLVDAVDKERFAESKKELDALLADDSLANVPFLILGNKIDIPYAASEEELRYYLGLSNFTTGKGNVNLADSNVRPLEIFMCSVVRKMGYGEGFKWMSQYIKRVEIKSGRDMAAAWKGLW

SEQ ID NO: 44917 - protein, 108 aa, Zea mays
  Coding DNA Sequence Number=SeqID_3138
MEVLHGATPVASMVLVALLLPLNPLLLSVVATGDDKSLETIESFLGNFDKAVSIARTTMTRDLTPYDQEVEQLRAEVAYSEEREHKLVVLHFEADWLRSEAIRPWTWI

SEQ ID NO: 44918 - protein, 161 aa, Zea mays
  Coding DNA Sequence Number=SeqID_3139
  Gene Ontology: Cellular component=anchored to membrane
  Homolog annotation: Hit_ID=Q10ML7; Match level="QueryCoverage=66%, HitCoverage=58%, E-value=3e-23, Identity=50%"; Hit description =Expressed protein
MAKERIADGGAAAAFHGQKTDAASIVGRALSCFNDRYIYSGCQGALRLGPEGALDVPPGSVDAFCGGPCLVETHLVLRCVDDGIVAGFRFYNGASAADVRLVLARGWCGRSGLRGDFDDVLQRLGGDGHLYGRGSDARVSSLAQAMPLLLSAAAAVVLVWT

SEQ ID NO: 44919 - protein, 72 aa, Zea mays
  Coding DNA Sequence Number=SeqID_3140
  Subcellular localization annotation: CTP_CleavageSite=32; ConfidenceScore=5.16e-01
MAGRGRSAALGQTVRDLTTRATPFLRAVRTVRDGAGSSSSHLDPAPLGRDLRVLWVSRSPGAFPDDVKSPRN

SEQ ID NO: 44920 - protein, 526 aa, Zea mays
  Coding DNA Sequence Number=SeqID_3141
  Gene Ontology: Mol. function=protein transporter activity; Cellular component=nuclear pore; Biological process=intracellular protein transport
  Homolog annotation: Hit_ID=Q71VM4; Match level="QueryCoverage=97%, HitCoverage=98%, E-value=1e-171, Identity=64%"; Hit description =Importin alpha-1a subunit
  Pfam annotation: Domain name=Arm; Domain location=101-142; Score =50.7; E_value=5e-12; Accession=PF00514.13; Description=Armadillobeta- catenin-like repeat
  Pfam annotation: Domain name=Arm; Domain location=144-174; Score =11.4; E_value=0.46; Accession=PF00514.13; Description=Armadillobeta -catenin-like repeat
  Pfam annotation: Domain name=Arm; Domain location=175-206; Score =24.3; E_value=0.00043; Accession=PF00514.13; Description =Armadillobeta-catenin-like repeat
  Pfam annotation: Domain name=Arm; Domain location=208-248; Score =47.3; E_value=5.1e-11; Accession=PF00514.13; Description =Armadillobeta-catenin-like repeat
  Pfam annotation: Domain name=Arm; Domain location=312-353; Score =42.2; E_value=1.7e-09; Accession=PF00514.13; Description =Armadillobeta-catenin-like repeat
  Pfam annotation: Domain name=Arm; Domain location=355-395; Score =52.5; E_value=1.4e-12; Accession=PF00514.13; Description =Armadillobeta-catenin-like repeat
  Pfam annotation: Domain name=Arm; Domain location=398-438; Score =31.9; E_value=2.2e-06; Accession=PF00514.13; Description =Armadillobeta-catenin-like repeat
  Pfam annotation: Domain name=HEAT; Domain location=107-144; Score =8.0; E_value=4.5; Accession=PF02985.12; Description=HEAT repeat
  Pfam annotation: Domain name=HEAT; Domain location=150-186; Score =12.8; E_value=1.2; Accession=PF02985.12; Description=HEAT repeat
  Pfam annotation: Domain name=HEAT; Domain location=214-250; Score =10.1; E_value=2.5; Accession=PF02985.12; Description=HEAT repeat
  Pfam annotation: Domain name=HEAT; Domain location=317-355; Score =3.2; E_value=18; Accession=PF02985.12; Description=HEAT repeat
  Pfam annotation: Domain name=HEAT; Domain location=361-397; Score =3.2; E_value=17; Accession=PF02985.12; Description=HEAT repeat
  Pfam annotation: Domain name=IBB; Domain location=4-92; Score=123.8; E_value=4.9e-34; Accession=PF01749.10; Description=Importin beta binding domain
  Pfam module annotation: Pfam domain module=Arm::Arm::Arm::Arm::Arm::Ar m::Arm::HEAT::HEAT::HEAT::HEAT::HEAT::IBB; Domain location=101 -142::144-174::175-206::208-248::312-353::355-395::398-438::107
  Pfam module annotation: Domain location=317-355::361-397::4-92
MSLRPSERVEVRRNRYKVAVDAEEGRRRREDNMVEIRKSRREESLLKRRREGLQAQVPAPPSGVEKKLESLPAMVSGVYSDDNNLQLEATTQFRKLLSIERSPPIEEVIKSGVVPRFVQLLTREDLPQLQFEAAWALTNIASGTSENTKVVIDHGAVPIFVKLLGSGSDDVREQTKPALPALARLIHSNDEEVLTDACWALSYLSDGTNDKIQAVIEAGVCPRLVELLLHPSPSVLIPALRTVGNIVTGDDQQTQCVGLAALSPGLDEMCFEDCWSRLAELVPKDLKDGFNSLVTPGAWCIWKHRNGCVFNGARPSVCIIDHQALPRLLNLLTQNHKKSIKKEACWTISNITAGNKDQIQAVISAGIIAPLLQLLQGAEFDIKKEAAWAISNATSGGSHEQIKYLVSEGCIVPLCDLLVCPDPRIVTVCLEGLENILKVGEHDKTMGATGDINVFAQMIDDAEGLEKIENLQSHDNNEIYEKAVKLLETYWMEEEDDAMATAGEAAPAVFDFSQGGNPPGGGLNLN

SEQ ID NO: 44921 - protein, 248 aa, Zea mays
  Coding DNA Sequence Number=SeqID_3142
  Pfam annotation: Domain name=DUF1218; Domain location=34-164; Score =14.0; E_value=0.0005; Accession=PF06749.3; Description=Protein of unknown function (DUF1218)
MAPPHTVHVSMLRSRKVSHYLMSVGGSKDQLDVCVYNSSGRLALAYAVGAFILLAVAMFAEHAYMLVAVAAPESASAGMAVAQDHPRVASTAAALTWQTGCLFFLTWICFGLAEVMLMIGIAVESGHMSDWRKPRPVCHRVRPGMFAAAGILGLITVVVGFVVYITAVQAQRLRGQQYQHGGGHFVGYGAPHPGAQHQHQHLRPPVPHPHGPHPHPVPSAPGAPEITAAPCQVQPSCASFITKEAFDV

SEQ ID NO: 44922 - protein, 115 aa, Zea mays
  Coding DNA Sequence Number=SeqID_3143
MDFICLAYLRGSRSRSKRSQISRPLSNDLVIPVHFEVAGRVYQVGSMMLLGETLELSFELATEGRFDRYSCDVPSEVAKKCVGADLGANHCDEYRLVHSEAAGTATEGQTVCDLA

SEQ ID NO: 44923 - protein, 66 aa, Zea mays
  Coding DNA Sequence Number=SeqID_3144
MGIGCLRDEIGIRIKVWYRSLEEMVAGITWPSTLPPKWTVEWDPASAEGSVRSDGTGFPISLNESS

SEQ ID NO: 44924 - protein, 73 aa, Zea mays
  Coding DNA Sequence Number=SeqID_3145
MTKSGAAGIEHDTTGQRSGHRRASRAPGRLCGYRSAHATEFASIGRNLGSARVEGRRVEEDEQGLDTRRQGSA

SEQ ID NO: 44925 - protein, 83 aa, Zea mays
  Coding DNA Sequence Number=SeqID_3146
  Homolog annotation: Hit_ID=UPI00004C1733; Match level="QueryCoverage =32%, HitCoverage=1%, E-value=3e-07, Identity=100%"; Hit description =UPI00004C1733 related cluster
MASPRYTVYRVLHSRSTKICWEIEFRVASIIGEEPVTEDSGEQQVEVAEQELIEGKFDDGVRDPKAMDDVGEERHRLFGPDAV

SEQ ID NO: 44926 - protein, 291 aa, Zea mays
  Coding DNA Sequence Number=SeqID_3147
MEFGVHRSVAMAFPIAQQHFGGDPHGAISLPKGGPYPYVLTTCTFPITPTLTELEGKHCASRANDGEHGAGGAKQTTARDYLRADGVARCDGSPSGQARRRQVRLFPIDGATVFGRCGQWMARAPSDLWAEPASLSPSDSTLPTGVDLEATIDIDTGLSLIICPDCRDVRVFAATTKFGSNEGKRYFKCPRKTYGHGTCTRYWFEEEYVVFFHYNGYLPMTSSIVAAASTIEVPKIVRRIVSLEKNLNEVKDKVGNNREGMGSCICLVCGCVNVTLFLLLAIVLLVVVVLK

SEQ ID NO: 44927 - protein, 111 aa, Zea mays
  Coding DNA Sequence Number=SeqID_3148
MEDMEKRLTERQVGRDGEQAIGTSQSGTILASEDGFVYEVFGTGFSRSKRIGDRCVDYQLRRGGDRRWFDGSRANSQTRWTSATTSRRTTGSTNLTHVGFHVEWVYRSFAI

SEQ ID NO: 44928 - protein, 62 aa, Zea mays
  Coding DNA Sequence Number=SeqID_3149
ILLPETNTEAAVTLTRLARATQDGNVVGPEPAPACDIIERYWKSPRNEAFLSWDLFGLSPGK

SEQ ID NO: 44929 - protein, 169 aa, Zea mays
  Coding DNA Sequence Number=SeqID_3150
MATHGGAGSAAHDTTSFGMTRALRTVAREGKESEELYGVAEGLTSTAWARSWRWFPSSMRTRRGEWRDAVGSALARCVWVTSEASTRGWPCRGASGHAGASSPAREGWAAHRVIGEDRGGSPRQTCRADGALDYGGTPVSALVEVGSASWRGKRERGGWLAVLAREEAT

SEQ ID NO: 44930 - protein, 228 aa, Zea mays
  Coding DNA Sequence Number=SeqID_3151
  Gene Ontology: Mol. function=protein binding; Cellular component =nucleus; Biological process=response to DNA damage stimulus
  Homolog annotation: Hit_ID=Q54I18; Match level="QueryCoverage=58%, HitCoverage=11%, E-value=4e-23, Identity=42%"; Hit description =Supressor of Mek1
MAEERWALVGGQGLDGEKQTEAGEKMSAGWKKARVKVYRLADGGKWDDQGTGYVSIDYIEGSKELGLTVLDEDDNDTLLMHNITSDDIYRKQEETIISWRDREAATDLALSFQEAAGCSYIWEHICDIQRNLQFSNLGDDSFRSANGGEFRELPPVELSNLPFILKCSSECEDCIGGWHYRSDARGRVDNTRWASPIVFPCMDLSKSDLLEDEVNIYLDMLGALVMNM

SEQ ID NO: 44931 - protein, 95 aa, Zea mays
  Coding DNA Sequence Number=SeqID_3152
MEPVIVGPVADTEDAAGRPYKMPWRRWPRASSVTLLMPRSWIPVDLRKSWQRPPGGSLDWDLDLYTALARERLGYGTMLSGYTAPGHPKRRVSIR

SEQ ID NO: 44932 - protein, 150 aa, Zea mays
  Coding DNA Sequence Number=SeqID_3153
MGRGKRGKGWPHCADGKRKRPPSPPSEDFGDSEYSEEVSSEYDRSPTPASPMALSEDSDDSMGLSVVTRAYWRSIECAGLGGSDDSEEASSEEVEDSSDSEEWSGGEGDGSSDNDDGKGSGDGDDDRKGGDGKGDDKGDSEGGKGDSNGK

SEQ ID NO: 44933 - protein, 93 aa, Zea mays
  Coding DNA Sequence Number=SeqID_3154
  Gene Ontology: Mol. function=DNA binding
MELGGWRRNSLVVDNALGADLDGVRDVCFMALGEAVELGGWRRNSLVADSVHSSSPRRREVRHSWRGRCSFFLHKEVLRSLGAVLDDLDHCVE

SEQ ID NO: 44934 - protein, 54 aa, Zea mays
  Coding DNA Sequence Number=SeqID_3155
MPRFAPTCVDQALLSTVQGAEAVTKLTFDRRSSTTLALLDSPSVEEMGPPLEIG

SEQ ID NO: 44935 - protein, 62 aa, Zea mays
  Coding DNA Sequence Number=SeqID_3156
MNVDEGVFDGQGTSVVVVLRGRVDDGRRNTGDAIGRQNGRARGDERAAVFNRPSIAFMEERE

SEQ ID NO: 44936 - protein, 132 aa, Zea mays
  Coding DNA Sequence Number=SeqID_3157
MATTWDSTATLCSFMAWSRCRRDLRSSLGAHEMAGIPVAALTVPKRWNKVDEERLYYIAMRRDRFLTEIPKSRELVMAAVEGPTRAGFAPFTDPNKFASICVDPGAWRCLRRLDDRMNMGDIPTARAIKKGK

SEQ ID NO: 44937 - protein, 118 aa, Zea mays
  Coding DNA Sequence Number=SeqID_3158
MAWSRCRRDLRSSLGAHEMAGIPVAALTVPKRWNKVDEERLYYIAMRRDRFLTEIPKSRELVMAAVEGPTRAGFAPFTDPNKFASICVDPGAWRCLRRLDDRMNMGDIPTARAIKKGK

SEQ ID NO: 44938 - protein, 90 aa, Zea mays
  Coding DNA Sequence Number=SeqID_3159
MEAWATPRQNSQVMVAAGEGSGRARAVAPLSWPDSQRLNSIFLSNLCGILSKDLHQSYRATIQLQLCHSNLDQFLNNSSLNSHTKLALFH

SEQ ID NO: 44939 - protein, 38 aa, Zea mays
  Coding DNA Sequence Number=SeqID_3160
MELDSVVVMNKRIRDEGPAPSVRCMKIVIELRQVGVIE

SEQ ID NO: 44940 - protein, 505 aa, Zea mays
  Coding DNA Sequence Number=SeqID_3161
  Gene Ontology: Mol. function=transcription regulator activity; Cellular component=nucleus; Biological process=regulation of transcription
  Homolog annotation: Hit_ID=Q69JI7; Match level="QueryCoverage=98%, HitCoverage=96%, E-value=1e-110, Identity=47%"; Hit description=BHLH protein family-like
  Pfam annotation: Domain name=HLH; Domain location=215-261; Score=5.5; E_value=0.038; Accession=PF00010.16; Description=Helix-loop-helix DNA- binding domain
MGIQGNKAATHEHDFLSLYAAAAAAAAAKDAPLLLHDSKTPPPSQGNFLLKTHDFLQPFDQKPGAPPEPSPLPAPAAEIRHRQQVAVAKQRALPLPLPGGVGTFSISPAPVSVALPSAVVKSEPPPFVLWGQPAATLQPGARGHQQQWALPFAGSLQVSPPPQQAQPDRKGRGGGGVMDSGSRSSGGAGFDDEDGLTTRREVSSSLQDASVLLALIGASPLVYHVRVAELPILRELLPHNDQKRDKATFLLEVIEYIRFLQEKAQKYEATFPEWNQENPTMLPWSKGQIPGDSPPDPSHFVRNGSSPGSNFTGKLDDNHTSAAASGALDQAETNHVASGCYRSSETPANITSMIDGSHMILHYSQKYFLRLEAALVTYDSSLHVDNAISQSQPQWTGPSPVDDSAVKSEMLNSQELAIDEGMISVSSTYSQELLISLSHALQSSGVDLSQTSISVQINLGKRAGKRSASAGGVSSNSKPDGRLSLGLVAHRVLGDGLRPRLLPFI

SEQ ID NO: 44941 - protein, 153 aa, Zea mays
  Coding DNA Sequence Number=SeqID_3162
MAGGSARETLYTPGPVNYSRTPTQTQTQTQTQSQSQAAVGTGQAHEAGNCGHPVDGDAHRLIAACAASTAEPLDRVRLTAAKSGLRRHRKLRFARPQGSDTGSAPKDDEPRFARPQGSDTGLAPEDDELRFARPQGSDSGSAPKDDELRFARP

SEQ ID NO: 44942 - protein, 95 aa, Zea mays
  Coding DNA Sequence Number=SeqID_3163
MVIPYGGSMVDIDFIEQIPMARSFHARPEPSKDTTEWRHFSQDTELGPGDYTGDGGMAAGIGVRRLGAQRGEPHEEGRIASAAMEGDVPRGEREV

SEQ ID NO: 44943 - protein, 339 aa, Zea mays
  Coding DNA Sequence Number=SeqID_3164
  Homolog annotation: Hit_ID=Q6IS42; Match level="QueryCoverage=60%, HitCoverage=48%, E-value=1e-07, Identity=28%"; Hit description =Similar to proline rich protein MP4
  Subcellular localization annotation: CTP_CleavageSite=14; ConfidenceScore=5.65e-01
MANSAPPDPRARTRAKTRKTANSALPDPRARTRAKTRKTANSAPPDPRARTRAKTRKTANSAPPDPRARTRAKTRKTANSAPPDPRARTRAKTRNTTKLRLARPQGSDSALASAERPPPRPTPGLGLGLRPGRRRTPLRPTPGLGLRPGLGRTTSASPDPMARTRPRQQKTDSTSASEEPPRRRQQGLDRSNSCPSARLRRTSDSHDITPARCQDLSGCHIGMAFLEKVGRAGPRTGQALSWGRSLPSPAWTLVTPLLQAHPTWARDEHEGRGTSTSLTLGSGHLASPPFALAHALDPSGLGHAAHSLVGLGTPLSRNADNSVMRKERIQVYNGGVAVC

SEQ ID NO: 44944 - protein, 585 aa, Zea mays
  Coding DNA Sequence Number=SeqID_3165
  Gene Ontology: Mol. function=RNA-directed DNA polymerase activity; Cellular component=intracellular; Biological process=RNA-dependent DNA replication
  Homolog annotation: Hit_ID=UPI00004C1731; Match level="QueryCoverage =99%, HitCoverage=46%, E-value=0.0, Identity=75%"; Hit description =UPI00004C1731 related cluster
  Pfam annotation: Domain name=RnaseH; Domain location=249-368; Score= -13.2; E_value=0.00098; Accession=PF00075.14; Description=RNase H
  Pfam annotation: Domain name=rve; Domain location=438-585; Score =93.9; E_value=4.7e-25; Accession=PF00665.16; Description=Integrase core domain
  Pfam module annotation: Pfam domain module=RnaseH::rve; Domain location=249-368::438-585
MKESDLLATSFITPFGMYCYITMPFGLRNAGATYQRCMNHVFGKHIGRTVEAYVDDIVVKTRKASDLLSDLETTFRCLKAKGVKLNPEKCVFGVPRGMLLGFIVSERGIEANPEKIAAITNMGPIKDLKGVQRVMGCLAALSRFISRLGERGLPLYRLLRKTECFTWTPEAEEALENLKVLLTSAPILVPPAAGEALLIYVAATTQVVSAAIKLLYAVILTRRKLRHYFESHPVTVVSSFPLGKIIAERPRVGLQRAGAGLLFISPLGKHLRYVLRLHFPASNNVAEYEALVNGLRIAIELGVRRLDACGDSQLVIDQVMKNSHCRDPKMEAYCDEVRRLEDKFFGLELNHIARRYNETVDELAKIASGRPTPEAPLARPEAPSAPEAPRALVGNAFRQGFYWPTAVADATRIVRTCQGCQFYTKQTHLPAQALQTIPITWPFAVWGLDLVGPLQKAPGGYTHLLVAIDKFSKWIEVRPLSSIRSEQAVAFFTNIIHRFGVPNSIITDNGTQVTSRKFLDFCEDHHIRVDWAAVAHPMTNGQVERANGMILQGLKPRIYNDLNRFGRRWMKELPSVVWSLRTTPS

SEQ ID NO: 44945 - protein, 1032 aa, Zea mays
  Coding DNA Sequence Number=SeqID_3166
  Gene Ontology: Mol. function=nucleic acid binding
  Homolog annotation: Hit_ID=Q9LIR7; Match level="QueryCoverage=36%, HitCoverage=37%, E-value=2e-85, Identity=46%"; Hit description =Arabidopsis thaliana genomic DNA, chromosome 3, BAC clone:F14O13
  Pfam annotation: Domain name=Filamin; Domain location=177-274; Score =83.1; E_value=8.7e-22; Accession=PF00630.9; Description =FilaminABP280 repeat
  Pfam annotation: Domain name=RRM_1; Domain location=444-508; Score =44.6; E_value=3.3e-10; Accession=PF00076.12; Description=RNA recognition motif. (a.k.a. RRM, RBD, or
  Pfam annotation: Domain name=zf-CCCH; Domain location=347-373; Score =8.5; E_value=0.1; Accession=PF00642.15; Description=Zinc finger C-x8- C-x5-C-x3-H type (and similar)
  Pfam module annotation: Pfam domain module=Filamin::RRM_1::zf-CCCH; Domain location=177-274::444-508::347-373
MTPIAGYIHELEVVAFRLGVHHALVTARPLVGPPFITRFWLPFALLPSCLVAPSDTPPLPRCPSALIPCICSPSRPLPNPSRPAELIEGKLGESSVRRRALMAAPKPIWVRQAEEAKLKSEAETAAAAKAAFDATFKALAAASGDDYNDVDPAPPSPAELTSTDSDDDAPALPGPVDPSKCSAAGPGIAGGSAGTPSTFTVVAKDRHSRRLTAGGARVHVRVSPAAGVGGDDLEGTVKDNGDGSYTVTYVVPKRGNYMVHVELDGVSVMGSPFPVFFSGSTATPSAAFPTALPAVSSAYPNMVNQTMPNMPNYTGAPSSAFPSLLGAMPSSTAGSSGGVILPGVGASLGEICRDYMNGRCTKVETDCKFTHPPQQLLMSLLAATTSVSALGHAPLAPSAAAMAAAQAIMAAQALQAHAAQAKAAGGTSGSTNKADEADALKRTVQISNLSPLLTVDYIKQLFGFCGKVVDCVMTDTKQIVYVEYSKPEEATAALELNSKSVGGRPLNVEMAKALPPKANNNLPMMMQQAVQLQQIQFQQALMMQQSIAAQQAAARAATMKSATEAAAARAAEISRKLKAEGFGGDNMEEKDAKGKSGSPSSPTRRSKSRSRSPIKYRRSRRSRSYSPPVGRSREHRSRSPSRSRHSKHGSDRSHRDDKDMYSRSGRRESERSRDHHSSRSRRNRSKSRSPRHKKPSRVDSRSPKKQRLESLSPSKSRSARAGSRSPRHHKGSKSSPTSDRHSRHSRHSRSRSLDRKHHHSDKKDSRKSEIQDDRRSHRGSRRDKDESSVKDDGERSHRGSRRDKDESSVKDDGERSHRGSRRNKDESSVKDDGERSHRGSRRDKDESSVKDDGERSHRGSRRGKDESSVKDDGERSHRGSRLDKDESSVKDDGERSHRGSRRDKDESSVKDDGERSHRGSRRDKDENSVKDDGERSHRSSRGDNDGRSVKDPVEDKRVDSNAVAHKRSSEDEILNNNSSNHKKHRHEVGLEVDEGNDVCPAVADPNGKHETGGMKIFGELECCSERSSDILK

SEQ ID NO: 44946 - protein, 240 aa, Zea mays
  Coding DNA Sequence Number=SeqID_3167
MRAEGQRGRGGVSDGATKQEGRRAKGSQNLLIKFGLTNHLTSKAYSIQNILNLVLTERPSGDQGMVDPEPERDNLQFMNVAGDRRHPGSLGRHLPQPQNSEMTAHEVYGRKQTTVLSVKSSEAVICTRNLLQHHRWRKTENPMRKPQELEGPKIEEGRARASPSIKNHDEGPLTLHLDVHTSERPDWAVGELSLALTARCSGPHHLTKFRPCHGNPLSSGTSSGNASPVPPLKARLPPNN

SEQ ID NO: 44947 - protein, 81 aa, Zea mays
  Coding DNA Sequence Number=SeqID_3168
MNPFFCLPSLGFMGFWSRSLVEQARLDALISRGVLHEGDYKLLGSEDIPKLPTGFVDDFGVGTKDVVDLLPLRTLSMVPPS

SEQ ID NO: 44948 - protein, 145 aa, Zea mays
  Coding DNA Sequence Number=SeqID_3169
  Homolog annotation: Hit_ID=Q9AS41; Match level="QueryCoverage=34%, HitCoverage=9%, E-value=4e-14, Identity=72%"; Hit description =Putative cytochrome P450
MRDLARRLGPLMLLRLGELRVVVASSADAAREVMRTHDLAFATRPLSPTAMALLGDGSLGLVFAPYGDGWRQLRRLCTAELLSARRVRSFRVVRENEVRRLLRSVAAKASPVRQQKQQALVDRSSSRRLSHLLLAPTVRVPLQGE

SEQ ID NO: 44949 - protein, 555 aa, Zea mays
  Coding DNA Sequence Number=SeqID_3170
  Gene Ontology: Mol. function=signal transducer activity; Biological process=response to light stimulus
  Homolog annotation: Hit_ID=Q5VRW4; Match level="QueryCoverage=36%, HitCoverage=70%, E-value=5e-44, Identity=52%"; Hit description=Non -phototropic hypocotyl 3-like
  Pfam annotation: Domain name=NPH3; Domain location=129-368; Score =104.3; E_value=3.6e-28; Accession=PF03000.5; Description=NPH3 family
MTPGVEALHACGTDRLVFKALEMVVYFRTGIRPRLWNETDASWREDTCAEAAACMLLLVTAPAPACSRASQTAAPARPPNRRSRNARAPATPRPHTPAQLPPARAADLAPATASRTPRRSPLPKRPAVLRYLNAASATKSVLSHYAAKWLPDVAPPTSPSASGHFLPPESPTATWLKKRLLLESLVAALPLDPPAGGDGCCAAAVADDGITCDFLLKLLRVGSMVGADAALLQDLEARAARRLDQATLGAVMIPAFGHSGEHASALLLDMPLVLRLVRGFLKEGGGAVAARVAKLVDAYLAEAALEAGLRPVEFEELARAVPAHAHPADDAMYRAVDTYLKAHPGTAKEERKSLAWLIDACKLTVEAAAHTVQNERMPVRAVVQVLFSEHDKLNRLAELSASFSGQRSPSPSPNSTLELPSRCPSKREVLVQHQEVRRLRDDVARLQVRPSACLEFPSPHMYTNFGGAPTDAETYVCSMQRAAGPGGQAGLREAPAQRGRRWRLLQVERVLVRRRHGADVARVDDSESGMERRMPPKGKKSATATPNAKWRKSTS

SEQ ID NO: 44950 - protein, 398 aa, Zea mays
  Coding DNA Sequence Number=SeqID_3171
  Gene Ontology: Mol. function=catalytic activity; Biological process =cellular metabolic process
  Homolog annotation: Hit_ID=Q5GS89; Match level="QueryCoverage=68%, HitCoverage=97%, E-value=5e-27, Identity=29%"; Hit description =Nucleoside-diphosphate-sugar epimerase
MLLLVTSKRTLHCWSLERGLSQPGSRGTERQQRKTPQQSTQSTRHPTGNWEVLIGLIRLILVVEFNQLIAIWDSGFVILLPQSSCGPETRITMVPGIATKTAARPVAWAPQPRNMFVFGAGFVGRYVSERLLAQGWQVSGTCTTVTTKRELEMLGMNASVFDGTEDRHVTSSLENIHSLRQATHLLISIPPIPGVGDPAIMLTGFHFMVICTFYPQLLINLDEDLRRILGHGNLEWLCYLSSTSVYGDCGGVLVDEDHTVNPKSESAKLRYNAEKGWLNLIDDPKLSAFVFRLGGIYGPGRRKIFNVVDDDPAPRAEVFAFATSLIQRRYPDMITETIDAKPAGLDYQEMIVPAEKRVSNARMKQELGVNLLHPTYRSGLQSILDAWQIQPPLPNTSQ

SEQ ID NO: 44951 - protein, 400 aa, Zea mays
  Coding DNA Sequence Number=SeqID_3172
  Gene Ontology: Mol. function=transferase activity; Biological process= biosynthetic process
  Homolog annotation: Hit_ID=Q9LSB5; Match level="QueryCoverage=82%, HitCoverage=58%, E-value=4e-23, Identity=36%"; Hit description =Glycosyl transferases-like protein
  Pfam annotation: Domain name=Glycos_transf_1; Domain location=186 -369; Score=66.4; E_value=9.5e-17; Accession=PF00534.10; Description =Glycosyl transferases group 1
MGTGVERRKKVEGRQPWPQVAAAARRSSNFKENIEGRRKRDGLEYVRTGTGANSTVFFVDVQLKVLPARGQEAVDIALKADLVILNTAVAGKWLDPVLKDHVPKVLPKILWWIHEMRGHYFKVEYVKHLPFVAGAMIDSHTTAEYWNSRTSDRLKIQMPQTYVVHLGNSKELMEVAEDNVARRVLREHIRESLGVRSEDLLFAIINSVSRGKGQDLFLQAFYQALQLIQHEKLKVPRIHAVVVGSDVNAQTKFETQLRDFVVKNTIHDRVHFVNKTLAVAPYLAAIDVLVQNSQGRGECFGRITIEAMAFKLPVLGTAAGGTTEIVLDGSTGLLHPAGKEGVAPLAKNIVRLASHAEQRVSMGEKGYGRVKEMFMEHHMAERIAAVLKDVLRKSQEHSRS

SEQ ID NO: 44952 - protein, 224 aa, Zea mays
  Coding DNA Sequence Number=SeqID_3173
MAFRSHYTLQEMLWQTARANQEPEDSTQNSWNNRESGQSSGRFCQDDGTWRRELYKDSRGTQTSSELTSRNLQSNKKSQAQQKVVKKLPVSDLRGKLSGVASQRPQLSSTVQVPKPVKEVIKSNKPVQKRDPTPTTTPPDIKKPSAPAPVPAPSALPKQSQNKIDASLDSLLKSLDLEKYLINFQAEEAHSIYVAILYCGCDCYHKFKPDALKRKLEIISSLWL

SEQ ID NO: 44953 - protein, 122 aa, Zea mays
  Coding DNA Sequence Number=SeqID_3174
MEHGRRRWRWAGGGGAAARTGALVATRAGALLAALGPGGGATSRSSGGAGALAAARPAGAVAALGPWRRRDQQEQRVARPGEEKEQGRRGSRGTAGAGAGDAAPVPAAGRREKKNWLYTILE

SEQ ID NO: 44954 - protein, 142 aa, Zea mays
  Coding DNA Sequence Number=SeqID_3175
  Gene Ontology: Mol. function=hydroxymethylglutaryl-CoA synthase activity; Cellular component=soluble fraction; Biological process =acetyl-CoA metabolic process
  Homolog annotation: Hit_ID=Q8H051; Match level="QueryCoverage=65%, HitCoverage=20%, E-value=2e-43, Identity=89%"; Hit description =Putative hydroxymethylglutaryl coenzyme A synthase
  Pfam annotation: Domain name=HMG_CoA_synt_N; Domain location=3-142; Score=103.3; E_value=7e-28; Accession=PF01154.8; Description =Hydroxymethylglutaryl-coenzyme A synt
MVVSKLEKLAKKSGNGPDRCKATARSSWEAMVTATFGLWLANTCCRYWLSLTVVKFLLKNYNIDPKCIGRLEVGSETVIDKSKSIKTWLMQIFEKSGNTDIEGVDSLNACYGGTISLFNCVNWVESKSWDGRYGLVVCTDSE

SEQ ID NO: 44955 - protein, 144 aa, Zea mays
  Coding DNA Sequence Number=SeqID_3176
MTCIGFSSYFENKIACENYCFSKSADSAYAFGSATSTKRQEAYVEQQSCQTDDWSRCRSPSSSDGTPVSGPLFTGASPMLFSISPSRGPTLHMSFNRETLSRFMLTGRGKFHVWCIGHGQKLEGLTITMFEEWVKKLFDLLVFP

SEQ ID NO: 44956 - protein, 197 aa, Zea mays
  Coding DNA Sequence Number=SeqID_3177
MKTAIRPRGRQIHPEKATTTVDPAGKATTMMDPMMAAMKKGEGDWAGPARQGPAPGLAGGFDASDRRGAKKREMLLGRRCGQGRRSTMASAAPRRARRLGHRRSEQAQQARPGGGGARSRARKREATRAMDDDAATKKRRWGCSGGAGRRSGRRARLGTDDKGEDGDVWAGLEVDDAGARPGGGGHAAGEGRGGSLA

SEQ ID NO: 44957 - protein, 370 aa, Zea mays
  Coding DNA Sequence Number=SeqID_3178
  Homolog annotation: Hit_ID=Q10E61; Match level="QueryCoverage=23%, HitCoverage=15%, E-value=2e-23, Identity=60%"; Hit description =Expressed protein
MIGEGAENCSLGDPSLRDSGKQSRILSVTYGTIQAAQQERSIFLSSLLPLLSEYDDLQPSVLDAQSIVSNLKERLIVTEDRLRESRYQITPWHTELSNNTSNPVSTNPPAGKALVTTSKSSLDIVSQMVYPHVQSPMSSPVQARGDWGAFGNKNHQDISNEVPIRNAGHDDKGGTSLSSRSQYRTDVPPQVSQGDSSAVHFDFETQSQNPPFKGLSRNDVLDGSDSAEAQNTQEPSTRWGLGDSSNLASGLEDANPSYPYLPTVLEEPGSSFSEAAEDDPLPGIEGLRITGEPFPGQELQAGGYSINGTTTCNFEWVRHLEDGSVNFIEGAKQPSYVVTADDVDTLLAIEVQPLDDRKRKEVGLRKGTLL

SEQ ID NO: 44958 - protein, 62 aa, Zea mays
  Coding DNA Sequence Number=SeqID_3179
MAAPRIARPVALTPRQGKRRPWQAKQALFHLTMMTASKKGPGKGIFRKGSFSTKEAGPEPSY

SEQ ID NO: 44959 - protein, 640 aa, Zea mays
  Coding DNA Sequence Number=SeqID_3180
  Gene Ontology: Mol. function=lithium ion binding; Cellular component =integral to membrane; Biological process=calcium ion transport
  Homolog annotation: Hit_ID=Q8GS69; Match level="QueryCoverage=99%, HitCoverage=98%, E-value=0.0, Identity=77%"; Hit description =Putative potassium-dependent sodium-calcium exchanger-like protein
  Pfam annotation: Domain name=DctM; Domain location=124-565; Score= -241.5; E_value=0.061; Accession=PF06808.2; Description=DctM-like transporters
  Pfam annotation: Domain name=MFS_1; Domain location=128-561; Score= -50.1; E_value=0.062; Accession=PF07690.6; Description=Major Facilitator Superfamily
  Pfam annotation: Domain name=Na_Ca_ex; Domain location=145-279; Score= 118.4; E_value=2.1e-32; Accession=PF01699.14; Description =Sodiumcalcium exchanger protein
  Pfam annotation: Domain name=Na_Ca_ex; Domain location=484-626; Score= 117.7; E_value=3.4e-32; Accession=PF01699.14; Description =Sodiumcalcium exchanger protein
  Pfam module annotation: Pfam domain module=DctM::MFS_1::Na_Ca_ex::Na _Ca_ex; Domain location=124-565::128-561::145-279::484-626
  Subcellular localization annotation: CTP_CleavageSite=62; ConfidenceScore=5.03e-01
MIASQPRRVRPLAAVSLVLFLLLLYSRSDGGSPRAARLLGSGFYPVHRRFLSDADPAGPASSAANPSASGTVPLNGEQPEDPSVACAGIALHEGFGTQCEFLRAHPQCSSDGFVDYLGFFYCRCERFRVLGYAVLGVCLAALFYMLGNTAADYFCCSLEKMSALLRLPPTLAGVTLLPFGNGAPDVFASIAAFMGSGAGDVGLNSVLGGAVFVTCVVVGAVSLCVAEKNVQIDRRCFVRDVGFFLVTLLALSIVLTIGKVTVWGAMMFVSIYVVYAFVVAANEVLRKHARRLKFDVFTPLLPVRASIFEQGAEQDESAYSSLLEEDADGEVTQMNTSVPQWMWASHVAIYSNHGNRDGSPDSSRPLWGWSEGEVDNSTFNIYKLFSFMELPLTIPRKLTIPIVEEDRWSKEYAVASSCLAPVLLAFLWSSQDTVSTKVSIAAYVMAVMLGIALAALVFLFTSNERPPRRFLFPWVFGGFVMSIIWFYIIANELVALLVALGVILGINPSILGLTVLAWGNSMGDLMSNVALAMNGGDGVQIAMSGCYAGPMFNTLAGLGISMLLGAWSTAPNSYVLPQDHSLIYTMSFLVAGLIWALVMLPRGDMRPNKILGVGLIALYSIFLFIRVGSAVGILPLPGSS

SEQ ID NO: 44960 - protein, 589 aa, Zea mays
  Coding DNA Sequence Number=SeqID_3181
  Gene Ontology: Mol. function=transferase activity, transferring phosphorus-containing groups; Cellular component=chloroplast; Biological process=phosphorylation
  Homolog annotation: Hit_ID=Q93YW0; Match level="QueryCoverage=89%, HitCoverage=83%, E-value=3e-82, Identity=35%"; Hit description =EXECUTER1 protein, chloroplast precursor
  Pfam annotation: Domain name=UVR; Domain location=73-109; Score=6.4; E_value=0.096; Accession=PF02151.9; Description=UvrBuvrC motif
  Subcellular localization annotation: CTP_CleavageSite=44; ConfidenceScore=5.85e-01
MSPACATPAAARPLNTVPTRRSPPSAARPPSAIPARRSAGCCFCASSSSSASSPSTWDWTRWSRHFDEVDQAESYASLLQFQLEEAVENEDFAEAAKLKRDIIAATGNDAVAHVMAELKSAIEEQRYQDASRLTRLAGTSLVGWWVGYAKGIDDSIGRIVRISPGVGRYVAKSYSPRQLVTASSGTPLFEIFLVREDDKTYTMKVVHLRPTKGTLGASSISSAITESPATVETPESSAISDSITEEANIDTPVKGNGDAEEKEQDVGSSKDTSVDGFKSLLNFFKSRIPEFKVQVINVDVSEETELAANSSEESVQDDVKSTPEGSLEEPTTEELEQEEDVPEEDMDEESKSTKVKLFISGVVHNKEDAGTKSYVRVPAEINNMEKDSFDLYIPGNGSGHDLPETKAAKQKVADMAAKLASELMPSDVAKALWGTTKSSSKLECWANIGLYVGAFSPYGPEIVQLRRKFGHWNSSDDVEFFEYVEAVKLTGDLSVPAGQITFRAKIGKGKRLENRGAYPEEFGVIASYKGQGRIAQPGFKNPRWVDGELLVLNGKSTIPHLGGAELGFLYSVPEQSFLVLFDRLNLPEC

SEQ ID NO: 44961 - protein, 319 aa, Zea mays
  Coding DNA Sequence Number=SeqID_3182
  Homolog annotation: Hit_ID=Q8RZF8; Match level="QueryCoverage=37%, HitCoverage=29%, E-value=4e-35, Identity=56%"; Hit description =Lustrin A-like
MKRRGLLLVTILLAACTTATAGKKTAIRRTHEQLQPQARGSSCDVYRGSWVVDASYPLYDAASCPFVRKEFDCRRMGRPDSTYLKYRWQPDPPCSLPRFDGVKLLNLWRGKKVMFVGDSLVVNQYESLLCMLHAAAPGARTNQSWASSSGENPSTTVRFERGTSIFVVVNMPTPNRALEEKLWDIKRVVRDGKMASSSQTLPTVFTIELPTETPQVSFHPALQFAKCYYDNRHYDLEFVVHYSVSIRLLHRLMHSLSPVTRVLERIRQVAYRLQLLESAGLVMTQLPMPPIQDNQLLPEPESVYRAQLHHGTCHVVIQW

SEQ ID NO: 44962 - protein, 71 aa, Zea mays
  Coding DNA Sequence Number=SeqID_3183
MIICIGRGDATTAAGDATNVTINANDAITKYVYGMHQHGSGIGPYNHMIDPTMSWVYAPQMPPQMTPQMPT

SEQ ID NO: 44963 - protein, 123 aa, Zea mays
  Coding DNA Sequence Number=SeqID_3184
MGSSVGREQATGCAAGKERLGKKTCAGSRARRHLGARRSGAEGWARLGEEPRPGKRFPPWGEPRLAGRVGGEWREERGAAGQAAMGAGEKHRGELVGEKQRVSAAKTSRGTRAMGDSAGCWRG

SEQ ID NO: 44964 - protein, 97 aa, Zea mays
  Coding DNA Sequence Number=SeqID_3185
MVWRLISMHCHNASERREILKLAKRISEQHEHASRDGSPLRRRPGKEKVDEGGAAAGERDLGYQSPEQDLKDIFTGDSDSGDDNDRRKKLYVMYGGS

SEQ ID NO: 44965 - protein, 178 aa, Zea mays
  Coding DNA Sequence Number=SeqID_3186
MARRPRTGVLGPQQHSAPARASPGHDATSRGRDIDRYDADARPSAARMPSRVPSARHGSAGLRRRLGRKCGARALGVADLDATDSGGSSAWEPGKGARHGARRGRLGAAGSRCERDPASRRGALLGPGAEAETGYGRGRPSGGPPGPASLAGPACWPPGRFLARQAGAWATLMGPDWS

SEQ ID NO: 44966 - protein, 153 aa, Zea mays
  Coding DNA Sequence Number=SeqID_3187
MEFLAATQVCFSSLTLVSSPSSRRELVQAASILARWLSGCEAFKFLREDGKQRRGNPNPKFLRVFLSLPNTRPTLSFNPSDDADNASLWPSLILLAEEALAKSSRSRPAGHSRVFLVSSTTTVGIGGGGGSTGDGRVQLADNLDLDVYVQSKC

SEQ ID NO: 44967 - protein, 173 aa, Zea mays
  Coding DNA Sequence Number=SeqID_3188
  Gene Ontology: Mol. function=kinase activity
  Homolog annotation: Hit_ID=Q6QP54; Match level="QueryCoverage=59%, HitCoverage=28%, E-value=1e-09, Identity=54%"; Hit description =Putative kinase
MALSPLLLAERQQRGENSAACLAPIAVPLDRVKLTAAKSSLGRHRKLRLARPRARTQPQPRKADSASPDPGLGLSLDLGRRTPPRPTPGLGLSLDLGRRTPPRPTLGLGLSLDLGQRSLPHPTPGLGLSLDLGRRSPPRPTLGPRLDLGGASASPDLGLGPATSQGVPSLPYS

SEQ ID NO: 44968 - protein, 230 aa, Zea mays
  Coding DNA Sequence Number=SeqID_3189
  Homolog annotation: Hit_ID=Q6QP51; Match level="QueryCoverage=38%, HitCoverage=50%, E-value=8e-12, Identity=49%"; Hit description =Putative growth-regulating factor 1
MDEDVAVALEREERTPNSSGSDALTLHPLVASAPTASPWHRHNSHLLSRPPPRCRGTSNDGALDLHPTSACSVPGDLRNDRWLVIGDLWPVESEPWGWARQRPPSGVEAESELRGRARRSPSSEVEVESEPWGRARRRPPSGVEAESELRGRARRSPSSEVEVESEPWGQARRSFLWRLRPILAAVSLTLTGGTAVGAAQASLFSRQVGQWSGEVTAFTSALSTKERASG

SEQ ID NO: 44969 - protein, 237 aa, Zea mays
  Coding DNA Sequence Number=SeqID_3190
  Homolog annotation: Hit_ID=Q6QP54; Match level="QueryCoverage=29%, HitCoverage=28%, E-value=2e-13, Identity=74%"; Hit description =Putative kinase
MACNDMANGRASGREEAVAARRRRTQTRSRGGRQRICNEIRKGTRKGKGRSVNLSGKPGSAEVRFGLEGSRLAVGLKENSAACLAPTVVPLDRVKLTAAKSSLGRHRKLRLARPRARTQPRPRKTDSASPDPGLGLSLDLGRRTPPRLTLGLGLSLDLGRWTPPRPTPGLGLSLNLGRRSPPRPTPGLRLSLDLGRRSPPRPTVGPRLDLDLGGASASPDLGLRPATSQGAPSLPYS

SEQ ID NO: 44970 - protein, 70 aa, Zea mays
  Coding DNA Sequence Number=SeqID_3191
MDPSSEEHMDRKRLRMWTSHFAGSEADKMVSLRVKVSLSISLPSQGNEKVENRRTWGIKMRTKKAWGQRT

SEQ ID NO: 44971 - protein, 34 aa, Zea mays
  Coding DNA Sequence Number=SeqID_3192
MQDEVARWDNLVIGLRPAPCWAKGLVNTDIQEQK

SEQ ID NO: 44972 - protein, 50 aa, Zea mays
  Coding DNA Sequence Number=SeqID_3193
MVEERPLHITVEDIPKDMEFDEWFSKTKDEPMEDYEPEDPHRLHPVPINR

SEQ ID NO: 44973 - protein, 66 aa, Zea mays
  Coding DNA Sequence Number=SeqID_3194
MPLMRLRLTSVMVTPGDGDVDGSTCDVATGGGARRNGKYTSDVWEDMERVYTMKMIRWLSNVFRQT

SEQ ID NO: 44974 - protein, 60 aa, Zea mays
  Coding DNA Sequence Number=SeqID_3195
MPLKDLSVHTPEEVSEMHKIDPEACSLNSLNFGIEYLQNRMRTKTKMLSFGTTAHRNEGE

SEQ ID NO: 44975 - protein, 63 aa, Zea mays
  Coding DNA Sequence Number=SeqID_3196
MAAGRRAMLALFLIWAMAMLLFMATHAPAVLGAREDAVCFCCADKIWCTFDPNCCSRPPPSAN

SEQ ID NO: 44976 - protein, 107 aa, Zea mays
  Coding DNA Sequence Number=SeqID_3197
MTWDRRGTEGGCWRRRGWSLGCRWRRRGGREPADGATFPAREGDDVAVPAAREGDDAMGREKQRTRGASRWSQSNGNTDVNVCLKIHSHEESNPGIEECCSPPNQLA

SEQ ID NO: 44977 - protein, 590 aa, Zea mays
  Coding DNA Sequence Number=SeqID_3198
  Gene Ontology: Mol. function=protein serine/threonine kinase activity; Cellular component=membrane; Biological process=protein amino acid phosphorylation
  Homolog annotation: Hit_ID=Q2QNF5; Match level="QueryCoverage=96%, HitCoverage=78%, E-value=1e-148, Identity=64%"; Hit description =Protein kinase domain containing protein
  Pfam annotation: Domain name=Pkinase; Domain location=249-521; Score =135.4; E_value=1.5e-37; Accession=PF00069.15; Description=Protein kinase domain
  Pfam annotation: Domain name=Pkinase_Tyr; Domain location=249-521; Score=136.0; E_value=1.1e-37; Accession=PF07714.7; Description =Protein tyrosine kinase
  Pfam module annotation: Pfam domain module=Pkinase::Pkinase_Tyr; Domain location=249-521::249-521
MYQEATATQSLFLLSMSRPSARFYFNRYQFKPDNSFPPFRYPDDSYDRLWQRYGRNAAWTTMNTTKEVDVSNVTGSFDKPSEILQNAATPVANGANRMDFSWSSDPSLEQDANADGNATTYLLILYFAELQRVPSDGLRQFDILINNATGNDGSSQGFTPRYLSAAAVKRTVQGPGQHNVSLVATPAATLPPILNAFEIYAVKPMTEMPTDDVDDTWMPNNSRFTSPQASSHIFENRKFTYKELKLMTANFREEIGRGGFGAVFLGYLENGNPVAVKMRSKTSSQGDKEFLAEVQHLTRVHHKNLVSLIGYCKDKKHLALVYEYMQGGSLEDCLRGEASAATPLTWHQRLKIALNSAQGLEYLHKSCQPPLIHRDVKTKNILLSADLEAKIADFGLMKAFADEFRTHVTTQPAGTLGYLDPEYYNTSQLSEKSDVYSFGVVLLELVTGQPPAVPVSDAESVHVALWVRRRLSEGDIASVADPRMGGAYDVNSVWKVAELGLRCKEQPSRERPAMTDIVAELRESLQLEVSYAMGYYSSSVSTSAIDLSTASAGLQSDEKPSDRLGQKAALELQQQHVDSESSATVGPAPR

SEQ ID NO: 44978 - protein, 265 aa, Zea mays
  Coding DNA Sequence Number=SeqID_3199
MRQYKPKQRKSKKHIETVRGISDVSGDAPDGTPNTVLKEAEFGLRKAKGTERIRWHAEHPTGYNTKRSVKMDKVRYSAPDVTGVALDGTPDTALREIVFGSSWIEGIRPVRWHTRCTMLNDQLREGFNGYLMWHVWWHTIHVRLLSPFEKKGLKLDLGDRLSKERVENLSYNSDVLGTSLVERDLVLCGPLVSLWNRTPMVGMRDLGAGVERLGATRGRGRTPGVDAVEEGGQTGGGASVRALSSIGQMAASTRAEQMAVGMGSE

SEQ ID NO: 44979 - protein, 75 aa, Zea mays
  Coding DNA Sequence Number=SeqID_3200
  Subcellular localization annotation: CTP_CleavageSite=42; ConfidenceScore=5.10e-01
MSRSTQSSLSYAKSMHMVSPGQTTDVLVTFDQAPRHYYLVVRAYARVLMVSPGQTTDVLVTFDQAPRRYYLIVRA

SEQ ID NO: 44980 - protein, 144 aa, Zea mays
  Coding DNA Sequence Number=SeqID_3201
MYGLQVVMRRMVMIMLMVMVMVAFGAIYAQKIFENPGRHTQWACPRGVLCAGLGGSNESEEVSSEEVDSSDSSEEWSGDEGDGEGDGSSNDGEGDGSKGDGDDGMGNGDRGDVDGSKGDGGRGDGDGGKDDGGNRKASGIMPLV

SEQ ID NO: 44981 - protein, 74 aa, Zea mays
  Coding DNA Sequence Number=SeqID_3202
MAEEEKEQEQGAPGPRRQAQKSPQPAQVGDHRGKHRAETMPKLPKARSNLSSVASTSVLVFASSLKIDKGSRLR

SEQ ID NO: 44982 - protein, 94 aa, Zea mays
  Coding DNA Sequence Number=SeqID_3203
MESSVPMIKGGRKASAFRVRIAGRRKICGRNQMATLPRCPRFLNSIISHLNFKDTPAVLGPKVHLLQLVDFCKNLAKVRESLLQGKNKVKYNQS

SEQ ID NO: 44983 - protein, 62 aa, Zea mays
  Coding DNA Sequence Number=SeqID_3204
MAGDDDMATRITRSIGGRSRDGLRATDTVKFAGDPSSSSGGVDAAERKQRDGSVNWDPHASN

SEQ ID NO: 44984 - protein, 139 aa, Zea mays
  Coding DNA Sequence Number=SeqID_3205
MGKNKKGGSSSQHSGDKQKCEPSPPSEDFSESEYSEEEFSSDSEGSPVYASPPGIAAEVWTYIRAVERSGLKGSDESEISSDEENSSDSSEEESGGDGGDGGGDCDDNGNGDGNGGKGDDGSGKGDGGSSKASGKAPLV

SEQ ID NO: 44985 - protein, 106 aa, Zea mays
  Coding DNA Sequence Number=SeqID_3206
MKSRHCLDQTDLQVRQLKRELLRTKYYFNLLRIELDSGPGGSNNTRPSSSGTQLVASATPCVASKLIDDNLPADATLQSLSLGRMIKNGTTAKTRMWTIVHGVSTP

SEQ ID NO: 44986 - protein, 110 aa, Zea mays
  Coding DNA Sequence Number=SeqID_3207
MAGKVSDQRAQLACNELLLSYFYLLKLSTGVVVPGGWRRARSLDADNEAPGLWLSDPVDESLRSQPRRPTTRTIRLMGEQSGSTGEPVLRLTNAHTQKNTPAHRLGYWAA

SEQ ID NO: 44987 - protein, 72 aa, Zea mays
  Coding DNA Sequence Number=SeqID_3208
MEDNQWALTHAPNAYWVGGLLRQQQKPSAAAIDAVVHQRRRGAESWRGHRSNLGQRRLEMVAKDPRAEKISV

SEQ ID NO: 44988 - protein, 49 aa, Zea mays
  Coding DNA Sequence Number=SeqID_3209
MDGARAFGVTVAARSSGNRHYRANWASSLARAFQTTIAARASDARTWGG

SEQ ID NO: 44989 - protein, 187 aa, Zea mays
  Coding DNA Sequence Number=SeqID_3210
  Gene Ontology: Mol. function=enzyme inhibitor activity
  Homolog annotation: Hit_ID=Q2QML6; Match level="QueryCoverage=84%, HitCoverage=82%, E-value=2e-17, Identity=42%"; Hit description =Pectinesterase inhibitor domain containing protein, expressed
  Pfam annotation: Domain name=7kD_coat; Domain location=1-57; Score =2.6; E_value=0.078; Accession=PF02495.8; Description=7kD viral coat protein
  Pfam annotation: Domain name=PMEI; Domain location=29-182; Score=4.8; E_value=0.0059; Accession=PF04043.6; Description=Plant invertasepectin methylesterase inhibitor
  Pfam module annotation: Pfam domain module=7kD_coat::PMEI; Domain location=1-57::29-182
MGRRITTTTLLAVAASALCFSSCCGVDVNGAADTVAGSCDAIRDFVDVAFCASRLGSVPGAASADLHGHLLMAADLAAASGVSARDAAAGMARREGDGGHPAARDALEACGILYGAASVPALRLMRGYAAARAWGAARALLPLTGQAGIGCDAALTGSAPAKARMAAANREFDQLSTMATALLNKLA

SEQ ID NO: 44990 - protein, 72 aa, Zea mays
  Coding DNA Sequence Number=SeqID_3211
MARRRPGSAVADLRGCTEDGGQLALKAKEKNCLIITENFQDHLAGMPSKELARFSVALWKSEWKLELPSTML

SEQ ID NO: 44991 - protein, 55 aa, Zea mays
  Coding DNA Sequence Number=SeqID_3212
MPEVGLPKQQKLQDGYPHTLEYMLLLSLTAYTSAPQYGEWCVGFGPLTAGSNESS

SEQ ID NO: 44992 - protein, 122 aa, Zea mays
  Coding DNA Sequence Number=SeqID_3213
MSLFHAACIGRVQRGNYVSFSVIWRSENGTNLGVQLLHLSWPWQGEQSVAMVTTKGMACKALGQGKPRGWGGKLHKPEGMKTTPTHAEKPGLELKDKEEDSLIQPGFNELMFGFLYRLSQNY

SEQ ID NO: 44993 - protein, 45 aa, Zea mays
  Coding DNA Sequence Number=SeqID_3214
MEWRWWKNGSTSGPGRGFQYLYARWSMGQLQRKPGAYGAAVGVEI

SEQ ID NO: 44994 - protein, 177 aa, Zea mays
  Coding DNA Sequence Number=SeqID_3215
TEHHFTGGAELPSVDFIRPPPRVDRAARLEHAPLTSPTACARGQHYSGHHRRRSTPRRDRQGPPDLARLSTGPLPPPEDNTEEILLTPTPLTKPHAFAVGASSSALPMLVTQAPAPGCDDPDDSSNDGGDDEDEEEENDNNEDANNQQEQEDDFVGMWPVAEHYTSMFETGHFPNSL

SEQ ID NO: 44995 - protein, 99 aa, Zea mays
  Coding DNA Sequence Number=SeqID_3216
MTTYTSHELVMASSMRLILWYLFLTCGEGEGKRSTAGEQATPRPGLHDNEAGQIRGEDGASRATTKGPTMAEQPKVVAEFVATEILDRKHRFGGDLPWR

SEQ ID NO: 44996 - protein, 35 aa, Zea mays
  Coding DNA Sequence Number=SeqID_3217
MALERLSNDRTSRGPWSMATGTRLHGEKSGGAANQ

SEQ ID NO: 44997 - protein, 134 aa, Zea mays
  Coding DNA Sequence Number=SeqID_3218
  Homolog annotation: Hit_ID=Q6QP51; Match level="QueryCoverage=78%, HitCoverage=51%, E-value=1e-13, Identity=57%"; Hit description =Putative growth-regulating factor 1
MTRPSEASQKIKTSEESNHSSEASRATPGKQRRSPHSDYRANHQDEIESRSPSHEFGIRRNKELHLAQPQASALASTSEEDLRLARPQASASASASRGVTTPPEPSLGLRRSLRLARLGPRTDYATGDTSLPYS

SEQ ID NO: 44998 - protein, 37 aa, Zea mays
  Coding DNA Sequence Number=SeqID_3219
MASHLAHGPAAHVDEQADTTELTAASMANAMCDEAVW

SEQ ID NO: 44999 - protein, 78 aa, Zea mays
  Coding DNA Sequence Number=SeqID_3220
MATVDGGCNTVDAGADIYVLPLVLLEQQVGLDVERHVDSTIGGGRKKDRGPAGAMNSSSGYKKRDRERDREAAQVGHN

SEQ ID NO: 45000 - protein, 489 aa, Zea mays
  Coding DNA Sequence Number=SeqID_3221
  Homolog annotation: Hit_ID=Q8H3G8; Match level="QueryCoverage=74%, HitCoverage=46%, E-value=1e-123, Identity=68%"; Hit description =Myosin heavy chain-like protein
  Pfam annotation: Domain name=DUF869; Domain location=184-487; Score= -86.0; E_value=3.5e-11; Accession=PF05911.2; Description=Plant protein of unknown function (DUF869)
MDRRSWLWRRKSTDKSPGETETSASEKITDEQTIISYSYQPSIIIPCPVHVLGQVTNASLRLSATVTIRQNDTYTVSGKRKSKSLFSMFLSETVQPVFKIGNEIDDSTMGRGRGRQCDCPGGFHTRSAVSNGNVAQSDQDSAKSSPNSTRSPEITSKELEDDNDVKVKVLSERLSSVVLDVRAKDDLVKQHSKVAEEAVLGWEKAEKEISSLKAQLSAATAKNSALEDRLVHLDGALKECVRQLRRAKDEQDQTVQDALARQARQWESHKADLELRIVELTARLEAKSERSVVGATDGDTRSSRLAALEKENSALKLQLLAKTEELELRTIEKELNRWAAETPSKQQLEGIRKVTKLQAECRRLQAAAQRRASSVNVELRRSPSSACVESLTDCQSDCSDSWASALVTELDPVQEGQERREHQDSEPRGRGHRRDGRLPRDGEARLRERLVERRRRRGRERAGGEGAARGSARAEDLPPPGNGGRGEIS

SEQ ID NO: 45001 - protein, 164 aa, Zea mays
  Coding DNA Sequence Number=SeqID_3222
MASPAAAWERPRHGHGGRKHGPLSGPPGGACSGGAQLRPGGRGGPAACGPGQAGAMAMAALGIGAAAPGAHGCGSSGSTSSAPPPRWCGLHRRATLAPSAASAQTEDEDENRLSDERAPANADCWPEGTLHNYSLSCNSETQVKPLSSYGSFPFSCSYTCTGGP

SEQ ID NO: 45002 - protein, 97 aa, Zea mays
  Coding DNA Sequence Number=SeqID_3223
  Gene Ontology: Mol. function=receptor activity; Cellular component =integral to membrane
  Homolog annotation: Hit_ID=Q4RKL5; Match level="QueryCoverage=77%, HitCoverage=18%, E-value=5e-12, Identity=41%"; Hit description =Chromosome 18 SCAF15027, whole genome shotgun sequence
  Pfam annotation: Domain name=DUF300; Domain location=1-95; Score= -117.9; E_value=0.00016; Accession=PF03619.7; Description=Domain of unknown function
MALYALVLFYHLFAKELAPHKPLAKFLCIKGIVFFCFWQGFALGILAGAGVIKSHHFWRDVEHIQEAIQNVLVILEMVVFFVVPSTGLFGSTPIHMD

SEQ ID NO: 45003 - protein, 140 aa, Zea mays
  Coding DNA Sequence Number=SeqID_3224
  Subcellular localization annotation: CTP_CleavageSite=89; ConfidenceScore=5.01e-01
MSALFRAHDRQRHGRCAMQGPRKAACRGAAQGGVPRGRGAAARTPWPPAKPRWGCIRTGTRLAGGTMRHRARAPESGDSPARASRQRACAAVAAAHAKAEPPRHRPPSRARAARGGPRPSHAHRVVFVPDPYGDREIARS

SEQ ID NO: 45004 - protein, 109 aa, Zea mays
  Coding DNA Sequence Number=SeqID_3225
MMKKKEVGGGCIRWNRLGEERCGRYCRLPPPAYPSLRCPPQRTLRESRTPAAATPACPSLPNRSPTTCTPHVAKRPHEARPPSRIPPLPNADRPPPRIPQTQPLPHPPA

SEQ ID NO: 45005 - protein, 671 aa, Zea mays
  Coding DNA Sequence Number=SeqID_3226
  Gene Ontology: Mol. function=protein binding
  Homolog annotation: Hit_ID=Q10Q23; Match level="QueryCoverage=19%, HitCoverage=41%, E-value=4e-19, Identity=40%"; Hit description =Targeting protein for Xklp2 containing protein, expressed
  Pfam annotation: Domain name=TPX2; Domain location=604-660; Score =66.2; E_value=1e-16; Accession=PF06886.2; Description=Targeting protein for Xklp2 (TPX2)
MALDTGTAAGIDEAYEFSAPRFFDFVVEETEEAVRAAESWFEAARSHAPSRMYSRAAEAFLVDRRLFPDLFSLFWILAFNPRIKESRAEVKLAVLCDFAQAEEPAPEVNKQKEPADEMSGPPAAQEERDESPPSLEFLSATDLSVKSADGGSTSTLKMQTRYPAPPTNVAPASSTCDSSSVNTDARTPKMQVNMCRAGPTAASTNVKRSVMIKGGRDLVGTGKAATAGAEIAQENQAVKRQKLDDGRARQILNVKTKVLPHKARADLAGSEMRRSHEDMRSAKEADPYVSAAELVKKFESGTRELSITHSRCRSHEDAASQRSLRRPKLMLTRPKEPDFQTSQRVRTVKVKSSAEIEEEMLAKIPKFRARPFNKTIAEAPSFPPLPRRTPQIPEFNEFHLKTMERASRYADTCSEVSCADTIQELELEELEKAPKFKAKPLNKRILESKGDIGVFFHPKSQVTAPKKFHFSTDVRLGPPSVADLFDKERGHLKERQLEAHLLQKKMEEEKARVHKANPYPYTTDYPTMPPKPEPKPCTRPEGFQLESSVRHELEQRRLMEEKQRMESEEAQRRIFKAQPVMKEDPFPLPEKERKPLTEVEQFVLHVDERAVQRSEFDTLIKEKEKTYKRLREENEFAHKIEEEKALKQLRRTMVPHARPLPKFDRPFRPQK

SEQ ID NO: 45006 - protein, 139 aa, Zea mays
  Coding DNA Sequence Number=SeqID_3227
MPRTTVVESSGCPPLRALTTDILGLVKVVEAHARPAGAAKVVETWGAPDASRAIVAASLADRAADPVLAVARRNGVVRLYDTALQRRPAVSVDFRESPIKAVAADPNGHDVYIGTGTGDLASFDMRTGLSEAAPYNGGP

SEQ ID NO: 45007 - protein, 248 aa, Zea mays
  Coding DNA Sequence Number=SeqID_3228
MPYCSEISSFVYILVFITAHVAGQIYGLEDYRGLTSATGCIFDCEYLNPLLQLLLIEVRFQRPNNSGICRVGRYNISAKYRGKVRDGNGYGGQMVNGHPPEAHICPTLLARSSCVTRKVHIYIFLARVSPDNYITCKAHIYFPSPLVSHKKHTFVFPSPDTELKLEAKLATQAFPSHTNERLQTKLKGRWGKKGKCLDSILHILHAGIAACLVALLADGSNSHGCSVPLAARVIAEANLLESMDPCAS

SEQ ID NO: 45008 - protein, 122 aa, Zea mays
  Coding DNA Sequence Number=SeqID_3229
MAEIDVGVAWALGATERFRNSANALGNKGMMNKASEAQTPRTSESLDITSITWKGATDKTSVHKLGRKTPQTPKKLFDIATGHASREDVERATTGSRKRKTGRDRGPDEDVDNHLNMKRRIG

SEQ ID NO: 45009 - protein, 126 aa, Zea mays
  Coding DNA Sequence Number=SeqID_3230
MAGGKGGKGKHHSSEGKHKRPLSPPSEDFGGLVVSEEEFSSEYDGSLAPVSPRHLADQIYILPIERVGLEGSDDSEDSSENSSEEEEEEDSSDSEDGGGSSGEGDGDGEGEGDDDDDNAGGKMPPA

SEQ ID NO: 45010 - protein, 80 aa, Zea mays
  Coding DNA Sequence Number=SeqID_3231
MGKPIPSLLMLLLSRDKQHGSSSLISCEKQMIRIEFLNLASDRTCTHHNRNGRPRLRSREGICPLPGSLRLSYKFEVDTD

SEQ ID NO: 45011 - protein, 46 aa, Zea mays
  Coding DNA Sequence Number=SeqID_3232
MAMMGPTSEKMYLYQVRKQPTFVASLQRWYLRKSTRSKAAGGKDPP

SEQ ID NO: 45012 - protein, 144 aa, Zea mays
  Coding DNA Sequence Number=SeqID_3233
MARGSTWLAHVAPGVRKGAIPRKWWSTAGLGRIFTGVGRNGTTGDQSDWGWVWGEAGRKAGMTEASPRAKTGRGRRMTTNDRWRSSGVVWVMWQGRLADGASSAKIREATASFKDHVGILGMNREALKVHSHDGNGMAVMERRG

SEQ ID NO: 45013 - protein, 348 aa, Zea mays
  Coding DNA Sequence Number=SeqID_3234
  Homolog annotation: Hit_ID=Q6AU15; Match level="QueryCoverage=21%, HitCoverage=22%, E-value=2e-10, Identity=43%"; Hit description =Expressed protein
MSGDLAKKKMETDDKPTTSHESTSSEESRNKRKEKKNSSNKGKGKEKKSSSHKSHRRGDKHKRMRKVVYYETDSSSPSTSDFDAPSVTSKRQERKKYSKIPIRYPHTSKRRMSLEDEKPFFVVAVVPNWVMLERVVFRRDDESFSDGSEAIVATDRHRVLFRVGTMMFASLVQEFFIYSTSAAVRAAYLVNVLLGDDAYWRSGPWASCAEAKKSSRCTDPNVIWQLCLWQTDTVILVDRWLCWVDYERGILFYDMFGEPSPTVIFSQFPLDKFPDNNTRNKDCCWLYRSMSTTREGGALLFTNGWCWLHYQYTNGRQYAIGTEGAYLTKIRSGCPMSFLPSEFSKYLC

SEQ ID NO: 45014 - protein, 126 aa, Zea mays
  Coding DNA Sequence Number=SeqID_3235
MRLALSSMDFPPGRSVHHQESISGGYTLGESQASLRRETLPIEPFTAHPLPGDPPARLSLASPLLGHAPDPRAGGRVPPPRHGRVQGRALGRAPGRGPDRALARPCPARARASAASRPARLHGSRV

SEQ ID NO: 45015 - protein, 289 aa, Zea mays
  Coding DNA Sequence Number=SeqID_3236
  Gene Ontology: Mol. function=oxidoreductase activity; Cellular component=membrane; Biological process=metabolic process
  Homolog annotation: Hit_ID=Q2QLP7; Match level="QueryCoverage=98%, HitCoverage=93%, E-value=2e-85, Identity=68%"; Hit description =Oxidoreductase, short chain dehydrogenase/reductase family protein, expressed
  Pfam annotation: Domain name=KR; Domain location=11-194; Score=-79.0; E_value=0.0089; Accession=PF08659.1; Description=KR domain
  Pfam annotation: Domain name=adh_short; Domain location=11-177; Score= 77.3; E_value=4.8e-20; Accession=PF00106.15; Description=short chain dehydrogenase
  Pfam module annotation: Pfam domain module=KR::adh_short; Domain location=11-194::11-177
MATDDGEGQQPVVLITGCAKGGIGYEYCQAFAGLGCRVVATDIPDQVPGLAADLAGTPAAEALPLDVTSDASVGAAVSDVLARHGRLDVLLNNAGVGCTGPLAELAPAAVSRALDVNFLGQVRTVRAVAPHMAARGSGRIVNVGSVVGNAATPWAAPYCASKAAVHAATDALRLELRPFGVHVVKVVPGAVRSGLGRANAAHLASHQEWRMYRDFAPAIEERARASQTGKATDAAVFARHVARRVMSARPPREIVYGNMTLLFAALAVSPAWVRDAFFANRFGLNKKQR

SEQ ID NO: 45016 - protein, 728 aa, Zea mays
  Coding DNA Sequence Number=SeqID_3237
  Subcellular localization annotation: CTP_CleavageSite=19; ConfidenceScore=5.29e-01
MVLPSHVFCSLSTIRLPIRSLASFDLRTTRTHPTLSTTNPREICSHLFISPIARGLRPSPLAIGPSQRARTLPSPQPTPVPHEICSHLFFSPIARGAHATTALPRPRLALGSGDADAHRDHDLLPRVLGLFLHSHPPSSPRPRLFSSPPPRVPLSPQPLSATSSSAVVGASLHARPRPTTLAAPLPVLDNFPSGPVLAGIGACSLRHGGGESEGGRRAKRLSQLGRSPPTKIPRDIIDEEMEMESSPAAPRHHNRCLPCCALGSTSRATPLIDKHVVRPHRLPDRQACHGSRHLQPPRFFGQQARDHASHYSVVVVPGASCLRVSLTSDYITVLLSSHPLCGSFLHISRSHLPPNSTLPRSLAASATTALDSSSLRRRSKGPAAPPKSRRELRRLEPALLLAPRAATLLLAPVLLALAEPLDVERQVLQLRRGPSLVQLRKQRSRGSGVVVVALLRLLLLLHATVGRRGADGPPPLPEGGREQRRARQQHYPSPHVVAVDRESRGGIESPTIVDVVATPLMSEEEALKIHTDCVHFQTSSPHLSPTGRYVCVIPTQSHPLPSPFAKNLHPPPSQCALRDAEADCCDNAQEPHVVTELHGSGTTDASSGGGVRCEIIHLLYRKLIMKLDQGPTSAATATYKVQNGNDEAIHLALFSPRRLIEKRPHSSKKATKGNSPDKGRNKFWKNINLGFKTSTSSIKLSLICKKFEPLESPPKRIKRILRTKVPHE

SEQ ID NO: 45017 - protein, 150 aa, Zea mays
  Coding DNA Sequence Number=SeqID_3238
MGQRTLAFTKEMLRVFNPVELEELDLKTGGHTAAQAGRATTQGPLLPVEQRGRGNRARGRLCHGLLAAPWGPRSDTTPRRWVANCAARGGSWPHWGLGGLAEDGYRARGYRGACEATGDKVRACALSCRGTAPAGRAKKKGRRRGILRTW

SEQ ID NO: 45018 - protein, 170 aa, Zea mays
  Coding DNA Sequence Number=SeqID_3239
  Pfam annotation: Domain name=zf-CCHC; Domain location=101-118; Score =7.0; E_value=0.068; Accession=PF00098.13; Description=Zinc knuckle
MNPNEDKMDEVNDKIPTSTVVKRKDESHRYLLNGMKNNKGTRKMFGYKIKPPQPQAEAPELMNTQTGESNQAQLFSMQATDQPSSAGNQAKLTRREVKVRGARFYCKEEGHFICQCPKKHLDRVAKKAFKQNSTSDDPEEIVFTRSKYKVIQTTDEGSRLLDIRVEPREC

SEQ ID NO: 45019 - protein, 124 aa, Zea mays
  Coding DNA Sequence Number=SeqID_3240
MTSIEGATVDPAGGQMTITNSKDEDVVELPILEETSLAKIIADPKVAPIPMSFLSTLEKAELITPMMSTLFFDDVEDDNEDEAVAKDLEEMVAMTTIVVKDSAELPTTSSVTLSRGGKSTEILH

SEQ ID NO: 45020 - protein, 149 aa, Zea mays
  Coding DNA Sequence Number=SeqID_3241
MGYTCVRRTQLTSLLHHEVQKLGHREEYNFLIPLLLVLICLLKLVLGIMELVPQNLNGVISNLDLLLELAVGKRPMGRVSISCGWKPQKVINAHKAATSVVSSAQNPTTLESTERQPSYRGWGSRVSYTLQRGIMCSSYNCIVYWGGMG

SEQ ID NO: 45021 - protein, 79 aa, Zea mays
  Coding DNA Sequence Number=SeqID_3242
MSEGFCSDRLVLDVCKLVAPVQVTITMKSQLRPENEEEMDWDISKIKLDGGSIMTVMGSTSKKMYLCQGCPRSLGQGQL

SEQ ID NO: 45022 - protein, 94 aa, Zea mays
  Coding DNA Sequence Number=SeqID_3243
MCSKAATGMCAVVIVSHEVMWMVRCTMGTGASGMHIGPAGREFGLLALGTRFKPPARALSLREGSLGASRYNRTTEDATSSLPPTKDPSSLPRC

SEQ ID NO: 45023 - protein, 180 aa, Zea mays
  Coding DNA Sequence Number=SeqID_3244
MSLVRPIRNLGLRLTRYDGRRAYTETVDPQIDDGKRITLEPDGSTMHGPDQIANVVWPDSIARAHPQIYGPGLKHAKSSSQANLDRAFMNQRPKPTFPNQPTLDTPALTSIHGGDHAGGQTIRRADAPQAQPKRLYYRVLSSVEFPRPVMAAARWKMREDEKSPANACKSRPAQPRTRCR

SEQ ID NO: 45024 - protein, 74 aa, Zea mays
  Coding DNA Sequence Number=SeqID_3245
MVTVLPSLLEAAGAVAVAVGNRWYRKRNNNANEIEQEEVQRDRVQEQRIELSAESVEKEQSVNNTGDGLATSEK

SEQ ID NO: 45025 - protein, 174 aa, Zea mays
  Coding DNA Sequence Number=SeqID_3246
MWTPPGRHVAEEDDTLQGIGRNPDLHGKVSDPYTNGLDPRERSGTSTGVDRTPGMGPRPLNVGWRPDAATWPTARDVSQWAEPDAVRPCYGVHYAHHHSHVTEEAAQDIKIGLGIRFLLVLLLDAMVHIVEHHDFMPEDFMVEEAAASSTPRATNLPAPGAAGVVHSARQHTPA

SEQ ID NO: 45026 - protein, 57 aa, Zea mays
  Coding DNA Sequence Number=SeqID_3247
MGKTNAAQRSCVRRRKTTDHSKDGGKNNIELLSAREKVKEVEEPKDRGVEEDLLSQG

SEQ ID NO: 45027 - protein, 42 aa, Zea mays
  Coding DNA Sequence Number=SeqID_3248
MAISQPQFGPKSPNCMILNAAEQAEEANLTPWMESALQRRGA

SEQ ID NO: 45028 - protein, 47 aa, Zea mays
  Coding DNA Sequence Number=SeqID_3249
MARRDTRLAGQEQVPQDEAHEGCYDEFVSGLDRRLPVNYGCWIVVFV

SEQ ID NO: 45029 - protein, 84 aa, Zea mays
  Coding DNA Sequence Number=SeqID_3250
  Subcellular localization annotation: CTP_CleavageSite=32; ConfidenceScore=5.28e-01
MTDASGSRSMSARRGKSVWAGGWEMATSRRCSTNMPSEIGMVTETATGSCSGGSASGREVAGSDLGGAGRHLGAVATASRWVRD

SEQ ID NO: 45030 - protein, 78 aa, Zea mays
  Coding DNA Sequence Number=SeqID_3251
MAANSSELHCKSEGDARRESEGCGILSAGSVGLANGASAGSSVSLGHGAVRAACASPGRGVVGDGRRGARSGRKQVAK

SEQ ID NO: 45031 - protein, 74 aa, Zea mays
  Coding DNA Sequence Number=SeqID_3252
MTKVRACQRWSNEFTGGYNDLRMKVMKGVPSSSQHIIMKVSRVFEDLQKTKALNSRQRLSPYALRLAVIPRYTS

SEQ ID NO: 45032 - protein, 73 aa, Zea mays
  Coding DNA Sequence Number=SeqID_3253
MAAPSAAPYAEFSKGELIYGGGSTNGRNYARLTRGGTTLPISCVSPLVWVIRTLKHCLGECLGIHYEAFTIYP

SEQ ID NO: 45033 - protein, 103 aa, Zea mays
  Coding DNA Sequence Number=SeqID_3254
MEPPPVPALVLAIDEFAANIEGESGEEDAEESEDSRVPTSSAMARAVESSPVQRLLRSAQVVPALGSSDVDDGGSLATMKKPLDTSSASSVSSSELVVSSKAR

SEQ ID NO: 45034 - protein, 112 aa, Zea mays
  Coding DNA Sequence Number=SeqID_3255
MGGVEAILALNAPAIQSVGVAIWPRLLLHEDWASGEQKLCADGGYQLRLGVLGVPLIMVPDKTIADGVVDAEAEPTIAEADSEIEDEDDDNILSPSKPSHIEYGKSTVRQMI

SEQ ID NO: 45035 - protein, 466 aa, Zea mays
  Coding DNA Sequence Number=SeqID_3256
  Gene Ontology: Mol. function=oxidoreductase activity; Cellular component=membrane; Biological process=response to oxidative stress
  Homolog annotation: Hit_ID=Q9LDL0; Match level="QueryCoverage=58%, HitCoverage=93%, E-value=1e-102, Identity=66%"; Hit description =Putative cationic peroxidase isozyme 40K
  Pfam annotation: Domain name=peroxidase; Domain location=67-279; Score=295.2; E_value=1.2e-85; Accession=PF00141.13; Description =Peroxidase
MRGQTQTASAGGRWRGDGAAAWCWWWVAVVLLLGHLPSCARAGLLESNPGLAYNFYKNSCPSVDSIVRSVTWAQVAANPALPARLLRLHFHDCFVKGCDASILLDTAQSEKTAAPNLSVGGYEVIDAIKAQLERACPGVVSCADIVALAARDAVSYQFKASLWQVETGRRDGTVSLASNTGALPSPFAGFAGLLQSFSDRGLNLTDLVALSGAHTIGVASCSSVTPRLYQGERQQRGPAAGLGLRADAHVVQRQGTLASDAALAQNAAAAQMVADLTNPIKFYAAFSMSMKKMGRVDVLTGANGQIRKQCRQRSDKLGLESCVGEGGIASARDTAGAPSRIDTGTFSRVTSQRRGLRADNSRWPCPHDPTDPYFSLARRLIRRPSPINERLDLGLSSPRPIRMPTGGFTVRFACDPEERELLQCGAAGGRWAAAGEWPACAPHVPVLDVPVRSGPVTSAPGHFRIR

SEQ ID NO: 45036 - protein, 85 aa, Zea mays
  Coding DNA Sequence Number=SeqID_3257
MTMRSMEAAFGRENHLRGRFQDLVLAYNAASDDAPGAAEAECGVVLADGGEPDADLEVEAATMVASVSGSPRGSSVSEIDTDTEE

SEQ ID NO: 45037 - protein, 124 aa, Zea mays
  Coding DNA Sequence Number=SeqID_3258
MGEWSLEMNEFIETRYPGMKQITKHPYAEGEETGRRGRPLTSRLLCSSTVKRPSSSDSALLAAAVFSFTRAEDVADHGHGCSDRERRGGESSRGRGNTHALVLEYRSSSTASLAVCFSAGFALA

SEQ ID NO: 45038 - protein, 177 aa, Zea mays
  Coding DNA Sequence Number=SeqID_3259
MAKRLLLFKMVVEASSDGSRLSALLPSDAEIARWLTEAMEVCKALFFGVARGPRSPTEEHSGEIGCSDRGAKTDSIDEDEDEDDEASAGFELWAIPNTSLAVSTADFVLAFSGEAASDFLMVEEADFLELPALFSGPMSLVAFVSLPVEPLVGRPSRVACMGSLSALGPSVTPIVTP

SEQ ID NO: 45039 - protein, 59 aa, Zea mays
  Coding DNA Sequence Number=SeqID_3260
MAAPRQRYCESKSGRAATPLIPNMFGPQNSATWFWRESEAAHGVIVEVALRRSNFMKTT

SEQ ID NO: 45040 - protein, 587 aa, Zea mays
  Coding DNA Sequence Number=SeqID_3261
  Gene Ontology: Cellular component=integral to membrane
  Homolog annotation: Hit_ID=Q8L4G8; Match level="QueryCoverage=92%, HitCoverage=87%, E-value=1e-166, Identity=58%"; Hit description=C4 -dicarboxylate transporter-like protein
  Pfam annotation: Domain name=C4dic_mal_tran; Domain location=249-505; Score=219.8; E_value=6.3e-63; Accession=PF03595.8; Description=C4 -dicarboxylate transportermalic acid transport protein
  Subcellular localization annotation: CTP_CleavageSite=2; ConfidenceScore=5.30e-01
MEANSSKSGGLPPRNADVSNPKPPTHPPVPPQRLRETVVLPPLETQFHHPPGSGFRTVQQTVSMSLPASPGSFGTATPTAAVTTDSADLRRQAMANASRMAPHRLAAHGAGSSSVRFTPQEKEEAMMFRSQPIPGGPPPARLASRAAGGGHGGRRAMNWDRRYDSFKTWSGKLERQINHLAGAGAEGSGDDGDLDSDVIGSHRTCATSVPEVDRFYAALEGPELDQLKPSEDLVLPADRTWPFLLRFPVSAFGICMGVSSQAILWKVMALSVPTTFLHVTAKANLALWCISVALTCAVTAVYACKAALFFEAVRREYYHPIRVNFFFAPWITCLCLAHRGAARGGAQHRGAAALALIYGQWMSGGQRRLSKVANPSNHLSVLGNFVGAQLGATMGLREGPVFFFAVGLAHYVVLFVTLYQRLPTNETLPKELHPVFFLFVAAPSVSSVAWAEISGGEFGHVSRVAFFVAMFLYASLAVRVNFFRGFRFSLAWWAYTSPMAGAAVAAIRYSTVVDNAFTKALCVALSAVATLTVAALFATTMVHAFVLKNLFPNDIAIAITERKVKPIMELQESDGNHIEATDDATEP

SEQ ID NO: 45041 - protein, 32 aa, Zea mays
  Coding DNA Sequence Number=SeqID_3262
MATGILQQRRAAGLTETQTAAGLIHRRIQGTQ

SEQ ID NO: 45042 - protein, 104 aa, Zea mays
  Coding DNA Sequence Number=SeqID_3263
MATGTRRTVSNLVSTIPDDARPDYHILFTMSSTISTTTTRYTYKRLIRTPAQDGLGHAFEPPNLASALYLVKQGSDILLLTKDDAKDRGHPVDHTTTGPRTHLL

SEQ ID NO: 45043 - protein, 726 aa, Zea mays
  Coding DNA Sequence Number=SeqID_3264
  Gene Ontology: Mol. function=cytochrome-c oxidase activity; Cellular component=membrane; Biological process=electron transport
  Homolog annotation: Hit_ID=Q33B99; Match level="QueryCoverage=93%, HitCoverage=92%, E-value=1e-130, Identity=40%"; Hit description =Expressed protein
  Pfam annotation: Domain name=DUF639; Domain location=42-721; Score =752.8; E_value=2.2e-223; Accession=PF04842.3; Description=Plant protein of unknown function (DUF639)
MGIVEAWMREKPIRTFLARLAQRRAAAAAAFLASPSATTVIDGEGGSDGSIPQLSSVANSVVSRCSRNPIGLKLPIAGYVHFTFKLAKFTLNFSMEFLIKFGHVASGGRDYLADKNLRRLMFDMMLAWETPGAQDVSVDNGSIVRDSLEIEDEDEGSIFYANSTRLAAQVDDKKTVGLSAFARIAPSCPIIADLVTVRNLFDALTSSSGGRLHFLVYDKYLKSLDRELRSVKGIMQSSLASSFHLDAGECILAIDGDKPIQPVLQHIGISAWPGRLVLTTHALYFQSIRVGYGDKIVKYDLSTDSNQVIKRDLTGPLGVRLFDKAVMYKSSTLTEPIYFDFFELGGPSRRDYWLAITREVLQVNRFIRKFNLGDVQKAEALSKAILGILRYSAVKEAFHIAPSHFKTTLTFSLAEKLPKGDMVLEALYNNYFQLLDSSLRHLAIDSAVDRMSENHSIPFSLYALSRMGFLLLKTNDKSEKEMSFCAVCFGVTKSLEAALEESICYSERIESARATVDQVKVEGVDANLALMQELLFPLIQAGKIVYSLSQWEDPLKSLLFLAFMLYAIQRGLISYIAPFVFLTFAIIMLWHKYIGDGKLLEVLEVKPPPSKNAVEQILTLQEAISKLENFLQSANITLLKFRSVLFACVPKATEVVAAVLIVAAAFLVFLPSRPLIQMLVLEMYTREMPLRKQNTEKFRRRIREWWARIPAAPVQMIRPNESKKKR

SEQ ID NO: 45044 - protein, 146 aa, Zea mays
  Coding DNA Sequence Number=SeqID_3265
  Gene Ontology: Mol. function=carboxyl- and carbamoyltransferase activity; Cellular component=ornithine carbamoyltransferase complex; Biological process=amino acid metabolic process
  Homolog annotation: Hit_ID=Q8SA97; Match level="QueryCoverage=81%, HitCoverage=24%, E-value=3e-17, Identity=42%"; Hit description =Ornithine carbamoyltransferase
MALPVDVAGLRPRLGDVEAPPKPRSSLSSMAEAESEPLGRARRRSFGRGQGGVRALGSGEAEFVVFWAALSFCQAGQWSGEVTAVTLALPACVRIKLYADGGYQLRIRSLEDTPNYGPRQMSSHFHEGIGRGCKAPADFKWLAVIL

SEQ ID NO: 45045 - protein, 93 aa, Zea mays
  Coding DNA Sequence Number=SeqID_3266
MKLLQARIETLPYQSRGIALARLRPAATTRKPGYQIATSLKESTCSSSSKELPKNNSRSQLQSLPLRIFPQPQGGCLVYETEMELRTNVWIPE

SEQ ID NO: 45046 - protein, 65 aa, Zea mays
  Coding DNA Sequence Number=SeqID_3267
MVSHSSYGGYKCGHCTTAIGVSEALYAKAIGYLEDMVAGVTWPPILPPGWTVEWDPASAEEEHEE

SEQ ID NO: 45047 - protein, 80 aa, Zea mays
  Coding DNA Sequence Number=SeqID_3268
MRHFAKFFPRPKKKNDVYPARVHPTTADEAADGEPVMAKGSEYDSEDLDIDEDNNDIQPTKLRHVNFAKSTIMSGHIEGL

SEQ ID NO: 45048 - protein, 134 aa, Zea mays
  Coding DNA Sequence Number=SeqID_3269
MGNKVSELEALNAEKDKCIASLEDELKRAKEEYEPEIDKIRHTSGKETFELSAVQMKIGDLNDEVNRIRQLNENYRILMTKFYTLGNRCYNELILSSTGATSREKNFVDGDLEGMTQWIARRAAEKAASIMKIL

SEQ ID NO: 45049 - protein, 86 aa, Zea mays
  Coding DNA Sequence Number=SeqID_3270
  Subcellular localization annotation: CTP_CleavageSite=46; ConfidenceScore=5.12e-01
MAQGHISLSDGKTLRPTFIKKTLERAEASAWGSVTHPSLFNGGVVRVVVVGAVLLVTLGVLSSVLSRPKPRSGEAEVFPRPWPSQL

SEQ ID NO: 45050 - protein, 380 aa, Zea mays
  Coding DNA Sequence Number=SeqID_3271
  Gene Ontology: Mol. function=protein serine/threonine kinase activity; Cellular component=nucleus; Biological process=protein amino acid phosphorylation
  Homolog annotation: Hit_ID=Q2QRH9; Match level="QueryCoverage=99%, HitCoverage=100%, E-value=1e-129, Identity=59%"; Hit description =Protein kinase AFC1, putative, expressed
  Pfam annotation: Domain name=Pkinase; Domain location=111-372; Score =79.5; E_value=1.1e-20; Accession=PF00069.15; Description=Protein kinase domain
  Pfam annotation: Domain name=Pkinase_Tyr; Domain location=111-372; Score=-99.2; E_value=2.2e-06; Accession=PF07714.7; Description =Protein tyrosine kinase
  Pfam module annotation: Pfam domain module=Pkinase::Pkinase_Tyr; Domain location=111-372::111-372
MECVTDMPLATLDSRPRKRQRLGWDVVPAEMYQVTRPRLGWDVGPAEMNQFALCGQEVVNAFSAAVLGLSSGCVSSQVNQEQPHDGSPPLREDDKNGHYVFAVGDNLTSRYKINAKMGEGTFGQVLECWDKETKEMVAIKIIRGIKKYRDAAMIEIGMLEKLGKYGESRSSCVQIRNWFDYRNHICIVFERLGPSLYDFLRKNNYRSFPIALVREFAKQLLEFMHELRLIHTDLKPENILLVSPEYIKVPDYKVSSQSPKEGSYYKQLPKSSAIKDMDGVTHVISGVLVVFLLSFARRHSDKYIRKGRLNWPEGCTSRESMKAVMKLSRLQNLVMQNVDQAAGDFIGLLQGLLKYDPASRLTAREALRHPFFTEGFGRRR

SEQ ID NO: 45051 - protein, 74 aa, Zea mays
  Coding DNA Sequence Number=SeqID_3272
MAEGRLPPRRNLDLTPWGRYLRALQVDRSPGTSPDNSQLAEYEGVAGCPRCNLCSGEDEVVVEDFQEFQEYDEF

SEQ ID NO: 45052 - protein, 173 aa, Zea mays
  Coding DNA Sequence Number=SeqID_3273
MEQGGNAMEDLREHPPPELRGRRALGGGVRAPGAGEQGARHGELPPWRESVQHRELDASLLATAATKTSHGREGARRVELLGDGNGCAGEGRCPWEGAASLEECSWPWVTASSLLEVGKWQRKGGWPACLRKKKREEVRAPWKGALRPWSFCPCARTGNREKELLVAARGGSE

SEQ ID NO: 45053 - protein, 307 aa, Zea mays
  Coding DNA Sequence Number=SeqID_3274
  Gene Ontology: Mol. function=protein binding
  Homolog annotation: Hit_ID=Q7F0Z3; Match level="QueryCoverage=68%, HitCoverage=69%, E-value=5e-41, Identity=41%"; Hit description=Zinc finger POZ domain protein-like
  Pfam annotation: Domain name=BTB; Domain location=205-304; Score =56.3; E_value=1e-13; Accession=PF00651.21; Description=BTBPOZ domain
MAARSWALAVRTSRLLGVGHWRDGVGRQRGARRLPWGGGVGRRRGARRGEPAATEEPAAKAAGGGGGARWRRRTGAAEEPAAAEDGRGAKKQKIRIFGLGLPLGTGIGNIVQSVTFTVSDHSWAIRFYHDSLKQETRMFASVELALMDKDAKKPSWRLELPSTGYIRNDRMIIQCDLTVVRDPELCKTKGGFEIQVPPSDLAEQFGKLLLEEEETDVVFSVGGETFPAHKVVLAARSPVFKAQLYGNMKEAKARRVAVEDMQPGVFRALLKFIYIYTDALPVIGDDNICDDDYDEIIRHLLVAAACR

SEQ ID NO: 45054 - protein, 177 aa, Zea mays
  Coding DNA Sequence Number=SeqID_3275
  Gene Ontology: Mol. function=carboxyl- and carbamoyltransferase activity; Cellular component=ornithine carbamoyltransferase complex; Biological process=amino acid metabolic process
  Homolog annotation: Hit_ID=Q8SA97; Match level="QueryCoverage=63%, HitCoverage=21%, E-value=3e-13, Identity=42%"; Hit description =Ornithine carbamoyltransferase
MALPVDMVGPRPRLGDVEAPPRSRSSLSSVAVVESEPLGRARRRPSAEARAESEPWGRAKRCSSSSGAGPKSEPWVGRCGVRRLPGLSTSPSPGSGGAEFAVFRGLAQVRALGQASRVRRLPGISPSPSPGSGGAELPMVPEVGPDCLSASLCQVALQSVRRRRRCPSVRSVSGAAK

SEQ ID NO: 45055 - protein, 147 aa, Zea mays
  Coding DNA Sequence Number=SeqID_3276
  Gene Ontology: Mol. function=transporter activity; Cellular component= membrane; Biological process=oligopeptide transport
  Homolog annotation: Hit_ID=Q56XQ6; Match level="QueryCoverage=91%, HitCoverage=16%, E-value=4e-27, Identity=48%"; Hit description =Nitrate transporter NTL1
MDDAERSQAPPESCVDWRGRPCRPRHGGMRAAAFVLDPQQVEGQDPGRRRAGARAMPCIYSNRLRRRLVVVRIAVFQASQTMALAAVGSNLITFVFGELHFPLPQAANVVTNFVGTVFILSPLGGFLSDSYAGCLRTLLAFAAVELA

SEQ ID NO: 45056 - protein, 72 aa, Zea mays
  Coding DNA Sequence Number=SeqID_3277
MAEMRHRVDQSLALPSLGENPFEPPPTSPRSLSSSIVFIRAHVDREFVGRLKAPPRNPVRPWADCGVAHSSM

SEQ ID NO: 45057 - protein, 41 aa, Zea mays
  Coding DNA Sequence Number=SeqID_3278
MAAQVVAAAGTPVARPLGDGSGADTLWPAARMPRERRTGMD

SEQ ID NO: 45058 - protein, 491 aa, Zea mays
  Coding DNA Sequence Number=SeqID_3279
  Gene Ontology: Mol. function=calcium ion binding; Cellular component =mitochondrion; Biological process=embryonic development ending in seed dormancy
  Homolog annotation: Hit_ID=Q94HS0; Match level="QueryCoverage=69%, HitCoverage=71%, E-value=1e-103, Identity=34%"; Hit description =Putative salt-inducible protein
  Pfam annotation: Domain name=PPR; Domain location=123-157; Score =33.6; E_value=7.1e-07; Accession=PF01535.11; Description=PPR repeat
  Pfam annotation: Domain name=PPR; Domain location=158-192; Score =25.6; E_value=0.00018; Accession=PF01535.11; Description=PPR repeat
  Pfam annotation: Domain name=PPR; Domain location=193-226; Score=5.8; E_value=1.5; Accession=PF01535.11; Description=PPR repeat
  Pfam annotation: Domain name=PPR; Domain location=21-55; Score=48.0; E_value=3.1e-11; Accession=PF01535.11; Description=PPR repeat
  Pfam annotation: Domain name=PPR; Domain location=227-261; Score =29.4; E_value=1.2e-05; Accession=PF01535.11; Description=PPR repeat
  Pfam annotation: Domain name=Peptidase_M22; Domain location=226-425; Score=-16.2; E_value=1e-05; Accession=PF00814.15; Description =Glycoprotease family
  Pfam module annotation: Pfam domain module=PPR::PPR::PPR::PPR::PPR::Pe ptidase_M22; Domain location=123-157::158-192::193-226::21-55::227 -261::226-425
MPEARRLFDQMAQVGIQVNTITFNVLIDGYAKSGQMDQASAAYREMQARGLVPDSCTFNIIAARAHKFGYAAQLVHDHDMFSSHMSADELDMLVCRLCWDHQLDDAWELLLGAIEQGVPLRVTGFNALIAAYSKEGLHEEASELYRIMNKLGLAPSSSTFNYLIMGLCNQVRLDEAQLLLEHMVSKGYCLSTSFTISLDAYFRDGNAVGALKCWDDMGKIGLQTDFIAFSAYINGLSRLDYVNEAYQAFAEMTSRGIVPNNITYNSIISTLCSQTLSYSYFANSYNQPTELIFLHTADEHLLYHGQLAKKGEQFIDVPYVVKGMDVSFSGILSFIEAAAIEKLKNNECTPADLCYSLQETIFDMLVEITERAMAHCDSKDVLIVGGVGCNERLQEMMKIMCSERGGRLFATDDRYCIDNGAMIAYTGLLAYAHGMTTPLEESTFTQRFRTDEVHAIWREKEMPVLNNTHSDAIAEVSIDEASMATPIVIDY

SEQ ID NO: 45059 - protein, 57 aa, Zea mays
  Coding DNA Sequence Number=SeqID_3280
METPRLVVADFGPLIRVSGRGTAILMVPSLADEQREGDITELFNLAQRSNYSPLASH

SEQ ID NO: 45060 - protein, 683 aa, Zea mays
  Coding DNA Sequence Number=SeqID_3281
  Gene Ontology: Mol. function=metal ion binding; Cellular component =nucleus; Biological process=regulation of transcription, DNA -dependent
  Homolog annotation: Hit_ID=Q6K937; Match level="QueryCoverage=91%, HitCoverage=87%, E-value=0.0, Identity=57%"; Hit description=Zinc finger (C3HC4-type RING finger)-like protein
  Pfam annotation: Domain name=VWA; Domain location=181-362; Score =96.3; E_value=9.4e-26; Accession=PF00092.18; Description=von Willebrand factor type A domain
  Pfam annotation: Domain name=VWA_CoxE; Domain location=125-335; Score= -72.8; E_value=0.0043; Accession=PF05762.4; Description=VWA domain containing CoxE-like protei
  Pfam annotation: Domain name=zf-C3HC4; Domain location=1-37; Score =19.6; E_value=0.0015; Accession=PF00097.15; Description=Zinc finger, C3HC4 type (RING finger)
  Pfam module annotation: Pfam domain module=VWA::VWA_CoxE::zf-C3HC4; Domain location=181-362::125-335::1-37
MKPGQGHALFTAECSHTFHFHCISANVKHGSSSCPVCRIKWKELPFRGPLPAELPQGNARINPVNGYQNGGHMNILRPLPRARSSGRLHHLATLLPDTDPSTFNDDEPLDLSSEEANDNHQGCLRTVEIKTYPEFTEVPENTSERNFTVLIHLKAPVAQHLQPSSNLGDGNGLSTARAPVDLITVLDVSGSMAGTKLALLKRAMGFVIQNLGSSDRLSVIAFSSSARRLFPLRRMTESGRQQSLLAVNSLTSNGGTNIAEALRKGSKVIEERQAKNPVCSIILLSDGQDTYTVSPTAGVHKGAPEYCALLPSTNGNQQVPVHVFGFGADHDSVSLHSISQTSGGTFSFIETEAAIQDAFAQCIGGLLSVVAQGLHVKVESLHPDVHFGSIRSGSYSSRVSDDKRNGSIDVGDLYAEEERDFLVSVNVPPGYGETALLKVGCVYKDPLMKETVNMADVQVKISRPAFVSVQSVSIEVDRQKNRLHAAEVMAEARFSAERGDLTTAVSLLEDCRRMIMGSASGQSGDRLCQALDAELKEMQDRMANRQRYEASGRAYVLSGLSSHSWQRATARGDSTDSESLIQAYQTSSMVDMLLRSQTMSRSSTPRPTPQMRHAKSFPARPQPRGSGMVYVLGRIGQEGGELGSSDLIVRGGVVVRRSRFSYSLSGHRNCPLAPGIQAGREKG

SEQ ID NO: 45061 - protein, 127 aa, Zea mays
  Coding DNA Sequence Number=SeqID_3282
  Gene Ontology: Mol. function=metal ion binding
  Subcellular localization annotation: CTP_CleavageSite=53; ConfidenceScore=5.27e-01
MSLGLNLCVYVPRTLEGDDAASSPDTASSTAALVSPVASSSSAATSTNTTPTAASADQSSASGKVLMPTTPTPTSAGLRLSKSGSKSFKEFYGFPRAHHRLALGRPDDRIAKESILIMAQLQTCNPY

SEQ ID NO: 45062 - protein, 171 aa, Zea mays
  Coding DNA Sequence Number=SeqID_3283
  Gene Ontology: Mol. function=protein phosphatase type 2C activity; Cellular component=nucleus
  Homolog annotation: Hit_ID=Q1S458; Match level="QueryCoverage=54%, HitCoverage=18%, E-value=3e-31, Identity=61%"; Hit description =Protein phosphatase 2C-like
MARAFGDFCLKDFGLICVPEVTYRQISKKDEFIILATDGVWDVLTNQEVMDVVASCSERSSAARSIVDLANQAWRFKYPTSKTDDCATICLFLDVEDKAAGLSVSSSVASKGTGSQAQPRKPRLHTSVPPEDVDDGSESNISGDERSLDSFTRLNTLLALPKLGDTSLKIK

SEQ ID NO: 45063 - protein, 97 aa, Zea mays
  Coding DNA Sequence Number=SeqID_3284
MELNKSRAGEHAKNEKTPTGEKSKGKTSSRMIKISGDNHKKREEEFAGSTKSNKKKDGKKKKKMKVIVIYETDSSASASTSDAESTSSKRQERQKYN

SEQ ID NO: 45064 - protein, 495 aa, Zea mays
  Coding DNA Sequence Number=SeqID_3285
  Gene Ontology: Mol. function=helicase activity; Cellular component =mitochondrion; Biological process=metabolic process
  Homolog annotation: Hit_ID=Q94HS0; Match level="QueryCoverage=89%, HitCoverage=78%, E-value=1e-174, Identity=38%"; Hit description =Putative salt-inducible protein
  Pfam annotation: Domain name=PPR; Domain location=147-181; Score =20.5; E_value=0.0062; Accession=PF01535.11; Description=PPR repeat
  Pfam annotation: Domain name=PPR; Domain location=182-216; Score =47.2; E_value=5.5e-11; Accession=PF01535.11; Description=PPR repeat
  Pfam annotation: Domain name=PPR; Domain location=21-55; Score=45.5; E_value=1.8e-10; Accession=PF01535.11; Description=PPR repeat
  Pfam annotation: Domain name=PPR; Domain location=217-251; Score =36.7; E_value=7.9e-08; Accession=PF01535.11; Description=PPR repeat
  Pfam annotation: Domain name=PPR; Domain location=252-286; Score =47.7; E_value=3.8e-11; Accession=PF01535.11; Description=PPR repeat
  Pfam annotation: Domain name=PPR; Domain location=287-321; Score =24.0; E_value=0.00052; Accession=PF01535.11; Description=PPR repeat
  Pfam annotation: Domain name=PPR; Domain location=322-355; Score =11.9; E_value=0.29; Accession=PF01535.11; Description=PPR repeat
  Pfam annotation: Domain name=PPR; Domain location=356-390; Score=2.5; E_value=3.8; Accession=PF01535.11; Description=PPR repeat
  Pfam annotation: Domain name=PPR; Domain location=96-130; Score=26.3; E_value=0.00011; Accession=PF01535.11; Description=PPR repeat
  Pfam module annotation: Pfam domain module=PPR::PPR::PPR::PPR::PPR::PP R::PPR::PPR::PPR; Domain location=147-181::182-216::21-55::217 -251::252-286::287-321::322-355::356-390::96-130
MPEARRLFDQMAQVGIQVNTITFNVLIDGYAKSGQMHQASAAYREMQARGLVPDSCTFNIIAARAHKFRLCWDHRLDDAWELRLGAIEQGVPLRVTGFNALIAAYNKEGLHEEASELYRIINKLGLTPSSSTFNYLIMGLCNQTDFIAFSAYINGRSRLDYVNEAYQAFAEMTSRGIVPNNITYNSIISALCKAGNMTEAFKLEQNMRQSGLVPDIYTSNILIDGLCREGKLKMVDNLLLDMCSNGLTPDTVTYNTIINAYCRAQDMNSAMNFMNKMLVAGCEPDIFTYNIWMHSLYRNHMLNQAGKLLDELVVVDCSPNSVTYNTLMDGICSDVLDRAMILTGRLIKMAFKPNTITLNVFLSHFCKQGFGNRALMWAEKLREDSYVFYGATRNIIDWARREMEDDPQANNEDIGRCMFLEFLMFMTYEAMLNSRSSKATHMLTEKGFDPASNSMIRKEVKMGLAVIACLLLNQTFLIDPKYPSFCLINPCYERL

SEQ ID NO: 45065 - protein, 120 aa, Zea mays
  Coding DNA Sequence Number=SeqID_3286
  Homolog annotation: Hit_ID=Q8W1N8; Match level="QueryCoverage=66%, HitCoverage=13%, E-value=3e-18, Identity=58%"; Hit description=CSLC9
MEYLTLSNVPSRSPLVQCMGLAVVDHPKVWPLKRPHLLRKSPVVRSGFYAFIKAFLVVSLLLLAIEVAAYINGWDLAASALALPSLALESLYASWLRFRAAYVAPGIQFLTDACVVLFLV

SEQ ID NO: 45066 - protein, 116 aa, Zea mays
  Coding DNA Sequence Number=SeqID_3287
  Homolog annotation: Hit_ID=Q6ZHH2; Match level="QueryCoverage=70%, HitCoverage=26%, E-value=5e-17, Identity=55%"; Hit description =Tyrosine specific protein phosphatase-like
MSRSRRLKKGGSLTSCVSWSIDDDFRILEALAAQRLEHGALPQTDVLVDALAGKLDNSGCSLSDLKRKVRSLQSRYAKVVKKGASPSKDQDHYLFDLCKSPVVRSASGNAGDFGSG

SEQ ID NO: 45067 - protein, 47 aa, Zea mays
  Coding DNA Sequence Number=SeqID_3288
MLCASCGWLLTDQQPDTPGDENAETENLEDDANDSVPDLKSLDLDSV

SEQ ID NO: 45068 - protein, 312 aa, Zea mays
  Coding DNA Sequence Number=SeqID_3289
  Homolog annotation: Hit_ID=Q10CV6; Match level="QueryCoverage=16%, HitCoverage=4%, E-value=4e-07, Identity=57%"; Hit description =Helicase associated domain family protein, expressed
  Subcellular localization annotation: CTP_CleavageSite=76; ConfidenceScore=5.04e-01
MASGDLLLRVLTKHCLPEMASGDLLLRAHAGAPVLARASPASSSSPGKAPQRTNLTSGRFQGRHRRRRWAGQVEVEQDEEDEALKLGVEKNGARREVWATFPNAGAAWLGASPEFHLLTCRRRSRANEARVACAAACVAGWASSSSHSRTHPAARRRSLAWLFSSDASMASPATPSAASPSGSAPSSSSQTTNTTTSTRTSGFVLHLGVQPVPLVHVPHAHSPSLGEAGAYVAEVTQLGAIGYGAESLYSDSEAACRDEQRIKPATDLIKNTDCTQVGGRLGQTGTGSRAPSFLGRVTGPRLALTSAAACVA

SEQ ID NO: 45069 - protein, 687 aa, Zea mays
  Coding DNA Sequence Number=SeqID_3290
  Gene Ontology: Mol. function=potassium ion transporter activity; Cellular component=membrane; Biological process=potassium ion transport
  Homolog annotation: Hit_ID=Q6YWQ4; Match level="QueryCoverage=98%, HitCoverage=87%, E-value=0.0, Identity=80%"; Hit description =Putative potassium transporter HAK2p
  Pfam annotation: Domain name=K_trans; Domain location=1-687; Score =1183.0; E_value=0; Accession=PF02705.7; Description=K+ potassium transporter
MSSVPTTAGRAAPFALYSLICRHVRAGLLPGGGTRDELMEEEKATGRRGERPVSRVRAVLEKYRVLQRLLLLFALLGTCMVIGDGVLTPAVSVFSAVSGLELSLEKEQHKYIELPVACAILICLFALQHYGTHKVGFLFAPIVCIWLLCISAIGLYNIIRWDHHVYRALSPYYMYQFLRKTQTGGWMSLGGILLCVTGSEAMYADLGHFSQSAIQIAFIYVVYPALVLAYMGQAAFISQHHNFESSYHIGFYVSVPETLRWPVLVIAILAAVVGSQAIITGTFSIIKQCSSLSCFPGVKIVHTSSTVHGQIYIPEINWMLMILCLAVTIGFRDTKHLANAQGLAVITVMLVTTCLMSLVIVLCWNKSIFLALGFLLFFGAIEVIYFSASLVKFHEGAWVPITLSFIFMVVMCVWHYGTIKKYEFDVQNKVSVNWLLNLGPSLGIVRVRGIGLIHTELMSGIPAIFSHFVTNLPAFHQVLVFLCVKSVPVPHVQPEERFLVGRIGPKEYRLYRVIVRYGYRDVQKDDLEFEKELVGNIAEFIRSSAEYDKNGFAEDTDKPSGKLSTISTGINMWEEDGEPDASSSPRKETDPRDAAPERKKARFMIPKSAQVDSEVRRELQELMDAREAGMSFILGRSYMKAKSGSGFVKRVVINLLYEFLRKNSRGPAYAASIPHASTLEVGMVYQV

SEQ ID NO: 45070 - protein, 165 aa, Zea mays
  Coding DNA Sequence Number=SeqID_3291
MVLVDRSGLQVEISGQQKPQPLNHLHGNRGQLQPPHCLGLLPSPLLIPSAATPNRRNYCRQGISSTAMLGVPLWGNPQRSRRLRLRWCRGSSLGRGEGNRVRVSRVRPPASSESFTAAADPPRAAAGHPATLITGRRGKEDSWTVDARIYGPDRTKSGRKSEPLD

SEQ ID NO: 45071 - protein, 591 aa, Zea mays
  Coding DNA Sequence Number=SeqID_3292
  Gene Ontology: Mol. function=RNA-directed DNA polymerase activity; Cellular component=mitochondrion; Biological process=RNA-dependent DNA replication
  Homolog annotation: Hit_ID=UPI00004C1731; Match level="QueryCoverage =99%, HitCoverage=43%, E-value=0.0, Identity=80%"; Hit description =UPI00004C1731 related cluster
  Pfam annotation: Domain name=RnaseH; Domain location=213-340; Score= -14.1; E_value=0.0012; Accession=PF00075.14; Description=RNase H
  Pfam annotation: Domain name=rve; Domain location=401-524; Score =30.6; E_value=5.5e-06; Accession=PF00665.16; Description=Integrase core domain
  Pfam module annotation: Pfam domain module=RnaseH::rve; Domain location=213-340::401-524
MGPIKDLKGVQRVTGCLAALSRFISRLSERGLPLYRLLRKAECFTWIPEAEEALGNLKALLTNAPILVPPAAEEALLIYATATTQVVSAAIVVERREEGHALPVQRPVYFVSEVLSETKIRYPQIQKLLYAVILTRRKLRHYFESHPVTVVSSFPLGEIIQCREASSRIAKWAVEIMGETISFAPRKAIKSQVLADFVAEWVDTQLPTAPIQPELWTMSFDGSLMKTGAGAGLLFISPLRKHLRYVLRLHFPASNNVAEYEALVNGLRIAIELGVRRLDARGDSQLIIDQVMKNSHCRDPKMEAYCDEVRRLEDKFYGLELNHIGRRYNETANELAKIASGRTMVPPDVFSRDLHQPSVKTDDTPEPEKASAQPEAPSAPKGCQFYARQTHLPAQALQTIPITWSFAVWGLDLVGPLQKAPGGYTHLLVAIDKFSKWIEFTGRKFLDFCEDHHIRVDWAAVAHPMTNGQVERANGMILQGLKPRIYHDLNKFGKRWMKELPSVVWSLRTTPSRATCFTPFFLVYGAEAILPTDLEYGSPRTRAYDDQSNQANREDSLDQLEEARDMALLHSARYQQSLRRYHARGVRSRDL

SEQ ID NO: 45072 - protein, 165 aa, Zea mays
  Coding DNA Sequence Number=SeqID_3293
MVLVDRSGLQVEISGQQKPQPLNHLRGNRGQLQPPHRLGLLPSPLLIPSAATPNRRNYCRQGISSTAMLGVPLWGNPQRSRRLRLRWCRGSSLSRGEGNRVRVSRVRPPASSESFTAAADPPRAAAGHPATLITGRRGKEDSWTVDARIYGPDRTKSGRKSEPLD

SEQ ID NO: 45073 - protein, 118 aa, Zea mays
  Coding DNA Sequence Number=SeqID_3294
MDELLAICYLYMDFDPTNISSARIFKMEKTCGDEELVAWHLVDDVGDRVFLLTGTNMATWCYACTNNPRGSTLYFLVHLVAGHRDLCIYDVQKQTMEVGQVHDHEDLEIMHTQSYWIN

SEQ ID NO: 45074 - protein, 377 aa, Zea mays
  Coding DNA Sequence Number=SeqID_3295
  Pfam annotation: Domain name=DUF295; Domain location=294-346; Score =18.8; E_value=0.004; Accession=PF03478.8; Description=Protein of unknown function (DUF295)
MCIMLMNDGHSGRASIQPPPQVLASVPLLVYEYEDAAAVDPADDSAPTAFKMLMYSLPERSIVYTHDNRPPMMMEGNFCFTTPQGWLVILGQESEASMWHPLTGETITLPPIHDIPVTCKCLLTHSSVAHPDCAVVLLDVTDPLMWFCRVNGEADRRRWGQHAYDIGDYFFPEEFRTPTTPTKNVIHDVAALGGKLYFRFTESDQHKMGVVDLDFPSDPGHPPTAVFDEFDVCAEFDLVPEGICAACIHLVESMGELLAICYYYVDFDPTNISSARIFKMEKTYDDEDEELVAWRPVDDVGDRAFLLTGTNMATWCYASTNNLRGNTFYFLAHLVSGHRDLCIYDVQKQTMEVVQVHDYEDMEIVRTMPYWINVPPC

SEQ ID NO: 45075 - protein, 129 aa, Zea mays
  Coding DNA Sequence Number=SeqID_3296
MEMTKGNCADHLAFVGAAKRRRLRVKEKRLTHRISAEGATFQLQNAQGDRRSMRSLVRMPIMRSKAQAWHALSLIREEMRNAAAFVFALCGTETWHALTLALALALALTLTLALVGEEEPPSPFSSLRG

SEQ ID NO: 45076 - protein, 114 aa, Zea mays
  Coding DNA Sequence Number=SeqID_3297
MAMGLDPDSSRGIPSLENGDDFALSRALPSPPDAAGDPVPLPRPSSSPETVPSLPELRPKIHGLFPAIEFVVVFSPSLPNPGNPGATLARACPNSGYLTAAERSSIARSCSSSL

SEQ ID NO: 45077 - protein, 393 aa, Zea mays
  Coding DNA Sequence Number=SeqID_3298
  Gene Ontology: Mol. function=metal ion binding; Biological process =metal ion transport
  Homolog annotation: Hit_ID=Q6K9R4; Match level="QueryCoverage=81%, HitCoverage=78%, E-value=3e-37, Identity=66%"; Hit description=Heavy- metal-associated domain-containing protein-like
  Pfam annotation: Domain name=HMA; Domain location=254-318; Score =42.2; E_value=1.7e-09; Accession=PF00403.16; Description=Heavy-metal- associated domain
  Pfam annotation: Domain name=HMA; Domain location=75-146; Score=24.7; E_value=0.00033; Accession=PF00403.16; Description=Heavy-metal -associated domain
  Pfam module annotation: Pfam domain module=HMA::HMA; Domain location =254-318::75-146
MAKKKRSGGGGGQQQKPATAEEGEEQAGDAPPAAEGNKDREHEKGKDKDQEEKGSKGKDKDGKKPPPQPPVVTAVLKVDMHCDGCAKRIRGSVRRYPGKQRNAMKAPCVEGVAMDVDKGIMTVVGRLDAKKLRDRVADKTKKKVDLVLGGGGGNSSNNKGGGGNNNKQGGGNQHKGGHEEDGKQSDKEHGGGEQEGKEKDKGDRQEGEEGTKGKDNNKGGSGGGGKGKGGGGGGGGGKDNKKPVAPVVATVVLRIGSTGLHCDGCMNRIRRKLYKIKGVEQVRMDMGKNQVTVTGTMDAKALPEKLRKKLRRPVDVVAPGSGNKDGKDKDGGGGGGKEKEKEKDGKDGKDAAITKALSAELEAWKAAFYDQQSLSNAEFMLSDENPNAACAVM

SEQ ID NO: 45078 - protein, 137 aa, Zea mays
  Coding DNA Sequence Number=SeqID_3299
  Gene Ontology: Mol. function=ligase activity
  Homolog annotation: Hit_ID=Q6K9R7; Match level="QueryCoverage=78%, HitCoverage=22%, E-value=1e-43, Identity=80%"; Hit description=DNA ligase-like
MDYDRLNSPNTSAISLEVMGHRLHISQDPNSKHLGTTVWDASMVFVKFLEKNSRKGRFCPSKLKGKRVIELGAGCGLAGFGMTLLGCDVTTTDQVECLESSELCLSNNKPYLLSVIIKVFKLISRVDKVPLVDKSVD

SEQ ID NO: 45079 - protein, 224 aa, Zea mays
  Coding DNA Sequence Number=SeqID_3300
  Homolog annotation: Hit_ID=Q6QP51; Match level="QueryCoverage=63%, HitCoverage=76%, E-value=3e-08, Identity=34%"; Hit description =Putative growth-regulating factor 1
MVTRSAITKQKRWRRRGRSCEDRRHLWQAKQATLRFRHNDRVKKGTGKGDTSKGILLREGNRPRAPLLIRGSKAGPSKGFNSRLRALGLRAHYWLAPEGFDSRLRRRARDDLGYVRYITKARAALPRERLTAAKSGLGRHRKLRLARPQGSDSTLAPEDDELRLARPQGSDSASAPEDDELRLARPQGSDSASAPEDDELHLARPQGSDSASAPEDDELRLARP

SEQ ID NO: 45080 - protein, 70 aa, Zea mays
  Coding DNA Sequence Number=SeqID_3301
MGGCRPPLMSHSVSEGKPNVNHELRHQKSFDIDRWKYDGASFIKMKQAPMVPNEIVIEAIVKGLCLGPTA

SEQ ID NO: 45081 - protein, 434 aa, Zea mays
  Coding DNA Sequence Number=SeqID_3302
  Gene Ontology: Mol. function=kinase activity; Biological process =multicellular organismal development
  Homolog annotation: Hit_ID=Q67UY9; Match level="QueryCoverage=94%, HitCoverage=99%, E-value=6e-95, Identity=59%"; Hit description=1 -phosphatidylinositol-4-phosphate 5-kinase-like protein
  Pfam annotation: Domain name=MORN; Domain location=176-198; Score =20.4; E_value=0.0064; Accession=PF02493.10; Description=MORN repeat
  Pfam annotation: Domain name=MORN; Domain location=199-221; Score =34.9; E_value=2.9e-07; Accession=PF02493.10; Description=MORN repeat
  Pfam annotation: Domain name=MORN; Domain location=222-244; Score =31.7; E_value=2.6e-06; Accession=PF02493.10; Description=MORN repeat
  Pfam annotation: Domain name=MORN; Domain location=245-267; Score =26.3; E_value=0.00011; Accession=PF02493.10; Description=MORN repeat
  Pfam annotation: Domain name=MORN; Domain location=268-290; Score =31.9; E_value=2.3e-06; Accession=PF02493.10; Description=MORN repeat
  Pfam annotation: Domain name=MORN; Domain location=291-313; Score =24.5; E_value=0.00039; Accession=PF02493.10; Description=MORN repeat
  Pfam annotation: Domain name=MORN; Domain location=314-336; Score =28.8; E_value=1.9e-05; Accession=PF02493.10; Description=MORN repeat
  Pfam module annotation: Pfam domain module=MORN::MORN::MORN::MORN::MOR N::MORN::MORN; Domain location=176-198::199-221::222-244::245 -267::268-290::291-313::314-336
MDGHGGGAGKLTRTPSSLLRSPTMRAGPGTASFHALDDPEPDDKKAQAPLGKPRALLRRAHHRFRPGPAQSALLLLLPVLALAALLMRGGDGGHHLALLAAAAGFALAAAAAVARLRGARPRSPALEASVRWFIGEDDDEEQRDWKRRAGLGLGLGLGRRAEVREGVEFYSNGDRYEGEFHGGRCSGSGVYSFFGKGKYEGDWVDGKYDGHGVESWARGSRYRGQYRQGLRHGHGVYRFYSGDDYAGEWAGGQSHGIGAQTCSDGSTYAGEFKCGVKHGLGCYHFRNGDLYAGEYFADKIQGFGAYRFANGHSYEGSWHEGKKQGFGMYVFGSGDERAGEWDSGILKSSLPLSDPAVQRALQAARRAADSAFHLPRVQEQVNKAVMAANRAATAARVAAIKAVQNRIDGKLCFIDIMASFGPLAAPCSRLALEA

SEQ ID NO: 45082 - protein, 111 aa, Zea mays
  Coding DNA Sequence Number=SeqID_3303
MKQAPNRDRRLRWGARGVLQLGDQRCSLRGGEVAEGETDVVARGLGSTVRVRTSEEGSANLLARLQPQERDRRWENDEGEVLRAGRAIPVRNPDREEVDSGALRPGLAPVG

SEQ ID NO: 45083 - protein, 109 aa, Zea mays
  Coding DNA Sequence Number=SeqID_3304
MMLRVLKTEANRLRGNSPVAVLHRSRTSTDKGFVAALELQRQIHTHPATKLARRDHRHRQGVEAKLSEWLGVARRRRSRASAAAENCGNGGSLSFFSYDTISSGFGGSW

SEQ ID NO: 45084 - protein, 140 aa, Zea mays
  Coding DNA Sequence Number=SeqID_3305
MSADPNRWIEDRRLRWGTWRVLQLGDRRCSLRSGKVARGEADAFAGGLGLPVRAGTGEEGLANSLAGLQPQEQGRRRENGEGERVHGHASATVAGKTELTWLAHRAAGESERAGERFSTLTGGAVADRWGPPVRQSGRAT

SEQ ID NO: 45085 - protein, 238 aa, Zea mays
  Coding DNA Sequence Number=SeqID_3306
  Gene Ontology: Mol. function=nucleic acid binding
  Homolog annotation: Hit_ID=Q2RA28; Match level="QueryCoverage=58%, HitCoverage=51%, E-value=2e-46, Identity=66%"; Hit description =Expressed protein
  Pfam annotation: Domain name=Alba; Domain location=13-63; Score=32.8; E_value=1.2e-06; Accession=PF01918.11; Description=Alba
MPRTVANVPPLPDSSSLENGHDEISIKAMGQAINKTVMVVELIKRRVGGLHQNSATESVDITDTWEPLEEGLLPLETTRHVSMITVTLSKKPLDTSSPGYQPPIPAEEVKPAFDYDHEDSYPTGRGRGRGGGRRGRGRGMSNGPSPPAYGYNEEWGEEGDYYNRGRGRGRSRGRGRVRGGYYGGGRRGGYSYGYGARGGYYEEQDEYYDDPEEYAPPGRRGRGRGRRGMPWRGRGVYY

SEQ ID NO: 45086 - protein, 190 aa, Zea mays
  Coding DNA Sequence Number=SeqID_3307
  Gene Ontology: Mol. function=hydrolase activity; Cellular component =mitochondrion
  Homolog annotation: Hit_ID=Q7F188; Match level="QueryCoverage=93%, HitCoverage=64%, E-value=1e-51, Identity=60%"; Hit description =Putative phosphohydrolase
MKNIGEVSLPGGKVEEGDADDVATALRESKEEIGLDPALYGLDHSHSFWVDMVKGPWNMACYLLEVFALRHLLVVVPVVGILLDRQAFKPALNIAEVDEIFDVPLEMFLKDENRTSEEREKMGQTFTVHYFTYENGIQKYLIWGLTARVLIHAASVVYERPPDFTERRAHFKLPKFTKDCSSMLAGPAKH

SEQ ID NO: 45087 - protein, 379 aa, Zea mays
  Coding DNA Sequence Number=SeqID_3308
  Homolog annotation: Hit_ID=Q6K2K7; Match level="QueryCoverage=16%, HitCoverage=6%, E-value=1e-15, Identity=68%"; Hit description=Lipase class 3-like
MCRQDRSRSELVRRQVVPSVRTALLALNRALNLNEWTDQIQAKDLFCLSDGVGSCSTTAERRVAPSKWGNARSHRDLAQTETGGKGAKPERARCPMSKFDESKSNQAQSEVPITPTLSIPLLLHHRRLASPPPTPAALPDDGGGRARRRCQLPQLRHFAFLRLHRSPTPSWPSPPRSNGRRGCTTEREGYARAEAECLDPRGRARILYRLAGDLWGGDVDPSALVAPACSTASPMAALSCVEEFINARYILAEAVDTLFTTFIGTKQYKDIIDDVNIRQGTLFYEHTTQDLAPNVDPKQNDTQKGLCAAFCPALFAIIIVRPPYPWNWERPVTEPIMCRAREAQAGPEVQLGPRGPAHGTGLLLPESNMVLSLAGSELA

SEQ ID NO: 45088 - protein, 50 aa, Zea mays
  Coding DNA Sequence Number=SeqID_3309
  Gene Ontology: Mol. function=3'-5'-exoribonuclease activity; Biological process=RNA processing
  Homolog annotation: Hit_ID=Q84T68; Match level="QueryCoverage=82%, HitCoverage=17%, E-value=8e-13, Identity=80%"; Hit description =Putative exosome component
MEGGRQKREYEMTLKRTLQSICLLTVHPNTTTSVVLQVVADDASISFHMM

SEQ ID NO: 45089 - protein, 216 aa, Zea mays
  Coding DNA Sequence Number=SeqID_3310
  Gene Ontology: Mol. function=calcium ion binding
  Homolog annotation: Hit_ID=Q94DW4; Match level="QueryCoverage=64%, HitCoverage=67%, E-value=2e-27, Identity=51%"; Hit description =Calmodulin-like protein
  Pfam annotation: Domain name=efhand; Domain location=188-216; Score =30.5; E_value=5.7e-06; Accession=PF00036.22; Description=EF hand
  Pfam annotation: Domain name=efhand; Domain location=75-103; Score =36.1; E_value=1.2e-07; Accession=PF00036.22; Description=EF hand
  Pfam module annotation: Pfam domain module=efhand::efhand; Domain location=188-216::75-103
  Subcellular localization annotation: CTP_CleavageSite=92; ConfidenceScore=5.79e-01
MGSMEVSKPSKRLSPKRSSSFKLSLFCGQCKATAVSSPPDSPTAAAAGARSLSSSSASASASSSGTSRGRDRTAELREIFRHFDRDMDGRISGAELREFFASMGDGGSLQALGLKDGGGAGGAVDLTLTLGFDDFVCVVESKGGEEEEREDLRRAFEAFEAVKGSGRITPRGLQRVLSQLGDEPSVAECEAMIRAYDDDGDGELDFHDFHRMMSQG

SEQ ID NO: 45090 - protein, 134 aa, Zea mays
  Coding DNA Sequence Number=SeqID_3311
MAIPFDLNEFPVDYEDTQELEDFQQVQNITAFMEASSLKKGRVGRKATSVSKPGASSSKSDVTEAGGISGSGTTSISKSGKTSISMPGASSSKSGVTEAGGTCESGTTSMAIKSDLHGFGLHGCVASQRQQRRV

SEQ ID NO: 45091 - protein, 101 aa, Zea mays
  Coding DNA Sequence Number=SeqID_3312
MAGHGDLATHRPNPSETTPKERGEGGETTRASIPVCCREGDPDDVKARFPGLVQRRRAIQRSRSEDNPGRSLRWLQEVTEVDPEHYTEGKSMASEPGRAAD

SEQ ID NO: 45092 - protein, 213 aa, Zea mays
  Coding DNA Sequence Number=SeqID_3313
MERGAGGVLDAAGGSWRGRRHAARADVCARLGRELCGRLCAAREGAVRASAREGAGGAAVRCSRRERGGPGGSWSPASWEGRGSRAQRAEGSGRAARGRGRAGRRGRAGRPHCSEGEGGAGQRAAARLRKGEGGAGAPASREGGAVARGERERAAAARMERASWASWEGGTAALRRGRGWARRRVGVPAAGVEGWDEDGAREREKIGWLILGG

SEQ ID NO: 45093 - protein, 137 aa, Zea mays
  Coding DNA Sequence Number=SeqID_3314
  Homolog annotation: Hit_ID=Q6QP51; Match level="QueryCoverage=78%, HitCoverage=51%, E-value=8e-16, Identity=43%"; Hit description =Putative growth-regulating factor 1
  Subcellular localization annotation: CTP_CleavageSite=91; ConfidenceScore=5.41e-01
MDGDCANRISKNSTVHPAPAAVPTTRVKPTAVSHDLPRVQPRAQQGAPPHPTSGLSLSLDLGRRSPPRPTSGLGLNLGLGRSHNLARPQPRPQEKSPPRPTSALDRLRHWGYIITLRLASCLRLRRNKTSVPSRLLL

SEQ ID NO: 45094 - protein, 228 aa, Zea mays
  Coding DNA Sequence Number=SeqID_3315
  Gene Ontology: Mol. function=structural constituent of cytoskeleton; Cellular component=cytoskeleton; Biological process=regulation of actin filament polymerization
  Homolog annotation: Hit_ID=Q1RTH3; Match level="QueryCoverage=74%, HitCoverage=80%, E-value=5e-71, Identity=77%"; Hit description =ARP2/3 complex, 21 kDa p21-Arc subunit
  Pfam annotation: Domain name=P21-Arc; Domain location=57-227; Score =364.1; E_value=2.3e-106; Accession=PF04062.5; Description=P21-ARC (ARP23 complex 21 kDa subunit)
MWNLWKERNRRIFESDALPPVQVALRIKEDVSQFRRALLPILDMRLNGRMNEDTNVYHSSFADDNGITKACSCPLLPLKTHIKGPAPASDPDKADIVDEAITFFRANVFFKNFHVKSSADKLLIYLTFYINIALKRLEGCRTLAVGTKAIINLGLEKVPVPREPGFPFPGLFTLPQSQEEAELLRNYLKQIREETSGRLLNCAYRANGFPNKWWLAFAKRKFMNIVIL

SEQ ID NO: 45095 - protein, 100 aa, Zea mays
  Coding DNA Sequence Number=SeqID_3316
MGELDMFSSMSHFLVMKGGQQGLRLRQPHHVRDGLLAMGGHHTHRLVFKGSAKTCVAPYVGLLWDFVALDPTRRPQHKPMTFGVCCVGQQTELHGIQGSR

SEQ ID NO: 45096 - protein, 281 aa, Zea mays
  Coding DNA Sequence Number=SeqID_3317
  Gene Ontology: Mol. function=1,3-beta-glucan synthase activity; Cellular component=1,3-beta-glucan synthase complex; Biological process=1,3-beta-glucan biosynthetic process
  Homolog annotation: Hit_ID=UPI000034F02F; Match level="QueryCoverage =84%, HitCoverage=12%, E-value=1e-73, Identity=58%"; Hit description =ATGSL11 (GLUCAN SYNTHASE-LIKE 11); 1,3-beta-glucan synthase/ transferase, transferring glycosyl
MKCTPGLISKDEWNNFLERIGVESNNEVSIKGRMDDIRLWASYRGQTLARTVRGMMYYRRALELQCYEDMINDQGYGLADLDTAKAARSKAIADIKFTYVVSCQLYGVHKTSKDSRERGLYENILNLMLTYPALRIAYIDEKEVQLRNGKIEKQYYSVLVKGDDEEIYRIRLPGKPTEVGEGKPNNQNHAIIFTRGEALQAIDMNQDNYLEEAFKMRNLLEEFLLTHGKSEPTILGVREHIFTGSGRDTEDMNITDNDMSVDEVKVDLHVLRALVLHEIGG

SEQ ID NO: 45097 - protein, 90 aa, Zea mays
  Coding DNA Sequence Number=SeqID_3318
  Subcellular localization annotation: CTP_CleavageSite=40; ConfidenceScore=5.03e-01
MPNCPMVNPDCSIVFATIGAPRGGPGAALSCPTVHSTLVVAHATAKATIGAGRDRERVAALAWEHERTAADALASQLAEAERHLLGSSVA

SEQ ID NO: 45098 - protein, 168 aa, Zea mays
  Coding DNA Sequence Number=SeqID_3319
  Gene Ontology: Mol. function=1,3-beta-glucan synthase activity; Cellular component=1,3-beta-glucan synthase complex; Biological process=1,3-beta-glucan biosynthetic process
  Homolog annotation: Hit_ID=UPI000034F02F; Match level="QueryCoverage =98%, HitCoverage=8%, E-value=3e-24, Identity=37%"; Hit description =ATGSL11 (GLUCAN SYNTHASE-LIKE 11); 1,3-beta-glucan synthase/ transferase, transferring glycosyl
MARYYQVVYALYEVLQDVTNKNIDDQVLRCADMVEENGRHFKNYKYNIIPLNFPGSSEEIMELPEIRGAIDAISDIDGLPMPDMSSIQRHEDKSIQDLIEYLSLAFGFQKSNVENQRENMVLLLANISTRTAAQEGHPLVDTVNELWKKIFGNYKSWCCYLHITSSIM

SEQ ID NO: 45099 - protein, 273 aa, Zea mays
  Coding DNA Sequence Number=SeqID_3320
  Homolog annotation: Hit_ID=Q6K963; Match level="QueryCoverage=22%, HitCoverage=3%, E-value=7e-12, Identity=52%"; Hit description =Putative callose synthase 1 catalytic subunit
MAKGLAAEAASPRATESSSVRRRKAVETLADEVRRDGTARRTSRTETAAPGAVGFRPLPAARSRTRGTGRVDRATTPRTIPPDERNPGGNPGTGRRGASNTSRSRRRRSVSATANSARPPTTETAAQDASEEERTTSRKERWTPPESEESGLSAHQRSSLERPHETSRATGEGPTRQKGWPPRPGISHDITEHKKQQLKLLHIGLYLLIWGEASNVRFMPECLCYIFHHMAKQLHDMVDENNFQPPQAPVEEGSFLKNVIEPIFKVLQKVDLD

SEQ ID NO: 45100 - protein, 175 aa, Zea mays
  Coding DNA Sequence Number=SeqID_3321
  Subcellular localization annotation: CTP_CleavageSite=65; ConfidenceScore=5.56e-01
MPSLAPLPAPHAAQTSRLVPLHVPRADLTPPPVFLSAPRTAPSIGPAPREALSPPATPCVAPSTSAARFANPALVYHCRERATSSVPADSHARSRTEPPVYHPVAIHRDPDYVHPMVTHRAAGVLRPVNWLILTADAPLNASSVPSSVRVDPHWHRAMEEYVALLANHTCLGFWG

SEQ ID NO: 45101 - protein, 35 aa, Zea mays
  Coding DNA Sequence Number=SeqID_3322
MVIDSKEADPLKTIKVVSEFLNVFPKDLPVCGGIY

SEQ ID NO: 45102 - protein, 339 aa, Zea mays
  Coding DNA Sequence Number=SeqID_3323
  Gene Ontology: Mol. function=1,3-beta-glucan synthase activity; Cellular component=1,3-beta-glucan synthase complex; Biological process=1,3-beta-glucan biosynthetic process
  Homolog annotation: Hit_ID=Q5JLH4; Match level="QueryCoverage=99%, HitCoverage=72%, E-value=1e-121, Identity=58%"; Hit description =Callose synthase 1 catalytic subunit-like protein
MEIGLEKGFGRALAEFVIMQLQLASVFFTFHLGTKTHYYGRTILHGGAKYRATGRGFVVRHAKFAENYRMYSRSHFVKALELLILLVVYLAYGSSYRSSSLYLYVTVSIWFLVFCWLFAPFVFNPSCFEWHKTVDDWNDWWKWMGNRGGIGLAPEQSWEAWWVSEHDHLRNATIRSLLLEFILSLRFLIYQYGIVYHLHIVYALSWLVIAVALVSLKVVSMGREKFVTRIQLVFRILKGIVFLVLIGLLVLLFVGFDLAVSDVGASILAFIPTGWFILLRSLLCQVQTEDRCCASEDGTMGLHPGDGEDTRLLFNQAFSRGLQISRILAGQNGSGTKSD

SEQ ID NO: 45103 - protein, 1158 aa, Zea mays
  Coding DNA Sequence Number=SeqID_3324
  Gene Ontology: Mol. function=ATPase activity, coupled to transmembrane movement of substances; Cellular component=integral to membrane; Biological process=transport
  Homolog annotation: Hit_ID=Q7FMW2; Match level="QueryCoverage=98%, HitCoverage=95%, E-value=0.0, Identity=61%"; Hit description=MDR -like ABC transporter
  Pfam annotation: Domain name=ABC_membrane; Domain location=561-839; Score=165.3; E_value=1.6e-46; Accession=PF00664.13; Description=ABC transporter transmembrane region
  Pfam annotation: Domain name=ABC_tran; Domain location=247-431; Score= 216.1; E_value=7.9e-62; Accession=PF00005.17; Description=ABC transporter
  Pfam annotation: Domain name=ABC_tran; Domain location=944-1128; Score=221.0; E_value=2.6e-63; Accession=PF00005.17; Description=ABC transporter
  Pfam annotation: Domain name=SMC_N; Domain location=233-435; Score= -123.2; E_value=0.014; Accession=PF02463.9; Description=RecFRecNSMC N terminal domain
  Pfam module annotation: Pfam domain module=ABC_membrane::ABC _tran::ABC_tran::SMC_N; Domain location=561-839::247-431::944 -1128::233-435
MWVCHDSRAVKEKGVNVGKSIQLLSTFIGGFIIAFVKGWLLALVMLSSIPPIAIAGAIVSRLMTRLSTRMQAKYGDAGNVVEQMLGAIRTVVSFNGEKQAIRTYNKFIRKAYESALQEGAVNGLGLGSVMAVLFCSYGLAVWYGSRLIVERGYNGGMVISVIMAVMIGAMSLGQATPSVTAFAEGQGAAYRMFKTIERKPDIDIYDTTGVILEDIKGDIELKDVYFSYPTRSEHLVFDGFSLQVPNGTTMALVGESGSGKSTVISLVERFYDPRAGQVLIDGVDIRRMHLGWIRGKIGLVSQEPVLFSTTIRENIAYGMENSTLEEIKRATELANAAKFIDKLPNGLDTLVGERGTQLSGGQKQRIAIARAIVKNPRILLLDEATSALDMESERVVQEALNRVMLERTTIIVAHRLSTVKNADVISVLQHGKVVEQGSHVELMKKIPEGAYSQLIHLQETRQGAEFSSVDPDIVLTNGIGSRSINSKPRSQSISRRSTSKGSSSFGHSGRHSFPAPLGLPDPMELNGSPDVEETVDKTSRAPKKAPLGRLLYLNKPEALVLALGSITAAMHGVIFPIYGTLISTAIKVFYEPPAELLKDSRFWASMFVALGACAFVLIPVEYFLFGLAGGKLVERVRSLTFQSLMRQEISWFDEPEHSSGSIGARLSTDAMNVKRLVGDNLALNVQTLSTVISGFTIATVANWKLALIITVVVPFVGFQGYAQMKFLKGLNRNAKLKYEEASQVATDAVGGIRTVASFSGEKKAVDAYERKCESPIKQGIREGVVGGLGFGFSFLAFYLTYALCFYVGAKFVEQGTATFPQVFRVFFVLVLATSGISRTSAVGADSTKANDAAASVLEILDRKSKIDYSCEEGITIAGVSVRGEIDFQNVCFKYPLRPNVQIFKDLSLSIPSGKVNKSNSTPEQEMESELIFPDTVAVAVACLQTVALVGESGSGKSTAIALLERFYDPDSGKVLFDGVELRALRVSWLRQQVGLVSQEPVLFNDTIRANIAYGKQGEASEEEIVAAAGAANAHQFVSALPDGYSTLVGERGIQLSGGQKQRVAIARAVVKDPKVLLLDEATSALDAESERVVQEALDQAVVGRTTVVVAHRLSTVRGADVIAVLKNGAVAEKGRHEDLMRVKGGTYASLVELSSTSS

SEQ ID NO: 45104 - protein, 414 aa, Zea mays
  Coding DNA Sequence Number=SeqID_3325
  Gene Ontology: Mol. function=ATP-dependent helicase activity; Cellular component=nucleus; Biological process=translation
  Homolog annotation: Hit_ID=Q2MJJ9; Match level="QueryCoverage=99%, HitCoverage=100%, E-value=0.0, Identity=92%"; Hit description =Putative RH2 protein
  Pfam annotation: Domain name=DEAD; Domain location=58-224; Score =208.4; E_value=1.6e-59; Accession=PF00270.19; Description=DEADDEAH box helicase
  Pfam annotation: Domain name=Helicase_C; Domain location=282-375; Score=91.5; E_value=2.5e-24; Accession=PF00271.21; Description =Helicase conserved C-terminal domain
  Pfam module annotation: Pfam domain module=DEAD::Helicase_C; Domain location=58-224::282-375
MAAPTTSRRGPGGARNMDDENLTFETSPGVEVVSSFDQMGIKDDLLRGIYGYGFEKPSAIQQRAVLPIINGRDVIAQAQSGTGKTSMISLTVCQIVDTAVREVQALILSPTRELASQTERVMLAIGDHLNVQVHACIGGKSIGEDIRRLENGVHVVSGTPGRVCDMIKRRTLRTRAIKLLVLDEADEMLSRGFKDQIYDVYRYLPPELQVVLISATLPHEILEMTSKFMTEPVRILVKRDELTLEKEEWKFDTLCDLYDTLTITQAVIFCNTKRKVDWLTEKMRSNNFTVSAMHGDMPQQERDAIMGEFRSGATRVLITTDVWARGLDVQQASIRTIFFVFVSSFALLVSLVINYDLPNNRELYIHRIGRSGRFGRKGVAINFVRKDDIRILRDIEQYYSTQIDEMPMNVADLI

SEQ ID NO: 45105 - protein, 871 aa, Zea mays
  Coding DNA Sequence Number=SeqID_3326
  Homolog annotation: Hit_ID=Q5YFA2; Match level="QueryCoverage=35%, HitCoverage=55%, E-value=1e-145, Identity=79%"; Hit description =Brassinosteroid biosynthesis-like protein
  Pfam annotation: Domain name=FAD_binding_4; Domain location=505-642; Score=21.4; E_value=8.5e-05; Accession=PF01565.13; Description=FAD binding domain
  Subcellular localization annotation: CTP_CleavageSite=65; ConfidenceScore=5.78e-01
MAPPHACSAPPVFGVGFGPSTSYSLLYLPRRCRRLPVPRASSSFAPKRSAPVPTTTLPPEAPSTSAAVEAPAPFSVTAPGTYRGGEDPLVSKLRTQLGVIHPLPAPPISRSVVGLFALFFFVGAAFDKLWTLRKRRRAERELKVNGSWPQVPTPSFSLFLEKDLQRKESVEWVNMVLGKLWKVYRTGIENWIVGLLQPVIDNLHKPDYVNRVEIRQFYLGEEPLSVRNVERRTSRRANDLQYQIGIRYAGGARMALALYLKFTKVPVVVPVWVRDFDIDGELWVKLRLIPTEPWVGAVSWAFVSLPKVKFELSLFRLFNLMGKTDPYVVMIIDDQVIKSKKNSQTTVIGLPGEPIWNQKLTIQVKDSIGLTDITIGTGEVELGSLKDTVPTDKIVTLYGGWGLFGKREAGEVLLRLTYKAYVEDEEEEDEAVRSEIGAGYASDEDVLDYVSGMSKGTDFVGKERETFMDLLAALLVSEEFQGIVSSETGSSSREGEQAGSGPEGTDSVTVPTSAAAADTEASTVPNSSTDTALVWLAAITSVMVLVSSNLGGSGYFNPNILEIDAERMVARVEPLVSMAQITKATCPMNLSLAVAPELDDLTVGGLINGYGISGSSHVYGLFSDTVVSMEVVLADGQVVRATMDNEHSDLFYGMPWSQGTIGLLVSAEIRLVRVKEYMRLTYTPVRGTLKEIAEAYADSLFLPAKVPDFVEGMVYSSSEGVMMTGVYASEQEARRTKGSGRIINRVGWWFKPWFYQHAETALERGEFVEYIPTREYYHRHTRSLYWEGKLIIPFGDQLWFRLLLGWLMPPKISLLKITQGEAIRNYYHDRHVIQETCCCPFTGSATRWSLLTVSWRSTQCGCARIACSSSP

SEQ ID NO: 45106 - protein, 549 aa, Zea mays
  Coding DNA Sequence Number=SeqID_3327
  Gene Ontology: Mol. function=oligopeptide transporter activity; Cellular component=integral to membrane; Biological process =oligopeptide transport
  Homolog annotation: Hit_ID=Q6Z0P5; Match level="QueryCoverage=99%, HitCoverage=75%, E-value=0.0, Identity=76%"; Hit description =Putative sexual differentiation process protein isp4
  Pfam annotation: Domain name=OPT; Domain location=1-508; Score=366.4; E_value=4.5e-107; Accession=PF03169.6; Description=OPT oligopeptide transporter protein
MHEEEKRPRGGVTRLQFFVIVVICSFAYYLIPSYLFPSLSTVSVLCWLYRDSVTAQQIGSGLRGLGIGSFGLDWNTVAGFLGNPLVSPAFTVVNVMAGFALTTYVALPLLYWTDTYNARRFPLISPHVYDDAGRPYDTGRVLNRDTFTLNLVGYDAYSRINVSVLFAVNYGIGFASLMSTLSHVALYHGREVWDGLCRKRQHQKTDVDDVHTRIMRRNYKPVPQWWFHLMLAVVLALSLFTCEGFGQQLQLPYWGLLLACAIAFAFTLPVGVIFATTNMQPGLNIVTELIIGYLYPGKPLANVVFKTYGFISMGQALAFLADLKLGHYMKIPPRSMFFAQLAGTLTASTVHFATAWWLLTTVKDICDVGRLPAGSPWTCPGDDVFYNASIIWGVVGPLRMFGSLGNYWQMNYLFLVGLLAPLPVWLLQRAYPTNRVLAGVNLPLVFAGASGLLPARSVNFIMWGLLGFIFNHVVYRRYKAWWMRHNYVLAAGLDAGVAFMGVLTFVALGYFDVYGPQWWGSVADDRCDLAACPTAPGVVAKGCPVVAAE

SEQ ID NO: 45107 - protein, 50 aa, Zea mays
  Coding DNA Sequence Number=SeqID_3328
MGTAVGACVAVLCQLLFIVHVKIIMLIGTWRTTRENSATTRVYGCPWLIN

SEQ ID NO: 45108 - protein, 199 aa, Zea mays
  Coding DNA Sequence Number=SeqID_3329
  Homolog annotation: Hit_ID=Q6QP51; Match level="QueryCoverage=57%, HitCoverage=40%, E-value=2e-13, Identity=45%"; Hit description =Putative growth-regulating factor 1
MTASKKVRHVVRFRILSLFLFLSLTTGTGKGDTPKGILLREGNGPRAPLLIRGSKAGPSEGFNSRLRALGLRAHYWSEVRRLAPRKGSTAASGYSGSAPTTDQGFVGWPPKGSTAALDAERGMTLVKARSTQGTRSRLARAQPRARVADPEGFTPRPRTPSSNGHTFGSPEAQSSPRSNLGQVATPTDRIAEAFNAKMA

SEQ ID NO: 45109 - protein, 225 aa, Zea mays
  Coding DNA Sequence Number=SeqID_3330
  Gene Ontology: Mol. function=hydrolase activity
  Homolog annotation: Hit_ID=Q6K9T9; Match level="QueryCoverage=53%, HitCoverage=36%, E-value=2e-53, Identity=85%"; Hit description =Metallo-beta-lactamase-like
  Subcellular localization annotation: CTP_CleavageSite=28; ConfidenceScore=5.12e-01
MAKAGKTNGTSDNGKNDGVHMGVGSVARAVPRSELRPARARLSFGHLYAEPTAIEVENSDFFTHTHMALMSLGAAGYTTATAPPRPRRCTLPFRAAASPAALDRRRRPHNVAGDFFVDHRCIDCQTCRWMAPEVFKRVDGKAAVAAQPSSEEERTKALQALLSCPTSSIHTEKPPKDILKVQNMFPLPIDDKLLPGVYLCGYNSEDSYGATSYLPKVYSKAGQQY

SEQ ID NO: 45110 - protein, 55 aa, Zea mays
  Coding DNA Sequence Number=SeqID_3331
  Subcellular localization annotation: CTP_CleavageSite=39; ConfidenceScore=5.40e-01
MTFHIMRAPLFLRSSDVPFVFSAFAPFFLPNLLSPPTVVVTSRPTLVDAGTGHSL

SEQ ID NO: 45111 - protein, 129 aa, Zea mays
  Coding DNA Sequence Number=SeqID_3332
  Gene Ontology: Mol. function=protein binding; Cellular component =membrane; Biological process=endocytosis
  Homolog annotation: Hit_ID=UPI0000D571F2; Match level="QueryCoverage =70%, HitCoverage=41%, E-value=1e-18, Identity=46%"; Hit description =PREDICTED: similar to CG9132-PB, isoform B
  Pfam annotation: Domain name=DUF1681; Domain location=15-129; Score =83.2; E_value=8.1e-22; Accession=PF07933.4; Description=Protein of unknown function (DUF1681)
MATGGGNEQPPAEAEPLELVLFQVAECYVYLIPPRKTSASYRADEWNVNKWAWEGALKVVSKGEECIIKLEDKKTGELYARAFLREGEPHPVEPVIDSSRYFVLRVEENIGDDCLSIVFSNAERAVPFH

SEQ ID NO: 45112 - protein, 123 aa, Zea mays
  Coding DNA Sequence Number=SeqID_3333
MSSELHKQYEYANAHVVTWSKAWSRSWSFSHGLRCRCVWKNSKKWKHFMKGKGKLVPRYVSPFQVLERVEWWCDLPCNGTIWESLQQFKDLYLDIQLEYEMFKEAGKDVMTNITYRGRGCASG

SEQ ID NO: 45113 - protein, 236 aa, Zea mays
  Coding DNA Sequence Number=SeqID_3334
  Gene Ontology: Cellular component=membrane; Biological process =endocytosis
  Pfam annotation: Domain name=DUF1681; Domain location=2-90; Score= -104.8; E_value=0.025; Accession=PF07933.4; Description=Protein of unknown function (DUF1681)
MPDLSLFGKCVLTYLNKKKAAEEMIQHYEKQSSVDYSLKEGETLVLQLKNKETGTKTKSTFFEQGLNKLSVNEKTSAKEAPVSLKLPPPPPSPVSPTDSGVAASPFKAEFPSQEQPPAEPVSRTSALPSKGEPAPELPAAAEKMKEQESVDEDFGDFQAAGDSIFSEQQNGTNFKGCEVLDWLSDYKNCCCNDRQYVATTVISALVLLLNHPPLLTPSPLATNPLGMRPPRISRSN

SEQ ID NO: 45114 - protein, 181 aa, Zea mays
  Coding DNA Sequence Number=SeqID_3335
MAEQHRALCCTTVLEPIASPAVFVVVRHFGLGTHRRHGSVCSAPAARRPVDIVCDSNRVTIGPISFYQVEDLPQLFLRSSIVFIGCALFGFTCRYAVRRDLDNIQLETGPPATFAFVRVLALLESGRTLVLSIDTLISVISVTLDAAVSVVENILIFLPAAVALDYCFKMRFLSPFPRRKQ

SEQ ID NO: 45115 - protein, 631 aa, Zea mays
  Coding DNA Sequence Number=SeqID_3336
  Gene Ontology: Mol. function=nucleoside-triphosphatase activity; Cellular component=integral to membrane; Biological process=transport
  Homolog annotation: Hit_ID=Q9FTG6; Match level="QueryCoverage=92%, HitCoverage=94%, E-value=0.0, Identity=74%"; Hit description=ABC transporter-like
  Pfam annotation: Domain name=ABC2_membrane; Domain location=334-540; Score=190.1; E_value=5.4e-54; Accession=PF01061.14; Description=ABC -2 type transporter
  Pfam annotation: Domain name=ABC_tran; Domain location=68-260; Score =164.2; E_value=3.4e-46; Accession=PF00005.17; Description=ABC transporter
  Pfam module annotation: Pfam domain module=ABC2_membrane::ABC_tran; Domain location=334-540::68-260
MEEATVMSQLGRSKDSGGGRRRQRYRIETRALSYVLPPRALLVPWSSATKGKEERLLLRGVTCEAPPGELLAVVGPSGAGKTTLLSVLAGSADPARVVAGEVLVNGVPMDAAGFRRVSGYVPQDDALFPALTVEESLVYSARLRLRLRGGGGGGTPSGAEHRARELMAELGLAHVAASRVADVSGGERRRVSIGMDLVHDPAVLLLDEPTSGLDSGSALHIVKMLRDMAAAHAKTVVLTIHQPGFRILELIDRVVLLADGAVRHHGSLDFLQSRLIATGHAIPAHVNVLEYAMETIDSLKPDVAVATAVTTITAATPANRQDGPRAGYANSPAAEVRILAGRFVKTVLRTPQLFAARMAQSVLVGAFLGSIFLGTTDLQSRLGFFAFNLTYLLTSTTEALPVFLHERRILERETSRGAYRVSSYVASNAAVFLPFLLAAAVLYAAPVYWLVGLAREPAAFAYFALVVWLVMLTANSFVACLSALAPNYIVGNSIVAGLIGCFFLFSGYFVASKNIPRYWVFMHYASLFKYPFEALVVNEYGGARGARECLASAGGAGGLCVLDGAGLLRQQGMREGMRWSNLGVMLGFVVGYRVLCFVILSFRCHRTGRESVTFVLDLIFGSPRQCGKEGS

SEQ ID NO: 45116 - protein, 76 aa, Zea mays
  Coding DNA Sequence Number=SeqID_3337
MATGGGNEQPPAEAEPLELVMFQVTECYVYLIPPRKTVASYREKFDITKHDGCDFDKIEAQARVSPLWKSWAGPTL

SEQ ID NO: 45117 - protein, 727 aa, Zea mays
  Coding DNA Sequence Number=SeqID_3338
  Gene Ontology: Mol. function=protein binding; Cellular component =cytoplasm; Biological process=steroid metabolic process
  Homolog annotation: Hit_ID=Q6ZJR8; Match level="QueryCoverage=87%, HitCoverage=82%, E-value=0.0, Identity=80%"; Hit description =Putative oxysterol binding protein
  Pfam annotation: Domain name=Oxysterol_BP; Domain location=287-711; Score=219.2; E_value=9.4e-63; Accession=PF01237.9; Description =Oxysterol-binding protein
MGALLPTCHSIDTDRLGQAKFISQSLSCYCAHFFNPNMLYDRIHPNGCAHDRICSGDVFGICIIHLYCSGRCFSTMLLLAIELPVLVQSLGLFKVSAFRESKSDDRRFYIFSPTKTLHLKTNSKVDRVAWIEALILARSVYSLGSLSGRATFVQSDVSISTARLRDRMHQEGLNESLIQDCEQIVLSEFSSYRKQLKCRYEDYLSLFGSCRHNFEEGKDGSITQGTLTRNDFSSSRHGNFSEYSTTESDEHEFEKHDGGELICEDESAFFDSIDYFTESDNRSSTMLSGKEVVDSQTHDSSNNIQAQIRRRSRLPDPIEKEKGISLWSIIKDSVGKDLTRVCLPVYFNEPLSSLQKCFEDLEYSYLLDQAYQHGKVYTLLVSMAVYSSLENERCFQSIIVVSVSFVQGDSLMRILKVAAFAASGYASSVARPCKPFNPLLGETYEADYPDRGIRFFAEKVSHHPMLIACHCEGKGWKFWGDSNLKSKFWGQSIQVEPVGILTLEFEDGEIFQWNKVTTTIHNLILGKLYCSHHGTMHIKGNRQYSCKLKFKEPSLLDRNPHLVQGFVEDNNGNKASFLIGMWDESIYCSNSDTSKVKSADQLKGASLLWEKNKPAPNPTRYNLSSFAITLNELTPGLQEKLPPTDSRLRPDQRHLENGEYEKANAEKLRLERRQRMSTKLQDNGWKSRWFEQDTEDGTYCYKGGYWETRERGFWDGCLDIFGEFVET

SEQ ID NO: 45118 - protein, 143 aa, Zea mays
  Coding DNA Sequence Number=SeqID_3339
MRRRRISSANTHSGMGRNLPRAAADGDLGLGVAHLARQPPPLSFLSPSSHATGAVGRGAVIWAWGRRESRRGREHRPGQRMMVLDELPWIEERGLQLRGTRGGEGGRANERCSGREGDARRTDGLDWLKAERKGQPTPCSLNR

SEQ ID NO: 45119 - protein, 104 aa, Zea mays
  Coding DNA Sequence Number=SeqID_3340
  Subcellular localization annotation: CTP_CleavageSite=39; ConfidenceScore=5.75e-01
MGPGPGALQCSTGVLVTPPGANGGRISANFSPKNSTRLRATPRRSMYVTGSFHGTKSSMQFAFFSSLHSTWGILEWGTGWAGTHRVGGRHQGKLALWRPGTVGR

SEQ ID NO: 45120 - protein, 171 aa, Zea mays
  Coding DNA Sequence Number=SeqID_3341
  Homolog annotation: Hit_ID=Q75GP2; Match level="QueryCoverage=33%, HitCoverage=8%, E-value=3e-19, Identity=74%"; Hit description =Expressed protein
MVRVPLCSVFQLVNQIGVFFLPDHTAPLLPSPRHHQPALIPVPPGSQLLALNMLPTHSRCGVCPPNPCIALCRFRLIIGDGVVVPAAAHEVGSSSNLAQFRNSGGSFPGKLGRWQQLLIDNLVGYDTIPTNSLVISPGHGYLYNFEMKELNGLSYGHETPEGPTKFGGWYS

SEQ ID NO: 45121 - protein, 102 aa, Zea mays
  Coding DNA Sequence Number=SeqID_3342
MAAPQPMGSNLSRNLNKKKTKEAKRGIDIQILPGFHGQRVDSAYQTQQQKSLKKRTNSHVVLGESQGLFGKAPKCSGSGFLCCSDSDHGATFPRLLRESPSL

SEQ ID NO: 45122 - protein, 852 aa, Zea mays
  Coding DNA Sequence Number=SeqID_3343
  Gene Ontology: Mol. function=protein serine/threonine kinase activity; Cellular component=membrane; Biological process=protein amino acid phosphorylation
  Homolog annotation: Hit_ID=Q8LQN6; Match level="QueryCoverage=99%, HitCoverage=98%, E-value=0.0, Identity=70%"; Hit description =Putative receptor-like kinase
  Pfam annotation: Domain name=B_lectin; Domain location=69-185; Score =141.2; E_value=2.8e-39; Accession=PF01453.15; Description=D-mannose binding lectin
  Pfam annotation: Domain name=PAN_1; Domain location=343-423; Score =4.1; E_value=0.061; Accession=PF00024.16; Description=PAN domain
  Pfam annotation: Domain name=PAN_2; Domain location=340-412; Score =110.1; E_value=6.2e-30; Accession=PF08276.2; Description=PAN-like domain
  Pfam annotation: Domain name=Pkinase; Domain location=536-809; Score =141.6; E_value=2.1e-39; Accession=PF00069.15; Description=Protein kinase domain
  Pfam annotation: Domain name=Pkinase_Tyr; Domain location=536-809; Score=141.6; E_value=2.2e-39; Accession=PF07714.7; Description =Protein tyrosine kinase
  Pfam annotation: Domain name=S_locus_glycop; Domain location=199-323; Score=125.5; E_value=1.5e-34; Accession=PF00954.11; Description=S -locus glycoprotein family
  Pfam module annotation: Pfam domain module=B_lectin::PAN_1::PAN _2::Pkinase::Pkinase_Tyr::S_locus_glycop; Domain location=69-185::343- 423::340-412::536-809::536-809::199-323
  Subcellular localization annotation: CTP_CleavageSite=29; ConfidenceScore=5.30e-01
MRACALPLVLLATAAFFPLSTSTDTLGTSASIAGNNQTLVSAGDVFQLGFFSPDGARTYLGIWYYNITVRTIVWVANRQSPVLSSPAVLRLSGADGRLLVLDGQNGTVWASAAPTRNVTAGATARLLDSGNLVLSSDGSGSDQSVAWQSFDYPTDTLLPGMKLGVDARAGITRNITAWRSASDPSPGDVTFKLITGGLPQFFLLRGKARLYTSGPWNGEILTGVPYLSSNDFTFRVVWSPDETYYTYSIGVDALLSRLVVDEAAGQVQRFVMLNGGWSNFWYYPTDPCDTYAKCGPFGYCDGTGQSPACFCLPGFEPRSPQQWNLRDGSAGCVRRTSLGCGGGANASSDGFWVVDQMKLPEATNATVYAGLTLEQCRQACLSNCSCRAYAAANVSGGVDRGCVIWAVDLLDMRLYTTDVEDVYIRLAQSEIDALNAAANRRAPSKRVVVIAVVATVTGVLLLLLSAGCCCVWRRKRRERHGETDPCPAPPSGGGDDALPFRARKQQALDEDWRSAEKDVDLPLFDLAAVLAATGSFSASNKIGEGGFGPVYMGKLEDGQEVAVKRLSRRSMQGAVEFKNEVKLIAKLQHRNLVRLLGCCIDEDERMLLYEYMHNQSLDTFIFDEGKRRLLGWQKRFDIILGVARGLQYLHEDSRFRIVHRDLKASNVLLDTNMVPKISDFGIARMFGGDQTTAYTLKVIGTYGYMSPEYAMDGVFSMKSDVYSFGVLVLEIITGKRNRGFYEEELDLNLLRYAWMMWKEGRGADLLDPVMDGGGSVNHSEVLRCVQVALLCVEVLPRNRPLMSSAVMMLASENATVAEPNEPGVNVGKNTSDTESSHGFTANSVTITAIDAR

SEQ ID NO: 45123 - protein, 836 aa, Zea mays
  Coding DNA Sequence Number=SeqID_3344
  Gene Ontology: Mol. function=protein serine/threonine kinase activity; Cellular component=membrane; Biological process=protein amino acid phosphorylation
  Homolog annotation: Hit_ID=Q7XJ40; Match level="QueryCoverage=97%, HitCoverage=97%, E-value=0.0, Identity=75%"; Hit description =Receptor-like protein kinase ARK1
  Pfam annotation: Domain name=B_lectin; Domain location=73-192; Score =104.2; E_value=4e-28; Accession=PF01453.15; Description=D-mannose binding lectin
  Pfam annotation: Domain name=EGF_2; Domain location=300-331; Score =18.1; E_value=0.032; Accession=PF07974.3; Description=EGF-like domain
  Pfam annotation: Domain name=PAN_1; Domain location=362-448; Score =5.3; E_value=0.047; Accession=PF00024.16; Description=PAN domain
  Pfam annotation: Domain name=PAN_2; Domain location=351-433; Score =117.3; E_value=4.3e-32; Accession=PF08276.2; Description=PAN-like domain
  Pfam annotation: Domain name=Pkinase; Domain location=518-788; Score =150.0; E_value=6.2e-42; Accession=PF00069.15; Description=Protein kinase domain
  Pfam annotation: Domain name=Pkinase_Tyr; Domain location=518-788; Score=138.4; E_value=1.9e-38; Accession=PF07714.7; Description =Protein tyrosine kinase
  Pfam annotation: Domain name=S_locus_glycop; Domain location=206-334; Score=188.4; E_value=1.7e-53; Accession=PF00954.11; Description=S -locus glycoprotein family
  Pfam module annotation: Pfam domain module=B_lectin::EGF_2::PAN _1::PAN_2::Pkinase::Pkinase_Tyr::S_locus_glycop; Domain location=73 -192::300-331::362-448::351-433::518-788::518-788::206-334
MASPLLCGCALLLYLLGHLATCHAARDTITPSSPLAANETLVSGGDGNFALGFFTPPGANSTYLGVWYNKVSLRTVVWVANREAPIAGAVGDNPGATLSVSGGGTLAIAAGNGTVVWSVRSASSRRLASPAAQILDNGNLVLKDGAGGGGAVAWEGFDYPTDTLLPEMKLGIDYVKGKNRTLTSWKSPSDPSTGPVAMVMDTTGDPQVFIWNGGEKVWRSGPWDGVQFTGVPDTATYSGFTFSFINSAQEVTYSFQVHNASIISHLGVVSSGNYGLLQRSTWVEAARAWNLYWYAPKDQCDAVSPCGANGVCDTNNMPVCSCLRGFTPRTPAAWALRDGRDGCVRSTPLDCRRNGTTSTTDGFVAVRHAKVPDTERSAVDWSLTLEQCRQACLRNCSCTAYASANVSSGGGGRGGGAGGGSGCVMWTTGLTDLRVYPDFGQDLFVRLAASDLDVLEGRSRAARIRIAVGVSVSLLALLLAVAGLLICTGRRYEGSSHGDDLELPIFDLGTIAAATDGFSINNKLGEGGFGPVYKGKLEDGMEIAVKTLSKTSAQGLDEFKNEVLLIAKLQHRNLVRLLGCSISGQERMLVYEYMANKSLDFFLFEKDTVVLDWQVRYRIIEGITRGLLYLHQDSRYRIIHRDLKAANVLLDKEMTPKISDFGMARIFGNEETEINTLKVVGTYGYMSPEYAMDGIFSVKSDVFSYGVLLLEIVSGRRNRGVYSSSNNQSLLGHAWSLWNEEKSIELADERMNGQFNSDEVQKCVRVGLLCVQENPDDRPLMSQVLLMLASPDAASLPTPKQPGFAARRVLMETDTSSTKPDCSVFDSATTIMLEGR

SEQ ID NO: 45124 - protein, 172 aa, Zea mays
  Coding DNA Sequence Number=SeqID_3345
  Subcellular localization annotation: CTP_CleavageSite=45; ConfidenceScore=5.27e-01
MGGSGAATQGGGKKKKNHGHDRPQSGATVAAAAAGVRNECGKHPRQQRSSSGSCPVYPNSRHNTSECREILKLAKRISERREQASKYGSPPRRRPGEREMRNQFGDDLARSAKVCSVWVHRTVRWCTGQCPVRQAGSGELAALGTSTAVYGYKSPDCPVSHSQAKSSLSGSD

SEQ ID NO: 45125 - protein, 125 aa, Zea mays
  Coding DNA Sequence Number=SeqID_3346
MCPFYIVSGASSHHDHIAMSRSKNCRHRSQHHLVELHPESPVRDHDRNCVVVSCPSDQLLVPEVLPILVPPLAMVVVPSIAHEREVDESPDIQGPPTISPPPHVHVHGAAVWWTPPAEKPPLHTH

SEQ ID NO: 45126 - protein, 57 aa, Zea mays
  Coding DNA Sequence Number=SeqID_3347
METDGVATVRPVAVELLAAASARCTGAAAPVLPVGKGQQRRLGQARCQVSLVQCPST

SEQ ID NO: 45127 - protein, 462 aa, Zea mays
  Coding DNA Sequence Number=SeqID_3348
  Gene Ontology: Mol. function=protein serine/threonine kinase activity; Cellular component=plasma membrane; Biological process =protein amino acid phosphorylation
  Homolog annotation: Hit_ID=Q2QMD1; Match level="QueryCoverage=67%, HitCoverage=45%, E-value=1e-75, Identity=51%"; Hit description =Protein kinase domain containing protein
  Pfam annotation: Domain name=Pkinase; Domain location=175-450; Score =123.5; E_value=5.9e-34; Accession=PF00069.15; Description=Protein kinase domain
  Pfam annotation: Domain name=Pkinase_Tyr; Domain location=175-450; Score=86.8; E_value=6.5e-23; Accession=PF07714.7; Description =Protein tyrosine kinase
  Pfam module annotation: Pfam domain module=Pkinase::Pkinase_Tyr; Domain location=175-450::175-450
  Subcellular localization annotation: CTP_CleavageSite=73; ConfidenceScore=5.09e-01
MKSFSFLKYLCGGMVAGAHRIPISRADAGLRKQKGTSAPVYAAGASTASALVATSAPVDAAGARTALVARQQRAANGTGEPVPSGGKAAVHNDRDEDFGIVLEYKYGYPNLYPNLNLNLRVPEIAGGAHGAAALGVDVGTRGRVQAVAGSGRKAKGEKVAREFSYQELSAATSNFFKDRKLGAGQFGEVYRGELPDPLMPPVAVKRLTRQMEARTRKDYVTEIMTLGRLSHRNLVKLVGWCQGGNELLLVYELVTNRSLDEHLHRSERLLAWPERYRIVLGIGSAIEYLHTGDQNPILHRDIKPSNVMLDDDFEAKLGDFGLVRQIHPGHGSSLEGTVMIGTRAYMDPVCMSTNTASTASDIYSFGVLLLEIATGLMPTEVAGPGGLLSNTLISTVREYYGRGSVLEMADRRLNGDFDEGEMERVLLVGLLCVQQDRRHRPEIRIAVNMLSNLKLPSPRIRS

SEQ ID NO: 45128 - protein, 89 aa, Zea mays
  Coding DNA Sequence Number=SeqID_3349
MAHKGKATSNVTYNSEDGFEAYSNPIVYNCLSASKEYEREPSHTTSIGQLISSCLGTSGDHWCADLFTPDSPDFTLDSLVAFPQGATWN

SEQ ID NO: 45129 - protein, 46 aa, Zea mays
  Coding DNA Sequence Number=SeqID_3350
MATTAAATIVGALPTARGRCGAFWRWVRASANDGNGRCILRIDTVC

SEQ ID NO: 45130 - protein, 51 aa, Zea mays
  Coding DNA Sequence Number=SeqID_3351
MRLSKCGTYGGQGWDSSGRLDGGVAPMDASVATRRENRGGGDGVSKGGVDK

SEQ ID NO: 45131 - protein, 286 aa, Zea mays
  Coding DNA Sequence Number=SeqID_3352
  Gene Ontology: Mol. function=RNA-directed DNA polymerase activity; Cellular component=membrane; Biological process=RNA-dependent DNA replication
  Homolog annotation: Hit_ID=Q6ZFR6; Match level="QueryCoverage=79%, HitCoverage=33%, E-value=4e-38, Identity=43%"; Hit description =Putative receptor-type protein kinase LRK1
  Pfam annotation: Domain name=Lectin_legB; Domain location=33-265; Score=162.8; E_value=8.8e-46; Accession=PF00139.10; Description =Legume lectin domain
MAYCYYPARACYLLFLIYQPVVYYLLLMAPHTIALSFSYDFSNPGDLDRANLTYLGNSIAGDGIINLTNMNDTWSTGGVAYPQPVRLWDHRTGRRASFTTNFSFAISGERTYNRADGMAFFIGSFRSAVPLDSGGGFLGLISNITPPPLSTVGVEFDTNRNIWDPQDAIDHFGIDVNNITSIVVYKSLGQDFPNPLSGTMSAGVNYDGSSKVLSVSLRLANGDVHDLETSVDLKAAGVPQYATIGFSAATGNHVESHQLLSWSFNSRGHVQVPQRDEPRRDLDYEG

SEQ ID NO: 45132 - protein, 122 aa, Zea mays
  Coding DNA Sequence Number=SeqID_3353
MASVLPRSVPIRDDPRVAQRRRTPSDLWGSLAAAHIALEAVDGERHLDVSNQVRQAVRCGACRNAVGALAFVQFRSSFELGIGDLSKDVASDALEDMEDDFGVATKVVVNLLPQEDVINGSP

SEQ ID NO: 45133 - protein, 111 aa, Zea mays
  Coding DNA Sequence Number=SeqID_3354
MTIATRWYVKSTSETQAIAQSNEPSTDFRALHLQDATGFSHTCTYTFLGLQRLTFDRGPPRAFRMAHETSSGCGGPGDIYPQKGPMSSAIMSTSRDDQATKTYTDNTTSPG

SEQ ID NO: 45134 - protein, 57 aa, Zea mays
  Coding DNA Sequence Number=SeqID_3355
MKEKKQHAEWRWHRGWRRATTPGLGERTVAPGLELRRAVGDDGGVTTNDSVVALHVL

SEQ ID NO: 45135 - protein, 257 aa, Zea mays
  Coding DNA Sequence Number=SeqID_3356
  Gene Ontology: Mol. function=isomerase activity; Biological process =protein folding
  Homolog annotation: Hit_ID=Q6K5Q1; Match level="QueryCoverage=80%, HitCoverage=13%, E-value=9e-24, Identity=59%"; Hit description =Putative peptidylprolyl isomerase
MSQTVNKKRGLLWPLSEMVRRFFSADGSKGSTLWPALRLLIPVIALVAVCVGYYMHNSVEEIDCTNCECLSLYRSDEYYTYLLAVWVEDLRAKYSRYKAIQFPGFLHICISLLPHSCARDAKLYGNMISKLSKLEDTEDNGQMSQTVNKKRGLLWPLSEMVRRFFTADGSKGSTLWPALRLLIPVIALVAVCVGYYMHNSVEEIDCTNCLLSRVSVLTFCPFSGECLSLYRSDEYYTYLLAVWVEDLRAKYSRVLYC

SEQ ID NO: 45136 - protein, 223 aa, Zea mays
  Coding DNA Sequence Number=SeqID_3357
  Gene Ontology: Mol. function=calcium ion binding; Cellular component =oxygen evolving complex; Biological process=photosynthesis
  Homolog annotation: Hit_ID=P12301; Match level="QueryCoverage=51%, HitCoverage=47%, E-value=6e-15, Identity=37%"; Hit description =Oxygen-evolving enhancer protein 3, chloroplast precursor
  Pfam annotation: Domain name=PsbQ; Domain location=16-186; Score =34.2; E_value=1.4e-07; Accession=PF05757.2; Description=Oxygen evolving enhancer protein 3 (PsbQ)
  Subcellular localization annotation: CTP_CleavageSite=63; ConfidenceScore=5.76e-01
MASRLAVQALSASLLSLAETTSPKPPKQQSQRPRAASSSSSSRRRLAATAGAIILASQLLPPVASSAAGTFDLQLMLPEKSSEEAEAVVRIHARNLLGVKRFIDAGAWRELQAALRSNASNLKQDLYAIIQARPTGQRSELRRLYSDLFNSVTSLDYAARDKDALQVQEHYGNIVSALDEIFSKITAAERFHPPLLSLSDRESRGSLVNGDPIHRHLVCKMKQ

SEQ ID NO: 45137 - protein, 370 aa, Zea mays
  Coding DNA Sequence Number=SeqID_3358
  Gene Ontology: Mol. function=protein dimerization activity; Cellular component=endoplasmic reticulum; Biological process=proteolysis
  Homolog annotation: Hit_ID=Q1T6J2; Match level="QueryCoverage=87%, HitCoverage=39%, E-value=1e-39, Identity=55%"; Hit description =Peptidase M20
  Pfam annotation: Domain name=Peptidase_M20; Domain location=16-345; Score=1.2; E_value=0.0013; Accession=PF01546.18; Description =Peptidase family M20M25M40
MQEAGGLVNPSAPPAPGRGMQEAGGLVVSVTYVKAGKALDATPNLVEFGGTLRSLTTEGLYCLQRRVKEVVEGQAVVHRRKGAVEINSNDYPIYSAVVNDEKLHHHVEDVGRRLLGLDMVKPVEKIMAREDFALYQQLIPGVGIEIKNKKADSVTQLTTLISSLMRMSFHSVLLCIMQLQNFISLRLPLCTKEGTCSRVDDLELKRWLKCKPTPFIESYLNLTGNHHFFQVVEGQAAVHRCKGAVEIKVEDYPVYPAVVNDEKLHRHVEDVGRGLLGPGKVRPGEKIMAGEDFAFYQQLVPGVMFGIGIRNEEAGSVHSAHNPYFFVDEDVIPVGAALHAAIAELYFTDGPLFRQRRLVVSRSCGWSRVQ

SEQ ID NO: 45138 - protein, 90 aa, Zea mays
  Coding DNA Sequence Number=SeqID_3359
MISGEHAKDEKVPSGGKPELSGSNKVPSGGMKPSSYKHKHKKHKEESIGSTKSHKKKCDKKKMMKKMVGDKDYDSDEAAKSDISTLKPPT

SEQ ID NO: 45139 - protein, 49 aa, Zea mays
  Coding DNA Sequence Number=SeqID_3360
METVQKTRFLIRDYGFSIKQVAPILCVEALMGLGVPKIEKKVEPVSMIV

SEQ ID NO: 45140 - protein, 720 aa, Zea mays
  Coding DNA Sequence Number=SeqID_3361
  Gene Ontology: Mol. function=transition metal ion binding
  Homolog annotation: Hit_ID=O64584; Match level="QueryCoverage=58%, HitCoverage=48%, E-value=1e-16, Identity=23%"; Hit description =Putative myosin heavy chain
MDAFFSGLDSRLREAVKVADSIMVGLVNAAMEDAYKKSLWKDGDLERLFQKLRFAELAIMQLEWCLRFVRGEMEADGGADDGHEQLLDDLLETRDRIQARLDEAELAVAQTDCDYMRRKRDELDPSRRRETPSAVDHRGAEVEGGTFEELRGSVGRKMTRMRARLEDASSELAALMQKVSGEASPMARLQEPGHEGDGVKGLSGFYSMAQLLMEFQEMVLDAGVLRDSVASAFDAMERSVSAQRAAMEEQQWLMDAEKEMYSAVVEGFLREINVESTKRNQSEGEGCPTPTLHHSRDAPDNNSSDEFQYLNDETSQLHSARRIPAEKSESRLRYTNSEEDCFCLSQEEAERLTETTIDSEIRFELQRVLYSAAFRDLLSKLSVQAYHAQRLTEQRDETEIRSNIQYEMDSIIFKDLVKNLCVESVDHLIKTWIQDEVHRALLAKIMNPWKITTEMVHSERLIKEEIECIVFGGLINDLVNGQNLSVVKYQHQNRPSDNLGRFGMIDSAEQLVNGKIQVNVTTEDDGVGSDQHRILVNQEVLGLIGNCDRQNSKGSDKQAEESIGRDDVKERLDDCRKLQTEEVATGLCMPSEGVIQEICIPLTNIYEIFGDFEAITCEKIGTSVLRLRDLDKQLSNLIEKVNSLKTSEFLYRSAFTRRCCDLQTAEAEVDLLGDEVELLLGLLSKTYGALVHYSPVLQHYVGIREVLNLLGKELAVRPRH

SEQ ID NO: 45141 - protein, 491 aa, Zea mays
  Coding DNA Sequence Number=SeqID_3362
  Gene Ontology: Mol. function=oxidoreductase activity; Cellular component=cytoplasm; Biological process=gibberellin biosynthetic process
  Homolog annotation: Hit_ID=Q2HSM4; Match level="QueryCoverage=64%, HitCoverage=93%, E-value=3e-75, Identity=46%"; Hit description=2OG -Fe(II) oxygenase
  Pfam annotation: Domain name=2OG-FeII_Oxy; Domain location=199-298; Score=140.3; E_value=5.3e-39; Accession=PF03171.10; Description=2OG -Fe(II) oxygenase superfamily
MPSLVAESAAEPPLVDSYLELLRRGGGGGGIAAATEGCVQERELPLIDLTCLQGSAGEAARTTCADAMARAASEWGFFQVTGHGVSRALLERLRAEQARLFRLPFETKAKAGLLNGSYRWGAPTATSLRHLSWSEAFHVPLASISGTACDFGELSSLRDVVQEVADAMSRVAKTVAVALAGSLLGHDEAAAFPAGCGETTCYLRLNRYPACPFAANTFGLVPHTDSDFLTVLSQDQVGGLQLMTDAGWVAVKPRPDALIVNIGDLFQAWSNNLYKSVEHKVVANAAAERFSAAYFLCPSYDSLVGTCGEPSPYRDFTFGEYRRKASTAPLFCRRDRPPARAAPNPPRHQRQHTAPPAINARGSPTLLPAAAAINAVLPHTDPRVLPTAAAMEAQRAFLPPQSATSAPPPNRKARSAASRHREGRSSESGKEGRASRGPARHPVPAVGIHVSAAASSPPSPCSAPPCPRRAQQLPPPESRKGWFLFLQATAL

SEQ ID NO: 45142 - protein, 132 aa, Zea mays
  Coding DNA Sequence Number=SeqID_3363
MAKVAVQVLGVEGGRLSSLEVGTNVVHLFSNAVNQGQGPRPSPSPWVGRGGGCSAEARAESEPWGRAKRSSSSSGAEPESEPWVGRSGVRRLPGPSPSPSLGSGGAEFAVYRGLARVRALGRAERSSSSSGA

SEQ ID NO: 45143 - protein, 160 aa, Zea mays
  Coding DNA Sequence Number=SeqID_3364
  Homolog annotation: Hit_ID=Q6QP51; Match level="QueryCoverage=42%, HitCoverage=37%, E-value=2e-12, Identity=61%"; Hit description =Putative growth-regulating factor 1
  Subcellular localization annotation: CTP_CleavageSite=27; ConfidenceScore=5.51e-01
MQAACNRAKWAHLSDFQRTHHGGPRPRVMQLVHRSLRASNCTATRTTATPPRLRNQYRDSRQPCGPGKGDTPKRTLLREGNRLRASLLIRGSKAGPSEGFNSRLRARGLHTHYWSEVRRPAPRKGSTAASGHSGSAPTTDQGFEGWPSKGSQPPQTQSEG

SEQ ID NO: 45144 - protein, 109 aa, Zea mays
  Coding DNA Sequence Number=SeqID_3365
MRVSKGSSICLWHRGELRHMKERKLSEPQLSSSSHAMIIDNRRTWTSPGGSWGAAPAGRQERADPIGAGRRVGVQQNSKSVADGVEECSVKGKDESSKTAWREMMILLE

SEQ ID NO: 45145 - protein, 153 aa, Zea mays
  Coding DNA Sequence Number=SeqID_3366
  Subcellular localization annotation: CTP_CleavageSite=66; ConfidenceScore=5.11e-01
MAVEVYVPMFAGIFSHLSHLFHTSGLQHHLFGAVPTMFVQGYTPEVLAITRSSPSPGSPPQSLTIRTSTAASRCGGFDSSCPISSVEMLERIPHEPRRAMAEALAIATDHKFPCPTVTPGFRREDVDFILNEKMKGKNKMDYEVCCSIPLSRT

SEQ ID NO: 45146 - protein, 419 aa, Zea mays
  Coding DNA Sequence Number=SeqID_3367
  Gene Ontology: Mol. function=transferase activity, transferring hexosyl groups; Cellular component=integral to membrane; Biological process=electron transport
  Homolog annotation: Hit_ID=Q10MK0; Match level="QueryCoverage=97%, HitCoverage=97%, E-value=1e-166, Identity=66%"; Hit description =Glycosyltransferase 3, putative
  Pfam annotation: Domain name=Glyco_transf_34; Domain location=133 -349; Score=252.5; E_value=8.9e-73; Accession=PF05637.3; Description =galactosyl transferase GMA12MNN10 family
MREHLQYCNKLVGTRRHYRRCAPATPHIAVAILLIALGVLYLAFSPTNSDLNLVLSMPRVHVVFNDEPVRKVAPVAAAPAPGNATDDDEDSGLPPPRQLTDPPYSLGRAILDYDARRSAWLAAHPELPARVGRRPRVLVVTGSAPARCPDADGDHLLLRAFKNKADYCRVHGLDVFYNAAFLDAEMSGFWAKLPLLRALMLAHPEVELLWWVDSDAVFTDMAFEPPWERYARHNLVLHGWAAKVFEERSWVGINTGSFLIRNCQWSLDLLDAWAPMGVARPRPRQRGRWGDKTFIESTYELNGFWEGIVDRYEEMRRKGRPTGGLGDDRWPFVTHFVGCKPCRRYADSYPADRCRRGMERAFNFADDQILRLYGFEHESFNTTAVQRVGNETGGPLDADDDELGRLLHPTFRAATPTQT

SEQ ID NO: 45147 - protein, 281 aa, Zea mays
  Coding DNA Sequence Number=SeqID_3368
MEEQRQGAERERHRRWGGDRRGLPTAKRRGADKGRIHGRGRARTPARARTQEWRQEQGRRGFGRPGGIAGPGEEQAEREYGRLAMGDSSRLLQGSSDGVQLTRAGEMVENFAGGAPCRTGRDLHRRRELLPPARPGQRQARTPAWVSTARARTWERKRMTIGAGVGWDVEGEGDGCQGAFAHGGRRMPAGVREKLAARKCFCAKEQGGATLKGWLQQGDRLAGNGITHWRRDSVATHWSNWAALAIGAEFGGQPLDGGCQWQTGAIGWRRRQENGGRWLII

SEQ ID NO: 45148 - protein, 817 aa, Zea mays
  Coding DNA Sequence Number=SeqID_3369
  Gene Ontology: Mol. function=protein binding; Cellular component =nucleus
  Homolog annotation: Hit_ID=UPI0000E800C5; Match level="QueryCoverage =70%, HitCoverage=25%, E-value=1e-43, Identity=27%"; Hit description =PREDICTED: similar to protein BAP28 (FLJ10359)
MSSIASQLKAIKSALGAAPEPARRPVTRPSVLFDAKEAADIDLRAILPIALSGLEHLTSVDERFAKYSNTLFRETSLEVNREQLTPKENDKLNKSISTYLRLLAGYLHLPSALKTLEYLIRRYLYEFSSANFADGPTSSSLFSCFWWEPSCRVHVYNSDELLLSALPYHDTHAFVRIVQLVNLGNSNWAFLGGVKSSGAPPPRSVLVQQCIRDKAVLETLCNYATPTKEFSHSKTVVCFCTAVIVECLGAVPKLDTDVVQRVLGFVFDSLNPAVTRDQEYKAGALMIVGVLGTRATLAPKLVQNLILFVARTAQHDAFESVDLPWLRVSVMALISLVQSQSVHVFPKKPLMVLKDIRDFSGILSVLSSEYNIEKFIRLYVESLIDYSIVDGTCHTHLIETIESLPMKNFIESVVCKILGNCIKVSRATGIPDINHTELWAKKIFKAIERKYPLELRDAIHKFLENSETNSPGGDSLAEVFGILFDENKNLPTEISDSNIWFSLDHPKATVRQSALSKVATSGIFNNRTLNPQKFINMQDAILRSLYDDDLSVVQAALSIEGLAAVANPDSLLKAYDCVLTKCIKIINKGGSKALKASDVAVSCLEKLTLRVNIKALELAKKIRWEFYASSSLVYDGVDFDKMKNMSADSIASINMNNIKAFAETFLADPNKHVEWLANSGSGSRFSKTLFLLIVLQTLVSTEALDEQVNLCHACLPVLKDECHHIQPKDSDVGDEISITNLEMCSLELVKHFFNRDTEALNVRILVGSGGNTMLDDLFLFFLVSPAKNIFQKHLQYLVNCIGAPFQFISKYFLDEGA

SEQ ID NO: 45149 - protein, 199 aa, Zea mays
  Coding DNA Sequence Number=SeqID_3370
  Homolog annotation: Hit_ID=Q1SLU4; Match level="QueryCoverage=40%, HitCoverage=19%, E-value=6e-17, Identity=46%"; Hit description=RNA -directed DNA polymerase
MSLKDGVVDVRRQGDVIVLVWLIVGDVALNVINAYASQPDYLHSQIFRKAGQKKAEPNRPDVLNFTLAYALLIANSFFRKRDSHLVTFHNGQHSSQIDFILARREDRHACLDSNGQTYDDLYQVLDTKEGEKDMFRMARTQERKTMDINQIKCIKDETNQLLVKDNEIKDIWREYFDKLFNGENEGSILELDDSFDDSN

SEQ ID NO: 45150 - protein, 547 aa, Zea mays
  Coding DNA Sequence Number=SeqID_3371
  Gene Ontology: Cellular component=nucleus
  Homolog annotation: Hit_ID=UPI0000D55A61; Match level="QueryCoverage =95%, HitCoverage=24%, E-value=1e-11, Identity=21%"; Hit description =PREDICTED: similar to BAP28 protein
MVPQKLKDLSERVQVESLLVFASICSKCASSDNNSLDESICVQLLLGFPSIILPLAHVNKDIRASAIKCIEGLSLVWQRLSTSVPRNGNNTKLPQCLSSPTFGSFLELLVNQKTMICSDAKFLPAYISSMLSPCKDILVPENLHERFDPHTKDTILTFILRSALRLPPYGKFMVLSVLKGVGSILFHAEDVKSLFFDLLDRRDQYQNRHNCKQILSTHEMHTLCLLLEVLFSTPDHVNIGFNMFEPLMKALKDSTNCIELQVDASSPGDSVVVMPCLTVLQNLQPGFFDNLKTDTKVHSSTLVKFIELISTLGDARGHSKRIKRNEDRDLNVFCNFAEIFGENSVASILVSLLDILFLKKDVKQRSRLLQPLFQILSKLLSDQWVSVIVSQYNDQQDTSSEIPDLSSFVKEVQHLVLLALKDITDTLQSGHHDAMVSSSDVGLLIDCVRSIQDIGTRNHGFSLIASLGKACPQLVSESIVDLFVAIGDAIKQDDSHSQRVLEDLLSVLVPCWLSRTTSIEKLLQIFIKALADVPEHRRLTLMVYLLR

SEQ ID NO: 45151 - protein, 116 aa, Zea mays
  Coding DNA Sequence Number=SeqID_3372
  Subcellular localization annotation: CTP_CleavageSite=50; ConfidenceScore=5.44e-01
MMGYCGIGLIGWSWKVTIPLRTSSWPPRAKLSTKAPPVSRRSWCSTVMPPCSADWLLHNTFAGEKFPMRLAVVPFRVLPFGLKYCARDLGLETTGDGLRRAGAAAAAWGKCLVYGT

SEQ ID NO: 45152 - protein, 107 aa, Zea mays
  Coding DNA Sequence Number=SeqID_3373
  Subcellular localization annotation: CTP_CleavageSite=3; ConfidenceScore=5.04e-01
MASASASGGGARPWRTALLTLRDESLASPSPTALLELLRQVLLTPASPSLAASAAGLPPHEVGSDVAFLADTAAAAAPCPGAGDALRGVCHLIHDVMSKTNMEINPS

SEQ ID NO: 45153 - protein, 1183 aa, Zea mays
  Coding DNA Sequence Number=SeqID_3374
  Gene Ontology: Mol. function=ATPase activity, coupled to transmembrane movement of substances; Cellular component=integral to membrane; Biological process=transport
  Homolog annotation: Hit_ID=Q8GU79; Match level="QueryCoverage=99%, HitCoverage=99%, E-value=0.0, Identity=60%"; Hit description=MDR -like ABC transporter
  Pfam annotation: Domain name=ABC_membrane; Domain location=558-885; Score=75.9; E_value=1.3e-19; Accession=PF00664.13; Description=ABC transporter transmembrane region
  Pfam annotation: Domain name=ABC_membrane; Domain location=59-336; Score=101.3; E_value=2.9e-27; Accession=PF00664.13; Description=ABC transporter transmembrane region
  Pfam annotation: Domain name=ABC_tran; Domain location=410-594; Score= 236.9; E_value=4.4e-68; Accession=PF00005.17; Description=ABC transporter
  Pfam annotation: Domain name=ABC_tran; Domain location=960-1152; Score=214.7; E_value=2.1e-61; Accession=PF00005.17; Description=ABC transporter
  Pfam annotation: Domain name=SMC_N; Domain location=399-600; Score= -108.9; E_value=0.0012; Accession=PF02463.9; Description=RecFRecNSMC N terminal domain
  Pfam module annotation: Pfam domain module=ABC_membrane::ABC _membrane::ABC_tran::ABC_tran::SMC_N; Domain location=558-885::59 -336::410-594::960-1152::399-600
MAMRPMSYYEDHSMSSSHADDTDERKSTVSASPEASADEESFSFFGLLYYADTVDWLLMALGTLGSIIHGMAFPVGYLLLGKALDAFGTNINDPEGMVHALYKVVPFVWYMAAATLPAGMVEISCWIYSSERQLARMRLAFLRSILNQEVGAFDTDLTTATIITGVTNYMSVIQDAIGEKLGHFVASFSTFFAGVIIAFISCWQVAMLSFLVIPLILIIGAAYTKKLNVLSLSRNAIVSEAVSVVEQTLSHIKTVFSFVGESWAMKSFVQCMESQFNLSKKEALIKGIGLGMFQAVTFCSWALMVWIGAVAVTKNKATGGGTIAAIMSILFGAISITYAAPDLQTFNQAKTAGKEVFKVIKRKPSISYAKSGLVLDKIHGEIKFRRVHFAYPSRQDKPILQGFSLSIPAGKVIALVGSSGCGKSTVISLLQRFYDPTSGDILIDGHSIKKIDLKSLRRNIASVSQEPSLFSGNIKDNLKIGKMDASDKEITEAARTANVHSFISKLPNEYLTEVGERGVQLSGGQKQRIAIARAMLKDPPILLLDEATSALDSESEKLVQDALERAMRGRTVILIAHRMSTIVNADTIVVVENGRVAHTGTHHELLDKSTFYSNVCSMQNIDKEAENKVASTPDNMEEQIGEAHIKQSSTNQGPNKKLERLESKQPRNENHYIYGIIGERAMKNIREALFSAVLRNELGWFEKPNNGVGFLTSRIVSDTSTVKTIISDRMAVIVQCIASILIATIVSMKVNWRMALVSWAVMPCHFIGGLIQAKSAKGFYGDSAIAHRELVSLASEAASNIRTVASFVYEDEIIKKAELSLQEPLRITKIESMKYGVIQGISLCLWNIAHAVALWYTTVLVQRKQAKFENSIRSYQIFSLTVPSITELWTLIPMVMSAISILNPVFDTLDRETQIVPDKPENPGKGWLVGRTEFQDVSFNYPSRPEVTILDGFNLIIEPGQRVALVGPSGAGKSSVLALILRFYDPARGRLLIDNKNIKDYNLRWLRKQIGLVQQEPILFNTSIRDNISYGSESPSETEIIQAAMEANIHEFISGLPEGYGTVVGDKGSQLSGGQKQRIAIARTILKRPAILLLDEATSALDGESERVVMSSLGTKVWKDKDEQASTITSITVAHRLSTVINADTIVVMEKGKVVELGNHQELISAEDGVYSRLFHLQSNMKE

SEQ ID NO: 45154 - protein, 39 aa, Zea mays
  Coding DNA Sequence Number=SeqID_3375
QALGELQVDDQADEWSEMSSSRHRRRLEMSNNHHRRRYC

SEQ ID NO: 45155 - protein, 93 aa, Zea mays
  Coding DNA Sequence Number=SeqID_3376
MNRSRDSIPYDVQKNALAPTKDRSATTMEVRQAICCSMENLQAPKVHSHTSRHRVISQDRTSDPRCYFGKVVVAGGQFAAAFQPYTSHELPPL
